United States Patent Application Publication US 2014/0057251 A1 - sequence listing, part 2

SEQ ID NO: 966 - DNA, 1251 bp, Cannabis sativa
cgacggtggcttcataccctgattgtgcggccaatagtatagttatgaagtcaatcgaaattgattagttaacttgtttcaaacttttgttgtcaaaataaaaagaacaagccattcacttcaccataataaactaatccattccatataaatcttttatatgaaacagcacttgcaggagcagtataatcagctggttccacctctttgcaatgagcatccagatatatttccaccagagttatatacatgggagcggttcttatgggcttgtgaactctggtactcgaacagcatgaagataatgtttcctgatggagaactaaggacatgtttagttcctgtagctggctttttgaatcattcggtttgtgttttttcttctttcactctatacttgttttcttaacatttttcctttcttattgctcggttaaacttagattctttccgatacaacagtagtctcacgctattttaaatctgatacaaccacttggatagaactcactcctaaaagctagcctaacaaaggagtgtccccaattagttatgtactattaaccaatccaatactttgtcaatgtgggatcctaacaatacacccccttttggagccgacatccacggcggcccactctacggtggcctactctaggcctaatccacaggttgcaccttctgcaagtcaccccttctgagatgttggtcccacttgagggtgtatggttctgataccacttgacacttgggtagaattcactcccaaaagctagcctaacatagtaggatgcccaaatcaatcttgtaattagtcaatgtgagatcctaacacatcttaccatggctcaaatttggagacttttctctcttttaattgaattttgtttctcaatagcatcagcttaatattgtttagttgtatatatctaagttttagtttcttattgattcttgttgagaaatatagttgttgttttctttgtcacagctatccccacatgtaatatcatatggcaaagtggactctaaaacaaataccttgaaattctgtttgtcaaggccatgcagtgcaggagaggaatgcttccttagctatggcaacttctcttcttctcatctcattaccttctatggctttgttccaaaaggagataacccgtacgacatcatcccattaggcgagtttactccatctaccgtgttattcattagtattggatgatactatcgtttctaaagcataatcgt

SEQ ID NO: 967 - DNA, 1950 bp, Cannabis sativa
gtaaacaatgtccaaagtgaaggacagaccttgctgccacaacttaccaacgtacaataccaacaactcctcaacttgttggctggacaacaaaccagtaattccaacaatgatcttggtaatggtacaggtaactcaggtattgtcatgtctaatatattgaatttgcctaataatagctcctggattttggattcaggagcaactaggcacatatgttctaatataaggctatttcaatgcgtatataaggttgttcctaccaggttgcttcttcctaatggggattttatttttgttcatcaaagtggaacaatcaatatcacagatcgtattaccttaaaagatgttttatttgtgcccaactttaaatataatataatatcagtgagttgcttgactcatgacagcagcctcaaggttaaattcactactgatgagtttatattgcaggatctaaccaacaagaggacgattggcaaaggtgaatccaaggatggtctctacatactggatcatacacctactgcttctcctattcttgcacctgttcttgctgtcactgctaatacttggcatgctaggctaggacacttatctgataaatacctgaagttactaagaaataagctcaattgtaatattgatgccttacataaaaactctccttgttatgtttgtcctatggcaaagcaaaagaaacttccttttccaaataataataattttgcttgcaacacattcgatttggtgcattgtgatatttgggggccttatcatattccatctcattcaaattttagattctttcttactcttgttgatgatcattcccgattcacttggatctaccttttaaagcaaaaatctgatgctttagatatcattcctcaattcttatcatatgtccaaaatcaatttaattgcatgattaaatgttttaggtctgacaatgctcctgagctatcttttaaagatctttttctaaaacatggtattttgcatgattttacttgcgttgaatctcctgaacaaaatgcagtggctgaaaggaaacaccaacacttgttaaatgtcgctcgtgccctttgttttcaagctcatatgcccataaagttctggggagaatgtgtaatgacagccgcattcttgatcaatcgcataccttccccaaatttacaaaataaaacgccatatgagttgttattcgaaaggcagccagattatcaaaatttaagaactttcggatgtcttgtttttgcatccactctttctgctcataggactaaattcgatcctagagctcgaacatgtgtttttcttggatatcctcaaggggttaaaggatatcgcctttatgacattaacaacaaacagattttcatttctaggaatgttgtttttcacgaaaacatcttccctttccttaaactgaatgaaactactgctgatattgatccatttgttactactgtgttaccttctcaggatatttctagtactcctattgatgattatccttatgttactactgaccatcctagctcaagttctaatgcagaaaacacttgtgagaatacacctactactgtccatataccggtcacttcagatgagttgcaggaacgtgcaactgaaccaactggagttgttactcgaagaactaacagagtcacacggccaccagcttatcttcgtgactttgagtgttactcaactctacaggacaaatcttcaactcctcatggtttaaataaatatttgtcatatgctagactaactgaatcttacaaggccttcatccttgcagttacttcattaaaggagccacaaacatacaaacaagccatccaattccaacaatggcttgacgctatggatgctgaactcacagcacttcgtaacaacaagacttggagtgtggttccccttcctcctaacagacgagtc

SEQ ID NO: 968 - DNA, 1069 bp, Cannabis sativa
atttctcttttcgtaaaaaatattgttacacttcaccttcagaagtttttgttacataaatgagtttttgtcgtatttgatcagtttaatatataaacaataagtttgatgtatgtgtaattataaacaactgttttgaatgtcgtttgtgaaatggatattggctttgtggtgtatatatgcaatgagtatattttggtcatatatcatctacaaaatttaatatacatgtacatttatttattcatttatgatacttctcttctttctctatgatataattataaaatattgaagagagtggttgagttttgtccagagaatacagattggctaattggcttatgatatttgttgagaaaggaaatacattacatagagttctgcccaaaaaaaatgtaataagaaaaaccctttttcaagagaattacccccaaaaaacactaatagtctaaatacctattatgtattaatattattatttggtccaaactcagtatcatgtcttatataatttaatataataatttttaaagagtatcactaattaatcgcaaaacaatatgtttaaaaatgttaaatattactggtgcctaataacaataatattttcaaaatcagctcttatagctaacaaaatttatggcaagggatggtcttgatatggttggtcagtggtcctcttctcaccttaattttaatttttgtttggttgagaaaaatctataacttaattttatttatagcctcttttcatggaggttcaaagttgattagttaattaattagctgcattaatcggctgtaattatgttgttgtcacaactcacattaataatattattattatatataaaattgttccttcaatttttatagaagagaataaatgagatattcttatataagactaattgcaggtatttatttagtaaaagtagtcatttattgctacaagaattattttgtgtctagttaattctagcaaaaatattataagtgagatcatgtatatataatgagtagaattgactgactacataggtcgtcacaatacaaagtatatata

SEQ ID NO: 969 - DNA, 1207 bp, Cannabis sativa
taaaaaatgaaaatgggcaaaagccagagcaaatgcatctcatcttcggcaataagaataaacaagtacataacatgcaaatttgacatatacatgtacaaataggtgtacacatatgtgtgatgttattatatgcagtaagggataggaattaaagactcgaatagaaatgacaacaaactcctacaggtcattcttttgagattttaattaaattaattggtaaaatgaaacaattatctctatatatacaacagcctccagactgcacaaagaagaagcacagtttggaagagagataatcaaaagggttagtgaagaccgagttgaatgggctgacatgggaagatatatctccaaattcctccttaaaactccacggcggcccaccaaaaaaaattccctctttgcagatcctctgttgtcaaagaggaggtatacaaaacatggtgatcttggcaccaattttggacaacaaataacacattagattacctgaagaggggcttgctcactccacaaaaaaaaaattctggaatggagtgatgttagattcagctgtcatcatccacagcaccaatgtatgtgagatccttccgcctcacccttacagcccctttaagccaactagatgcccgaagattggcatgatcaccgctgcttatcaagccactgttacttgaagatgggcctgatcctgtgccatcttccaagagtgtccatgggtcaatttctgtatcataatcctgcaagggcaatgacttagactttcctgctatgttagatacaggtcgagctaaaggaaactgattcctctgagatgtgactaagcttcctgagtaagacccagaacttgagatgctggattgaagagatgctaaggctgtatttggaatagaaggtaactggcaattgacaaagcaccggacagagggaaggagtactggcattgctgtttgaatccgccaccgaatcatgtcaggtagttgcatacgatctaagtcacactgcattgccaataagatctaattaggttgacaaaaactaataacaatttgcttggtctgcaaatttttacttcaatttatttgtttcagaaacgtattcattgaattttgataattaaaaagtattcaaaacctacaaattttaaatgaaaatgctataacaaaaaatccaagaaaattaatggacaggaccaacttca

SEQ ID NO: 970 - DNA, 3820 bp, Cannabis sativa
aatcataacaactctccgtactagggtgacattgatatcgtcgtttgacttttgaaactgccgattgggtttttgagccgtatctgccggacttcttgaagcgcgggttatggaagtaagtgatccttttatcttgggtttcactgctcttgaagagtttactcaggtagtctcatatttttctcttgggtaaggatgagccacttacttctatatatgaaatggtatcttgtttggctagggatgtaaagcccaatagagagagaaaacaaaggaattacattacaccaaaaacatcaagaggaacatgaagaaaaagaaaggaaagttgaaggggttgaaggggtacagagaggtttcgagcttatcaaccacaaagaggttgaggattatgtaaaacttttgtaataatatggttttgagaaagattgaaaagataagaaattgaatggaaatttcaagttttgtttttgtcttttagtcgtagttattggaattctagtgtatttcagaaataaaagtgtatataaaatgtctatactttgataatgtgatttgaatataatttggtaagaattaacagcaatatgaccatgactaattgactagtcaacttcttcttgcttccttctacaaattacaataactgacaaaatgctaaacatgaaagtaaccctctttcattatctttaaaatcacaaacaaagaaatacagcatgttcttaattgaaacaacattcagtaacaaagtatctcaattgtgaagccgagataggtcatacgtattggcgcgaaagcaagcaattgcactattgtaactgaaaatatatgaaaaacagagatcaaatggtgaaatgtgagatataataatgtgtaaacatgagtatggtatggataagatatcctaatttttgtttgtgttgtttctttaaatttcttaaaattacaaatatacccattctcctaaaacataagataaaagggagtaaaataccaaagtggcagagtgagtaccattccatggctagtttcactttacttttcttaccaaatcctattcatttttccaccaagaaacttgttcccaatcaaactttttttaattattgttgttactttgttgtatttcacaaagcttgttttgatgaggaataaattgttataaaacttttgtttaattttgataaggaaacaattgttgttactctctttgatcaggaataaaatattgttaagcttgttgtggtataagtggttgcttccatagactttgaaagaaaaaaaatactagtagttctactgaagttgtccagtagaatttgcaccataaatttaagcaacattatgacagattttgaaccaagttttgacaaattcttgcctagaaaatacactatattttgacataaactagccaacattttgacacattgcacctcaacaaacactaaattttgacaaattttcaccaaacaaatggacaatatcaactaaaaaccagccaaactgttgataaatttgcacctaaaaaaatcaccaaatattgacagattttcactcaaattgaacataaactgccagttttcatacaatcaaaaatttaaaccaaattaaacaaagatacattataattgtcttaaccaaaaataatatccaaaaactctcactaatatgcaaaatataccagattgtcaaagtaaaataatatcccaaaaactagattcagctatcaatttataatctttttttttttgtcaaaaaaaaatttaaaagcttcaaaaagctctaaatgttgtagttgtcttgttcttagtcagttggtgaaattgtctgatgcaaagagcccccaactgttgcagaacttacagactctatcggtgttggatttgtatttctaacataattcccaggatctttagttggtgttgaattttcctacaagataatgcaacaatctaaatgataaatttagatttacaaacactatacatgatataaaccacttgttttcaatgtatatacaatctatcatgtagcaacagattagaaaaacaaaaattagttatatcaatatattaactgagtttacatattaaaatacaagaaataacataagagtaaatgtagtaccttgtttttgttatttgtactgcaagtcttatagttgtgcccctctgcatcacatcctcgacacctcatcttgtggaatctctttcttaatttctttgcacctggtggagctacatcatcaaggtccactctcctatttttcttaggcctaccaggttgtactttgccaataggtttgatcagtcctgtcttcccacttcgaggccactcgacttgatttcgaattggaaaaatttgttgagaatatgccttcatatagtattctttggtgtaccttttgctaacatatttttttggatcctctctattactccaaattacagcaatagcatgactacaaggaattccattaagctcccatcttctgcaagaacaaatccaccttcgtaaatctactgaatacatgtccccatacatactctctacctggtcatcaaattccccgaattagttggcaaatgccctcatgcatcaactttattcttctctagttgtgttactatttttggtgcaatattagactgccacatgattatagattgcctatgtttggattgtctttccataaggtacattcttatgcgttccaacattgtcaatattggcctatccctagcagctaatattaactttgaaccattaaatccctcacacatattattgcataatatgtcacattttggatgaaccctaaagtgtgctctactccaatggtgtggacctgcatccattagccatttaaaagctttctcatccaaagctttaattgcatccataacagcttcaaaccttcgaacagttacttctctggcggcagccttccacaagagtgatttcaatgtcttatctttgaaaatcttcgtgaaatttttctccaaatgcttagcacaatgtctatgctcagcctcaggtatcccttcttcccacatactcttcaaagcttgttctaatcctttttgcttatctgtaatgaaagtccaatggttagagttttcaatcttcgaatcctccctcaacaaatctaggaaccaactccaagagtctttattttctatctcaactacagcaaaagccacaggatacatttggttatttgcgttgataccgatggctattagtagttgtcttggatgcactcctttaatgtgacaaccgtccatacatatgactggtctacatccctcgttaaaacccagtttaacccttcataacatatgtacattctcttgaaccgcggcttcccaccctcaccttgttcagtcataatttccacagttgaacccttgttagtatgcttgatctcctctgcataatcccaaagagaattatactgttcttcgtaactcccctctatgttttttgttgctataagtcgagctcggtaagccttgcctcttgttatcttaagtacttgctccttgccaactttttgttaaaatgctgagatacccattttcacatgtattttaacctcttccaagtacttttgaccaagccattttgaagttgcaaatcgattggtattctttcatgcacacttgtgtacatcttcataagtctttatcacaaagataggagtttcatctatttttgaagcaaacaatacccaaggacagttcaaaccattgcatttagctcgaatcctattggagtcatttttcttaaaataaatgtgctggaaattatttta

SEQ ID NO: 971 - DNA, 1869 bp, Cannabis sativa
gtttggttcaaatgtgttagtgtagctaaaccatgtaaatcatatgatgatggtacactcagaataagtgtttctgctttaaaaaaaagagaataagcgtttctaaaaggcaagctaaaaagtagagtaaatgaaacaaaacttaatcttacggagctagatattcgcaaaaagaagacattgcagcaacaacttcagcatagttttcagaggtagctggggctgtcacttcaaccaattgtatcccaggagttacaggcacagcctcatcagtagcgtgtagctttagcattttaccaactgatgaaacagtgactgcaattttagcacctctttggaaatggaaggcaaatcccactttcagtagctcatgatctaacttgtagccaagtgcataaaataaacgaagcacgttcttgcttgctttgctttccaccacggtcctgactagaattgaaatctgatcagcacctgcacccctcattggaccccctacatgcctaacagtcctaaagatttgaattttatagtgagctcatattcaagaagatataaatttgggaagagatttcagaattaccatgttggttcggcctgttcaaggtcacatagaagtcgaacctctgaagatacaatccctacaaaataggatttgatctcctagtcagcaagagatctcccgtttggatggtaaaataccaaaacaacatgtaaatttcagtatcatacatggtatttagtatatctcaaaaacaaatcgacatctgagtcatgcaattatcctaccaaggtttgggccatttttaaggcatatctcatggatttttagccgttccctttgaacaccacaaagaccttgaagaagaatctcaagagcctcaacatgctgccacatggaaaaaaaacaggagagatcacttgttgaaggattttttttcttccaaaaaggagatacagacagcaatctaaactttaaaatatgcacacacaaaccatgagtgttgaatactgcatgaatatatgatagtagaaaagaattatgggcacttcaaaacatcttaagcaattacaatggaactcttcaattcattacagtatgccaattatgcgaaagcagaaccaattgcaagaaatgcctgattgagttaagccaaaaaattgagtaagttggtgttccaattaatgatgggtaaagaggtggaatactgctatagattttgacatcaaaatagtgcagtagagacttcatcataaatgataaaactactctaaaagtacaaaaacatgtatagagatcttctccatttctttcctccttagagtaatcacctacaatttaacccatcaaacattcactcttctgttttcttttactataaatttaagcgttaagccaaaataattgaaacttcattatttatcgctgaacaaagaatagatcaacattcccaaagattagcctccaaactttaaatcaattttgtcttaattcaagcaaaattaatggtaagaaagcattaagacgggagagaaggtgttacctgtgtctctataattccccgaactacgcattccatttttgttgctttcgttctcaatttcctaccaaagaaacacctttagaaaatatatttctgcaaagcaacccaaatagtattagtgcatcggagaagaaagaagggtactcccataccagagagagagcgtcgcagggggagggttccgtccggactccggatgattgagagaggtagatgggcgtgctttgcacgtgatcatacgcaattattatttctataaaatattgcaatgattatcataaaatgaacataagtgctcgtttggctccggatgattattatatattta

SEQ ID NO: 972 - DNA, 1601 bp, Cannabis sativa
tttctaatgtgttcaatccatacacaaaagttatgcaaaacacaacctgtaaaccaacaatttaaaccatacaaagcaagaactactgactttcttacaagatctttaccctaacaaattctttttgtcacactaccaaaatccttccctctattattgtggaatagtgagaatcccaaccatgaaacacacttgtcatcacgtgatccactttgtccttcttttatttattatctaagagagcaccgactcccactttattaaatctcaagagactaagcactttaactaacttatctctcttatttaatccctaaacatcccaactaattagattagagcaatccatcatcaacatattggttgaaatgccccaccatatcccccattacttgatcttggagagcattaaaggtattctaaattttttaattatctactatcattgccttccctttatctttgaattcccaaccatttaaggaatttcccagttctccttatttttatgtttaggagttgcatgttattgttgtttattggcctctccattcgtcccaatcatgtgctctttctctatagtggctcaattttcaggcttatcagtagccaattctttctgcaagtttcttatcagtagtgctctttttcaccccaagccttgcgcccttccttcttggactcagccatgttatgaccatatctcttacaactattgtatttaattaggagacattcgtaccctattaaatgataatgtatttggccattctcattcataaaataagtgataaaatgtgggtcatatatgatcttcatctcaaccaacaccctagcaaattgaatcatagatgccaattgtgctgattatagcaataagacaatttttccccaatatttttgacctagaattagtaatcgaatacactgaggtacaaaagaaactaaccaaaatatgttcaaatacttagtctaaggccgcacaatcataggtgtcttatcaaattttacaataccaatctctaacaccgaatctcgagtagctttgtcattaaacttcactatggccaaatccatattcatccttactgcaagctcaatccccaagtgtccccaaattctcttcgcgaagccttcagcaaatgaaggattgacacccattaccatacagatcacatcacaattctaattttgagcctagtttgtaacctctactgagtcaacttaagaaattcatttctcatccttaatcatcagttcctcatagccaagcttagcagccagaataattttccacccttccttgagtttagcctagtgtttctgagttgaagtttgaaaatcatcattcttaacctccttttcccaagtttccttaggcaaaactccctaaacatacatcacaactgttgacccccaaatatggctaagtgtaatttcttgagtcattagtgttatgcctaaaagtttgccaagtgtaaattctaaaatgcacccaaggagatgtgttggtacgaggaggagcaaaggcacgagtcaagctccacgtgcccacacaaatcaacgagctgctccatgcacagggaggctccacgttggga

SEQ ID NO: 973 - DNA, 1538 bp, Cannabis sativa
tttctgtaaacgagctcgacaagtgtggcagtgctcatccttttgtcttgctgattttttatccaaccgtcagaatcttaaggtattactcatgcaattttctgctgaatggtattctcttcagctggagcaatttgcaaccatcctttggagtatttggagtgagggaagcaaagaaaggcatggtaccaaaccaaaaccaacatatgtgcttctctactttgctctttgttatttggatgaattccatgctgctaggaaagtcacgaacaaagcaagttccggtaacctttcggtagatttgtctaatgcacagactggttcatggttgaactccccttcaggccgtctgaaactatactgatgctgcagttgacacaatgaatcagaaatatggttttggtgtaatcctaagaaattgtgcgagaaatatagttgctgccatgtcgattccgtttcaaggatgctttaaacttgaagttatagaagctttgacacttatgaatagtttgtaatggctccaagagcttcaactacatgttcactatattgagatagattctcttttgatagtcaaaggattgcattctacccaacatcttgtttctgattttcattgtttattaaataatatgtctcttttagtgtgtaatttttttagagctcagatctctcatgtttatagatttgctaattatgtcgttcattggctggcaaaatttgctctttcggtatatactaaatgtttatggttggaagaaatgcctctgcctcttatgtctattgtattataactttcttatttaatataatagcataattatctcataaaaaaaaagtataaaagaaaaaaattaagtaagaaaaatataaatgtaaaaattttagggacttttttatttttcacttcaaaacagtttttttttttctttggtacgtttacgggattctacatataaatgcctattgcaattaacggcaacctaaattatattgcaactcacatagaaaccaccggagaaactactttaaaaacttataccataaatttaaaaaaaaaaaaaaagttaaaaaaatataatataaggtagtttctcaaaattttgataaatataaaattttaaaaaaaaaattaatatccgtgtaaatttctgaaaaaaaaatccaaattttgatttgtttgcatctgaatttgggcatacatagaatatcaatattattatggacagttattttagggagagaaatttgagcagtgttgatgttgatagattaatacatatatagaaacacaagagttttgttttggtcagtttcctcaaaattcattttaagcattaaacggagcaatccaagagtcctggtatcaccgacccccatgatttcccataatataattcagcatcttcaaataaaaacaaaaacaaaaaataaaacaaaaacatttatcttgcttcctcagaccactccaaaatccaccatatttctctctctccttcccaacaaaccttttcattgctttataacttaatacctct

SEQ ID NO: 974 - DNA, 3754 bp, Cannabis sativa
aggaatcaatatcagcttaccaataaaatctggcaaatgcaaagggaagccttgtaagtaagatttgatagtctcaaaatacatgtacacactatttacaatatttgcatactaacttccattctatactatagcttctgtcatttagaaagtcaatatattaaattgctaatgatgcttacagattgcaatccaaagaaaaacaatataaatttagcaactatcttatagataaagcatattctgtttcatattgctgaatattagtgacttcaactattttggaactacaaatgatgatctgtacattctacctcagcaatagcccatcagtcatgtacttgatccttgttgagctagaagtcacatcctcaaatctaattgagtatccaaccctttgacccaactccacaccacattcctcagcaacccttttcgcaacggttacagcagcaacacgccgaggttgagttattccaatagatttgccttctttacaaaatccagcattgaacagaaactggggtatttctataaagcatgtcacaacatatatttgattaaaaagagtaataacaaagtaaactactcattgggtcatctcttccccacttatgcagacatacatatatgtaagagtgtgtgtgtgtgtgtgtgtgaagtggaagaatgacatacgggttgtttttccacttccagtttcaccaacaatgatcaaaatatcattcttccgaacttcatctatgagtcttcgctcgactgtcaatgaaaataattcataaaacaaaaagtaattaaataaactaaccaacatgaatatgaatatgaatgagcaaaataaaagataaagagatcaattttctgggaaaaataccggtagcaataggaagagaccttctatgctgcgacaatttttgtctcctgcattataataaaagaaaagtaagttcgtagcagagtaacagaagagtgtgtatttggaagtttacctagcaaaattatcaacttttcgattgtcattagtagagcttccactgagggtggccttgttaagacttccttgagccattggaggaagctcaactgcaaggaaaagaaagaacaacactcaaaatagtgaagagtttatcattttgttcttaaaacacggagctttttagaaatttacaaggtgggatatactttagaaacactgtcatatatttttgaagtggagggatgtctaagaagtgagtttgtaaagaagaggggaatgaatgaagtgatggttgaggtttctgggttttctttaccaaacaacctctttattatatcaaaagtgagaagaatgattgatttgaccctttataagttgacttggggcattcaacaataaatgtgtcagtcaggcaaaacgtcgaacatatggaagacacaaacaataacatgaaaattaaggagcaattcctacatcaaaacagattctctctcttatatccaatgaccgaattaaatcattaaaatctgaaacagaatagtcacatataattggtcttttggtacctcagcctttggttctagttctttagtaaaacccagcttccaatcccaaagtcttgcgtgtgaatattaccatatgtcttcttcttcaggcttcgatttcaaagtgagaaccctcagaaaagaatcaagactagcttttcactctcataacttgttaaagaggattaggattaagtgttcattgttgggtataatgtcaaatttcaatcaactcctcaatgttacatctctttctcccatcacatttacagggttggttatttatctctcaactcggaccaatgatattattatatatttaatcattgttatatataataaaaactaaaaaaaaaattaaaggtacaaatcgggttggtcggtttaatttggcgggtttgtaatttttttcaagttatttcaatttgtaatttttatcgattttttcgattcgatttgggcggtttataaattttttggtacagtcctatacatacacggtgatagtctaaatttatagtagatgagtgttaaaggagtttcactctctttattataattgattagtagtgtttaaacattacaatttatattgtaaattattttaaattttttaaaattttacacgatgtcttaaataaatataatatatacgattatgaaaaatattagactaaaaattttttagatgtcgaaagagataaaagtacaccaatacacctattttaaaggatgtattgtaaaagcaactaaaaataattaacttattttagaaaaagatcattgcttcatgaattgagaatttcaaggacaacatccattacaatgctcaaagataagtaaacgcaaatcattcttgataagggtgagcaaacggcaacaaagctaatagactgacataccaagacacacacacccaaagtcatagtcgttaacaagtatcataccaccatagatggtaggtaaagaaataaactaaagatacaaaccctcgtgactatgaaaagagcaagtccacaactgggacaaacaaacaacataaagcaaaaaaacaaaataaatctaaaataaaataataacaaacaaaagcaaaaatcactaatccatcggagagtgagatccaaccaaccacaagcttcatatttccgacgtcagaggaaccacgaactcggaccactgatccaccacactagaaccccatgccttactagataggtttgaaaacttctacccacccaaatagcataatggatgatgaaaggcacaaatcaatggtttcaaccgaagatccatcgagtgcacacggaataccccaaccaccctatcgttgaggcacattcgttattgacgaagaagcccaacgcttcacagcacccttccaaagacgcctctgagaagactcaccccttgccaaactctacattccaatcaaaagcaaaagcaccatcctcaataaaatcgcacaacgaatccccctctactaaggagcaccagatgcacagcaaaggccggcgacgaccaccctagtcgagaagaagagaagagaaaaggagaaaaccctagaagagagaaacaattagagttaattacaacacattattatggtcctcaagagtatctccaaacatgctctctaaacacactcaggtaaataagggagtgtgacttgaaaatatgagctccaaccatacaaaaatgactctctataatagagaatggttaaggaacttcttacttttttgctaaacttttttaatattagttcaattaaaagtactattatttttttattattttataaaattaagttatatttgacaaattgaaattataaaattgttaggactttattagcactattttttagtagatttttgaagtgttttcaattagttttagttgagttttgtgtgattttacacttttagttgttaatattttcaagtttagtattagagaggaatggaataaattcaagaaaaaaaaaatgttaatatgcgatttaaaccgcaatgcactgcacattataaaaatactaatttttatatttatttaagtccaatatgtgaatgttaacccaaagcccactaattattgtattattgaaacttatttttttttcatatttatttttaagtattatgatatttttgaaaagtattattcaaattttgttgtatttgtgataatttatttgttggtgaaggccaaattgcaaaaattgaaaaaaaaa

SEQ ID NO: 975 - DNA, 4386 bp, Cannabis sativa
aagatcttcacgaatgcctaaattaagagaaattaattcacacgacactctttttcccttattcgaatttttgtcccactagattttttggtacaatttttaatgagagagttattatggacatctaagggcgaatgttataaaatattattaatggatgtctaaattaccaaattaattatcatcataaatacttgattgtatttctttttattttattgatttagttttataattattttagtcatattttgtataaatagaggttcacctcattgaaataaactatcgagaaaaatcttattcactctcatcctgttcttattatttttattttctctcttgtcttatttcttttttcattctattatttttataatatatctttaatttatattaatttttaattttttttttcttctggtattcttaaaaaatatatgtataaaataaaaataaaaataaattattttttaaatattaaaacaaaaattaaaataaagtattatgtgaaagtttattagaaaaatataaaacaaaattaaaataactattgatattaaagaaaataatttgaaaaagaaatttttaaaaatattaaaagtatttttttaaaattaattaaaatatttggatgtacgtgtaaaaatggggaaataataacgttcaaaattaattgttgggtgtaaaagcagaaaagaaattcaaacaagagtcacaccaaattactccttccttcactcccactcatcttcttcttcctcagtcctcccttttataatttatgctaaaaaatcgaaaatttgaagaagaagaagatgtatgaggcacagcaacatttcgtagaactacaagacaatgcaagtggttttgggaatggagatcctagtttatggctttcaggggatcacgccttatctcctactcaccgtcggaatcacccctcttccgtcgccggctccaatgtcgatcgcgaccttttcaaggacctcgttgagatcgtccctcttgttcagtctctcattgtaagctctttctttctttttccttgggttttgaattttcttggggattcttggtagtgtttggtttccgcaaaattcgtggaaaaattacttcaatttttacatgggtgagtggtgacaccagttgacttgggttgggtttatcatttccataacagttgtgggaaagttatctttcttagaaaattgacaaggaaagaaaattgtggtgatttttctcacaatttcttagcaatttttttaggatcgtaaagggagtagttcatttactcgtcgtgggtcaatgatctacaccaagacgccttctagggaatcactatccaaaaaggtatgtttttacacgtgtgtatgttgagatatctacatatgtatatagttatattgtgttgccttggcttacgataggaacattttgtgaaagtttttaagcgttacttgttggatatttcatagaaatgatggagttgtttgatttgatttgattgctaagtaatgagttcttcaaatttgataattaaatgctattaacttctttctgttattttgttagtgtggagcaatcaagcggcaattatgagtaaaattataaccatgacctgtttggaatttaatgataaatgttctattaagaggcgtttcatatttcttattataataaatgttatggtcaaaagtctcatcgtaatgcataggcagtatggcctgcttaaatggcaatgctcttgccatggccatggaatcactgatggaatgcatttgttacagtgcatgatctgttctatctatgataaacgcgtagttgaaaatgaactgtgttttccttactgtattatcttttgactgatttgataatgttatatatgcaatttaacaaagagctagcttgagctagtgaacaactttgttgctttattgtcttctaacgctttttcatcctaagcataatttgtcatttatcaataatacaatacaatcttgcttagggaatttttcgttgttttaatttttcactgtgttaatgtttaatgtctctgttaacccttatgcttctagcatatacaattttacgaagtttccaggattgacaggtctccttaaccattgtttcagttgtgatcatttaatagatttatattcattcaagatattatttcattgtctctctttattatataacatatatatataaaaacattactatatattgtattttcagtttgaatttgttgtctaaatgtgcgcttatttctttgtgatatgatttacagtaagaccattttctcttcaagaataatttgattgattgctgactacagatatttcttatcacctctttcttcttttttttttcttaaaaaaaaggtgtctgaaccaaaagggaggaatgcagctcaatctattccaagaagaaagaaaagggagcatgtagacaagaatggtactaataatacagatgctgaggcattttcgattttttcgtcaaaggggttgaccgcagatgacagagaagagttggatctactgaagggacaggtggaggatttgcaaaggaaattgttggaaaaagatgaatctttgaaatcagcagacgatttgaagaaccaaatgagtgctattcatgcagaacttgataatctaaaacttcaaatttcagagaaggactctttcatcaagtctacacaacgacagctctctgatgcaaaggtgctaactgctattttacattgttcattcatgactatgttatggtgaactgtttccctccctgttaatactagcttttggttgctagatcctgcaaattattatgtcaactgtgtgtttagcttgctgcagatttattgcatgaaatatatatatttatatatatatatagatatagatatattgaaactaggctctccgcatagcaatttgctatgtaggtacctaggagaactcgaacttcagacctggtgagagcagtaattgcagtttggtaccttacaagttacaacagtcatcatacctaattgcaggactatatttgagatatgttaggtctgaggggcagctatagtgtttcattactgcttctggaacgttgattcaaattttaattgtgatttggttttgacattgatcttttatattggtttgtatttacttagtgtataagtaaaatagcctgcatctttatgcttcgcatatttggaaaattgaatacaaataataaatttgcatttatcggcggtcattcattaattggttttatcttataaggttatatgtgaagcttatattctttcattgaatcaaaatttaaggatctgcaagggtgttcagaatggtgaatataatttatccctctgtttgtgtcactgtatcagttgattttttatttatgaaaaccattgtctatgcctacagatcagtcttgcggataagcaagctgcatttgagaaaatacagtgggaagctatgacatccaatacgaaagtggagaagctccaggaagagctatactcagtgcaaggcgacatttcatcatttatagtgctgtttgatggattgctaaaaactgatcctggtcaatatgctgaagactatgacatctctccctgcaatttggacagtcttccttctatagtaagctcacaaatccgtaccttattcatagtgtttactatagttttgtgcctttacttttttttttctttttttgcttgactatataacctgcctataattgcatattatttacaagctgtttaatatgcattaatatatttgaaacacattattccattaatgggagattaacttttttttcagtagttcagatagatttacctactatataatgtgttgaatttttgaactaagattatgttgcatgaataaataggatgatttggatgagatggagatgcacaaaatggaagaagctagaaaagcttatattgctgcggttgctgttgcgaaagaaaagagagacgaagagtccattgcttctgctgctcgtgcccgattataccttcaaggatttgctttcagaaaatgttcagtcgggggaacataatgagtgctgtttaatacgattttataatggaagtttttggtatgaatatgttcattgtattatttgtagaacaaagtgaaatgtgttggtgtggtgtgttgtaatattgtccatgattaaatgttcgaggttagggtcgcaaaatgtttaaaaagataagagtaaaattgttgcgtgtctgtgttacaatgctaatcttagctatttaagcaaaaataggtttcataaagtcttgttgagctgtctaagattgacatgagctttaacagtgtactcataagtgcataggtgtataatatt

SEQ ID NO: 976 - DNA, 2347 bp, Cannabis sativa
tagtggttctttctcgaatttgtagctgggattccatccattctctaaggcagttaacacccagattcatgttcctgaaatgattctcttcttagttgccttggagagaagaaattattcatattttggtttcgcaggactagttaagagtgtgtggtttactctcaattccagcaaaaaaaattcttctactgatccgcatgcatccttgttatagtttctccagtaatcccagacgagaaggaaagctttttctttcagcctttgtatgctgaaattgtaccttttcttttcacatataatgtatatcaaattaatagcctttcaaaatgtatttcaagttgaatcatatcatttgtaatgatatcacatatttcattcctaccagtttagtaccccaagcttctcagactaatgtaccaattcatttgtgtatagtactgatatgcaactttttattcagaagtaaccagtaaacaatctatgcactgcaaatccgaatcaacttgtttacctgatactcttttcagattacaaaatcatgagtccccactacaactccactgatcttccaagcagagcaattatacaagtaatcttttttcacttatttggttgaggtataagaagaagcagattgaatctataaatgcaagcaagtaaacacaaatggaagtaacatgtacaaaaacaaagtccttatcgattacaatggcattatgaaatatacacatatcataaatactaccaaatatgaatctaagctctctttgctcatcatatctgcatatttgcgtcagaattagcccatcttattgttgaccttgcaagagcatccatgggatcagtacatttgtgaagaagaggatcattatgtggaagaagaccctgcatttcatcacaagcgattaccacagtatttacagctctcatcaatagaatctgtactgctattttcatgagattccgagctccttttttgtcgcctctcttcactgcttctactgcaggaatcaccacgtgctccattgttgctctgtctggcaaaacaacctcaaagccctgcaaataaatgttgagattttccattcaaaactaaagacaaaatatcaaacacctgtgggaaattctcaaaacattacctcgttctgcagcttctcttgatatataccagccactagagattcattggaggcaagaactccaatccttacaccattaccaacctcaagaggcttcaactttgcttccaaaagctccttggcgacacactcaccagcatgaaggaaaggcaaagaacacccttcagatatctcaccttgccatacatgtaaaacatggcaaggcatgactatacagcgagctccagattgctcaagaaagacccttttttgccttaagctctcgactaccggaccgaacttagatgatgggatttgaaccatatgagcattaaacgagtgaaatgaattcaaaatgggaagcttcatccgtagtgatgagtcactgcagaccacaaagggtgggcaacccccagctctgatcccccaccagacaagcttttccaggaaaatgagagtggaaaaagcagagactccacctatgatgccgatggtatttggctggctgaggagttggtctgaggtttgagtgcatcttggcctttgattcaccaccccagagcttaaaaccttgatgggttctggtaagtttccactttcatcagtctgaaccagaactgaagatacttgtactgtcaatgatggaagatgatgatgatttggtgatcttatacgtctggctccaaagtaggctctgttctttgttacaaggccaagaagaacaggaggactatgaagtgtatggaaggacattttcatggccccatcaagcattttcaacaaggtaatatataataaagccttactcttctctttttttttttttatgaagttttaagcttttaaacaactattcaatcaataccctacatactagttactaagaactaaaacccatctccacaaacttaagaactccatgatctatgatgtgttttcacggtttcaccaccaataactgctcacttcatagttcttctaataatgatgaaacaaacccaccacctccaaatatctagattctagaatgggggtgatttaattaagagattctgtgaaaagatcagtaaacactgggatgagctatattggttgttggttttcttcagtgacaacttgcctaatgacaaagacccatgttatagcatcaaaatagtatttgacagagaattccacacctttcaaactcactacacacttacaatagttggtagtagtcctttttt

SEQ ID NO: 977 - DNA, 1614 bp, Cannabis sativa
atagttggtgattacacagtactcactcacggggctaattggagtgtaattgaaatgtctcaattttctctaattatatgataatcatgtaatttgtacatccagccaaataaaccaaattgaatagttaacttgaattacactgaaatccaattacaaaatgattttcaaaagaccttataatagtaatcttccatcaacttgactgagaagacatacaaacctcccaccgaataaaaaaaccgataattccaagtttccaacgactttggaggaaaattgtcaagattgaaaagaaatgggttgtgtcttcatcttgttgacaccaaagtttttgatcttcaaaatccttagtagccaagttagggttccagagaaagcataggccactcatatttcagacgacatcagtcacatagttgtgaagttcctcaagttctgcaattagttggctttactcgaaccctaaattttctccaaagccctactgattggttcttggaaatattgaagagagataaagattgcctcctgttgatgaagatgaagaaaaatgcaccattagcacattttgatacagatgtttcatgagtaactgacatatgcagaaaactgatactacctcggttcgaattgttcggcttccctggtgtggacatgtgttcaaatacgagtgaaatatttcactcgcatcttttacctatcaatgaggacaataaatcttcaaacttcctatcgaatgagcaactataaattatcaaactctcaagacaacattacctttaaattcatatcctcttcaatgcactcttctaacccagcaagtccaccaaaagcaattaatagatgcctaccaaatcagacacacacaatcacaataagaaccaaagaaagggatttttgaaaccaaacatgaaacatttagatgtgcaagaaatatttatacacagttttaattacatctgccaatgaaatgcagcacttacagattcagcaaaacaaacttagttacaactgaaattggaaacatacctaaaggtaggtataacgagatcagatgatttagtaactgaaccatgctctgaggttccaatcaaatgatcatagcctccctacgaattaatagaataagccgatcaagaaatgatgtatttttaaggttagtatctatctacagttcactggcaaattgagtcaatgcacaataccttatatgggcattccctgaatactgaacttatattggaagcatatctcactctgtaaccccaatatgtgtttgcttcttccctgggcttagatgatgaaacaacttggcgaactgaatctacgaaagaaaaacaagcaactaaatttgctggcatcgtactaaacagaattattgtaaattagaaaaacaagatcacaagtctatacacagtttgaaatctttaagacagctttgcaaggctaaaattagttatttaccagcatccagattccgatcagttcccatagccacggtaaccctcgttccaggattgagtacttgatcaataacgaaattctgcatatttagcactgtgtccataaaaacagatctattgaagactttcttgttagagttttttgttt

SEQ ID NO: 978 - DNA, 5625 bp, Cannabis sativa
tacagggtttctttaggtaagtactatatttatactaacagtttaaaaaaaaaattacaaaaatacgttaatacgaaaaaaaattatttttactctttgaatttttttacttacaaaattatattttcagtaaaaataataaactgtttttttagttgttttatagttgtatattatatagttgttatgatatttttttggttaatttttattgttttatagtttattaatagttgtcttgaaggtgattttttgttattttttaattgtatatttattttttgttgagcaaagtgtatttttgtaatttaaatactttataaaaacatatttttataattaaaaattttatataaaatgtaaataaagtataaaaaagggtatttttaaaaattttcctataaaatctatatatttgtattaagaaataatttcacattttaaatttcactaattatattatatataatgcagaattgaaagtataatatatataatttacgtgtacaaccctcttgttatattatattcattatttgaagaatcttttggtgtattatcatgagcatatattatttggataatgttgattttattagtaaaaatgtatacgtatgtagatatatttgacaagttcaaagatgagaatggcaactttaaagaatgtttggcgagtgacactcttggtttgcttagcttatatgaggcctcacatttgagttgcgttggggaagatttactaaatgaagccttgtcttttacgaccagacacctaattgagtttttggcaaataataaaaaagaacaatgcgatgatgatgatgatcttttatcgaaagaaatatctcgagccctggagagacccttaagaaaaaccctaaacaggctccaagctaggcatttcatttcaatatatgaaaaagtggccttacataaccaagcattgctacaacttgcaaaattagatttcaatttattacaatccatgcacaaaaaggagcttagcgaaaactccaggtactatataaatatatataattcacagttgtatatactataataaatgtaaattaataaaattatatattaattatgaaataatcataactttcttcattatgcatattttagagatgttttttttcttcacaccacgaaattaaaatatttataacctaatatttttatattaatgatgtttttttttggtaagtaagatgaattttattaatgatgtttaatagaagtgtggcacaccctaaaagatcaatttagatgatagaggatcaattatttttttggagggttttccaaacctaacgtcactactaatattgagaaaataaaacagaaaaattaattaacagcaattagtacagtatttctgatgattcatcaggtctttctctagatgattcatcagttaccaacctcacacatagcctctcaagggaaaaaagctcttttccaatgagagtttttcgatttactagggttactggggtttcttcttcttttgtgtatgtggagggatgtgcatgagtctatgtgtttctgatcatagttctctcaagtgaggttgttttctattttccatttcttttcttttgcttttcctgcgctcccgtgtgtgagcttctgggctttttccaggttttcgtgtgggattctatttcccctgttttcttcttcgttctctgttgtgtcttctctgtttcctccttcctctccttgtagtttggatggaggactctgaagctaattagggaatgatgagtgctgatggcaaccctggctctgaagaaaatgttgaactgctgagacaaaagttcttggatgaagttaccctagaattggaacctgactttgagattagtgaggaagttgctaagattggagtccttgctaaaatctttggaaataagttaatctccaaaggaagggttaaacatatattaggtggtattcggtctctgaaagggaaatggcgtttgaaaacgatggaggcgggtctttggggtattttctttaaatgtcatgaagacaaacttgagattctgaaaaaaccccttggatcatttccaaccagttattgaatgtccgagacttgcctgttgacggtcattggcaaaacgtgaacatgtctaaggcaactttttgggtcgaaatgcatggtctgcctcctccttatctggcagcccaaaactcggtcgttattggtgctaaggtgggtacattcattaaatctgatggtgcaacaaatggagttatagcccgacgtggttttttgaaacttagagtcgatatcctgattgatcagcagctccttgctggtttctttttcagtattgacaggggccgccgtgaatggatccaatttaaattcaagaagcttcccactttctgttttaattgtggcttccttggccatgaaagaagcagttgtaggaagccaaaagtcttcgcctatctgcccatcggagacgcagtgcctctgtatggaccttggttgaaggctatgggtcctactaggagttattttgactctcgccacccgatgcttctcaaaaaccggtggtgatggaacgaccggatgacttgttggcgaggtcgggtacgaatgttagaaaaggtacgaatgtaccagtggacatgggcagcattccctctctgggtactacggcagacaacaataccaccacgatgcatggtgaacgtactgagaggaataagcaagtgataagtggcaaaaccctgagggtgtctggcaccaataaacttaaatccgcacgttttaatccctttgaggtagtctctaaccatcctattgcccagctggaaattttttttaatgatgaccgtattattctttctttaattcctaatgtgggtcctactgcggagtaaatggtagatttgccccatgaatctatttgtaagtccagaaaacctcatcagcatcctgagcccattatactgccccaggcccatttcgaataaggtagaaaaattagctgagactttactgggctcatctatatctacagggttggcctctccctctgtgaagtttggggcccaggcctcccttaatgactatctgaactgctcaattagtagtagaaaaaggaaagcttgcgggagtgtgactcttattatgtttatcccgttggtggatccttcatcatcgactctaagtttggatgtcgataacttgacattcatcgaaggaaaaacgataacaacattgggactaccagcactgagaagaagaaaagaggcaggaagaaaggcaattctctccctaggaaaaactagagacgattgacaagagcgagtcctcttaaccttagtgtttcctctggagataaggacagtgtagaagctgagaatggaaaggaattatgtacccatggaagtatggtcattgagatccaagtggaggaaaattttcaattgggcgaggaggtggcccttatcaagtcccctcctacccaatgagagccctatcctggaatcgtcgagagtttgaaagaccctcggcattgcaagccctggtggcttgggtgaggagatttaaggttgattgtgttttttctgatggagactaaattgggtggagatcaagtggactccatatgtcgtgctctaattttgactttggggaattcctttcttcgactgggagatctggtggttttggttttctacggaacaagcaagcgagtatcactttggtttcgaaactcaagactggttttgaatgtaaagtttgggatcctgacgagtctctttcctggactctctttgctatttatggtactccttacgaagaggagaaacaattgttttaggactgcctttcacgagatattaatctctgttctaagccgtgggctattctaggggatttaaatgttattttttcgagtgaagacaagtcagggggaagggattttgctcctagagatggttcaattttgaaaaaaattccgtttgaaacagggggaattgatctaggattctttggttgcaagttcacctggaaaaataagagatgttctgggggcctcatcagagaaagattggatagagctattgttaatactggatggattaactcctttcctagaggggggtgtgaaaaatttgcccattctttcctcaaatcacgaccccatcttatttgactctgtgatgaacatgtctcgggggtctgtgctgttcaaattctatgaagcttggtttaaagagggtagttgtcttgaaaccatccaacattcttgggacgcctctgaatcgaatggtgtaaatgggaatattcccaggaggtttgacacgattcggatggctctctaaaggtggaacaaaaaggtttttggtgactgtaacaagaaacttatagccttagaagcaaaactgcagctacttcagtcgagagatgcaaattaaagttgtttaaaggaggaggaagaagtggagaaggaaatctctgagctttgggagaagcaagagctcatttggcgtcaaaggtctagagagatttggttgacccaaggggatcgtaattctaagttttttcaggcttcaactgtggttagaaagaagcgaaaccacatttggtctctcaaaaatgatcatggcactctgatctttagagaaaaagataaaggtgaaatcctcaatacttattttaaaaatttggacccatgctggtgccttattagcatttttcttagtaaatatctcataagcactccaagctttcatgatcacaggtttctattattataaaatttttgtattagagaatttaattgctgtaacaccaagaattttcgccacagatctagttttaatagtctgatcttctaaaataggacctcacttctttgcagtcgcatctcccttcttataagttccttgggtaatcttgcgtggacggtctcgacctgccatagccacagctcagagctaagagttaaaccttagcaaagcaaattttttagagaaagttattttatacaaagttttctcttatctcttcctatattaatgatgttgtatattacatttacagtagtaataatttatgagaaattcataaataatttacatatctgatcaagagttcaaacatctattttccaccagttaaaaaacaaaactagaaaatgtacgagcgcaactaactgcttggattctaactctgatatcgtaaattattcaaaatttattaaatattgatgaaaactataacgtttcttaacaaatatataattgggaatttcttttgttatcgagacaaaaacataaatattttcatatacatatatatcgacaaattatttggtgtttaattttgatatagcatgattgctttaattactaaaactctattacatctttgtatcatatgttattataattaggtggtgtaaagaatcagacttcgtacacaaattccctttttcaagagacaggagtgtggaactatacctttggatattagcagtctattatgaaccccaatactatttggcaagaataattttattcaaaattatttcctttgccacaatagctgatgacatttatgattcatatggtacttttgaagaactt

SEQ ID NO: 979 - DNA, 709 bp, Cannabis sativa
atatatatatattctcaatttaagtaggaacttataacaatttttttttttttttgtgtagggtaaacttataacaattatttgattgtacgtaaagtacaaatgtaaatataatgatgatttattcgatccgtacaaaaacagcagtattattggtgatatatttttcaataaaaatttaacttcattcatatcatgatcaagaaaagccataaaaatactactaattataatcaagacgtggtttaatatttactacaatttatataaatattatatatatatatatatataagttcagatcatctttattattctagaaatacacagaacagagataattattaaattaaaacaaaaacaaaataaaatctttagctagctagagagatcagttgacaactttattattaatttaattaattaattaatttactctaaacccgaaattcacccaaatttggaaattttggaaaaacatgaccactaattaattactaataatcccatgacagagaataatcctgatcattaatgagcctagagcaaccaatgagagccgtgtgattatcaacagctccatccaacggccacggtgaatagtaagcacaaaactcaccgttttgctttttactattactaacgtccaccaaaagatcaggcaggtcgaaaaatgtatcgtcaccgtcaacgttatctgccaataacg

SEQ ID NO: 980 - DNA, 2768 bp, Cannabis sativa
ttatttttttctaattataaataattcgtaaacatgacacgtgtcccacttcagaccgaatttatcagaatttcatgtgttatttcacagatctttttctgctttctttctttccttttttattttcattttatttcatttcattttgtagctattccccactgaaaatttcatcgatctctgaaacaaaatttccattctcattttctctgacttttcattcattcctttcccgtttatatctccaattacatccaccttcttcttcaaggaatcaaaatttacttttcgaagatctagggttttctctcccccattccacacctcaagaggtttggccattggagtgaacgctcttgttttcggatttgcaaatctagggttcgttgatctagtatatgtgtttcgtcatccatgagtatggaaatcgtcggggatgcggcgtcgttcgacgccgacctgttacagctctctgaggtctctcctttggccatgaaagcgaatccaggttttgtcgatactatttttgagcattggcttgcgcttcccgacactaatcgtctggtattttctatttcatattagtattgtgttgttttgaatctcgcaattcgaatgaatttataggttatctgttttttgttatgttttttctttcctcgtttgattaatttttttttatatgttttgtcaattctgtgcgaagattagtgtattgaaatcaaagaaggctttttggttgatttattttctttagcctgatgttgatatgctataaattgattcagactcgattctgttgattattgaaagtggtgattgttgttgaatgggtatatgtataaacaaggcagaggagaaaaaatatacttttggctgattactctgaatcgtgtttgtattaattctttagaattctcgtctttatctctcttaagtatttatcaatatattaattctactcaattctttatgaaagaaaacgaaattattagcaatcttggaaagaattattctttttaaaataaatattttggaaggcggattattcttgtccaatatctgtattttaacgagatttattttgcaaagccaataaagtggagagtgtgctaattgtctgttttcaacattttcgagtgtaggtgacgacattgctcaatgaagctaaatcaggtggtccgttgaatgtgcctggaaactcttctagtccacatgccacttctagcaattctttgccttccatgtttcctgcaggaagtgctcctcctctatcacctagaagtacatctggctctcctcgcataatgaaacagaggactggcccttctaatctgggttctccattgaaactaattagcgagccagttaaagaattgatacctcaggttcgagaagaattcttataattttctgtaataagggggccttttgctacgtgtttcattttttttttatttatttattgagaattgggggagagggactcaactcactatcttttgacttgattactgaactgtgtttgattggttctaatatttgtgcttttgtggcttgcagttttactttcaaaatggtcgtccacctgcaaacgagttaaaagaacaatgcttgtttaggattaatcagttcttctatggtcacttggatggattacagattagtggtgagataaacttttgatataaggataagtaatggtctgactccaatagcggattttttaatttctgttttcatttcagaatttaaatctgttacgaaggaaatttgcaagctgccatcatttttctctacggctcttttcaaaaagattgatgctagcaatgctggttatgtaacaaggtatttgaacattttttggtttcggaacgttgtgagagtcctttttgcattgtacttgcataagagtctttgtggtggatgttacactgttgctttctatttcattggtctatctttttgcttttctaccaagaagaaacaccaacattcattttttttaatatgttagatggcctcaagtcatcttgcttcccacatccattcaaacagtaaattttatgtatctcattctttaaatgaacaggaaatcatccttcttattcttttcaaaaatatttgttggggagcatcacttttatttacagtatacttaccaggggagagaattggtggacctcatcactctttagaaatttgcgttatggtgttgtgcctaaataatttgcaaactttgagtttttgagatcaacttttttaggtcatatattggctgaatgatctcttttgtattacagttcttgcatattatggaagattttgttatgtggatcaaatatagctttagtaaattagagaaagtcttgcttgtcaattttttttttccctagaaatctgcatacagaatttgaaagtattgtggtatgtaggcttgtgtttgagtgatagtggctttcttcaaaagtcgagaaacactaaaagtaactttcactctgtgatttgggattaacgtttagcttatgtgtatagttgataaatttggaattagggtggattgatctttcttttttgagtgaacggtgtccttggtaatttttttttttaaaatctttttagtcaagtggggacatccacttaactgaaatttgaatgagctcttttgcaaaatggttattttggtgtttgttaaaatgaatacgtgaaattaataagtttgtacagttcacatgtatcagttcttatatattaactattttgtttgt

SEQ ID NO: 981 - DNA, 977 bp, Cannabis sativa
cttgatcttgagcaaatattctttcataaagctcaatatttttgcactgtctttttttttttcttcaaacattaatttccctatatagcaaagttgtaggcatcactttattttttcctagtcttttttaaatagagcctttgatgcttttctacccattggttaatccaagtttacatttgttgtatttaccaactcatcttcttctaatattttttaaaatgtgatttttaatatttttcttagttgggagaaagagagaaatagtgcctcacaagtataattgatttgttgtacatagtactaactcaaaaaatatcaattattattattgaacatgatagaattagagatatgagacaattaaataaaatcccccaatacatcacatgaaagtttttattttattttcttgggtaagtaagtttagagctcatgaaatttttcagtatataaattatatataactagagtaaatttttttattaattaatgaaatatttactaatagagattcatatttcattgacaaattaataatatttgcatgtatattatatatatgtgaaaacaatatctcacaatatagtacaattatgaaatttattgactacatagtagtaatcataagacttacaagtataattaaccacatattttttagtcataataatattaatgaaatcaaatagcattgcatggagaaggattttgtttgccaattgtctttggtttgatatttttgcacttggaagtgatagggccttctggtccattatattttaaatcaatgttttcaattgtaacattttggcatggatatccactactacaaattaagtttattgcaagtgctgatgtagaagtaccatgaatatttttgaatgtaacatctttcagcttaattttggatggaacctgaaaattataaataatatggttagaactataatacaataaatatataggggtttttt

SEQ ID NO: 982 - DNA, 2251 bp, Cannabis sativa
tctaatggggtgagttaacacagtacagtataaattctaataataatatctttgcttaattaattaaatttaatcatgtaaggaaaaggtgccactggtatgtaccagccaaaagagaataagaattgagaatgggtgaccatgcatgctaatatgccatggaccttttgattctttcaccatttattgaattttttagaaaccaatataatatatataataaaattaaagaaaaataaacaaatatcgaaataaaaatgacgatctttacgtgcttcgagtattaacaaactttagtccacgaatcaatactattagttaaaaaagcattcgagtattacacaaatatttttgtaatttatatgaaccctattttcaatcttagcttataagaaatgaatctccaaccctttgcatgaaaagattttgttatatttataagcaagagtttgcatatataaacatgatccattgatagagtaaatataagtaatatattaatattggatcgatttggtgaggccaaatccgtgaggcaatagttatctatacatgtagaattttcttaatgatgccaggtagaaaatgtgtgtcatccccgcatgtaatattaacaatttagtgactaattgacaatcactatctttctttttatggaatgcatgatttctggacctgactttggaaaccaagtactgtggtgggattcggtattaaatgagtgtcgaataagtcttaacatccgaaggcttattaattattttttggaagcaacgctagaaggtagctggatgatctctttgctgaactcttcttttgtttggtcgagatatctttctgaaaccttgatggcccgacttagtaagattggtccattattctaattggacctgtaaactaggcctttattaattgtatttggggtctcaaaagtacatgtgtccctcctctagaaatatgaacaatatttaccccccaagttttggaaactttagagttgcaaaggcttgcagtctttcttccagatggtatgagggtgcatggatgtttaaaaagtgattaattagttgttaaaaatacatttttatttattttaaatgataaaataaattgagttttagatgatatttttatgaaattattgtaatatattttataaataaaaaatatttaattttgattcaatttatgattttattgtaagaattgaagtgtatttttgttgaaagaaagaaaaagaagcaaagttgaaaagaaaagaagaaaaaaattgtatttttattgaagtccaaagtaattcaacccaaaaatgccaagcctagcccatgaagtccaccatcaattttctctcttacaaagcatgtgatgcaataatgataagtttaggtcatcatcaaccatatttctctcttccacactcaatcttcatccaaatattagaaggcaaaataacaatgataacaaaaataatattaattttattttttatttcaaatgtcaaatttaatattaatatttatataaactcaaactttctttaatttattgttagtcactttatggctctataagtaggagttcatttttctttcaaaaaaaataggagtttattttagtagttaagtgtgtaatttttggaaagtaaagaatatatagcaaaatttcttctcactcttcttctcatatttctttctataatttttgtgagaatgattaatataatggcataatcttcctttaaaggttagggataattccatatgcaaagtgaggttattttgtatctttgattcattttttgtttgaatacttatttgagtaatgcaagttcattctccacttttatttatattttcttcatcaatctatactaaatgtatgtatagacttcctcatactttttctatatatttttatttcgtgatgatagtaatggtattattgctcatttctatcttttatgttcatcttatttactttttgttaaatgatatataagtttagtcatgttctccctatctctaaaaattaataaaagtgatattaatttatattttttttcagtatcatcaccatctctatttttttttttttttgatgaaaaccatctctatttctttgtcgttattttactaataacatataggattaatcatactctttctatatgtgaaaacagtagtagctagtcatcaacttcaatcccctgaccattcgattcggtccgccaccaagaatcaaaaccttcttg

SEQ ID NO: 983 - DNA, 4347 bp, Cannabis sativa
agaaacaaacttatgattcatatatacatttttttggggttattggcggtgaaaccttcttatattttgattttatacacttaactcttttattttctttgtggcaaaactcctttgtatttatttacattttgcaaaattgaagagtcaactagatattaccgttaaatactaactacattaccactggactcgaatttcggaccttatggcagcaaactacatgtctcatttgagctaccctctaaggtcaaacttatgattcatattgaacagagcacaaaactcagagtacactaaaaaataaattgaagcattaagcagtcaaaattttgtggtatagattatccctctgtttcaacaatggagttctatcttcaaatagcttcgtcccacattacgaagctcaattcgataagtctaaagaaatattactaatcaaaataacgtgattagcaaatcaatttaacctcaacatattactaatttcattgacaatttcatatacaccagcccctaattcatcactaaattgatctaaacataaaacaaatcctctcaattctacatctttctcataatttacttctcaaatttaagaatctaaatatataagaaacaaaaccttgaattgaaatcggtgattgggcatttgtggtatcgatacagagaaaagaaaatattattatggttttgagatcatcattaccagaacactccttccttccacactcgaaactttctgatgagaaaagaagcgacgttgacactgacggtggcgacggcgacgacgacggcaagaaaatagagagtggcgactgaaatggtttgagttgaaaaacaaatgaagtttattgtgacttttttcttcttttctaagaagatagccctaaattattgtatatttaaaagaagatattttaaatggtatttatgaaaaacatttaagatatttctactggttataagtaaaaatgttttttattattaaataaagttttttttttcattatatattgattattgttaggactttttcgtaaaataattgttcaattggtttggataatttagtattctagtgttgtagtgttaattttttgtttagaaatacgagcataatctcgtgaaaagttgccacgtggaatctgtctttgcaggaaaagataatttgatgaaagtgggcgcttgtctcaactcgtgtgttgttaactgcagaaagtgttgttaactgcagaaagaagaagtgcgaacacaacaaccaatgcaatcagagagaatgatcgattcattttacatgatgtgaactagagagaagatgcaaccgggagatggtctagttgcatattgtgcccagcacagtcaaaagataagcaggaccgagagaagctaatactggtcgtgcatataccgattatatgtgatgaccaagtatatctctcctacgataagtaaagatcgtttctttatgtaggtttggtctgaatgactaatgtgatcaaaggagaatgcatgcattcaacaataggcgtaaaggtccatcatgcgagtataacaccatagagcctgcgagctcgtgtgcagaatatgaacagacaagctgtgacttatcaagtcgcatatacgttgctgcaattaagtcaagaacgaacaaaattattcttcatttattctttaaacatttattttgattttaattctatcatttattgtaaaaacggtctaaactaactagttatgtaatcctaaaggatacttattttctatataaaggggtgatctaaatcaaataaactaagctggaaactattacctaaattggactaagcagatcaagctctgactgaactactatattctcttgtgttttctatatttttgctttcttttttatctatttggtagtttatactttgagtactcgctattctaagtgagtactcgcataactactagtgggtgctcttactttctttgaatactcgtattatttggtgttgtccaaattcctccgataacattggacgtcgtttgtgggaaacgtaaatatttttaagattttggaagagaatcgaaatggctacaaatcagacaaacacaaacaacaacaatggtgccttcaatgttggcactatcgatgttcctaattttggaggaggaacaacccttgttgatgccattataaaaggagtagggcgtactaatgtgactcccctcgacctatttccttaattctcaggccatgctagagaaacctcgacaccgatagctactatgggacagtttccactaatcacgctcgccatcacctctgagggtaacatccaactaataaccttgcattacacgactatgcaggaacggatgcgggtatttcaagcagagattgtaggataagattggattcaagcccgacatccaccacgagtcccaaactgatgtcgcactgatttcaagtaactaatgattaaacgtcataatgaacattctaacatgacttgtaatcgcagggaacggtcatgtgagaataacccaaccaggctcaatttggatcaatctaatctagaccttatacgcgatagaggccttgttgttcccaacacaaccaacaacctagtcggagggtggaaagactacgagaaaaggaggatcctgaatgacgcaacttgctcagtcgtgaacaaccgtgaaataaggtaaacaacatagaatctcattcctctttgtcgaggactaacaacctttcccacagtgtttacactaggtcaggattggtgttcactagattaggaggaaggtaccatgtgcaaacagacaacctagaagactgcctcaacgaagcatttctcccacgttcccagacttcgaggaaccacgatgtggaggaggaaccctgtgatccccttttggccgatcaaggtaggacagcctcttatgaatataaataatgcaacaaatgacgttaacgcgccacttgcaccaactgtgctcaacgatatggtgatacccgcgaacatagcagcagtggatgctctaccaacaagaaaataagtcgtacatgcctacaatcccacattgccaggagggattgatcaaaagaaccttctacgagtcctaaggatgatcaaccagcagagaaaacccatttataagctacatggaacgtctccctttactgaggaagtgcgacaagccaggctcttgaaaggctccaggctctcagagtcccttaaatataaaggtaccacaaattccatacattatcttgataaatttaacactattatggaagttgattaggtacttcaactggctaaatatcgtatccttgttgcgactctgaaggacaatgcacacgactgtttcatccagttacctaaagcatccatctcaatgtgggaaacatttgtagacttgttcctgacccatttccaagcaaccatgacatataaaccactgtatacaactttggcaaacataaaataagatgtaagtgagactttacaaaattactttaagcattttgatgctaaagtaactaaagtagagaagtcccccaagtcttcgcttgtcttcatgcttatcacaagggtgctaccaagaacaaatttctagaaaaaattacaggcgcgacatcttgaaacactagtcgagttctttgccatggtggaaccccacaagaggatagagaactcactaatagagctcgaaaagagaaaagacaaataaagatctctagtgcctagaacgcggtccaggagctcacgacataaaagttcaagaggatgtagtccaaggtgtagcccgagaagacgcagtcctacaaggcgtaaaagtccaaagcttgccaagccaccagccagtaaggagaattccccgaagcaaacaggaggcccacaattcgtcaattatatagaactttgtgtctctcgcgatcacatatatgccatcgaacaacacaagggtacttttaggaaattatttacaatattttggatgaaatttatatacctataatatattttctttcaatataacataagagattttacaaacaaaatatttttatatatcaaaagtgcttatttaacgacaattcttggtttaattttgatgttttgttaaattttaagagaatattcttttattttacagaatattcttaattaatttttaataatgttatttttaatcgtaaaaccctaacacaattctaaatctaaacttctcttcgtccctaccgtgcataacaaccttcagtaaaatgaccataatcactcagtattaattcgattgacgcgattcaacttgcatttggaagctatatttcaatgctctatcaagtca

SEQ ID NO: 984 - DNA, 8110 bp, Cannabis sativa
ttttttttttttttttaaacttgtgtacttggttatacaaaaaagaaactctcttaaccctaacaaaatcaagatgtaaaatagatgaatatggagaagcaaaataattaagttgttagtaatacataaaaattaaaaatatcaaaatactaattttctaatagcctttattttttttaatgaaaaccataaatttcattaaaccataaaaatagaccaaaataggataattttttttttcttcttcgtgaaattttctccatcaaacttggttcttgacaatctagggcttttctcttagtttatgcctgttcaacttctccttttcccctcctttataactttcttttcccttcattaaatccacttacttcctgttgccccacagttactcttttttcatttttctcccctgcaatgatgacgattatttctccgatattacagattcattccctcttcacattaattactctctaatctgcatttaattttgactgcgcatgttttatcacatttaatttggacttgggaaacctatggtaaatacttcatccaacgataccccatagacctgcgatcatccactttccaagatggcctctcatctctaggtattactttcatcccctgtattttttctatttaaagaatagggtttctgtttctggtaccaacctctatccttttgctccctgtttttattctaaatatgttgttatggcatcctcttccattaatcatccaaatcttctcaccctcacagacaaagaaaacctcattcatgacttcgaccatgttttcctaaactcagccgacagttttgaatctttctgcttagttattaggatcctcaccaccaaacctctttaccatgcttggattgagaaagtgatgagggaagcctagaccctctgattccctgttgaaatctctgattaccactctggtttgttcttcgctaattttcaatgtgaaggtgaccattgacgagtcttggaagatcagccatgtcgtttcgacaaatgcctgatgatttttgctaaccctgagggtctcgacactcttacccctaatcagttttgatacgttccattctaggttcaagctcacaataccctttttggacagaaatccccctaactggcccaatttgttgctgatgaacttagagatctcattgaggtctacaccttatccctgtttgaaagctttggaccttatctcagggtcagagtcctcctcgatgttactagacctctgagacgtggcatgaacattcgtttcaggaaaattgccaaaaccaaatggcttagctttaagtatgagggacttcataacttttgttacttctgtggtatgcttgaccacaaccaacagatgtggcaaatacctcaagaggtgtgatgattttgctaccccacctgagttgggatataaggagactcttcgcatctctgctagatatgtccttaagaagaatctgttagaaatattagtttctgaacttaagctcatattttttagtccatgataacgagtaggaagtccaaccccctcccactgaagctcctcatgtcccgatgggtttgaataggatcatctcgactctcccttcacccctaatcatggtcacccatctctgctggttcacgacccccttctagagacatcaccatcaatgagcccaacagagttgctactactactattttaggtgtcaagagatcgtttaccagacaaaatgcccaagttggaaattctatgaggagtatgcccaagcatgctatagctgttcagagtgatgaagctgtggttcctacccttactgcccctattgaaatgacgggtgttgctagacaacctcgttgagaaaaatgagccttgttagttgggatgctcaagtatggatacaatataatttatccattatttcaatcacaacaatcattgatgctctgtttacattgagtagggacaaaattatcgttttatcctttaatgcattttatccttaaacacttagatacttgtaaatgatatttcaagaaattaatatataattaccaaaatgaacattcaaccatttaacatgtttagctaagctcaaagaaaactatcgttttacttctaataagcatatagaagctataaatgttcatatctatgattaatacgctcacttaattgtattattgagttcccaagatgtaagtatgggcttatcctacgggtaagctgataacgaacaagttaaagaacctagacaatacaattaagctagagctctaccactttaagattgagatcaaatgatctatgatcaactaagtgacattgacttaaaaaagatataacagtaagtttatgatatttttttcactgtcaatatctatccagtttgatgtataaccaatatatctcatcctgatttactttacttataccctagaaaatgcatttcactaatccaagtgtaagcaaacctcatcactgattatcacgtcagagtaaatttaatgcactgataaatcatgggactaaataatttgaaacatataatcgcaattactttacactatgataacatcactgtaattgtgaataactatatgttcaagaattaaaagaatttatatattaaacttattatcacgtaataaacatgtgaataaaatatatgacaatgtcaagatataatttctgatcattattgaaagtaaataaaaatacaataaaattgaattttatttagagcataaaatttcaacatctttaggagaagatctgtcaaagactcatctattttctttctttcctccgtctattttaagtaaatctctagaaataatcaaaattaatttcatacaaaggaatttgttatggtacgaaactaaatatttatcaaaaaaataaaaataattagttcatttacttataattttttttagagataaaatacccagttctcataaattaataatagtcatttatgagaggaaaattctccaaccaaaagcaagtttcattaactctagagcatacctaactgtgagcaccatatacatttacttatatataattatgaaaaatttggtgtttagttaagaatatatagtttaagactaaatagatttagttgtaatatctattggaactttgatgaatcttttaacaaaatataaaagtattgtagtgtgtgtgaagttgaaagagtcccacaagggatatgaacccttatttataagagtatatggagtgcaactttggcatttgggtttgagccgcaagaggtatccagttttgtgcgaatgggtgaggactcacacatttgatccaccacacatatgagccgtccgtttgagccaggttaggttagttggtatgacactctattattttttattttttaatttaataaagaaacgtgtttaattggaactgattacttagtcgtatcagttaatgggacacgttcaaaccaactcaccccacgattcaaaaaaaaaatgttcttcttcccgttatggtttttcaatccattcgtctatataatgcgattgaactgataggaagaatacatctttcccatatcgaaaaaattcagttttcataaaaattaaaattctatctgcgatatcaaaattctttgggtgtattcgacggtgctctacagtgcaatgggattccgatacagtacgattgtgttattttatcctgggaacgatcggtaaattctgactgtttgcacactcctagacagtgccgcgaacgttttaaaaaaagcgacttagtccgtgactcaacccagaatttttcattcggtaatatcgttcctcttttaaaaaaataaaaagagagacgtatatataatattaaaactgaaaaaataatttttggaaattgtgaaaaaattacatatctaaagtttgaaaactcgtcttttttaaaaataaaataaaataaaatgatagttatattacaaaattaacgttttagctatattaattaaagaatgaattatgtcatattatttcattggctttattatatattcatcatcatcatcattatagttttggaacaagaacaatggtgtttgttctttttagagacaaagccataagtggagagaatagagaataaataaagtattaataaagaaacaattagatacggaatcgacggaaaaaagaaaaaaaaaaacgaattatgaatggaagttgagaaaagagaaaggaaatatggaatggaagctcatcaaataaagaaataaacatatgagagaattggatccttaattagcggaccatttctctaatcctctcactcctccctaaggtatcatcatttccacactactttattatgtggtcccacactatttttttaatgagaaattaactcttttgtacaaaaatgttaattaccactccacttgtagaaagtatggttacaaattataattagagaaattattttatacgttatttttttaatttttttttaaattaataatttgagttgctatagtagttgtttcggtaaatttttatgcaggtagctatgtagattttcattgcagtttaaattgttttgttggttgcttttatgggttgatatgtggattactataaaaatgaaaaaaaattactttaaattgttaaaaaaaacccttattattatttttattattattaaagtaatttacggcataaatactttcttttagaatttctgttaattattatataaattactacgtgtcaatcctttagtccaagtcattaaatttttatttaaaaaaaacaataatttgaatataccaatttgaaaatgaccatgtgaataatgatcataacggtcaagtacctttccagaaatataacttaagtattgttaccgataaaagttagacttaaatatttatttgtgagagtttaacttaagtatttatatactgccaattattcttattattattataaaatttaattaacaaaattacttgtattttaagaatgtgtttttaattgtatttataaaaaggaatgaaagatacttagagtaagaattgagaataataataataatattaatttgttgtcaccatcaataattatttaaataaataaattgatgcattatgtttggatattaaggtggtaaaattatattcaaatttggacagatttcaacaatttttcgttatgaaattgtaattgcatgagctcagctgcatgcatgacatatataattatgaatttgtttctttcgaaacaaagtgaaaatataattatacaaatttattactttaaatgcatgcgatttttaattattattattattattattattttttttaaaattattggtatgagaaaataattaaattacaattgcaacgtaaaagaaaatgaacacaacaaaaagagagaagaaagcaatctgagagagagagagatactgagaaagtgtcacatggtggagtcctactcagacttttagggttccttctccaacctctgaattcccttttctttttctcacttgggttctccacattctccatgaaagctcccattttcttctcctcaagcttttcttagtgcattcttgtaatatgaacaaggtggcatagcatcatacattgaagtgtttgtacgtgaatccttagttgaagttatagccatggaggaagatgataaagttagaaggcttaacattgttgtggtttttttgtgtcttttgatgaggctatgttatggtgtgacagaccccaatgatgttaaggtgttaagtgattttagagaaggtttagacaatgctgagcttctcaaatggccaactgatgaagataatgatgacccttgtggtcctccttcatggcctcatgtgttctgtgttggggacagagtttctcagattcaagttcagaatcttggtcttcagggaactctgcccaagaattttaaccaactctcaaaactatctaatttaggcctccaaggaaacaagttcagaggagaattgcctagttttagtggcttatctgaattggaatttgcttacttagacaacaatgaatttgatacaatcccatttgatttcttttctggtcttaccaatataagagtcttggctttggatcacaatccttttaatgccactactggatggtctcttcctggtaatttggcagaatcagttcaattaaataatctttctttagttggttgtaatttggtgggttcagttccagaatttctagcaacattgccttctcttatggtgcttaaactctcatacaacagattgtctggtgaaattcccatgaattttggaatgactttgatgcagattttgtggttgaatgatcaagagggtgagggaatgactggttcaatcaatgtaatagggtcaatgactttgttgacacaagtttggctacatggaaatcaattcacaggaatcattcctgagaatattggtgatctttcttcactaagggatctcaacctcaatgggaacagacttgttggaataatccctcaaagcttggccaaaatggagctcaacagattagacttgagcaataacttgtttgttggtccaataccgaagtttatgtctggtaatgtttcatatgcttccaatttcttttgtcaatctgagcctgatcttgaatgtgcaccagaagttaatgcacttctagactttcttcatcatgtaaattaccccgaaatgcttgtctctgagtggtctggtaatgatccttgtgtcggtccatggatcggtttgagttgcaatcaagactccaaagtttctattctgaatttgcctggacataagctgaatggcactcttagtccttcacttgccaacttaacttctctgcttgaaattcgcctttcgggaaaccatttaaatggcaccattcctgagaatttaactgaattagagcatttgagactcttggatttaactggcaacaatcttgagcctccaattcctaaatttcggggtagtttgaacctcatcatagatggaaattctttgttattgcttggaaaccagacaacttcacctgctgccataccagtgggaagtccattgcctggaccatcatcaacacctccctctccatctccatcaagtgactcattatcacactctccaacatcttatactccaccatctccagcttctgtttctgatgaagtagagtctcaaccgaaacaatcaaaaagctcgaaacaagttacaactgtggctggaatttctggtgctgctacttttgttgcttttgtgacactttttctgtctatatactgttttaggaaaaggaaaggaagcttagaggctcctaattcaattgtgattcaccctagagatcaatctgatccagaaaacatggttaagatagcagtttcacataacactacaggaagcttattcactccaacagcatctagttcaatcagcagcagtggcactgagtcaagacacattgaggctggaaatctccttatatctgttcaagttcttcgaaaggcgactaaggatttcgcgcctgagaatgagctcggtcgtggtggatttggaactgtttacaaaggtgaacttgaagatggaacaagaatagctgttaagagaatggaaggtggattaagtagtaacaaagtacatgaagaatttgatgctgaaatagctgttttatccaaggttagacataggcatttggtttctctcttgggttacaccattgaaggaactgagaggcttcttgtttatgattatatgcctcaaggagcccttagtagacatcttttccattggagaagcttatgtttggaacctatatcttggaaaagaagactcataattgcacttgatgttgctagaggaatggagtatctacatggtttaactcaccaaactttcatacaccgtgatcttaagtcttctaacattcttttgggagatgattttcgggccaaggtttcggattttggattggttaaacttgctcctaatgggaaaaattctgttgcaactaaactggctgggacatttggatatcttgcacctgagtatgcaggtatttctt

SEQ ID NO: 985 - DNA, 1479 bp, Cannabis sativa
acaaaatgagacttgggatgttgtgactttaccacctgataaacatgttattagttgtaaatgagtttataagatcaaattcaatgatgatgggactattaaaaggtataagccgaggcttgtggctaaagggtataattaacaagagggcttggactatacatatactttttctccagtggtaaaattggttttttctggcattggcagctgtccatggatggtttttacaccaattagatgttaacaatgaatttctacatggagatctccatggggatgtgtttatgactatacctcaaggatatagtcctaagggggagaatctgccaccgaatgcagtatgcaagctcaagaagtctctttatggtttaaaacaagcatccagacaatggttcaaaaaattttcacatgccttggtagatgaaggtttcactcagtctgccattgatcattcattgtttattaaatattttaagacaagttttattattctactagtctatgttgatgatgtcatattggctagcaatgacttgcctcagttgcaagcacttaagactagtctaaacaccaaattcaagcttaaagactattctactttcttcgtcttgaaatagttagatccaataaaaggatttttgtgtcacaaagacattatgctcttcaattacttgaattgactatttaggatgtaaacctgccaattcacctatagatgtaaacttaaaatcgtgtcatgatgataaagatacccttcagattcaactttgtacagaaaaataattagtaagttgtaatacttaaccatcactagacctgatatttcttactcatttaaaaaaaaaaaatgagtcagttcctagcttctccgcaaacaaaacatctacaagcagtgcaaagagtatttaaatacattaaaccctatcctggacaatggattttcatggttgttgcatcagatttgagttaaaggcctatacctactttgatttggcagcctatattgagacaaggagatccattaaaggtttctgcatatttcttggtagttctctaatatcttggaagaaaaaataacatactgtgccaatgtcatctgccgaagccaagtatagagcaatggtaaacactatttgtgaattggtgtggattttgtcactacttgaagaattaaagttggagcataaagagtttgcaatgatactatgacaataaagctattgaacatatagcatccaatccagcgtttcatgagagaacaaaatacattaagattgactatcgtcggattagagaaaaagtgtagaaaagaatgatcaaaacaactcatatctcaaccaaagatcagctagctgacatactaacaaaagctttattatttccatcacatttcaatatgcttaaaaataagattaaattagtagacatataccatttatcttgagggagagtattaggattaaatttgttagttaa

SEQ ID NO: 986 - DNA, 3299 bp, Cannabis sativa
atatatatttgtcactttcatcaactttgaaaaggccaacacaacacacacaactaccgttgagtactaactagtccttgtggaaaaaaaaatacccaaaatatttcactcagcaaaacacattgcatttgcaattgcatatgtcttgaaagagtcactacaaatctattccttctttttcaattaatattatctcattttatatcttcttaattcgctaatgtattttggtagagacgatataagatgtcaatttttaagtagcagtgtggctgcatgcatatacattttgattccttattacttcatcttcttatgtaaataatttttgcctatggctaataatcatgttcaattaatattaggattacaagttactctctctcaaggtttcaacatatgttttaggaaaaagacaaataatgataaaattggatataaagtacctaaaaaaacgagacattttccaataaagggggtgtgattcatgcatatccacatgtgctcgtaggtttgttttaaaccttaggacaagtatctcttgtcgttgatgaggctctcacggttgtctctctctctctagctcttctcttctgttatatatcttatcaaacgacaaattttggtgccccttagtcctataataataacctatacatatataaatgattggatggaatgattgaattccacatcactatatacataaagcttaaaaaataaaactccaatttcattatttgctcatatcgattactttctttctaatcaaccttttcaactactctcttgaatcatttcacttaaagataatcctactttaaacaatttttctattagcctttgtcccacttttcaccgtcaatttggtaactattcactagcatatatcccccatatgttttgtaaaatacagacccatattaccagttatatatatttattataaacattattctatgtatattatgatattcctacgtatggacatttctatattcacagaacaatataatactaattattataacatttaaatggtccaaacatagtagctaaattcttttgtgtaacatatatatttctattatatatatcatcaaattaattgctaacattatactatacatgcacatgaacatgaatcatatgtaagatgtcaacgagtccccacgtgactttttcatgttccatcatacacccttaattctcatcatcaaaacaagtaacaaccaactcaatctctttacaataaattctctaatatatgtttttttttctttctctcttttaataacttactatgactttttgacacttatcttagatcataaccgtgaattaatataaccattgaacacttctctgatcaaaaccgtctattaatatgaaccaatataatctcattatcacacacacacacaatacgtacttattttcttattatttttgtttataaaagaaaagaaaagaaaataaataaataatgagtctctcttttcttacagattttctctcttactcacttacctatccccttccttaggcttcggaaaaaacgaactctactatgcctttccttccttttctttctttgtcttttcatttttctctttcagttttgaaattttctaactagccaaacacaattctgtttattcatttttctctctttatatatggctcccgcacaaattgagataatcaacacggcatatcaagccatgaagccaccgaagaagccaccgaccacaaccaagctcgtctgtttctccttcgccgcttacgctaaaaatctaatccagaatctccgctgctccgaccttcccgtcgccggaggcctctccaacgtcgaattctcctccatcgagtcactcttcaacttcaccttccctcccgatctccgttccatcctccgtgaaggtcttccgatcggctctggttttcctaattggcgttcctcttctcatcaacagcttcacattctcatcaaccttccgatcctcggtctcctaaagcaaatctctcgaaggaatttctggttcgaatcttggggaccttttcccgacgatatcaatcaagccttggagatagccaagaagttcttgaccaaagctcctgttctcgttcctctctaccgaaactgttacatcccgtcgatgccgaatgccgccgggaaccctatcttctacgtcgacggcgatgaggtttggattcttagctacgacattaccagattcttccaagatttcgagttcttaaacggcggcggaggaatccgccgctcatcggagtatacaagagtcaacgctccggcatgggcggcgacgacggcgcgtgagatcgagttttggacggaggttgcgagcaagaagcggacggtgaattcggcggcgagtagcacgtggtggagccgggacgaggagctgggcgggtgcttggaggaggtgtttcagaggttgagaggaggagggtggagggaagaggaggtgagagagatgatgatgatggacggctacgatgacgacaaggaggatgatcagaagagggaggtagttatcgagtgcggtgaaggtgtaggaggagtcgacttggaggaggccatggcgtggcacgtgcggacgctctcggtggttttgttacgtgcggggtggaccatggaagatgtggtgtactctcttgatcttccaaacgacgaagaagaggttgccgttttggatgagaaaccaacgacaactactctccaacctagccatgcccaggattttcagcttcattgtcgttctaatccaagtgagagtaacctccagcagtcgatgcacttgcagtctcttgaggtttgactttcgggtggggttcacaattttcatccttggccgttggatcacttgactttctttctacagttcatcaccacatacaaaatatcattaaattaattgattgtatttgtatatatatttttggccgcataataatggttataaatttataatgtgatataaaaacatactggttgggaagtgttaggaataatttcagtgagttaattactaattaatactgattggaaaagggccaattataaagtaaaaaataaaaatctaaaacgagatttatagaatctatgtagatttattagtcataattcattcaataaattaaggaaaaaaaaaagctataaatgagttaggcttatttgtgcataataaatacttcattcatttaaagaaagatatttttttttttttgcatattatatcttagtaaatatttgatttttttttaaactaagtaat

SEQ ID NO: 987 - DNA, 4601 bp, Cannabis sativa
acgaaaaggggtaattcccatttttagtttggatctcaggtacaaaaaacgatcagtggtaagttcttttgtcaatgcatcagcaacttggtccaaggcaggcacataacgaactgataagtctttggccataatctgatctctaacaaaatgtagatcgatctcaatgtgctttgaacgagcatggaagactgggttggctgctagtgcagtggcactttggttgtcgacccaaacaattgggcagtgaggcatagagacctgtagttcagacaatagagacttgagccattgtatttctgcagtagcatttgcgagagccctgaactcgctttcggtgctggaccgagcaacaacatgttgctttttggcagaccaacttacaagattatcacctaagaagattaagtagcctcccgtggaacgtcgatcatcgatgcagcttgcccaatcggcatcggaataggctgttagagatggaaacgaactcggttgaatgtgaagaccaagagaaattgttcctttaagatatctaagtacacgtttacaagcctcccaatgtgttgaagtaggggcatgtagaaattgactgagcttgttgactatgaacgcgatatcaggtcttgtgaaggacaaatattgaagagcaccaagtgtactcctatacaatgtgatatcctcaagtggctcacctatattcaaagccaactttgctgcagcacttgtaggattgggacttgcttttgctccctccatatgtaatttgacaagcaagtctgttatgtactttgattgagaaagaaacatgcctgagtgatctctgtgaatttcaactcccaaaaaataatggaccggtccaagatccttgagagaaaatgccatatttaaaccagaaatgatgtgagaaatcaagctaggattcgggccagtaatcagaatgtcatccacgtaaaccagcaatacaacaaggtttgaacccgtgccatgtatgaaaagagaaggatcagacttgctgctatgaaagccccattggtaaagtgtgtgtttcagcttgtcattccacgcacgtggcgcttgtttgaggccgtagatggctttgtcaagttgacaaacatgagatggatattgagcatcttcaaatccttgcggttgaagcatatatacggtttcctcgagctcaccattaagaaaggcgttactaacatccaattgttacactggccaagtgttggaaactgccatagatagaacaacccgaatagtagcaggcttgacaaccgggctaaacgtttcttcaaaatcaatcccaggtttttggagatatcccttagccaccaaccgtgatttgcacctatctaaggaaccatcagcattgagtttaacacggtgcacccatttatttccaataacatgcattccattcctgtatggaactagatgccaagtaccagcttttttcagagaaccaatctcagattgcatagaagcaagccatttgggatcttttaaggcagatttgagagatttgggctcagttggaagcaaagattcagggagagggtgtttcgtggcaaggtaggatttaggctttgaaatgccatttagagatctagtgatcattttatgtgtgcgtgtagcagtaggtgctgcaggagcttgaacaacaatgtttgggatatctgtgtgaggcaactcaacagggagaggctcacttatggtggcagggggcaaaggtggggaaatatgacaagcaacatccgatgcaatgttaggcccagaagtggaaggttgctggtgtgggatagctgtagcaatgattggttctggctcaggaagattgtgttgaacatgttgttcatttgttattgttgcagcagtattgggcagtgttgcagcagctctggtgcaattttgccgaggcactgaaggagcaggttgttgtatagatggctcagcatttgagggttgtgatgtaggaggcaaaacaagtggagacacatgattagaagatgggaaaaatactgttgtagaagaatttacagtggattgagttgaaggtacctgagtgtttgctgaagtgtaatgagcagggaggcaagactcattgaataccacatgtcgagcaataaacagtcgcccatctttattctcacagagatagcctttatggtgattagaataacccaagaagatgcattgttgagacttgtactccattttgtgatgattgtatggtctcaaaaatggaaaacatgcacacccaaaaggcttcaagattgtgtaatcaggtttgttgccaaaaagacattctaaaggagaaatatgtccaagaactggtgtaggtaacctgttaatggtataaactgcacactgaaaagcaaaccaccagtaagtaaagtccaaacccgattgagccaaaattgttagaccagtttctgtgatatgccgatgcttcctctcagcacggccattctgttcatgtgtatgaggacaagagtgagtgaaaagaattccttgatccctcaaaaatctagcaaaagttctatactctccaccccagtcggcctgaacattctttatgggcaaattaaattgcttctccaccatacttttaaatctaataaaggtatcaaaggcctgattcttttgaactaatggaaaaatccatgtatatctgctgtagtcatctaggaaatgcacataatatctataaccatccttggctgatatatgggagggaccccaaagatcagtgtgaatgatttcaaggggttgggaggctctgctaagggatataggaaagggctgcttgtggtttttgcctagttgacatgcattgcaaaattgcaattggttaatggtgcctgtatgaggaacaaagggtaggatccgtgacataatattgggtgatggatgcccaagttttaagtgccatgtgttaatgtcatttagctgaaaagtatggaaaacagagggatacgaatcaaaggaaaactgatcaattttattcatttcagcagtagtacaattgtgagattgcaaaatattgcattgacaggaattagaaatacaagaggtagactcaatagaggtagcatgacactggtatggttcttgagaattttggcttgatatggtgtctcctagctggtacagcttgttcttaagtttccctttgagaagaactctccccgtttccttgtccttgacaaaacaacaagttttgtgaaattcaagaaagacattattgtcattagtgagctgagaaacactaactagatttttggttatagctggtacttgaagaacagaatgcaattgtaaaggacaagtagaagaagaaggtaaagaggtggtaccaatgtgagaaatgaccaacttcttaccatctccaacggcaacagcttcatgtccattgtaagaggtggaggattcaagattcatgggattattggtaatatgatgagtggctccggtgtcaacataccagccctcatcatcaccaaaatctggaacaaacgaagctgagaaggcctggggatcatagtcccattcttgttcagtaacaaaagcacgaggaggcacagaacctggtttaggggtgacccatgacttgtcaaaacgatagtggcaggtgggtgctgtatgaccaaatcgaagacaaacctgacattgtggccgagtagcttgagttcctggcttaggatatcctcgacccatgttctttgtactgtgaggagggcgatagacattagatcttggattcccataggttaaattggcctgcattttcatagctatttcattcacagcattgtgattctccaaacgactttcgtgggagagaagaagggcctgaacttcttccagagaaagaagatcacttctcgccgtaataccagaaacgacagaatcgtactcgggtcccaatccatttaaaagttgcagaattatatcttggtcattcatggcagaacctgcaactgctaaagaatctgcaagattttgaaccttgtcagcataatccgatatcgaaaggttacctttacggatggtggagaactgattcttcagctgaaggagacgcgcacgagattgactattaaatcgttgttcgagggctttccacaccatataagaagattggaaattagcaatagatgcaagaactccttctgacatagaggagcgaagccaggatagaaggagttgatccttctttcgacattgagaaaacataggattgggactgccattaacgagagtggagggaggaggaacaccgtgaaacaagatctcatcaagctcgtgacctatcacagtaggaacaacctgtgatttccatgccaagaagttgagtcgatctaatttgattgtgagggaagaagataaagaatttgaaaaaggattccaagaaggaatcgctggagttacggtcgcagacggagtagcagaagcagagtttgtagacggattttgctgagccattggctcttgaagcggaacggaagctgaattcggagcaggatcaatcgaggaggactccattgacgtgagtcagtagcaatctgataccatgtaacaatggaaaagaagaagaa

SEQ ID NO: 988 - DNA, 2544 bp, Cannabis sativa
tctcataaatagaataatttcacatatcttaatcttttaatatataaattaattaaaatacaatatatatgatcagattcacgatgatacacaattagaaaggacaacatacactacaaaaaattttacttaattttaatcacaatgaaacttgtgactaaaataaatatagaaagtattttttttgaattctctccgtacaagttgagtggtgctttgctgggtcgtacggtggtgcgcccatcgtacattttcgtgcgtccggccgtatggctcaaggtggtggcctgctaccttcaggcatcgtacaagatgctttagggttttataccctgccacaaaaggaattttttaaaagggattacataacttcctctgtggcgccgtcaatctggttctttccttttggtttcgatttttatgcgttttcagtgctttcttctgcaacaaacgccgttctgattttctgggtatcggtagaaactgggtttgaagaaggtgttgtcttggtgcaaatggttgggtcgaatacgcaagcagttgaggagctgattgaggaaatagagaacttctgttttgatgatttctccattcaagtggaacctgataatgatcttgcccgtgatacagtcgcgaggacggtggtgggccgattctttgccaaacgtggagtgtctctaggtaccttgaggagggccttgtctgggatgtggaagcttacgccgggatggtgtttacaagaaccttctccgaagacctttgtgtgtcgtttgaatagtacgaaagaagtcaaggcagttctggagaatgggccgtggaatccttgtgggggttttttgctggtctcggctctccctgaaaatggtgactggaagtcggctaatatggaggctctggatatttgggttaaagctcatggggtgcctttgccattcatgaccgaggagcgcatagccaatatggcttctcgaatggggactcttctccaagccaataaagtccgcagaaatggtattcttgctcacgattaccttcggttccaggttagaattaatgttaaattttcgattttggctggggtgtctttgactgatgataggaagaagaaatggtggtgtcatctaaaatacgaacgtcttcctattctatgcttcaagtgcggagtgatcgggcatgatgaagctgtgtgttcaggacgtaaaagaatggtttcggttcaggacgggcgatcagtccctctttttggcccttggctccgagatgggtcaaagctggaaaatggttttgcgcttcttgaagtggatgatattggtgatatacagagattggaaaaggaagatggccctgtgtctggtgagacaggggtctcggatggcgctgcgggtgcggtttcgggcaattatctgggagctgtggcttctccggttggggtgactcgggtggaaaagctgggaatggagggtgttgttactcagaattctgaacaaaccttctctgtggcttataatgattatgtggatctatcaaagttccccactaaacatgttatgcatgtagctaatattttcaaagagaaattgggtcctatcaagtttggtgctacttgtggtaatgaagaagagaggcagtctattatggcgtcggttcaaaagctcaataaacccaagcttgttgggccgagaggtattcctaaaccccctatttttggtcgtagttttaattcggataaacttgttggttctaaaaggaagaaaagtttggggaagtcatctcgtagaagtgattttgtggctgagagtcagggggtgtgttgcatccaggtgattgataagacaaatatccctgatgtttctggggagactagtggtgcgaaccaaagtggtgggactttcactagatcaagtggggaggactcggggaagagataccagattgatatggaatccttgcggtctaaggaaggttcatttggttcgattttggaattgggaaatcaaaaggaggccgtgggcatccctattgataacagtggcggtgtaagggtgggagttcaacccggtttggttactacctctgcaccggctattttgcctgtcttggagaaggaggccgagtcggttatgtttgatgctagagctccccgggaatgtcctaccttgggagacatgaagttgctgctcaggatttttctatggccgaggaggcgggccgaaacatgccccccaacgcctcatgaaactcctttcgtggaattgccggggattggggaatccccgtgcaataaaagcccttcggaaccttgttgttcaacaagacccggatgtgcttttcctcatggacactaagttggattataggcgtatggatggagtctggcatcggctggggttttccggtgcgacagttgttggctcggttggagcggctggtggcttatgtctttgttggaaagagggattggaaattgagattgtctcgacctctctatccacgatcctgacccgtttctcgagagtcctacatggtccggtgtggtcttgctat

SEQ ID NO: 989 - DNA, 2273 bp, Cannabis sativa
actaaacttcacatagatactaagccaattaactaattatatgggctaaaacaatgaagaattattcatcaaactcatattttaataaaacaaatgtaagtccaaaataaaggtgctatatagatagccccatactttttcttttgagaaacatgaatcttggagttgaatggtatttttagtttcttgagagagttaatcagtgactcaatagataaaattccattgtttttgtcatttggtattgtatgttgatttttattaatttaaagattataatcaatttttgggtacttggattggacagggtttaatgctgctgttgctggttgtttctttgctgtggagtcagtcttgtggccatcaccaactaatccttcttccttaacacttaccaataccacttctatggttatactcagtgcagtaatagcttctgtagtttcagaagttggtctgggttctgaaccagcctttacagtcccagagtttgactttcgttcacctactggtaaaccatcaatatctgttcaacattgaggttttctttgttgtgtacatcttttaactattagaactattctgttatcttttcagagcttccactatatctattgctgggagtgttgtgtggattggtgtcattggctctatctaagtgcacgtcgtacttgatggccattgctgatgacattcgcggtgtaccgaagattttgtttcctccattaggtggcttaactgttggcttgatagcactgggatatccagagattctttattggggttttgagaatgttgacattttgttggaatctagaccctttgtgaaaggcctctcagctgatctattggttcagttggtagcagttaagatcttcacaacctccctatgtcgtgcctcgggattagtgggcggatactatgctccatctctttttattggtgcagcaacaggaatggcatatgggaaaattgtaagctctgtggttaatcagcctaatcctgttattgatctctccatcttggaagttgcatcaccacaagcatatggcctggtacgaagacttctgcttcaactagactttatacacatagatgtatgctaagcccattaactattgattactaacaatatgacctaacacagcaatcacatttgaggttggaagattggctaagatttatgctgaaaacataatatattttccatcattttcaggtagagaaaacctctttgcttgtggaagtacattactgtgctttcctttgtcctttaagctaattttcaagtgtgatttctgttggggaaagttttgaaatatgcactattaataatcatgccatggaacatatattgatgaaattcttgttgtagagcaaattagcttgagcatcatgagagtttccattttcaggttgggatggctgccactcttgcaggtgtatgtcaagtgcctcttacggcggttttgctgctctttgaattgacacaggattatcggattgttctgccgctacttggaactgtggggttgtcttcatgggttacatccagacagtcaagaagaagagatgttcagggtaaaaggaaaccgaaaccgaaacaggaacaaagtcctaatatgcttcccttcagtgcaagtgggctaccttctaattatgctctcatgagaaaggaagatacaacaagtgacctttgtgaaattgaaagctcactttgtatagaagattctgatactgaaactgaaaatttagaagcaaaaatatgtgtttcagaagccatgaggacaagatatgtgactgtgatgatgaacacattgcttacagaagcattgactctcatgcttatggaaaaacagccttgtgctatgattgttgataatgataatatattaattggtttgcttacacttaaagacattcaagatttcagtaaatatgcaaaaacaagaagcagaatatccaaggttgttttctaggactaaacctgttgtcaactttgacacaatctctctgtgaccaagctaccttaactaattggtttttcatttttgcaggaggttttggtatctgagatgtgctcattggatggaggaaattgtagggtaccgtgggctgcaacgccgagtatggatctactctatgtacagatgattatgaataagcgcgggatagatgaggttccagttgttaccgagcaattcgaagatcaccgagggcacctagttggccttttggacagagaatgcatcagtctaactcaaaggttagtt

SEQ ID NO: 990 - DNA, 11758 bp, Cannabis sativa
  modified_base (2553)..(2555): a, c, t, g, unknown or other
  modified_base (9717)..(9718): a, c, t, g, unknown or other
  modified_base (9747)..(9748): a, c, t, g, unknown or other
gctaaggctagccaacacatgctaaggctggccaacacatgctgagtcttgcaaacacatgctaagaaaggagttaagcaagtcgccaagaagctgcacaaccatgtctggccggccataggaatcttatatggccaaccagggtttaagcataagctggccagcgaaaaggtgactgttagaccaaaaaggacttgttcgaccaaggaagcctgacctttgcaagcaaagctatacaaagaacctgctaaggctggccaacacatgctaaggctggccaacacatattagggttgtccagcacgtaccaaggctggccagcaagtaccaaagtttgcagggacatgggaaagcttacagacacatgggaaaacttacatgcatatggaaaatctggcaggcacatgggaaagttggcaagcacatggaaagactggtaggcacatcccagagttacaggagcaatacctggccggctaggcgctgaaaaataaggataggatgaccaactcctcttctggcagaaacttttagtgtctttgtagctttcaacttggatgtacactctcagctacaaattggcttcaacaacccatgaaaatagtgttttaactttgtatatttacctattctttaggaacaattagtaggttattttcttatatatttaatatgtaacaaataggtgatatctcctcattttaaggaagattaacctactttgaactagatctgttgtaagccctgcacgatataaagggcattaggtctcactcaaaacctaagttaggataagtcattccatatgctgcaaaggctttcttaagcctcatacacgtgctcctctttctccctctctcaagtctcatatctcatctatcccccttagacactaagtcatttcttcttcagtctttcataagaaatcataagttcttgatctacttaagcattgtactcactattgtaatattcaaagagggctatagctagaatcataaggttctcacctatgatttgcatggtattatctctagaattaatacaattaaaaggagagtaggtcattaacaactaaataaggggggaaaaccattataaatatatgtgtctcttttatcaattattattcttgtttacacgtggtgattgcctatcataaatacagctccgctgctggttggccaaattctgagccaacaatttggtgcttccattgagagcttttgtaatgccctaatacttaggcacgctacagtaatttttcaactatagcgccatctttgctaatcaaagaaattttcttaaagattgtgtcaaattaaaacttttagtttaattactaaactttataaaacttttatacatttatttataaaagtcgggatcccatatttaaacttttacaaaatattcaaaatgtatttagtcgggtcacacaacaactacaaaataaaaccctagatgtcccaagactgaatactccaggtcaagccgctatgacatgtaaaacatcaccctagcttgaagctcactcctgttcagccttcacctttcctttacctacacatgaaagtagaactgtgagtcgatagattcagtaagaaaagtatataacaaatcatataataccgacttgtatctaagtgcacatacacctatttacaaggtttaacaaataagtaagaacgttctttactagggtacagccactgtaccacatacactacgtacgacactgcacgagggttggtagggtttgtttcttaccctgagtaccactaagtgatataccacatacaccctgtactttcccgtacttgtactggtgtcaccgtaatgtactcttaaatactatacattataccaatgcactctgtaccacttctgtacaagggtcttggccggccagcactatgctaggtagggcatggccactcattatcccatgattggttggtacagtcagtgtgttgataggggtagatcgcaccatttactagagttaggtggatctagaaatctgaagtgactagactcacttctcaagttgttgttttaaatgtttccaaatgatcccagacctagccagttgaagattagcctttgggttactttctccccaaggccccaggacgggtgttcaccctggtggctagccaggggtgtaccattaaggggctggcactagacctttatggcaaggtttgtccacatttgagtagggcaaggtctgtcctggttcctgaggaacctggttggacagtctgttagtagactccccccagtctatcgactagtctcccttggagggggtctctaatgagatcctgacctctgcaagcagttctctcattgatcctctttatcagtttggtagcttatctatgacgccggtctagctctgcctagtgagatcagaggatgtactcttgctcatccatccatctaagacatttgtgtctctattctgcgaatacattgcaaccaacatcgcgtggttcttcagtttggttgacttgacagaggacttctctaagtctggctaactcnnnatcttctcccaagtctacatggggcttgccaattcttggccctatctctttagcataataccaaggactaggtccagttgtggtgcctgggggctgctccatgtgggtccttccttcaatgggaggctccagtggagggtcctccttaggaggcataggttcattgttcagatccagaatggtggtgtcgaccttgccagctatggtggctagattcgtggtgcctgttgaggcgacagaagtggtcacatctgttgcgctcgtggagattctagttgtgactagagcatgaacatcgggatctatggtcatagggtcttaaggaacacctgataaggcagatgccgtagctaaagttcaccttgtgttaaccatgacgttttattagataaattaacaacccgctctcaattaaagcactaaactattgacctcaaatttggccaaccagtagtagagttgaatttaatattgatgcttgccacgtgttacacaattagagtataaaagtaaatagacacatgattttatagaggttcgacctccttagtagcaggtaatgacctactctccttttagttgtattgatactagagataataccacttagattactataataatgggatttgaagtggctctcttaagattacaatgtgaaaatggaaaatctaaagtgagaatagaggacagacttgtgagagagtgagaagagatgaggtatcagacttagagtttaaggcttaggatttagagttagggtcttagggcttgactaatatagaaattcttacaaccctaatatcccttataaataggtaaataaagttattatatacataataaattaataaaatacaaataactaaattgctcttcaaaatagggaggttgttgatatttttctcaattttcttgggttgtttaggcacaattagtggtttgactttctatccatggatgaaagctgcacaccaaaacctgccaggccaaaagctggccgaccatgtacctgtagggtgcaaactggctagccatatgatgtctagaagttgggcagactatattggacataaggtcagcaaggggtgcccggttcttcatttttcgtccttcctaagtacttggacctctcgttgattgaagtgttgagtagatagcttggccttcttattggcaagatgtactcccacatggaattgatacttaccacgtggacataccacgtcaggtgaaaaaaaattgggataatatatatatactactaacatctcagatgagatgtaccaaggtatatgtaagtactctagctatatattattttccctatattcaagtaatatagctagcagtccaatggaacatggatatgatcttttctttctagcctatatcacttcaccatgtaatgcccgtgcaaatttgacgaaacaaaaatacataaagtgtttttcaacaagaagaatattaaacatcaatgatatcattttgactttgaaccccacatggtcccccaatgacagcgccaggctactgtggggcacccaggtcaacataagttggtcaaaagcattttggtacacttttttgaggattaagtctcccagcattttttctatttttgttagtggtgaaaatacaagtgcttttgggaacaaaactaaggggggcagatgaaaagtttggtgcccaacacactaggagacggtgccctaggcgccaaggttgacatgttccacgcaaacttcttgttttgttaatctgattgtgattctgtttcaagcattcttctttgttttgttccctaaacgatatttaaggctttgaataattagaataaaatatcactaaagtggtgttttagcccctaggtaccaccatgcaccacgctgggtgcccaggttgacaggtggcatggggattagtgttttctccatcaaatggcagtgtcatcctgggcatcagtcttattttgtcgccaaaataagatttggatgcttccgcaagttaatatctcatgtacacgtgtcatgcacaagtctaacaacacccagacgcactagtgatcacccggtcatcacctagtcgtccccaatgatcactcaggcacctctcgtgcgcatcgagtaaaattgccaagagatggtgaacaagttcaacgaagtcaaagaatggagtaaggaaagctttcatatcatccatgcatttcaaaatatgcctaaggcccgagaaaccaagttttgggcattgacattttatgtcaacctggtcgcctaaaagtcgatctggtcatccattcagggtttgttaatttttcagaactgcgcatcgcatagtattttggcaataacttacttaatttttatctaaatgacaattccagtggcatttgaattattttttcaagacgtatctaagctttacgtcctttccacgattttgactttttgggtgccaaaatgggttttcaagtgaatccaaagaattttcctctgaatttcatgcgaattttctattattttgctgtaaaaaaattcgacctcattaaaaaaaaaggaataatagattttctctgggtttttgctctcgcagctgtgaagctggagctatggcaaaaacgagatcaaaggttcaggggaagtcaagatcaagatcgattagcaataaagggaagaagaaggatgtgcgagcagagagcgatgctgttcgagatggtacgaggttagggatggatgaaatccatgaactgacaatctcggaggaagaggagatcgatattgattcagcaatgatcgatgtgttttaggcgccactgtctcctagagcatctctgaagttgattcagaggcaagaagatatcagaaatgactttgtgcactttctcaaagtgaacgagcaatgtaacagtgacatccaacaaggtaaaaccccaatacctcctgttctgcattctggttttgttgtgcgaaatttagaaaactctttcaagggagaagaacagaaacctaacgtgaaaataaacttagaggatattgaggatgaagtgatgttttggatgccatccattgtctgctatgttctgggatcaaaccctccattgcagataattgaaggttttgccaagcggatttggggagataaagttgatagggtgaagctactatcatttggcatatacatcattagatttaatagtctgaaattcagggatcaagtacttaatgggggattcattttcttcaataggagacccgttattatgaaaccgtggaattctaatgacactttcaagaaagaagatgtgaaaaatgttccaatatggattcaattggaagtgctagagctaaaatactggggagagaagtctttgtttaagattgtaggccaaatggggaaaccgattatgattgatgctattactagagagagggagcgattgagttatcctagaattctaattgaagtgagtatggatcaaacactccctgagatgttagaatttgaggatgaacatggatggaatacctctattggagtgaaatatgaatggaaaccttccatttgcacacactgttcggggctgggacatgtagcagcagagtatagaaagagtactgggggaaaaaagaatggattgtaaaggctgatcatagaaagaaaactcaggtggatgaggacggttttactaaggtcacagggtccaaaaagattgagaaagcagaggggaaaaagcctgaaactcgagtcaacaattcttttcaagccctggatacagagcagagtatagaggaggttgaggaaatcaacattgacaatatggaagaagggggagaaccctctttgataaatggataagatgatatgttggaatgtccagggagctaataattagcaaaaacaacacttaataaagcaatttattaatgtgcaaagagctgattttgttgggctcctcgagataagagtcaaggccccaaaacttgggatcttgtactcaaatgtttttgaaggttggtgcttctcctcgaatattgcatggcacacaggaggaaagattgtaattgcttggaacctgctgagatttattgttgatattcttagatgcacaagtcaaattatgcatcaaaaagtatcaacaatagatggtgtgttttctagttacttaacagtggtttatgcatctaataatcaggctgaaagaagaaatctttggaagagcatttgtgagatcagcactaaggaagattggtgtatcacgggagactttaatgatgtcctagcacaggaggaaataattgggaacaaggtacggttttatcctgactcagattttgggaattgtgttaaccaatgtcagctggaagacatcaaaaccagtggaaattacttcacttggtcaaacaaatagtaaggagaggacataattttttctaagatcaatctggtattagccaatcatgactggttaatatgaacatgctgaagtggtatatttgaatgaagggacctttgatcattccccatgtgtacttacttttcatcctgctggtattgctggcaagaagtcgttcaaatattttcgaatgtggcgatctcattcaaaatataaaagctatcttattgattgctggggtcaaaagttaaccggttctcctatgtttcagcttgtcacaaggctgaaacaattcaagctgatgttgaaagagctgaataaggcggggtttaataatttgcaagccatggttgctaaacaccaataggagcttgatgagctgcaaactaaagtgcaccagcagcccctaaatgaatcactgctagcacagataagctaattgaagcacaaaaaaattatacttcctttcttcagcagaaagctaaatctgcttggattccagatggagatgcaaacactgctttcttcaattctagcatcaagcagaggttaaggcaaaatagaataatctctatagagctgaaggatagaagtagaactcatgacccaaatcaaattactgcattttccttaatttttataaagggttgcttggttctaaagtggaaaacagaaggaaggttcatcctggggtgcttgcaaaaggtcctagattatctattgagcagaagaacatgttgcttcaggaatttactaaagaggaagtgaaggtggttgtctttagcattcctggaaataaatctcctggaccggatgggttcttgagttttttctatcaagataactaagattacattggagaagatgtttctggtgctgttctatccttcctgcagtcaagtaacattctaaaagagataaattctacaataattaccttaattcccaagataaaatgcccaaatacagttaaagattttagaccaattgcttgttgcaatgttatttataaaattgcaactaagcttttgagttctagaattcggaatatcttacctgaaataatctctccttctcaaggggattttattaaaggaagatatattgggcacaatatcatgatttgtcaagacttggttagacattatggaaggaaagcaaataaaccaagttgtatgataaagttagacctccaaaaggcatatgacactgttgaatggaattttatggaagagatgctagtaggacttgattttcccaagacatttattcagctcattatgaattgtgttagaactcctaaattctctcttatgttcaatggatctcttcatggattctttgaatctaagagaggacttaggcaaggggatcctatgtcacctcttttgtttgtcctaggcatggaatatttgtctagattgatgaagaaaattggggggaaggatcactttaaatttcatagtggctactcaaatattaagctcaatcatctaacttttgcggatgatgtgcttttattttgtaatggagacatgaggagtatcacctatatgctacaagctttgaagcttttttcaagaacctctggtttatgcccgaatgcctctaaaactgcttgctattgtagcaatatgtctcaaagagaggtccaacagctgctggttctttctggcttccaacaacaggtattgcctttcacctatttggggattccaatctcttcaaaaaagatatctggaaaagattgtgaattacttgctaaaaagatgactgctagaattaagagttggagcttgagaaatttttcctttgcagggagaataactctaaacaactcggtgctcatagccattcaagcttactggagtcaaatgatgatttagcctaagaagattctgaagaacattgaggctatctgtagagcatttctttggaagggacaagctacctttcaagggggtggtgcagtggcttgggaagatgtttgtcaatcaaaaaaagaagggggtttaggcatcaaaagacttgaagagtggaatagggctgctatgtgtaagtacatatgggcaatttcaaatcagcaggaaagtttgtggttgagatgggtacatagtgtgtatatcaagagagactcctggtggagttacacaacttctatccactcgagttagtattggaggaagcttgtaactcttaaggaccatttgaaaaccattcagaactcgactgaattccaagagaaaaaatatgagattgctgcaggttatgagttactcaaaccaaaccaagataaagtttcttggagacgagaggtttgggcaagattaaacatccccaagcatagcgtgatactttggttggcaatgttgaatatattaaagacaaagtagaggcttgtcaagtttggaattcaaattgatagtggctgccggttgtgcaacactcatgtagaaaatttacaacacttatttttcaaatgctcatttgctgaaaagtgtttacaagcagccaaaagctagctgatgtggggctcggctgctactgatcttcctatgattttgaggtggattaggaaagctaaaataagcaggtttagaaagaatgtcttggctgctgtgattccaggtctggtgtatagcatttgggaggctagaaacaagctagaatggcaaaatgagcaaccggactgtggcagagtgatggaggctgtgcgatggagaatcaaaacccgagttactatgttttgcctaagaaattgagttgtanngatagggattggttttatggattgtaatnntgtaaatacaatatttgtatagattcaaatattgaggctcccgttttattggagtgctcttaggttgtaaattggtgtgtgcaatatcattctctgattcttcaaaaaaaaaatggacctcattccctataaaaggagagctcctcaagctaattattcaatctccattcattctaaaaggttagagcttctctctcctcactatctctctagaaattatgagctaaagcttttttctctagttctcttgtaaggcaatttacttttgtgataatagaagcttgaagtagacataactctattaccgtcatgtcacgcagagtgaacaactataattggtggtattctctttatttttttgttattccttcagtggccgctaccaatatttagtcggtcgcttttcaacgttaatacttgactacttgcaagccttacctcattctttaaaagtgtcttagggtccttagggagaccatgcgaaccctaaaatgatttccttgtcacccttggacttttggtcaggtggtaacacatgttcatctcgtaaacgtggataacatttatctccaacttttttttaatcttgtaaatgagagaaggctgcttatttttccccgatctaggatattactcctcatgtccccatattaattattaaatcaaaatgtgtaaaatctaatattaaaatgcaccaataatagcatgttagcttttgtgtggttggcatctgtaaaaccataaaaatatctctctctatttccttgtattattttcttgcttttatagtacggtgacatgtgtccctcaatgagtctcctctttattataaatatggttgtactttgtactcatttctttgaggaatagtaatacatttttcattccttctgacatggtatcacagccaaaaggctctccatggcatcaatagattgtactagctctaccccacaaattgaagatcaaaatacccaaaacccccttcaaaaccctaccatcactaacacacaaaaaccctaatagtacagctgcaccacctacccctgcttctcctctgcatatctcggcctcatcctcttctccttccttacccccaaatttcccctccttcaatcaaaccatctcaataaagttagatgacaccaattatctggtttggagaatacaaatgcaaaacattattattgcaaatggtcttgaaggttacattgatggcactgtggcatgtccggaacaatttcccgaccctacttcgaaccaagtcgacccagccttcacgacatggcacaaatacaatcggctgctcatgagctggctctacgcctccctctccgactcaatgcttggtcaaatcgtgggtttcaccactgcagtagagatctgggtctcccttgaacgcacctactccgatgcctcgtttgcacgaagcactgactttcgcacagccttgccaaacttgaagaaagatggtctcaatgcttcggcatatcttcagaaactaaagactctctgcaacactcttacatcagctggggaaccaatttcctcccaagaacatttaacttaccttttgaatggtctcgaaccggagtacaatgcatttgttactccgatcttagcccgacctgtgaaacctaccattgaagaggttcatgctcttcttctcagctatgaagctcgtcttgaatgacaaaacgatgctgcctctcttagctcccttcaagccaatttttccaatctttacttacccaaacaaagacctaaatcatccccttaacaaccctcttttcaacctcgcttcccgtcccatactcagcaaaatcgcccacccactataccctcttttcgtcaaccttgcagcaactatccttcccctcctcgatcccctacaccgtggattccatctagtcataaccgtccccacccaaacccccaaaatgctagatttgtttcaaaataggacatacaccactcatgtgctatcaccgaaccaatctcagctttcaa

SEQ ID NO: 991 - DNA, 4839 bp, Cannabis sativa
cttgattaaagatgtttatcttcaaattggaatcaacaagggaagagcataaaaagtacagaagcacatcatccaccagcaagcatggtgtaagaaaacaagaagataccacttagtattggccatgggatgttctcaacaaagatctgaagctacttccacttaactgaaactcataaatatagaatgaaagatgttttaaccccatatgaagtctgcagtctcaaatccaagcacctgagtatgccataatcttaaggggaggaaaatccttaattgatacaaaaagaagaatttggagggcaaacaagaatagccttcagcaacaaccgtgtatattttaacaatttctcaagtacataaacagccattaacattatatagtgcaaagacaataagaacccaacacctgttttcattgcaaaatggtaatatacatatacaaacaaaaataaggatggagcagacatgaaaaagtgcagcattctctcttggtggcaaggaaatttagctgttgaatcaactgaaataattcatacagatcaaattgtggaattggaatcaaacctaaatagccaaataagacctttttaaaagggtccaactacatcaatggaaatctatgttccataactttagtttaaacgagtagaaaattactcgttaaggagctgttgttagatacaaacataggcatcattctcattaagtggaaagcgaacttcaaaagcccattacaatggttcttcttataatttgaatgtgaatttgaaaattgaacaaatacaattagtaactttccaaatgatgaaaactcagaacccaaattaaaacatgcagtgcaaagaataactaaattcaaacacctctctcttactcacacttcaaactcattcaaaatccctaatatacaaattttagaaactaaaattcaaactcattgaacagcaaaaaaaaaactagtacaattctgaatcaatgaaagggaaaaaaaagatgaagcgagagagttggttcgttcttacgatggaatcaagaatgtggcggaggaggagttgggtctgggtctccacggcgaagactttcaatcacatcgccgagctctttccgagctgattctcttccgaacatgaatccatacctgagaaagatcgaggttatagtgtgatataccctaatctaatagccaaattggttagagagaagatttagtaccaacaagaaacggcggagaagacaccggcggggagaaccgtctgaaccagagtgaagctcttctccattttcttcaatttctaatttctctttaacaaagaattgaaattattacttcaaaaaacgagctgtcgttttcattaaatgatttctattttaattttttctttacttacaaaaccaatattatattattagtaagataaataaataaattgatatttttttaaaaaaaaaaaacattattctgtattaattttaatagaaaaattttatttgaatggtttttaaagtataaatttgttaaaatatagcttttttctgaaaagaagtttaatttatgtgaaattttttcaaaaaaaattaaaaaatatgaaaaaataggatattgattatccttttatggtacgtgattttctctttttttttttcaatttttttatgaacaagcttaataaactgtgaaagttgacaatgtatttaaaagtaatgtgagcaatttgatgattagagaagcttattttttgtatcaacttgctaaacatgctaacctattttttgtagcagcttgttaaatatgcaacttgtttttttgtaacaatttgttatataagcagcctagtatttataaaagattacgaaatgggcataagggcgattaattaaaaaaacttgagatagttgtgtgtaagaggaaagtgataagatgaaatgtttgtgtataagatagaagtgatgagatgggatgcgtacttctgcgtaagaaaagaagaatagcgagcaatgataaaatgagagctagttttagaaaaaaaactcttctgaacctcgagtcgtatgttgtgagttctatcaatatttcttttatacgagctaactattaatctactctacatacaacctccccaaccaattgcactaattttatctttttatcattttgtgaccaacttgttgtgtagtatctcatccgtaattaaagtgtttcaccaatagttctcattaaaagtaataactcttcctgttatgcccttttatctatcaacattttatctatcaacacttagcaccaatttttttatttttttttttaaaaaaaaagggaccaatttttattttcttttatgaattttcacatgttacttagcataaatatttgttacatgacttagcctgccaattttctggtttcatatttttctacctactctgttatcatccactagttctcaacttattgaccctatttagcagaacttcttgcatggttgattaatcaaggtctcttttaataatgatgaaaattcttaagtgagaacatcaaggaaagacttgagaagaaaatatgagcattgaagaacctggatgcaagtgacaacttttgcactattaactgttctttatagaataaaatctcaacttatttttgagaaacaatttattaaaaaaaaaaaaaaaaactactatgaccaccttgaactttgccttcagccacttcatcatcaatgactgaacaattaccacttatgaaactgaccccaaatcattagtagcttcagatgttaaagttagtgagtatactatataaacaagcaagaagatctaattgttccactttattgagattattcttttcctttgattgtagtgaaagttgaaagtttcgacatgtaatagttatggtaaaacactgtaccacttggtttggtttctgcctaataaaaaatgttgatccccaggaaaatcctatgaaaagatgaagaccggatgcattgctggccaaatgcccatcttttgtcaggcgattctggttcttcgtgagcttaaattacttgagagatgacaatgcctctgcaacttttcgagatattcgatcgtgcattggctcctgaatgaagaaaccggattatgttaaaattctcattatattgattaatatatatatatatcagtctataagacatttacctctgttgatggcattttaaattctgactttgttatcgtctcgtataagaaaatatatctgtagtattttttcataaacacaggtcaataaataaaagcagagatatatccagtagcagacgtgcttttagttgaataaaataagtaaacataccgccaagctagttcgcaaacaagttcttcaggagcatcggggaggacctatacattggatgacctcagtaagatttgaaattttctcatgaacagaaagaattaaaataaaattccaacaatgtaagtaatgtaattaccttatctttgtatggatcacagtgatctttgaaccataacctcaagaactcctgtgaaatatagaaatcataaagtgatcactggaaagttactggtaattatatatatcggtgaagattaagcacatggaacttgtgaatgaaatgcatcctcagtgtctgatagaggatatacatacagaagctagagtattaagatataaaaaccaggacatgacaagaagggaaaatacaccttatcaacattttcaggttctagaccattctgaaagcgttcctcgtaagaatgtgctatccaatatctgcttgaatcgggtgtatgaatctataatggaagttaaagaatcaactacatcatcaacattattacttggatgaatatacaagaacagataaggtagcaaatagaacatttaacaagcgacaaacctcatcgatcaaaagaatggaaccatcacgtccctttccaaattcatatttggtgtcaactaatatcaagccatgctcctgagccacgcgctgcaacataaaacatattataaagtcatctgcctaaagagtaaactttctatcttttgatctttttcttatcagggattgattgaggatgcggagaataagtctagattaaaaatgtttttaaaataataatgaggaaaatcatcttggatcgatatttacttgtccatattcaaacaagctcagtgctttcctacttgcttcctcgtaatcatctcgactcatcagtccgctcttaataatctgcaaggcaaatgcatcacattagccaactagatagcagtggagattataagtgtacaagccatgaacccaatgtggtatcatttagaagacataaatcgaaaaatcaaagggaaattttgaaaataaataaatattaaacctcatctggagtcacgggaacatcatgatctgcagccttcgttgtaggtgtgaggatattttgaggaagcttttggttttttaccaatcctgcaattaaaaagaccatcagagagaaaattttcatactggaaataagaaagcactgcacgattatctcaccttcagaaagtgcattgccacagtaatttcgaactcctttgttatagaccgtccatagtgatgtctcagtgcttccagttacaaaacctctgactatacattagtagacagaaagagtcagttaaatagttcattacaatatcagtactcagcacaacaaagaattcaatataaggatatatcatgaaattcacaagatgaattataactaaacaactgtttttcttaaatttatccagacattagaaggaaagactaaaacagatcataacattttcaatcaaagtggacatgaaaa

SEQ ID NO: 992 - DNA, 4637 bp, Cannabis sativa
ggttccatttcatgtaaactcatctcctaagtctgaaacttggctcgagcatgtctctcatgtatctagggacaatggctaagcagattgcccataaaaagttgatgggaaccaaaactgatgcgagacgacgcacaagatgtcaacttgggcacccagcactgatgctcgacccaggttgagcctagggacgttcatgtgacatcctctgcttcatggctcattgttttagggtcactgagacttgttctcttgaactttgtcgaaggatggcagctagaaacatcttcgcgagatcatagcgccttcttgggcacccactagtgtcaaccaagacactaacacaatttccgatgcccaagttgaccaccattagtcttagtggataggcccaagattgtttccttcttgccacgtgtcaaaaatattgtgcatatcatcgggtcaaatttccatgtaaacacccaataaaataaagctattttccactagtgttacacaagttcaagaacataatactaatggtgaaaatttttacaatgcacccgtaaaagagttccactaatgcactccttatttgtatcgtcatatgatagaagttttttagtctattttttttacaatcgtctacgttgtagttatctaggacatcctaaaaaattttgagaaattcaaaaaaactttaacatgcaaaaaaatagggttcaaacacacgcgttaaaaaataaaagagtcgctagcaatagactgtttgaatcctatttttgacatattcaactaaaaaattctttcaaatagccaaaaacccaataatgttacattgtacaagtacaagtaacatgaacaaatttattaaattatcatgtgcaaattgagatatattttcccatgtgaaataaaatatatatatcttttttttgctaacgtaaagaaaataatgtaaaataaaataaaacttcacaaattatgatttaggccgtggatttctatggtggtaatgctaagcaaagctggaaaagaaaaaaaggaaaaaaaaaaaaaagaagaagaagactctctctctctacacccacacactctctctctctctatgtacacacccttgtgtttgtcagggcttttacacctctttcttgttacagagaacaaaagtagagattagagcgaactagagagaggagaaggagagagtggtggtggtggttgagtgtgcgcgcggcggcgcgtctgattctgcgccgccttgggttcgggaatgagattctgggaatgatttagaattagaattagtattggtattgttatcatcactattactatttttatttttcttcttcttcgccgagttcgcttcattcccacggtaacttggtgcctttgataagggaagaaacaaagattgattcagattctcattcggaaacaaggctttcctatttgggatttgtttttctataattctggcggaacttagaggaaccctagcgttccttgttcaaccctcagtgtcggcgagtttattaccagatcgattcgatttcaagccgaagaacaagaagaagaataggaggagagggtttcacgaggttaaaatgctttgggttaagaggctttctggttttgtgtcagctgcaatggtgttgattgttctatcgccttcgcttcaatcgtttccaccggcagaagcaatccgatcctcacaccacgattctcatctcctacgtcttcgccccgatgattccctaaatccattctcatttcgtaaggcaccgacttttcgcaatgccgataaatgcagctccgcagacccctcaatccgtgctccaataagtgtctgtgatcccaatttggtccatgtcgctattactctcgacgttgaatacctccgtggctcgatcgccgccgttcattcgattcttcagcactcgctgtgtccggagagtgtgttcttccacttcttggtttccgagaacaacctcgaagcgctagtacgatccacgttccctcaactcaacttcaaggtatattactttgatccggcaattgtacgtgatctgatctcgacgtcggtaaggcaagcgttggaacagccgttaaattacgcccggaactacttagcggacctactcgagacctgcgttcggcgcgtgatttatctggactcggatctggttgtggtggatgacatttggaagttatggagaacgagtctcgggtcgagaacaatcggagctccggaatactgccacgcaaacttcaccaagtatttcacggcgagtttctggtcgaacggtcacttctcgtcggctttctcggggcggaagccttgctacttcaacaccggcgtgatggtgatggatctggttaagtggaggcgggccgggtacacgaaacggatcgagaggtggatggagatccagaagagcgaccgtatctacgagctggggtcgttgccaccgttccttctggtcttcgccggacacgtggcacccatcgagcaccgctggaaccaacatgggctgggcggcgactacgtcaaaggcagctgccgtgacctccaccctggtccggttagcctcctgcattggtccggaagcggcaaaccatggctgcggttagattcaaaacggccatgcccactcgacgccctctggacaccatacgatttgtacggacactcacagtgaatcaaatacaaaggggttaggattcatcgacggtaaattcccaccagtactgtttttttgtcacttttcttcttttttacttctaaatttgccatttttctccattattttgtgtcttcttcttcttcttactctgagctactcattttttatataacaattacattttttttacctctttgttattatttagttgggtttatttgtattctactctaatcttgttctttttttagtttttcttctgcaaataaaagaaaagatactcaatttgttattgtatataatgttattagtaatcatactctgtttgtttagaactggcatttgcagtagtgctagttgattttaaggtccaaaccagtaagtaagtaaccaatgtgcaaaagtaaaatgagaagagagaaaataaaaagaaaaggtatccttatctttcaatggtggagtattgagacacactacatgtgggcacaaaggtggccccgaaatggagaccatcgaaatgtccaaactttactctctttttctttacttctttctttaattatcccttcccaccacttagttacagcaacttgtaaaaaagataatctttttagtttctttccttttattaaaaataaaacaacccttaaaaatggcttctttatgagttttgtttggagaatatagatttgtttgtgtatgtaggtggtaggccagtgattttgccgttgttggtaaaagcttaagaagtctactgactatacataagaaaacccagaaacagagatttattcaatgatggtggtgaaagcaaatattagaaagaagacaacagaacctactactacacaaggtggagtgcacgtatgagatttaatattttttcttaactctgttattatttgtatcaatgaatttgtcttattgggtcaacggaaaaataatccaagaaaaacagaaccaagtggagattgattaggttgagataaggctctctctcccccctttctttctttctcaatattagtctcatattgccagctgttgagctttatagctagaatagtgagcagcattggaagaatctaaaagagtttgttttagtgatacattggcaaaagttaatgagataaaaacgacgtcggcatatggtgtgtgtttagcatcggtggcagcggcataggccttgtgagctaccttctcacataatttaaaatcctacttgtccctttctgcccttttggttggcaatcccatattccctttctccttcttacatgttttttttttcctttgggttttatcttttaagtcatgctggtccatacgaaagcagagtcggctaaggctaattatataaatataaatataattataaacccatttaataaatttattcacctaaacaaaagtggagttttcaggggccataatagaaaatgaaataagccacccaaatatcacacaatttcgtttggaaatatccaaaggagtaaaataaaaaagggtcttcttctcttctagtctctctcggctaggggaccgattccctcacacgtggatagttgttttggagagtcatcatatgaaacagaaatttaaaaaaaaaaaaaacatggccaatcaacttggtacatgattgggtaattctataattgttggttgatgcttattaagtgacttataatatgcaggcatatgggactttttctctttgtttcgatattgttggctgctactagctgctctctctctctgttctttcttcctctggctgcttccatttcactttgttaagtctttgcttttaaggcaaaaactttgatcataaaaagttgattaggaccttccaacaaatttcattgctcgactgtagatggtgaaatcattttaaaaatagctatctgactttcacagctttgttgtcacaatcgttattataatatattttccatattttatatt

SEQ ID NO: 993 - DNA, 3156 bp, Cannabis sativa
tttaattagaacaataaaaatattgtcaaaaaatgttttctataaaactattttcatattttaattttttaattgagaatcaaaatttaaaaaagattcttcaaaacaaaaaaaaaattactttcacaatttttttaaacatttttttttcttaataaatattttagacctcgacctcaacttagaccttggacgcagactctagtcccgaccccgatcgcaccccagactcgaaccacgaccatggccttagacccggacctgacaaaataaaataaaaaataaaaataaaaataaaagttatagaacaaattttattttttttttaaaaaaataataatttttgttgtgactaaaaaattatagaacaaaagtgttaccaaacattcttaataaacaaatcattttttgataatatggctaactaaaaaaaatatcaaaacaataagctaattaaaaatatacacacgtacgttttttttaggtttttttattaaggttattctataaacaataaacatcattttttaataaaaattatttggtttaagtactatttataaaaattattaactgtgatgctataattttgttatttaatttttttgtcaaactatttgagaattaatagactgattatttaatttattttctaattctaattaagctattattttaattaattactactaataaaattatatgatttattcaaataaaaaaatgtgcacttatatatattaaatataaattaaattactttattatttaaataaatcataaagatgttaaacaacacctaaatttgtcattaacgggccactacccaacatagcttagctatttattgacaaagagtgcctaattatatataatttttcatttaatttttgaccgactttctaactaaataacggctccattatttatcaaaattgaggatgaaaacatggacaaccattaccctttccaaccacaaattgtgtaatcaccattaaccacccaccacattcaatgaaaatgtataattttaaaaaactaattagtaatttttttcccaaattttaatatgtattaaatcgtatcctgaatttttttttggtcatttactaaatcatgcaactttcatcatcatgttagagacacgatttagtacatgtcaatatttgggaaaaaaattattaattagctattttaaaataaaaattttgttataataatacatttaaattagaggtgttcgtcaataaatttgatcaaaaataataacccgtttaataaaattggtttatcaatccaaaccaactataattataataatgagattaatatatataaattgaattcaaaatttaagttaagcaacataaaaagatcggatagttaaatctttttcgggttaatcgaaattgattggatgaattagtattattttcaactcactcatatataaatatatatatatatatatattggaatcaaataataggtaatttcatggtgatgaatgatggaacatcaacataaaatataatcaaaattatattattgcaaagatgacaaatatatcaatgtctagttacgtcggttgaaacgacaacaataatatctgattttttattgttattatttatagattgtaattaacgaaactacgtttttttttgttttaattaaataaataaataaaatttaaacgggactcaagattatcatatcaaatatatttatattgcatttttcacgaaaagaaagaacaatattcaagcccacaaaacaagaaaatatttaaaaatccaaattaaaaaaaataattatagaatattgagagtgggaaagtcgttagattaccattaaaaaatattatatatattatatctaaatatgcaaaatattcacaattccattacccaaccgaaattaaaaaacaataaaaaaattccctaaaactaaaaaaaatattagagaattcagaaaaaggaaataaaaattaaaaaaaaaaaagcctaaaattatagaaaagtaattaattatgacattaataatgaaattaaaattgaattaattcttcaatcgctgcgattccatggaatcgaaacgcgaacccatcatcatcataagcttaaactcatcaaagctaatcataccgtcaccgtcgcaatcgacgccgttgatcatcttccgacactcagcgatggaacaatcatcaccgaggcttttcagaacctcaaaaagctcctccgcagaaatagagccgtttccgtcaatatcataaactgagaacgcaactttcagattctccaaaacctcatcagaatcgacacctttggtattaagctcaataaactcgcttaaatcaatgaatccatcgccatcagcatcaacctccttaatcatcttctgaagctcttcttcggtcgaagattcccctaagcttcccataatagcaccgagctcagcagaagagatctttccatcgccattaacgtcgaatttcttaaacacctgttcgagttcggcgatctgatcgcgtgcattgacagagtgagatcgagatccaagaggaatatccagcgtggtgtgatgatccacattgtgattttgaaccgaagaagaatctgatttcttgtttttccttgcgaagagagatttgaaacccattatttgatgaagaaaatggaagaacaagaattttcaggtacgaatgtgtatatataggaatatatattgatatatatatattaattaattaattaaaatttgggggaaaaacagaaagggaatcgtaattggatagttattaaaatttgtaacggaatgaatctgaaatctgagtaattttctgaaactctaaatataggtatagagagagagaaataggggaaataaacgcgtgattagcgatgtgggatttttttaaaagcgagtgatgcacgccacgttaataaaacgaaacccctattagtattaattccttcatttttctacctaatgttgctgctgcactgatgcgtgccacttattattataaaattaaattaaattaaattaattagttttttttttagaaattttttatatatttattaatattttttttaaggattttgtttatttattatctgggatgactctttagagatagaaatttatagc

SEQ ID NO: 994 - DNA, 2658 bp, Cannabis sativa
aaaaaaaaacaaatgtgtgttttctagaagaagccaaagccaaaataatatattaaaatattcttttatcaatctcatttgtgtctttttctgcattacgctactgtagaattatgcttagtgaaacagtgaaaaaaagcatttccgatcaacacagcagtactttataataactaaattcatataaaactccgacaaaatcttaaaaagctcatctttaacatatatatatacctatcttttcaaaggctaattaacattaacacatgaataataacacacaacacgaactattactatagattaatattattattattattatttacttcatacaacttaagcttatattataatataatatagaagttactattatgacttacaagaacatcatagaacaaacaaacacccatatatatattccttaataaaacataaactaattaataacaagacacagagagtacatatagttatatatacgacgcaaactaataatttaactaaatcccatgatctgtttttgctgtcgttttttaataattgttcctacaatctcaaacaattgcgatagggcccacattggcggtggtttccatggccttcatggcttcaaaccttggctccttagcttggaatttcagcccagcgtatagcttcatgtagtcctcaaacacaaactttgggtacacaacggctcggctttcgctctcgccctcattggctccagcttcttccaacaatgccggcgctggaaagataacggcgtcacttccagggttatagaaagatgctattgacattctgttaccgtcagattgagctatcacacggtgcataacgctcttgtattttccgttcgtgattacctataaatacattcaaaataaattaatatggatttttttaaaaactaatttaattatattaataaaaaaattacgtacatgtaaataatgacttgatattttatattaaaaattactgtaaattttatagtttcaagtttacctcaagttggtcaccaaggttgataacaatggagtgtctcatgggaggaacatcaatccattcaccatccttaaggagctgaagaccactgaccttgtcgtcttggaagagaagtatgagacctccggcgtcggtgtgggcccggaggcccttaataagttcgggttttgggcagggtgggtagttgctgactttagttccgaaagttgggcctttggatccgtaaaatgcatttttgaggtagcctttttcaagcccaagattctcacacaacaaatccagaagttgctcagctagtttttctatttctccagcaaactctttcatcacatccctgaaaaaacatcttatattagaataataataacaagtttttttttttttttcaatcatgaatagtactatatatatagtacataacataatatataattaacctgtagttttgatcaagatcggggatttgggacaagtttgaagtgggaagatggcgtaagaagaaggtgctttcccaatccaaatcgtcgatctcggactgtacggcctcaaggcctttgcttttcaccatatctttaaacctttgctccatgcactgtctgtagtgctcctttgttagcctctcaaccgtgtccagcagttcatgtgatattccatggttcatcaactgatcaaacataataatttcacatgaacaacaaaaagaaaaccataaaaaccgatcccagaaacaaaatatacagaagaaagaacagagctttataaaaaagctatctttataattatactactacttatatatagatatgtatgtatgtatacctcaaagaaaccccagttctcacaagcgtcgttgatcaactccatggttgtttttctctcatcagtgctgagttttgccatgtcaacaatgggaaaacttggttgaattgccatttctttcttttttgttggaagagactactttctatcaatatactctgtttttgggtctctaagaagagtgagtgatcttaagagctaagtaagtaagtgtattgaaagttggtatgtggtgagattggtgtaagggtttgaagcaatttataagcgataaagagaacaaataatgatggagatggaataatagagttctgagttctctacagtgaaaaataaagtagtaaatatgttttttttttttttggaagaaaagaaaaagaaagtaaattgaaaaaggaaagaaaaaaaagtgaagagtattgcaataaatgaagctaaaaaaaggaggtgtggagtcgtggaagatgtatgtgagcacatcctgtgggggccgggtgcccctattctttcttctttgtgctgtggcataatctatgacttgttttatccaataaatgaataaatatattgtgtgtgttataatgcaattttctgggaaatgggcctatatttctactttggctctttctagtttattattatcgtcactttcttgtgtctagttactctctttctcttgtcagactcttttcataacagcaaaaataagagaaatgtaataatacaaagttagtaagatattgatattgatgtgtattttagtattgatcagttctgcatactttaaaatgagtagttatgcatacacaataatagagattagag

SEQ ID NO: 995 - DNA, 1012 bp, Cannabis sativa
tgtatgtgatgtaatcaaactaacaccaatcaagaacataaaaactagaaagtgtagaatgatgaacaaggaaatgacaatgaatttttcctacttacatttaaggccacaacaatggcttatgaattttatttatactcgagaagaatagtacaaatcgagcactaaagaagtcttgttcttgattaaaaaaatactcatatcaagtctcaaaacttttctctgatttttaaatcccaaagaaggttaactgaattaataaatacgaaggtgacgtttggtttggaggaatgaaattaccggaatagtaatgaaaaatggaatacaaatttaaatgcatgaaaagaaaattgatagaaaattactaaattttttcaaatcttgcgttaaaataattttttcattcttttccaacaaaatggaaaaattgttctattctaatattttaaaatgcaattaaataaaaataactttccatttcattaccaaactccgcttaagataagtgaatttaattgttttaactaattaaagtcatatcagcaatatcacaagtggcatgaaccagtcaccgcattgtacacccataaattcattcaatttatttatattattttcttaaataatcttttgttggtagatttgatattttgtatatataaaaaatggtttaatctttttattgtttagagttgagtcctatgtttgtttggtaaaagaatgaatgagagttcgtgttcttttcctaaaggagtgaatatcttttaggatgttttgtttggtttgttagaagcttcaagtggaagagttggagagttttgtagaatgcccactcttttcacttttaagggtttggaagttttaagagttctcttttaaaagagtttgtcaaaactaacaattgaaacttattgaatcaagttgtagtcaaaattatttcataattaatacaataacatcaaatataggattagatagcgttactagcccataagttcgagcttgctattaa

SEQ ID NO: 996 - DNA, 2138 bp, Cannabis sativa
gaaagaacagggccagacttcatgcatccaatgtagattctgggcttgaatcggtgcttagcaagcgtggttagaagggtagccacattgaggtggacatcgtcatccaccttgacgtagaagaaagcatcccagagcgagacggcggtggagaaatagagtcgggtcttggttgagagctggtgatatccctctacgtggttcagcctcaggaaatctctgtgctctgcttcctctgcttcgatggctttatctagtgctccacctcgtgtcgcactgtaccctatcacaaatcttattacgatccctttctccttttcaagcttctttagattctcccctcttggcatccacgtttcacgaactgagtctcttcgttttttgctactaaatgccgtattgattccgatcaccacgaatgctttctttgcagtactactacttctactaatgctatgagtactagaagtactataattgtatgtgagtgaatctgatctttcgttatggcttgttctggctgctgctagctccatttccagtgttgagattgttctatctagtgacctataatacataattattactagttttcaataattaataagatcatgatataagtatatgtgtagcttactggatagcttgatgagttttggtaacttcatccatgacatcttcagtctttccttccaccaatttctgctagaaatatttcaaaagaatcataaatagcataaagagatgatgtagtgtagattaagaggcggaaatagcgtacttgcttgttatcacagtctcgaggccttgttattagagacagatcaggttggggcagtgacagggcgtgatcatcttgatgagcccaattataggtacggcttgtgaagagcgaaccggcaagaaagctagcaatgcaaagcgcaaacgcagcctttgctgagaagactttccccctcattttcatcaaattagagtcagaccaccaattaccttttatgatctttattttgtttcttttcaatggcgccacttcaccgcctttttattgcttaaaacctcctgcattttatacacagctctaaaattgttaaggtgattatttccttaagcctcgctttgatcgtaggctaaaaggactaagtaaatactatatatgttcttagtcctagcctagcgatataaagtctcaaacatgtatagtcgattcaaaattacactttatcaatattaagtaattgcagagtatttgtaatcaggtaatatattatatctcaaattagaaattatttatatattaatatctcaaacacacgaaatggtttatcatcttatcaatgatgatacatattctgcattattattcacttataacttacttattttcaaacaattttttccttttcttttgttgtattgtatatgtacattataattatttccaaaagtgccatgttcaaagtacaaataatacacacaccaaaaatttaagaatgatacacatttttaattaattactaatacgaatatagctgattacctggtaagaaaatcagatgtgaggggatgagcgggaggaaacgatgatgaccacaaattaataagcaacgttacttgatcactagataataagagatacaaaaattactcacaaagatatataagagagccttccttggatatacatatatgttaattcttagttcattattatcaagctatatatttgaaaagtacaagtgatctgaaaaaaagttcccgttgtgtgtgaattaaatggaatcattggtttaggcttggaattgctagagcagggcagtttaatcatgtctatttcatggctcatcaacaaaatatatgctcattatctctctctaaataaaataaagcaatatatatgccggttttctattaactgttaatttgagcatgatgagcatgatatacatgcgttgcccaaaaatatttgataagactgcttctatacctaatttgtaatttgattatgtatggttctcacggcgaaaaaattttaaaaaaaatattacaaaaattcatgtagtacacttattgttacgagctatcacagaaggaatttagtaaaatatttatcaataagaataataatttatagcttt

SEQ ID NO: 997 - DNA, 2356 bp, Cannabis sativa
ttttttttttttttttttaaccaggtgcccttggcaatgggatagggaatagaggatatggataggaaggaagtgacatttttaaaagttattagagaagacatttgggctccaccattataacaacttttcttcatattggcttcttttactaagcaacttcattcttacttacttaactttactctttaatatatatatagtgctttcttaatttcttataattattgatttcagattaattaatgtgctcaggaaatgttaattatagttaaggagagtaataaagaactatggtgtacttattttaatatatagatcactgactagttaatttattattatggtgtcattgactagagttaatttttttttttttttgaatgttagataaccttaacaaatatagtatatagaaaaccaagcaaaggcatatggaggtatttaaggtatgggaatgggatgattaaatcaacactagctacaaaaccaatgacaatgagcaatcaacataaatattaattaaccttatgttaggtaaactatatatatatatatcgattattaattgttttactcatttttaaaaaaaaaaatatttattgaaaggactcatgcatattaacttttatcatagttctaccattcaaaatccagacacgtgaatgataactatgatcttctcacaaaagatgctgattatttaagacgctattagcatagggaaggtaatataataatttatccaatgcaacaaaaactatagctactattcttatttttctcccaaatagttgaaaaaataaaaagtatgagcgtacgtatataaattttaattgatagacaaagttattttaaaagggaaaggagaaaaaaaaaacaagggggcaaatctagctagttgaggtttccttgtattatttattaggcctacaaattaaggcaaactgaattgaatactagtaagaacaaaaagggttgtgcacacttctactctacactattcatttaaaaagaaacatatgattattctagcccaaaacaaaagatgagcaaatattggaaaaattatacttttttggtttttcaagaaaaaaaaactaaaatttaagttttttaaatgtaaatattattttggacctcgtgttaggattgaacatttagattactattgacgcagaaaactggccaacactatctcactagattggcgagataagtaatgagtttaagtataaatagagagacacaaaaaatttatcgtattttactcccatgacaggccggtaatagagctacgtctacttcgaatttttattgctcgcgagaattacaagaaaattgactaaggaaagaactcagatttctagagagaaatgctttgacactatggagacttagcaaaatgtgaaaaatgagttggtggaactctcattttataagcaaggaggtccattaaaatttgaaaataaaatcattgtggaataatcttgactgttgatggcgatctaatggttgaaatgactcggatggtgatcgtcaatttttgaagctcgaataacgtctgtttgatcattttttgggtgatttgtaacaaaattgcactttgacttggggacgacttttcgacttaaaatcttcaaaattgagatatgacattcctagaaagagctttaaaagagctttctaatgcacttggaatcgcatcaatcagagtaatattgagtgagttgtgggcatttttgtgaagagtgttcagcacccaacgcccaagttgataatcttgcaattgagaagttgtctaatgtcaaatctgggtgctagaaattgggaaatcgtgccagaaccatatttttcgaagtctaacaaatatttttatatcacttagccaatttcttgggtctggtgaagacgttcactagctcttaaaggtcttgtatttttgcaaaattaggagactcgaaactacccgatttgcaactattttaccgatatttcacttttttgaaaaaagtaaaaaatcaaagtgtgaatttaacttgtgataagtcgtggccactactacaaaaaaacaatattcttgtcgatcagaaaattatttttttaggaacgtcgctaataaaatttagtgagtttttaaaattgatacttatagttgaaaattctcgtctattttaaattgtcggtaagtatagacaataatttaaaacagttactaaattaaagcttcaaaattttaaaatagcatccccgacagttttcaaccgtcagggattccaatccttcatataaaactccaaatttctcaaggtagactcattccattctcttttgatcatctctctctctctctctc

SEQ ID NO: 998 - DNA, 3366 bp, Cannabis sativa
ccgccgtcaatggcagcttgaagaagcctgtcttcctcaccaaagctcaacgcgagcaattagctctccagcgccgccaagacgagttcgaggaccaaaaacgccgccaacacttgcttctctcccaagctcgctcaggttctccttcttcctccgccgccgccaacaacaataacaacaacgaccatcataaaccctccgatttcgatcgccgcgaccgtgaccgtgaccgagatagggatagggatagagatagagaaagggatagggatagggatagggatagagaccgggaccgcgatcgagatagggaacgggaacgggagcgggaacgagaccggtcggaccggcgtaatagagagagggatcgggaagatgagacgaaggggagagatcgcgctcggattgagaaattggctgaaagagagcgcgataaggagcttgaagcgattaaagagcagtatcttggatcgaagaagcctaagaagagagttattaagcctagtgagaagtttagattctctttcgattgggagaacactgaggatacttctcgggacatgaattccctctatcagaatcctcacgaagctcagcttttgtttggaagaggttttagggctgggatggaccgtcgtgagcagaagaagcttgctgccaagaatgagaaggagcttagagatgagattaggaagaaggaaggtattgaggagagaccagaggaggctgctgctcagaagcttaaggaagaagctgctgatatgtatgatacgtttgatatgagagttgatcgccattggagcgataagaagcttgaagagatgactgagagagattggagaatattcagagaagatttcaatatttcatacaagggttcgaggttacctcgcccaatgaggagttggcccgagagtaaattgaatcctgatcttctcaaggctgtggagagagctggttacaagaaaccgtcgccaattcaaatggcggcgatcccactcgggcttcaacagcgcgatgttatcggcattgctgagactggttctggtaagactgctgcttttgttcttcctatgttgacttacatttcgagattaccaccgataagcgaagagaatgaggctgaagggccttatgctgttgttatggcgcccactcgtgagcttgctcagcagattgaggatgagactatgaagtttgctcattacatgggcattaaagttgtgtccattgttggtgggcagtctattgaagaacagggttttaagattagacaagggtgtgaggttgttattgctacacctgggcgtttgattgattgtttggaaaggcgttatgctgttctaaatcagtgtaactatgttgttcttgatgaggctgatcgaatgattgatatgggttttgagccacaagttgtgggtgtgttggatgctatgccttcgagtaatttgaaacccgagaatgaggatgaagagcttgatgagaaaaggatttatagaacaacttatatgtttagtgctactatgccccctgctgttgagcgtctcgcgaggaagtacttgcgaaatcctgttgttgttactattggtactgctggaaaagctactgagttgatcacccagaatgtggttatgactaaggaatctgagaagttgaatagattgcagaggttgcttgacgagctcggtgataagactgctattgtttttgttaacaccaagaagaatgctgatcatgtggcaaagaatttggataggtcgggctatcgtgtgacaactttgcacggtggaaaatcacaggaacagagagaaataagcctagaagggtttcgaaccaagagatataacgtgcttgttgccacagatgttgctgggcgtggtattgacatacctgatgtggctcatgtcattaactatgacatgcccggaaatattgagatgtacactcatcgtattgggcgtactggtcgtgcaggaaagactggggttgcttcaacgttcttgactatgcacgatactgatgtcttttacgatctcaagcaaatgctcatttcgagtaacagtcccgtcccacatgaactggcgaaacacgaggcctctaagttcaagccgggaagcattcccgatagaccgcctaggcgtaatgacactgtttttgctcattaagaaggctttggaatttaacgagtcaccagtgatttttagtggattatacatctatgcttattgtttcaagcaaggaactgatactgctctgaaagtggtaaatttatgttttgttatttccttttgtgggtattgttgtttcatagtttaaagagtcatatatggacattagtagttgaaataaatttacctattaagacttgaacatctatttccatacttattagttgattatgcattcagtagagatgtttaatgtttttgttttcgggtcctaattctttcggtttggcatcctctcttagattttgtaggtgtaactagtttcatggatctctcttgttatacttacgaaagccattttgtttcatgttttatttttgtctgtaggagcaaacatgacaaattgaatgttgagatataaacattactagacgtaatgattcgtcattcctcattattgtgagtatgaatccttgcagctaagctaactcactaacttatttctctcattcaagcttgttttacttgcttatgtaaatatatgttgtagtagtattagaatcattctacaacctgagaacttttgtttcagctcttatagattttgtacattgtgaaaagatttgatcttttgtttctgttttcggttagttggaaaataatttctcatccacatttttatagtttaaaataaaaactgtcttcagtgatttctgagacttaaagggtaagggaagaaaagaagtatgcatttggttattgccagttgtgaattctttggtgtcctatcaatttgcatcactgtaaagtcatcattggtcatttttaaatttcatattatgatgacaatgattcattttgtgagaccatagataaaaagccttgacattgacatagttttgttcttatacacatttgcagtatatatatatttatattggtatatatgggtataaacatgacttgtttcagattaggatagttcatttgcatatcatttataatagaatcaattatatttttgtttgatatttgctcaagtgaaaaagacttgactaactacccacactaggggtgacaaaatgggttgagacactaaaacacgactcgaaacccgttgatagttaacgggtttgggttattttcgggttgattctttaataaaagggttgtgttcggtttgacccgttaataaccc

SEQ ID NO: 999 - DNA, 4537 bp, Cannabis sativa
gaagaaaaagttgagactttgagacactactcaatactcaatactcattcataatattaacaactactcttttctttcttcttcttcttcatctgattttctctgtcacaatagcatttgatgttgattttaaacaatacccagtttcttaaatttcctttcttttctttatataaagaaaaaaaaaaacagagaaaaagaaagtcaaggttggattttgttttgttgggatgaaatgagagaaataatgaatgtgtttttgtttatggaatcagattttagcgtgttcatttcatcttctctgtctcagtctcagacacatttctgaacatcgtacatacaaacaccttaaggtatcttttttctttctactatcatcattcatattattatttatgattgtgattgtgatttttccaccatggctgtcatgtccacccctcttattatttttattgggtttatcacagatctgataaccaagtactaaacacacagaaaacaaatatcagaacaaaaagaaaggaagagtctttactaaatgtctttgagttcttctctccaaaggaaaagaagaaaagcttcaaacttgttttctgagacaaccaatattaaagacaagacaagacaagagaagagaatataactaaaacaaaacaaagtttgtataaatatttatatatatgtgatgggattgttttggttggtgcttttgattgcgtttcagccactatttataatttcttcatcatcatcatcatcaagttccactagaagattcttgtctgatcagaaagcagtggagttgttgttaaactttaaaaactcatctgttgagtctgatcctaatggcatgttggttgattggaaagcttcttcatccacaccctgctcatggaatggtgtttcatgctcatctaatggcttagtcacagctcttaatctcagcaacgctggcctcacaggcagtctcaacctctcccatctaactgtcttgaccactcttaagtatctttacttacaaggcaattcattcacagcagctgatctctctgcttcaaatgataaaacatcatgtgctctacaggccattgacctttcctccaacaacatatctgattctcttccaaaaccatctttcatgttttcatgtcaagctctctcttatgtcaacctatctcgtaactcaatcactggtggaactctttatgtggggtcttctttgatgcagctagacttgtctagaaatcggtttacagactcgggtttgctgtcttacactctctcaaactgtcacaacttgaatatgctcaacttctctgataacaagctaaagggtcaattgggtgtcactctaaagtcttgtaaaagtctctcaattcttgacatttctcataatctgttgtctgggaagataccttctacctttgttgcagactctccaccaactctcaagtacttggacctttcttacaacaatttttctgggaaattctctgatcttgactttggcagatgtggcaacctcacttggctcaacatgtctaggacaacactttctggtgcagagtttcctgtcacactcagcaactgtcagcttcttcaaacacttgacctctcacacaatgaactttcctcagaaattccagttggtagcttggaagttatgaagaacttgagaatactgtcgttgggtggaaatgatttttatggtgaaataccttctgagctaggaaagctttgtgggactcttcaggaactagatctctcggcaaacaatctcttaggtgagttgcctttgagttttggaacatgttcttcattgacaagtttaaaccttgggaacaatcaattctctggtgatttcattgttactgtgattagtaatcttcagaatctgaggtatctctatttgccattcaataacttaactggtacagttccactgtctctcaccaactgtactcagcttcaagtgcttgatttaagctctaatggctttattggaaccattcctgaaggattctgctcctcctcctcttctaccttggaaaagatacttctttcagacaactttttgtcaggaactgtgccagttgagcttggaaaatgcaagatgttaagaacaattgatctcagtttcaacaatttgagtggtgaaattcccatagatatttggaggttaccaaatctttctgacttgatcatgtgggctaataatctcagtggtgggatccctgaagggatttgcattattggagggaacatacagatgctaattctcaacaacaatctcttgagtggtaccattccacagtccattgccaactgcacaaacatgatttggatatcactttcgagcaaccggtttactggtgaaattcctagtgggattggaagtcttgtcaaccttgcaatctttcaaatgggggataatttgctctcggggcagattcctcacgagcttggcgattgtcgcagcctcatttggctcgatttgaacagcaatcaactctctggcactgtccccgccgagcttgctaaccaggctggcctagtggttcccggtattgtttctggcaagcaatttgcatttgtgagaaatgagggtggaacagcctgcaggggagccggaggactagttgaattcgagggtgttcggcctgagagactagaaaactctcccatggttcactcttgcccctcaactagaatttactctggcatgactgtttatactttctccaataatggaagcatgatttatcttgatctttcttataattctttgtctggaactattccagcgaaactcggttatatgaactatctccaagtcttgaatttaggacacaacaagttcagtggcaagattccagacagctttggagatttgagagcagtaggagttctagacctctctcacaacaaccttgatggatatgttccggggtcattagctactctatcatttctcagtgacttagatgtctctaacaacaacctgagtggtgccattccctcaggaggtcagctcaccacattcccagcatcaagatatgagaacaactctggtctttgcggccttccattaccgccttgtggatcactaccccgcggatcagctttgaacagcagaggaagaaggcaatctatggctgctgggatgataattggcattgcattctttgtgatatgcattctcatactaacactagctctataccgagtgaggctgcaccagcagaaggagcaacaaagagagaaatacatagaaagcctgccaacctcgggtagcagcagctggaaactttccagtgttcctgagcctctaagcatcaacatagccacatttgagaagccattacgcaagcttacttttgctcatctactcgaagctacaaacggtttcagtgctgatagtttgattggttctggtggttttggcgaggtttacaaagcgcagctcaaagacgggtgtgttgttgcaatcaagaagcttattcaggtaacaggacaaggagacagagagttcatggcggaaatggaaaccattggaaagattaagcaccgaaatctagttcctttgttgggttattgtaagattggtgaagagaggcttcttgtgtatgaatacatgaaatggggtagcttagaatgtgttcttcatgagcagcctaagggagtaggctcaacaaaactcggttggtcagcacgaaagaaaatcgccataggatcagcaagaggcctggcattccttcaccacagttgcatacctcatatcatccaccgcgacatgaaatcaagcaatgtacttcttgatgagaatttcgaagcaagagtatcagatttcggtatggcaagattggtgaatgctctcgacactcatctcagtgtgagcaccttagctggaacaccaggatatgttcccccagagtattaccaaagctttcggtgcacaactaaaggggatgtgtacagctatggtgtcatacttctcgagcttctttcggggaaaaagccaatagaccctttcgagtttggtgatgacaacaaccttgttggttgggcaaaacaacttcataaagagaagagaagcaatgcgatacttgacagtgagttgttgaaagagagtagttcaggtgagtctgagctttgccattatctaaggattgctttcgagtgcttggatgataggccgttaaggcgtcccaccatgattcaagtgatggctatgttcaaagaacttcaagtggatgattcagagagcagtgacatacttgatggattctcagtaaaagaaacagccattgatgaatcataatcaaaatcatcatgaaatcaaatcaaataaaaaaattaaaggcagaggttagagggtagaggtttgagatttgtgcagtgtaaataagatgatcaatagagggataggaaggaaactagagattgagtgagtgagtgagtgaaatgaattgaaaagcagcattggcattattacatacaaatatggattcatttgtttttattaagggtggtg

SEQ ID NO: 1000 - DNA, 2684 bp, Cannabis sativa
tttacaactgaagttcctacatttaaaatttgatcacttcatacatttcatttgtgttgtgtacatacattacatacaacccccattgccaattgttaattgccattgctctttctttttataagctcattaaaattaattgtggggtaattatatttaagttgtaagacaatgatgcctatagactatcccaaattgtttaagaggttcagaaaaggttctatattcacctcagtcagtttgggacaccttaattttctttcataattaaagctcagtttaacctttaaatgtttagaaattcttaagggcctcatatttattcttaagaagataactcccagtaaacctgctataggcatcaacaaaactcatgtaaacctgtagttaaaaattttggaaatagcaatttatgaatttttcctaagaaacatgcttgaaaattattaaagatcttttattacaataaatattacattaatttagaatagtttgaacttccttttgagatggatgacctagcctattatgccacaattcaaagtctgaaataagagatttattacaatgagtacaaaaatgagaacttgactctaaattactcgagttattggtgatagtgaaggctatttttagatttgaggagttcaaagctaaactgaatgaggattgagagaatggcaacaccttaaactgacctgaatcaaaagtatgcatgccattgtgatatgtcccagttaagaagatggctttggtcacctattccttgacataacaaacatcaacatgaaactcaaaaaagacattattgtgaaaagcaaatttggacacacttaacagattcttagtgatttttagtacatgaaaaagattattaaaaatcaaaattttattagagctattagaagtagtgaaagtatggccagtatgttggatagacagccctaatcaattaccaacatagatgtgatcttgacaattgtattcaacattgttcatgagattatgcatattaggtgtatagtgatttgtagcaccagaatcaagatatcaattctcatcgtctccttaagtgttttaggctagattagcctacattttaaatggatttaaagctagaaaaatacttgtgaaactcttatcaaatcgatagaaaaattcaatcacagtatgcccaatcttgtggcaaagttgacactgagctctattctgagtgagagaaaatactccacttctggttccagtggaaatgcctcttccaaagttataaaatgatgatccaccttgtgatgaattgccaaggtatgagcctcgattagcatggaaaccagaggagttagaaggatgaaaatttttgtaattagaaaagaactaacctctttgtgctcttgaatttttgaaatttctattaaattgaacaagatttgcttcaagttgtaacggagttttagaacttggttctaagtcagctacaacaagattgatgctaggatcaatctctttatcaatctttttgatcttgacccaaaggactaacctctttgtgctcctaaatttttgaaatttctgttaaattgagcaagatttgcttcaagttgcaacagagttttagagcttggttctgagtcacttataacaagattgatgctaggatcaatctgtttatcagtctttttgatctcgaccctgaagcaagaagaaaagcctcaatttctgctacaaagtatgcctctattcgagtattggatgatataatgaaggtatcatattcactcgacaatcctttaaaaattacagtaatatgatcgcgagttgagagaacctcaccaatcgagcctagagatcaacatgttgttttaccttgagcagatattcatttagaaacaaagagtctttcttgagattctaaagtttggttcaaaattcaagaatcttagaagagacttgaagagtgaaatgcttcttcaaagcgttccaaatttgtcgagcagtgttgtatccaaccatgcgtgtaagaagactctcattcatagatgagaggagccatgacactagaaattgatcctgaacctcttagttcaaaaactctggattgatgatctgagcagctttatcaacattagtgagaaactgaggtggcagagcaacatcttggatgaatttttgcagtcgatttcctctaattgtagccaaaattttttgtttccaaagaaaaaagttgtgatcattgaaatttattgagagtgtataattgaagtatactggagaatgaagttgttctgtctcgcaagtgcaattccattagttgagttgcagggaaggtagatgatgaattaccaacaccagtaacagtcacattcaccattaatggtggaaatgactttgataccatattatatctagtattgtgtcttaccatgatgaacagaaaataaagaaaggtcgaaaaaaagagaaagagattgagagagaagacataaagaatttgtcttattatcttagaaaggaaaaatgcaagcttatatacacaaaagtattgagctagagaagctgagaggatattattcccctaccttatcaaatcctatgaatattgtcaaaatgatatttttaaattgtctatttttttcattgctaacaaattaaagggaaaaaatctatttattttttttcacatttaaatt

SEQ ID NO: 1001 - DNA, 1202 bp, Cannabis sativa
aagagaagaggttcagttgtttaatttgatttggtttgggacacaatgcaatgcaggttcatatgttgagatgggggatctagtctatgaacctccaagaaatggaccaacattgtgggaaattggcatacctgatcgttctgctgcagaattctatgtcccagaacccaatccaaattttgtcaacaaactttatgtcaatcatcctgataagtaaataattcagcataactatgtttttttttctttcactagagaatttttggactagttgtgcttattttaaatgaatttggatgcaggtttagacaatatggactttgggaaagatatgctgaactttatcctgataatgatttggtttacagtgttggtgaaagtgactacactaaagattggttttttgctcaagttactaggtgcaatactaaatattcttccactttttttttagtttggattacatattgatgtttcactttttactcatgaataattttcattgaaacaattatctgctttttgtttttggtctcctaataatatataggaagaaagaaggtactaaagcatcatatcaaggaactacttggcaaatccaattcaagcttgatgaagtggacaagagcaccaactatacgctaagaatagcattggcatcagctactttttctgaattacaggtatgtataaatctcctagtaaagagttcttactagttatttattaagtagaatttagcatatacaaataaaggaactaacatgtgtgagtgttttaatgttatatatatatataggttcgagtaaatgatccaaaggtgggaaatgctcctctattcacaagtggattaataggaagagacaattcaatagccagacatggaatccacggcctttactggctctacaatgtgagtgtaccaacaactaggcttgttcaaggagataatacaatctttttaacacaaccaagaagtacaagtccatttcagggaattatgtatgattatatacgcctagaaggacccccttcttctccatctccaacttcataataaaacctctcttgttttgtactttcttttgttatatagcttgtacgagttctttttatttatattgaaatctttcattccaagtaaagtcattttttttctttcaagctgtggttgtactgttgtagaaatcatgttaaatttt

SEQ ID NO: 1002 - DNA, 3064 bp, Cannabis sativa
cccagcataactggcaatataccaaattgaattttagccctagaaataaaccaatggtcagatgtctaatccatattaattgtcaattccttcctgcaaactcattcagtcctctctagagaggtcttaattccacaactgcacgtgctctttttttcaactaaccaactttaatttccaattaaaaaagtaacatttattgtcaagttaacaaaatcaatcaaggaaaaatttatagtacatcatgagaaatcagtacttggaacccaatataaatacttcacctaattgcaccaactgctgctttatgaaaatatggatgcgaatgcaatcggtcttgaaatttaagcatttcaacgtatgtacgtaaagtcatttttctcaaacaataagaatggaagtcaaattgatcttcggtgatatcagcataatgcttctccacagctagaaatttttttaaagcccgaccaagatcactttgacggaagtaactttcaccagattccagctcataccttcaaagtaaaatacaacagtaaatacttagaagcaacaaccaacacaaattgcttcaacaagtaaatagatccagccgtgaatagagacataccacatgcactgcatgtcatgcaggttggtatgctgatctccatctttagtgaataacacagcagtcctctcagctaaagtcacctgcgaaaaagaaaatgcaacatgaagcacattcaaaacatctaaagccacagaaagaacgaacaattcataataagttcaaatgatcattggtggaaaggacagtttcagtacctgatcagcctgaagcatacgcttaacacattcactgttgatgtagcggtcagcaagatccatacatctagcttcatctgccaatgcagcagcagcagccaaatcaccagcatgcttcaaaatttggctctgtaataaaagacaaaatttcaaattttaaaggaagaaaaaaaataattaacaatcctgctaactcaaaaattttataagctcaataacattgaaaagaagaggactgtgcacgagagaggatcaaatcctatttccctgggcaacacagctaaagatacaactccagttaagttcttatttggacgatccaaaggataccctttacaattaagctaaaccaattcacaaaagtaaatcgtacaaattctagggtaaatgcatgtgaaaaacctctagccaacaatattaaatctccttaagacaagaatcgccaggaatgatcatttcaaaatatatcctcacgtcacatgtgtattactatctacagatacactaacgtgcacaaactcctataacttgtcgactaacattgatttcaacaataaaaattctatgttataagtttgagaaggggtaaaaattaaaattttgtatggacaaaaaatccttaaaacatgtcaagaaaaatttacattaaaaaaatgtttccttgagaatcttaacaaaccttgccagagtataaatcaatcgcagtaggggtgtgctcaatggcctcatcaattttagaaagagcaatttcatattgtccccgtctgtcgtaatgctggatccagacagaaattctaagcaaaaaaaaaaaatacccaagcaaaaatataaaggggaagcaaagggaacagaattaaaggtggcaaacctgagctaataggaataaggtccacataagagttgaaggaggttctttctctgacctgcatttgaagtaaatattaagaagaaaaaaaaggcatcatcaataagaattaccaaatggatgcctctggccacaaaatcatgctgcttaacgaaaaaggcacttgcaagatgaaagttttgagcaaaatagagcattctccatttacaactaaaatctttaagcatagagataattttataataataccgtgacacactcactgaccccaaatctaaaagcatattgcttacatcatcagattgagtatgacagaaatacgattggctgttaatttagtatataaagagggcatgaaaaagataagtcaaatttattccaccaaatcagacaatacaaaacaaagctaaacaaatacagaaaactataaactataaacattttatttcatttggaaatatgtaactttttattgaatgaacattatacttcccaaaaatcaagattcttaaccgaaaaaaaatatcacagaatcagagtgaatcaatgaaaggaaatacaaggatgagaatggaggtggaggaagaaaactgcaacctcaattacccaatccgctaatcaactaagccacatccagaagataactcttatgcaattccatattatggaaatagcattaaattactagaaaagatactcgttaactatttccaaataggcttaagtgaagtcaatgaatgtttcaacgtgaactgcaattatgcaaataattgctgacacagcttacctcccggggaattgaccagttgttctaactgcatgctccagttcaataataagttcctcaagaatatctgcctggaaaagagttgtgacaaaggcataacttaaacctacagaacatactttttctttgctcctaaaaaaaatggaaagaatcaagaagaatgaggagcaaccttgccaggatgatcatacaatggagaaagatcagtgaacaatgacgggactccctgaaagcatgaagaatataagctgccataaagtataaaaaaccagttagagtaataagaaaggaaccataaataccttagtaaggaggggcttaatataattgtctgcttcttctcgaaatctgtcaccttgcagaaagtcgagcggtattctctgaaacacccaacccaacaaagattcagtgataagtccagaaacaacaagagcattaaaaaaataatgctcatggtcattctaatgctggaaaaacatagtagctacacgctaatttaattgcattaaccacttaaatcacttgaggaagttgtagccgagcatttctaatagtaagtaaatgtgacacaaagtcgtgtctgaaatggaacaatggtatctata

SEQ ID NO: 1003 - DNA, 1971 bp, Cannabis sativa
accaaacatttaaaatgaaaatggataaaaacaaactataaaaataaatatctatatagatatatatttgcctcccaaatcaaccaatgaattcaaaatttgcagtacttcttttctatcaaaatttttatattttcacttgctactaaatatatatatatatatatagtaagccaaaattaatttaatatttgtaacctctggcacacaagtaatttttttttttaaaaaattaagtgcacaaactacgtacagattgcttaaaaaactccagaatatatatgatacgaacaatatattaatataatggtccccataacatgcacattgatttgaatttctaatttgaaaaaactatagaattgtccttgtgtttttatgttgttttgtccttctctttctctttctgtgctgtatataataattgacctgccttgtcatttctatgaaattaatgaccctttttgtattcatacactacttctattatttatcatttatatgtatttttgctataatgctgccctggcttagtaaattcaggggaaaaagaaaatttaaaacgtactctttggacgtgcatggcagcatcagcatgcacacgtttcttcattgttttatttaaacacagtaattaactgaaagtgaatataattttcaaactcgtattagattaatttattatctaatttagtttagaactccgtgcaattcacgtctcaaattttgtaatttattgtatataaatatacaaggttgtgtcaggtcttcctagtggtccaaaccccctttaatatgatatacatttttggtctgcttagggcttctccaacactaaaattctaagtggagtttagaaacaaaattattctaatgaaacactaaatgctattctatatatttaggagtctactacaccaattttttttttttttttaacattaaaataataggtttatgattaaattttatatttatatacattgtgtgagataatttaataaaataatataataatatagaatatatttttagtggaattttagtgttgtgtttggaattggaaaaaaaaaaataatgttgaaatagtattcttttagtattgatttaacactaaatttgaatttttccattaaagttacgtacccttaatctattttttcataagatttgtgtttattattttacttcgggttggatcactcttttatatataaaataaataattattgaaattatgtgtgtatgtattattactcttacttttttatatgtttggtagacactataaattaattattttaattgtcttaaataccaacattatacataattatagaaaaaatagactacaaaaatttctcaaacaaataaggaacaaataaggggtgtataaaaaacttaaaaaacaaaactccaatataaaaagaaattaccacatgtacgtctttttattaattttattttttctacttttacgttatttatttcagtattctatctatatatatataacttttcaatcacatttaagtttaagcataggtcttatttttatttttacggtttcttcataaatcactttcccctttattttttattttctctgtcccgcatttaaacctcctcagccatgtgaccaaaaatgaatatatttcttcttctttctcccaagctcccaatcactctccaccatgaaaaatgaagcttgatttcttcaaaaatgaaaacacaattcgcaatacatattacaaccctaaaccacgactaaactatatatttcaatcttaaccccttttaatatttcttcttgctctgagtcattttttcttctttttaattatttgagaccaccacatcaagcttttattgatttccaaaacgaaactgaagccacaactgatatcacaaccttaaatcatcattaaactatgtaataatctcaactatatgctctagtcgcaacctaaa

SEQ ID NO: 1004 - DNA, 2793 bp, Cannabis sativa
ttgttacagtatcttggaaacttgaaaagtattgatcttagttgctccgagcaactaactcaatttccagatctctctggtgcaccgaatcttgagagaataaaccttgaatcctgtacaagtttgatccacgttccttcgcagagtttgcggaaccttaacaagcttacggatctcaatctgagctactgtgaaaatctctgtagtcttccagacacaattgatgcaaaaacactcagaactcttaatcttgaaggttgctgtaaaattaaaagttttccggagataattggaaatcttgtgtctttaggcttaggctctcttgaagtgaatgaattaccctcatcaatttgttatctcaaaaatctttcttctttgattatcaaagattgtaatcaccttagaaatcttccaaccagttttcatgagcttgaatccttggaatatttcgagcttcgtcactgctcatcttttgataagtttccaaatcttccaagaaacataaaaatactagacttttgcgggacaatgattgaagatgttcctgcctcttcaattaactgtcttcctgatctccaaagtatcaatctttctgacaataaaaggttagagtatctcccaacgaacattttccaattgaagtgtcttagcaatctttatctttgtaattgctcaagtttgaagaacatcccagaaatcatgtggcctgtggaaagcttaacagaactttacttaaggggaactgggattgaaaagttaccatcatctattggaaatttgattagtcttgtgacattggacctggattcatgtgacaatctcaagtccattccggacaacatttttcaattgtgttctcttaatcaactcattctcactaattgtccaaaacttgaaagtttgcctcactctatcagttccctctctttgacttcactagaccttagtgagtctaacataatagaaatcccttcaagcatcaaacagctttctacattggattctcttcacataaaaaattgtcagaatcttcaatatttaccagagcttcccttggctttggaatttcttgatgcaagaggatgcacatcactggaaatggtgtcaaattcactaatgaaactcacaggaggccattggagtgactatcatataagtgaccaaactacagaatgtttgttatttttggagtgtctaaaattggatcagaatgcacatgagaatattgtagccgaattccagcttagagttttacgcatggctataggattcgaacctcaggaagaagttgaggtatgtcttttttgttatccactttaaaagtaatattgcctatatttattctcttaaacttggaaaaaaaatgcataatacttttctctgtttttgcacactaggattgggactctgcagttaacatgtgttgtccaggaagtgaaattccaaactggttcaactatcagttcgaggggccttcatttagtatgaggctttctctagaatgtgatacgtctgactttctgggctttgtagtatgtgctgttgttgcggaggactcttatcctgacataaaaaatatggactttctttgtgaactccgtttgaaaaccagtgatgacgaaaaccaaaaatttctttggaacttcaatgaatttgagtctggatttgaggcagtaccaagtttcagttcggatcaccttttcatgtggtatcagcataaggattacaatcattgtcttaatgccatggaggcatcatttgacttctattttgggaagtttgattattgggaacaagatcatgtaaagtcctgcaagggcaatgtgaaaaggtgtggtgtccacttgttatatcgccaagatgctgagaaatttggtttcatcaatcatcaacatgtagttgagcctaagccaagtagatgtagaactattgactctgtcactgaagcaactaatcctaaaagaactaagttttccaaaactattgattgattggcgtaacatttctctaatttggaaaacatggttgtttaaaattttgtaatattctaaagctacagtaacctagattcatcgcagatattagtgagtcagaaaaatacagagttaatatcagtcatagaattagttaatgttgctaagagaaaacactttagttaccacgaaggtaacttcttatctcttgccagtctagacaaggtttgactctattctttggaaacatacaactcagttccataaagttcaaatctactttattctccttttgttctatgtgttcttactgaactaatggtgaaaattgcataaaagaatcttgtgcaaattattgcaagttcaattgaattggcttctatcatagttaattatggaccagtgcttcaatattgaatgtgaattgcatcgtttatcaagaattatttgccttttgtgtaattatcatgagggaacttgtcatagttgatagacatgactttcagcatcagtgaaagattggatcagtagttaatagctaacttggcaagtgtgtcgccttgaattgctaactgtattcagagttcttttgccggttgtaacatgataaagtatctgggtgcactatgactagaaactattaagaaatttctggttccaaacgaaaaagtgcaggaatatccatggttttagggtgagaagcagagtgtggagtaattttggaaggagtttgttaaagaacttgaaaatgattgggttagagctcctttggttgaagcctttaattgcataactttattgttgtttatggagtcaaccc

SEQ ID NO: 1005 - DNA, 796 bp, Cannabis sativa
aaatgcgatcgacctctgcaatatgcgtatcctcctattgggaaggtcgtccctctctacggggcatggataaaggcagggatgcccattaggaattgttttgatccggcgataccgagaatgaaacgcaacgattgcagggaggtcggaggccctactccggcgtaccctgtcgataagggcaagaaggtcattgagggaatggatagggacgggtcaaacaaagggggacaagaccaggggaagcagaggaccgttggtatggggttttcaccaaaaggggaactgatgcagggagcaaagaaggcgacctgagggatagggagcagttgagtatttcgggtaataggagtaccaaacccctggtttactcaaaaaaacaccctatgactaatattgataataggaggagagatagtgggattattgcaagcttaatggctgatattgggcccacacgtgaccaaatggtagataggtcacatgaggaaatttgcaagtcaagggttccacatcaatatccagagcccacttatatcacttggcccacagataccaatttggaagaagtgatacatcaagtggttagcccaatccaaagtggtaaagggccgacccaaattgttgtctctcatgataatgtggatttctcttctattggaccttccttttctggtgcaaagaaaaggaaggcttctctgaatgtggtacctgtgattgactcaagggagaccgtgactaatcttggggataaacctccctcatctcctataaccctcctccctccgcttgaagt

SEQ ID NO: 1006 - DNA, 3221 bp, Cannabis sativa
atatatatatatatattagagaaagtggggggcatggcccctgtggttgcataacgtgcatccgcccctgcatatgcctatcttaaataagaatgacaattgaaatcttaaaagcatagaaaaaaaaaatgaaggatttatattaacttcaaaagaaacttaagaataattcataattgaccagaccacagatctctttccattggacggacacattttctgttctaaactaaatttaattttcatgtcagacaaacttcttgtgattcaaccaagatattccagtccctattcaacaataatctaaagagagcaagaaacattgatactacctgctgcatgagaacattgttgtctccctcaaaggtagactgcacatcgtattcacttttcatgtgaccaacacgattttcagtcttcaggccttgtcctccacaggcttcccgacactcctaaacaaacatcaaatagattaaatatacattaaacacaaattatataaaaatattgacttaaattccattatgacctgaagagttcgcatattatgccaggtaagtgtagccttgaatgcacttgacacaacatggatggttttgtttgactcaggagtcctcttcacataaattaatttcaggtaatttgcagcaaaactcatagcgtatctgcagtgtacacaaacccaaaaaataaacttacattatgaagaaaaaacaaaggacaaataccactttgttggcttattcaataaatttatatatataaatatataaatattgtgttactgactaaaattcaaaattctataggcgtcaatatttagcaatcacagatgagagcatgaaatttactcaagtaggaaggcacaaatattttagtcacaatctaggcctacgtgcttaaggaaaaaagaaagatcagcgcctagatagtcccaataattgggactgggaagaaataaattttaggttatcaaagaaactagtacattactggttaatttttttattatcttacttctagtatgaattgtttgatcctgagtaaattatcagctaatttgagcttttcaacttattccccaccacagatgagtccatgaaacgtatatacaagtataaaggaatacatacgtctttgcaaggagaggcaagagccggcgctgatgactagggtaatcaagcaacagaacttcaggtccatttggtgtaacagaaaatgcccgcctcgtcaaggagtatcttatggcaattgctaaactaatctaataggtcaaaacattatgtcaaattataaacaatgtgttttaagaaagttaataaagataaaatcaaagtttgaggaatcatgcctaaacataatattacctttgctgagtaaattgcactgattgctattgtaacgcgaccagatgtcaaaggagccaagaatgctgcaaacctctgaatgcgataaatgttttatactcaaaacaaatattgatgcagctaaattggaaagaagatataaaaaataattcatatttcaatatggaaaactggcaacataagtacctgatctggatcttttattgcactcaaatactgaccatccggagaaacatcagcaactgaattcaacaaattttctctggggatccgcacattgtcaaacctatgaataaaatgcccttgttatccacgttattatttttattttttaaacttggactgtgtctcaaaagtacgcaatttattaccagattctgccattatcaacgccattcaaaccaattttatgaccacaatcagcaattctaatgttgggacagacattgccatcatcatctctaatctgtgcaatgaatgcatggaccccttgattgttcccatttatattcagctgcgaaaagactatcgtgtgtgttgcatgctgaacgaataaacgttcaacatatcagaaatcaattatatgaagagcagaaagaagacagaaaacaagaattaacttttttttttggttaaataagaagcagaggtctaaaattaatccttacattagcagcgcctccaatccagtacttctgtgccgattcacagggagtactaatgacaaattctcctgtatttttatcaaacttggttactgtttcaattcctcgaacctgaaagtataataaagaatccatcagttaaaagatactcatcttcaaagcatgttctttactaaatcaaacgattgaacaatcttcacatacattacttccatgccccaactcagacattgcaaagcaacccttaacaatgtaactctcagtgtccctaagccacttgtcatgatggcgcttcgtgccaaaaaacttgatagcaccacccctgaaatcgatgatcaaaatatcatgattagtcaacgctaacctttgatattgcaaacatcttaactttcaagtcattttaacaagccttttcttcttggctccaaccaaaacagtagaacatggaatattgcattacataaacagtttcttctccaataacaaccacgagtatcttatggaaattgctaagctaatctaataagtcaatatactgtgcccaaatcacaattttaattcagaagaaaacatttgcatgcacgggcttgcggaaaaaagtatttaaggaaacgacaaagccgaaattataaagtagaaatagaaattaaagtttaccataagaagaaatgaacaccgagcttgacagcgatagagtgatcataaatcccaataacttcgaaaaatgcgaacttcctcatttcagcgtcgaccccatcctccgtaagccagccccgaaaaaccccgcaatcagaaagataagcaattcgcttcatcgtcatctctctctgctgttgcattgactggttatagtccggcgcgatgaagactcggccagcggcgttccgggggttgaagaggttgctctgcctcatcaacccaaagagccagtcgcggtcctctagattgtgagcatccaagagagatcgcatctctttggcatcgaaataatcggatcgttctgatagctccggtggcgaataattgagacatggattgggctcgataacattaccggagggtggctgaatgaggtgctttgaaagaacatgggttcgccatgaagcgcggtccatggattgtcgttttagggctttcggaagtctgtgattcgattgggtaagtgagaaatgagaaaatagaatagaaa

SEQ ID NO: 1007 - DNA, 1061 bp, Cannabis sativa
ttagcaagtttgtactataaaatcttgaagagtgaagtgccttgggatcaggaaatgtataattgtgtcataaattgctgtgctcgcgccttgccagttgatgagatttcccggctctttgaagagatgcttcaacgcgggttcattcctaataccattactttgaatgttgtgcttcatctttatggaaaatcaaagcttttcaggaaggcaaggaagttgttctggatggcccaaaagtggggtttagtagatgtgatttcctacaatactttgatagcagcttatgggaaaagtaaagattttactaaaatggagtcaacagttaaatcgatgcaatttcgaggattttcagtttcccttgaggcatataattgtatgttggatgcttatggaaaagaaaaacaaatggagaatttccaaaatgtactacagaaaatgaaggaatcaaactgtgattcagatcattacacatacaacatcatgatcaatatatatggagagcaaagatggatagatgaagttgctgaagtgttaacagcattgaatgaatgtgggcttaaacctgatctttatagttataacactttaattaaggcgtatgggattgctcaaatggtggaagaggcagttggtttgatcaaggaaatgagagaaaatggcatagaacctgataaagtaacatatcttaatctgattactgcactgcgacggaatgataagtttctcgaggctgttaagtggtccttgtggatgaagcagatgggattgcacggcaaacaaaactgaggtaccattgcctttttccttattttcaagtatcactgtacatgaaaacaccattggttgtgattatgctgcaattgttgaacccacttatgctgtcataattaggaccttttttagttccattttatttaagaaaattattgatattttgctttctgatagaaatccacaaaagggtaaactagaattgtattagaataagatgtagtagggagacgggaattaaaggggattaggtactctttagtatatggttcctcgaaattctatat

SEQ ID NO: 1008 - DNA, 1222 bp, Cannabis sativa
tatttaatactaatggaatgggcacttaaagaatatttcaaaattcagatatgtccaaatactaatagtcattattatttaccatcatgaaggatatataaagttaaaacttatattagaatgaaagaatctggtgtcaaaaatatattttgatattaaacaaacaaatattaataaacgagtgaattaattcatataattatataaataaaattgtccaaattcaattcttccattccaagtccagatatccaactaccaaaaaaataaaaatccaggtcagatttctaatattttatattttccttatcccattcacacggtttccgaaaagaggaatttcccttattaaacattgaattttttatggaagttttcaattattaattcggtgtacaaccaaaaacagcatttggactgattcactctttcttagattcaaaatttccttgacaatctagtttttgttgtatacgaagactaataagcaacctctgttgtcacgtgaagactattacgcttcttcactacacaaaaccatacattaagtaaacgaagaagaagaccatggtcggttcgatatcaagaaatcaaaactaaatttttattatcaaaaggtattacacacgccatatatatatagatacatatataaagctggtataagagaaaataacaaaaaatttcacacattaaaagcgataattataaaattaaaccgccttaaacgaggtcaaatttctgaaatgttgccatggtttttcccaaacgatggcttcgtactttttcgcaggcccattcttgaccgcaagaacaagcttgtaattggtgccagcgacgacctgagactcgcctttgaccacgctgctcaatttcagatctgacttcgattgcttgttgtactccgacacagcgtactctgcaatctctttcacgtgagggtctttaaggtcctctatagggctccaggcgccggtgagagcaccggtggtatgccttccggttgagactacgagagggacgaggagacccaagaggaagaagatagtgtaagaacgcatggtgattttttagggtaagaaaaaatgaatgaaatgaaagaattgggggattgttgttgtttttttgttttgtgagtgtgtgtttgaggtttttgaagggtaatgggatagaagtgggtatttatagcgggtggtgggacgtgggtaacgggttgtagaag

SEQ ID NO: 1009 - DNA, 2673 bp, Cannabis sativa
aaaccagcaaaagggatccaagagatttaaaacatttcctaatccactaagaactgttggaggcgaaatcaaaaggaacgagagcattcacaaaagggtatgttaataatacacttcatacatttccatgctgacaaacaataaagtacaaaatatcaaggatcagtacatgaacctttcactgtaacaaaagcagggcaaagatccagcctcacctgattctgtaacacagctaaaccatggatcaaaatgagaagttgcatactgcaaagatttctttataaattttataggcagggtatgaaactaggttcaaccaaaataaccagctggtaaggcaccagaatcaagttcaaagaagcctctaagcttgcctcctctctcttcggtaagacggaatgcaggaatctggtgagaaaacttaaaaaaatcaacttggggaattctccatattaaggttgatccaccctgcagtcgagccttatataccgagataaaaccattgacgcgttccaaaactgaaacctttattagtaaaacagtagctgaaagaacttccactatgtcatattcacagttttccaagtcactactgtttctgttgggcttccagttcctgtacaatgcccaaatttcacctttcctaggaaaaattccatattcatttcttctaccagtaagctctgcgtttacttgatgagaaaaatagtttaaacaatcataggccggaccctcaccctttctaattgtaaatctaccgcaagaaagaggcacgtactcatcagaaacaagccatgaaatatgcagtttgaaagatgggaaaagatcaattttcctgatcttagcatagtattttggcatgctatcctcatcactatacaatgcccatatctgaccaggccgaaacttatttttggatttatcagcatcaaagttgtagaactcagaatctggaagttgcaagttttctggccttggagctaaaggaatggcagaactgtcctgctgagtctctgaaggacgactcctttgcatgtcattgacaccccttgccgtggttttaattacaggcaaagcagccggatcaagttcgaaagatccatctggtacccctctttcattactttccattttataggatggaatcatatgggaaaacctcaataactcacctggtggaacacgaaatgttttcttcttaacccgacagaaaacactcacaaatttattaactttgttcaataaagcaacatttattccaacaccttcagcataatcagacaaaatttcaacatattcatattcactcttactatgagcagctggatcaccactccatttaatatcccagtttttaaagagagcccagatctccccctttcttggatgtatcaagaaggtacatctactactacctttctcccaagaaacttggtgagagaacataaaacgatttgttgttttctcagaatccccataactgaactcaccacaagaaaatggcaagtccgccacatgccattttaattcattctcatcagttggcaccggctctaaccaagttatgtgcacattgaacccgggagaagaaacactttttatgtgagcatagaatctaggcatgacattataaaaatcataagcagcccatacctgccctggtgcaaaaagctcagctttcctgtccttgtcaaagttgttgaaatctggatcaggatatatcaagaatttcaagtctgatgtctcatgcaagctcgaatcaatttcagagctttttatcaagccatcacttttaacaatctccttaagcactttcctcttcctggccttatctgactctccatcctcaccttctttacgtttacgtttgacccctttcttatcttttttcattgtcaaagaagcaacaccagagatcacagtagatgccactcccttttcactctttgaaggactcagattcacatagccaccaccacttgagttttccttgaaggagacctgttttggatttttctcctcagaaaaagcagtgttcatttcaatataaagaacgccattctcatcaatcaacattctacacgcatcactttcagggtctgagacattcatcactaacactacaaagcgctttctcgcaacttcgataatggagataataataatatttactaaaaagtaccgagatatcttactgtagaacaggggaaaggaagacggtccacaaagttgatgggtaattaattagctgcttgccatggctactgatcctcagaattcagacctgaaactgaaaggttgcttccattgttgtctccagaagaactcatcactgtaaacatccacatcaaaacatgatctttcttttttacaattatggtcataattacatcacgatttatgaaatttttacttataaatacctaagattatcatcaatgaaggaaatccaacgagagaaaagggatcagattagggttttcgatgataattgagaggaataatagtgtgtgtagggttttggagggaaaatcgatacaccgtttctgggaagaaaaaaaagtggtgataatgtatttgtagagtcttgcggaaaaatcgaatcttctattttttttttttttaattattattaaagcgtttataagggcattggagaaacttaaatttggt

SEQ ID NO: 1010 - DNA, 1009 bp, Cannabis sativa
tccaactaactgtgccatacgttgctgctttccttgccaaattaaataattcctatctttccaaaggtggtacacaacgctagctaaagcagtagctattactttattctgaaatttgctagctttggttctgtatagccatttgataactcgagccaatgttgtatctgaatctctccaatttagctttggttgaattaatattagagattgttagtttcttatcatctccaattgtaagtcctttaggtcttgagtatgcagtggaggattctaggttttccgtgccttgagtcacatgattcgtggcaccagtgtcaacaaaccaccttgaatcatctccaaagtcagggaggaaataagtggcaaaagcttgtggatcgtaatcaaagtcatgttctgtgatataggcacgagggtaggggtttgaagaggtgatggattacccagtggtgcctggtttaggagtgacccaaattttgtcaaattcgtagtgacaaacaagagcaatgtggccatagcaaaggcaaagttggcataggggacgattgttctagtttgatatcattcttgggaccctgtggtggtctgtaaggattggttcttgatccagagaaagccacattagcttaaagcttcatgctcaaatctgtcatggtattgtggtgttcaagtcgactctcgtgagagagaaagagagcttgaaactcttcaaacgtaagaaggttattgtgtgcaatgattcctgagacaaccgagtcgaactcaggcccaagagcgttgagcagctagagaatgacatcttgattaggtataggcgagcttgttacagccaatgagtcaccaattgactgaacttttctgacatatttagagatggattagcctcctttttgaatcgtcgagaactgacttttgaactaaagtagttgagccttagattgactggaaaattttggttctaaggcacgccaaatagagtgggaggtggtgaaactagccacagatg

SEQ ID NO: 1011 - DNA, 1769 bp, Cannabis sativa
ttaagttaaaaggttgagaaatctgtattgacagataaaaatttcataaatggatttgtggttcatggatggtgcttttagtcctgtttatatagttttggaaaagtggactgttacatgcacctctactctacttggtttggttccctctcaaatttgtgatgttctgtaagtatgtgactattgactggtttgggctgttatttctgatcatttgggtgcccatgacatgacatgagcctagctctttggttaatttatttatatgaataatgtatataattgataataatatattttcttctaaaattttggacttttgcttaacttgaagaagttaaagtttgctgatgaaaatagtttgaagggtttttgtaataatcttacaaatttaataaaccatggtaatttttcagatcttaacaatgatggcctatatgaaaatgctacaacataatttgccaaaagaaaaaaaaagaaactattgatgtgttgaattatttaagagaagttggtggtagttacctgaatatttggattgcttataagattatgctaatgattccagtgatgttgtctacacctaaagaaactttttaaaattgaggtcgatcaaattttattttcagttgacaatattttaaaaaagattgagtgatttagttatgttatttattgagaaaaatataaatgtaaaacttgataatacaagtttaatcagtacttttgcatcacaaaagggcaaagtgagtcatgtttacataatataaataaaaagtttgtttttctcatttgtattctactttattttgtgaagaattattattatttattttaaagataattatattgtatgtctacttgactttacctattttaatttttaattttatttttatgttctttaagatatactcatttttatagatgatttttttattataccctttaggttattgtaaattatgtgctaaacttggagggtgagagtatattagacaattcattcacaaaagtaggtacattttatgaaatataatataaaaatatttttgattaatggatacaaaaaatagatatttttcaaattatctcattattttaaaggtggtgtatttttatttcaccttagactctaaattgcttagattcagcccaaaaagtaatgaaataagaaaagttgtttagttcgttgttagaaagaatattgaaatcaaaattattttattaagttttgtgtgaaaatataataaaataagtggtgtattgataaaattattcttattttaatttggtaaagtaaatgtatgtgtattaaagttttttatttaattattttaaattaattgattatttctttatagaaattagtaatataatggtcattacatagctttatagatataaagagtattatactatccattgtaaaaaagattacaatgagtaataatatgtacacataaatttaacacaaacttatgtgataagttatttaaataattgagacttatctcaaacaaaaataatttagttaaaattacctataacataagtgtgtataaatttgtgtgttcacgtataattacttaaaaatcaatacaggttttaaacttttaagtgggtaataaaaatgctctatttgaaaataactcaacacactcacacctcttcattcaaaatctccaatcactctgcataccagttaagtctaatttcgtgtgaggccaccattagcttcttcttctttaatagtttttttttttttt

SEQ ID NO: 1012 - DNA, 4588 bp, Cannabis sativa
ttatggtatcagagcgggaaagaactgctttccctgatcgatcttgatctccttctccggtcttcttctccggcatcatcgtatcgcctgtgttgtgcgatactctgtttttctgcttccgcttctttcctcatggttgtggacgatcagaccactactcattccgacgcagacaatccatctactggaattcttgaaactccccaaacttcgattcagcaagggagccatcacttccagatcaacaactcgaggaatcccatggaagaccctacaaatccttattacctccatcacggtgacaacccaggtaatatccttgtttcccaactccttactggacaggataattacgtttcttggagtagagctatgcaattatcgatttctgtcaagaacaaacttggttttctcgacggatccatccctaaaccccctgttaatgatcaaatcttgtacaatgcttggatccgtaataataacatcgtaatatcatggatcttgaactcgatttcaaaggaaatatcgtctagtattctctatgacgaatctgcagccactatatgggctgatctcaaggttcgattccatcaaaggaatggaccgcatatatacaatctcaaaaagggtttaatgaatctcaagcaggatactcaatcagtgggtatgtactttaccaaattgaaatcaatttgggaagaattgtcaaattacaaaccaacttgtacttgtaatggttgcaactgtggaggaatgaagaaaattcaagaattccaacacatggaatacataatatcattcttgatgggtctaaccgactcttattctcaagttcggagtagtatccttttaatggaaccacttcctgagattaatcgggtcttccacttagtgtctcaagaagaaaaccagaaagggaattctacagcaaccaatgaacccaattccagaatggcttttgcttttcagaaggaaaaagacagccataacaagaatgaacatcaagggaacaaaacttatcctcctaagaaaggaagaccgttctgcactcattgcaatatccatggacacaccatcgaaaagtgctacaaaatccatggctatccaccaggattcaacaagcaaaacaagcaaaaggaggccacggctaatcaggttcaaacttccaaggacagcaatggaaccgctaaagaaaatcacactcttctccctcaattaagtgcagcacaatatcagcaactccttaatttgttggctaaccagcagcataacacgcaaaccattgatgctagcacttcagcaggtaatacaggtacaattcttacctataactctgctgctatacaggaagactcttggattgttgactcaggtgccactaggcacatatgcaacaatcccaaactctttcaattcatttgtaccacctcttcaactagacttattttgcctaacaacaatttcttagttgtgcagcaaagtggaaatgttgttctttccaaagatattgtgcttaaaaatgtgttgtttgttccaaacttcaagtttaatatcatatccgtaagttgcataactgatgataacattgttgatattaaattcggcactaatgagttttgtatccaggaaatacacaacaagagagtgattggcaaaggtaaagaaaataatggcttatacattttggaaaaggctgactgtaaagctttcaattgtgccgtttctgctgatgtttggcacaccagaatgggacatccatcaaatagaagacttgctctacttaataatcaactttcatgtaatatgagtaatattcataagactgaaccatgttacatctgtcctaaagctaaacaaaagaagcttccttttgttaaaaataataattttgctgaaagaaaattcgatttggttcattgtgatatttgggggccatatcatgttccctctcattctaatcatagatattttcttacccttgtggatgataaaaccagatttacttggttatacttaatgaagcaaaaatctgatgtttctttcataattcctcaatttctttcttatgttcaaactcaatttaattgtgttttcaagtgtttcagattcgataatgcccctgagttagtctttaaagatctttttgctaagttaggaatcttacatgactttacttgtgtggaaacgcctgaacaaaacgccgttgcagaaagaaagcatcaacatcttttgaatgtagctcgggccttactgtttcaggccaatttacctattagtttttggagtgaatatgttatgactagtgcctatcttatcaatcgaactcctactccaaacttgaataactgttctccctatgagttattgtttgataaaatacctcattacgaacatctcagaaattttggatgtcttgctttcgcttcaactctcatggctcaaagaaccaaatttgaaccaagaactcgaacattgttttcatggggtacccacaaggagtaaaaggatacaagttatatgatttaaacaacaagcaattttttatatcaagaaatgttgtgttccatgagaatatttttccctttctaaaattaaacagtagtaacaaaaatattgatcctttctctgctattgtcttgccatctcacaatattactaacaccagtgttgaaaatttttctatatcagataacaacactacagattatcaacatatgactccaagcagtaatcttgatgaatcagaatctactacaacacctaacacagattctaatcaaacaaattcacaatctgctaccacatctaatacagattctcctctgcaacaaactgattcttctctgcaacaaactacaccagcaccaccattgagacgaacaaatagaatttcaaggcctccttcatacctccgagactacacatgcaattccatcattcaggacaagagttctacaccccattcctcacataaatatttatcttatgaacatctatctcctacttataagaaatttattcttgccttgacagcttatttcgaacctagcaattacaatcaaacaacccaatatcgtgtttggaatcaagccatgcagcgcgaattatttgctctcctcaaaaacaaaacatggacatatgttccattacctcgaaacaagcatgccataggatgtcgatgggtctacaaaatcaaatacaacagtgacggaacggtggaacgatgcaaagcgcgattagttgcacaaggatacacgcagcaagaaggattagattttttttgatactttttctcctgttgcaaagatggtgacatttaaacttctgcttgccgtggcttccatcaaacaatggcatatcctacaaatcgacatagacaacgcctttctcaatggcgaccttattgaagaagtctatatggaacttcccaaaggcctcactataccagatactgtggacaaaggatcaaacatcgtctgcaaactcaacaagtcaatctacgggctaaagcaatcttcacgacattggtatcgtaaattgtctgatgctctctttcaagaaggctttactcaatcaaaggctgattacaccttgtttaccaagggtacgaacgattccttcatagtgctactcgtttatatcgatgacataatacttgctggacctaacatctctctcctacaccaactacaagagagactacacaacagattttctctaaaaactcttggccctctaaagtacttccttggatttgaaatagcccgtgccaaagatggtctctttttatctcaacggcaatacaccatcaatttgcttgaagacaatggtttcataggcagcaagcctgccaaaacaccaatggatcctaagttaaaacttgatgatgaacaaggtcaacctcttgacaacccgtctcaatatcgacaattggtgggcaagttattgtacctcactctttcaagacccgacataacatatgccgtcaacaaccttagtcaattcatgggaaatccaagaacaccgcacctacaagctatacatcatttgttaagatatttgaaaggcagccctggacaaggacttctatattccactcaatcaacacttaaacttcgtgccttttctgactccgattgggcggcttgcccgaccacaaggcgatccactacaggattttgtgtgttccttggcgactctcttgtgtcatggcgcacgaagaaacaacctaccatttctcgaagctctgctgaggcagaatatcgagctcttgcagccacttgtagcgagctgacatggatccaataccttcttcaagatttccaaatacctcaaacaagtccggcttttatttactgtgacaatcagtccgcaatacacattgcaaataatcctactttccacgagagaaccaagcacatagagctggactgtcactttgttcgagaaaaaatcagagattccaagattcgtctcgtgcatgttaacagcactaatcaactggctgatgctttaacaaaacccctttcttctagtatcttaacttctcacatcaacaaaatggttgtatatgatatatacagtccat

SEQ ID NO: 1013 - DNA, 1259 bp, Cannabis sativa
ttggtggtccttttcagtctatcttctctcttgtatatatggcacgcacaaaaaacacagatgaggaggattgatagtgatgaaagctgctgaagcatccgtgtgcaatgaacctcaaaaattgggtgtgccacccaacccaattgggacctgatctgacctgaatgatgagattgaaaggttgttctggcagtactaatgcctcatcaatttcatcctaaaattagagtttcaaacatggtgacatatgtcacctcctccttagactcttgaaagtgacacccttttaattaaatgccttctcttctcctagatgaagctaaaactaagtgagagacttaattaaaagcaaacacccaaaatgaggagtagaaggaggtgatggtgattgtggtggtagtagactagtagtagtattagtagtagtggtagggacaagagtgacaacatccccacatgaccacatgacaatgtatattctatatgtaattatgtatccattccttcactcataaatgtaaagctctttaggtaaatttggatatagatgcgaccaaatccaactcccttttgccaatttcaacacaaacatgctttactacatacctccatcccatcccaccccaccatcccatcctatccccacttcttaaaaagtactcctccttgtatacaatatattatatactctcaatgaaatagcttaaggtttcttcttatgtcatgtaaaaacaagagtctctcttttttaagtctattctctaaaaaccaagcaatctttagctattcatctaattttgatttgaagtttgaacaatatacacactactaatctacaaacaacaacatacccaccaaatataatattttataaataaattttaagaaaaccccaaattgacataatttccaatgcacattaattgggtcaagcaaaaaataaaaaagaaaataattaaggatattggaatattcaataaattcagttattatacaaactcatatttcaaagaagattactttgatcatgataatgatgatgatatataatataataccttgtatttaacagagaaaattacctgaagatgaaggtagacaaattaagagaaaaatacaacctgattttttttttttttaaattaaaaaaaaaataataaaaaaaagaaaaggaaaaaaattaaaatcaggttggtggcgcagaacttgagctggcgccagaagtcgagccagatagtagctcggctagggcggtcatg

SEQ ID NO: 1014 - DNA, 3087 bp, Cannabis sativa
caaagattcgaacactcctggtctagctatccagatatctacaatcttcactgagctccaatactcattgttgttcagtcctggtctttaacccacatatgaaacatatttgtgagtcaataaactccgtaaaaaaagcataaaacataaacatataacctaacttgaaacttaggcgcccatacacctaatcacaagcctaacccactttcaccctttcaagtggtgaaaatatttcaatatatttgatttcttacaagacattccaaatgtgttgatttcctactgtgtatacagttgcttcaaaggtttctagtttttttttttttttgttatagtattctgaatagtaattgtatgggtcgagatacatctccttcatcacttttaaagtatgtgcacatggcatttcatcgatttgaaacctattacatgtgcatgttttttcttttagattaacaacccatgatcactttactttgaacactttcaatatgtgttcatttgatactttgagtacaaatatattctgttatatattattgtaacataaaaataacattatatatttatgattcttaaaaaacatgtacctttaattttaaatcaactttgtagttgttcttcatcttcatctcgctagctagaataaattttgtgaatgttccttgtgctatttttctgtttgtgtatgtccacatgaagtaaagtcctcaaagcctccatcattgttattattgatagttttctagctgtcaggtttgctttgctgcatttagcgattcatcaacatttgatataatggctctgaatcttttatttctagaataatacattgactatttttcataaataatattttttagttatggtcgaacccgtttgtctaaggcgtcgagcttttcatgtgatattcgaattgtgagttgtatatgcctatgttgcatgagaaaagggctttcaaagaatcttgcattttttctaatgttgttttctggttgttgagtaggtgatatacacaatatccatgttctacttcaacaaagatttgttaagctgcttcgattatactttcatgtctatcagatatactacaatggtcttgtctaacaccaaatgtccctcttaagtttcaaagaaccattcatatgagatatcattttctgagtcaaccatataaaaagctggtgaaaatattttacatcctgctcttgtgcactagttgttagtaatgttctctcatatgtagcttttagaaaagtttcacccactacgataataggcatgcatttatttcgtgctttcagtgaagtatttagtgtcatgaaacaaaataagaagttgttgttttcttcggttttaataagcattacagatccttggtttttttttggaacatatggaaataactggatagcaactgatatgactcttttacttttcttctaacaatatttagagtgtgttccctactcctccatgcattcatgtaattcatatataccatatttgtcattcatctcaaatctaatatcttatggtgtttgttttgatgtttaaaaactcgtatttaacacagtaccatattatatttgcatatgcttgccttttatccccaattctagtgcttagtaagcaattctttagcgtaagattttatgaccttgtattgaaattattattttattgcaaatagttgagggcactcttcaatatttctttatctttgtagatatgtactttttcaatttttaaatgttgtttatctatgataactaatacttcatcattgatttcttcttgatcaattgtgtgtcttgttagtttttacatcatttctacagtaaccatttgtgcatagtcaacaaagtcgaatgtttcattatcttctttgtgttttctgtgtattgatgtgtggttgttccccctgattgagtttcatattcaagcatgtggacttcttgccttgccattttgcccactaaaagatatttgtgttgttggatttgtgttggggaccattttttatgcacaaaggatgctttgtcatgtctttttctcttaattttaactgcaagtaaaaatcaaggctttcatcatccgtgatctttagtactgggtatccagattgtacctaaaactatatttgtaggtttgttgtgttcctgttgcaattatattttcgcaacagtttgtccaccaattctataaatttgtaattttgtgtaatgcatatccagtagctttgaaacctatgtattaattgttctcatcccaatgtccattactttgaactagaactagtaatgattctatttttctacaaatcaacaccataaaatatatgaaactcaatttaaattatattatagatgaataaaataaattaattacataaattaaactagcaaatcaacaataatcatgtctatttttttacattattattatcaaaatataattataaatcaatagtaggcaataaacaaaagcaattttgtaaaattaacaataaatcaactttaactttaatttaagtattcgctttcgcatcatcaaaattaattttaatatatcatataaaaatacaataccttgaatttaattttagatttaataagaagtttcgaccaacaatttttcaatctattcttgtatgatctgcagcattgaaacaataatttcacgttatgtagtatagatcttattctaattatttcaatttttgtatttctaatgtttgatacctatttttatgcagattttttaagagattttgttgttcatccattgacattttttttattaattcttttgttttattcaatctgcctaatcgttggaagtttggttaggattaagcattgtgttgttgatttgtagtttgaaagagcttggttcaacaacaatgtcatcactataatttttgtttttgagcaagtattgtatttattgtcattaaaataagaatccctcatatatttgttataaaatttcaatccaatcgtatatttgttatttttttatgtttaagtgaaaaaattgctttattaaattaatcactgtaaaaattttaaaaggtttttt

SEQ ID NO: 1015 - DNA, 2395 bp, Cannabis sativa
cttaagaaattaagttcactgtataaacgcttgaaacacttgagcacatgtaataattaaacacttagttcatgacctctctgaacaaactgcagttcatacatatcccccgtactgagagatttagtcaaacctaaaaatccatcttatcttgaaagctctttagagaactcaagagacttgaaaaaaaaaaaatcgaattctcaatggaatatataatcttttgtttcctgaattgattgcttacaactactttacaaattgaaattcaacttggggaaagtataatgaattggttggaatcataacaataaagtcctgtgcaacatcatgtttaactttaaccttcaaaactggcgaactttctgaattggaatactaactttacattattttcatcttccagaatttagggaatcaatgtagcatgcttcttacttgttttaatatgttccaacaaaataaagaactataaagacaggaaaaaaaatccaataaaaagttttaataatgaaactgcttgtactctccttccctttccaaacatttagtaaaaactaacattggatgacacatcttagtgacatggcataagattttttctatcataaagttaacatattgaaaataaaaataaaaaagctattattttcaatcatattatgtgaaaaaatgtaacctgcaactcagtcttcaatccaccgtagatttggttgtcaagcttcagcaagacagtcacacaaggacgcattacagctgggtcttctacggccaagccatccaactgaaagaacaaacagttcagaaaatgcgtgaatcattgataaaatttgttgcacaaaaagcattgatgcacagaaagcattacttatgaaactacaatgtagagctacaacatagataagtttcaacttccaactgtacttacttgcaaagccttaaataaatgatcttcgaacaaatggccatcaaatgaagagggtatggcacaattctagcacaagcaaatggtaacaaattaattaacagtaggatgtggtatgattcaagattacccaggtaggaaatatttaggagatctatcaacttacctctagtagaaggcataggatatcaacctcaatgtttgacaacttcaggctggatgtatcagatttacaatgatattgactgcgtcttctcaaaagttgagataagaatgactcaagttccttaacatgtacaacagtactgccaactcctttgagcaaagataaaatcataagctgccagaacataaagcccatcaacatctccacaaaatatgtactacattgtaataaataaatataacaattatgcaaagatgaataaccgaaacaattaaaagaataatagcaaggaaaataaatgtgtaacttagaaacaatgtgcaaaaataaaatgtaaagctaatcatcatagggctagctaacctttgaataatcagagagcttaagagctgaacccaaaatgaacgcaagaatcttttccctggtgggttgatcaaacctgcacagaagaaagagacatatgatagttattgctgggcatgaaaggtaacaaaaattctggagattcttattggtcctttattattcactagtactacccttagaagcacaaaataatttagaggaagaagtcatcggattggtaaaatggaaaatagaaattatataatcaaacaagaaaaaacaagaacatgtgaagcaatatatgacagttcatataacttgaaatctcacaatgtgcaggttatcaatgaatattgcaaccaaatatttcttacttttttagctattctaaatggataatgaaacaataaaaataaaaactgtactaatcaacagaaaacaaataccataataacaacagatgataccaccataataagaagagataaatacctttgctcaatattcttttgtaccaacaagctatggcaggatgagccaagcaaagatgccataagtgaaggaaggaattttctgtcagacaaaattagcctcttttgctgaactatcaagtccaaaagtttatcaagaaaatgactccaagttgcttggtttcctggcatttaaacaaaatcagtatatgcaaaaattgaagtacgcatcaggaaacagataaacaggagaccatgtcataccatttttcttgctggaacagtcaatatgtgcccataatgcacgtaatccttccacacaattcatagctgcaattcttacatcctagaagagaaacagatcccataaggtaaaaccattttagcacagaaacaaaccacaaacagttcttttatagaaaagaaatgtctaattacaccggccactgacattacatgtataaactaaatccggtaaagtaagatacc

SEQ ID NO: 1016 - DNA, 5817 bp, Cannabis sativa
tctcatttaaacatttatattcaactttaaatttctacctttcaacagcagcaaggtaacccatcttccctggtgctggagcaacataaaacctaaaattgaagaatacaatagtttttaaaataacaactgcagtatgcatactgacacattgacacgcagactgtaataagtctggaagatggcaattatacagaaacatgttcaaaccccacaggagacatcttttatagtgtagagaatctatgatggtaatgccttagtagaaaagtgaatgaaaaaaagatattgcacattattagcagcaacttgttgtcaccagttctaagtgttttagtacaagaatttaaccatatcacttaccacaccacgagaaatgttgtgagatagtaggcagtattcagtagcccatacgataacactccagcaatgccatatctcttcagtttctttatcatcctgacatgttaatttagcataaatgagattgaacattctcaacaccaaagtacacaccgcaaaagctatggctagagcattctttcctcctttaaagacacaatttcatgaccaaataaaaataatatgatgaatattccatttagtttacttggtgtaaaatggtctaactctgaagacctatccaattaaaacaactctaataacacacatgtctgcaggtcaaactttgatttgctgatgccaattttgcttgtggtgaatcccattataaatggagatcatatggcgagaaggggcaaatgtaactcaccctcatcatatcactaagaaaaaaacagtagcctctaatattttgaccaatgacattgtaaggcaagtagtaagtactcgttggatttgggcagtactccttgaccagtggcatcattttcaggcgaacctaaaacagcattgcacatgttatagtttcacaaaatttcaattttttgttgcaatgaaagaaaaataaaaatagcattggtcaatttccaaaacaacaattttatttagttggcattactgcataccttcatgttcaagggatccactttgagtatctgacaaaccacgaggctaatctcacataaagaaaacagaaggcacaattaaaattaaacacttttcccatggtagttactgcaacaaaaacaaaacaaacaccatataaagtgataaaataacgctcaagagtgcataaatactactgaaatggagacaattttcattgaacccaagtgatattgaaatagtagtatgttacacttaagcctaatttactttataccaaattggtaatttagtgtgctagtagcttatatccatggcttgaaggcaaacccacgaagaagggttgttttaaaccagaactagattagtctactcttgtaaggggtcagtactattacagagaaaatatcaacattataggaagaaaatgcttttcttacttggaggaataacaaggcatatatttagagataagaaagtaaaaactcacatcaatgtcgtcgccgttaacagagcaaaatttccggaattgggtatgattgatttcccaaaggttcatcttccgtggcaaaaacggggaagaaccaatatagagtctccggcaagagaagttgttgataccctgctaaggcagagaatcaaactgagttagaaaaaagaatgagtggcaaagagattggtgatgggattgtgattttaccggataacaggaaaatgagcaaggaacggtgggcagcttcagagaaagagacatggctatggcggagggagagattaagcagagtgcttaaagttgggtactcaaattaaatactcgtaactataactaattaccaatatttactggatcatgcctaatgtgtttctttattattttttgttttaatttttagacagaaaatagaaattttcattaatagacaaattatacttcattgaacaaaatcaacaataatagacaacaacctcaactaaaaagaaaaataagcttctaccaacctcaacaggtgtatggtttgatttcgatcaactccgtaccggagaatttattgtgtaacgaccgtgaggtctagttttatttaatatatttttacgcttaccttcaaaaaaaaaaaaatctaatatataaaaatgtttcaaaaaaaaaaaatattaaaaaaaaaaagtgagaaaaattaggtttctagactaaataaatatgtgatagaattaaattatcaatgataatcaagtttaacgatctttcaataaaaattgagatataataatatcattcaaatggttaactgtaacgagacatctaaaagtattgaacaccacgaaacaaagagttaatagataaatttggctgagaaagagaaagatatcacattgctgaagcaaattaatctaatcaatgaaacatcgatgtaccattaaagagaaaactccactccaattgctgaaattttattgatctttactaatctatcaaagtaatgataaaatactattattgtaaaatataaaattaatataaatatcataactcaaacaactgaaataattaaaactaagtacaagggtatggaaaaataacaaagaaagaagacataataaattatttgaatgttaattttgataacagaatctatataagaattaataaaatttacattagcctaattatgaataccattataaatgaaaaataataaactaagtgcatcatgtggctccatcaagttgatgatagagattatatagttaaaaataatgtcttttattccaaactaagttgcatccttaaagaatttggataatctagtttcactattgggcaatgagctgttgaatagactctatggtactttgcttaacaatatagagacttaaaggagaaagcaaaaagtgaagatgtcattttgagaagtgatatgaagagctagagatactttggaaaaattctaaacaataacaagagcctacttcaatctaaagtagcaaataaaaaaagaggtaaatagtaaaagtttattgaattatatctctatccagtttgctacaacattattttagcaaaataaggctaaaaaatgtcaatctatcaccatgctttttgtttttcttttccaagaagaacaagcctttgatcattcataaaatgagttggagttgaaaaaagagtacacatattaagatcctatgtggtcatctccttttaacatgcattcatcatgcttatttctttgatatcaagttgagtttgaacatttgaactcatatagttaagcttggggcgttcataatggagactcataactcattgacgatagttttttcaaaaatgaagacgatgactttatttaatgaagcatctcttaggtgacacctaatattttcaactttgtcattaattttttctatatactctagcttaatgcattgtattgattttgttgtgtatgtgatggattttattactttttttggaatagaagaagctcattttgagaaagctttggaacagtttgtttcatttattatatatattaattctgaattatcttctgtctaatttgaaactatttgtacatatataataaaaacaaattcgtaatctattatgatacattaattcttatacaaagatcgataatttccatgacatagtaagcgacataagaaggaatcggattagtttattaaaatgaaaaatacaaagtcgaatgtcaagtttgtcattatcaagtccattataatcaatcaaacctcagcattcaaatactaaaaaatcaaatattttttatgttttattttttattgtttaaataagaagaagcataggttttttcaccagtagagagtgtggccgtagaggggaatgattcttcatcctattacaaaacaacaattaatgattaaaattaagattttaggaacattttgaagatattttcgtctctaaacatatatattaattggatcagttcaagttttcagttcttatatatagttcgttgtgaactccaaaattcaaatgaacacactgtcatgttttgtctatatatataaatatataaatatttatatgatctcatgcaataacacaaacaaaatacagatatatatattcacatttatataaaggggaatgtatagttaaatgattaagactataggtagtaattatagtattaatattataattattaatatatgtatacatatattatatatgggagcagagaagcagaaattaatacattgagaaaactcttaggagaggatacccgaatatgctctcaattaataatgccatcatccaaagatgctttgcttggaatccccataacactatacttaattgtctctctaacacttaagacttatattacaaacacatcttttcaattaattattcatcaattaatctcaactttttctatattaattcctttactaaaaaccacttttcacttgctatatgtacatctcttcagttggagagcatatatacatgtatatgtatattctcagtcatcttttttctttttcttcttcttcttttttttcaaattttctctaattaatttcttttatttttcttcttaatatatacttccagctagctgcttcttttaatttttatagatgtgtggttatattttattttataaaccagcaaaaagagaaaaatatattattattactaaatccatgtatgttaaagtaacttaataatatatatatgtgatgatgatgatgatgaaaacatcatcagaattaggtgatgatgatgataattataataagaataatagtaaaagtgtagtggtggttgtagatgcatttagagatgatgggttgagagcaatagcaggggtcctcctacaaaaattgttagtgatgatgagatcaggagatgttcttacacttgttgctgttcttcaacaggttaatagccctagtatgttttctttatcatcaggacttctaaaactatgtaagacttttaaattcatatctctctgcaatctgcatctatcacacatgcactcttctccaaaatcagtaattaaaccagaaacatcatcacataaagaaaaaggaagttataattctatttttcatttataagagatgctctatatatacttacatttcctaattttggtatcttaaattatttcaaatttctggaaaattaatttgtgggagcttctgcattatactccatcatattttaaaagatagagttgcaacttattcatgtatcaaattaaaatactgaaagtatgtgttactactgaaaagaaaaaacatatattttagtcacagtataaattttcttttaattaatatttatatacaaattattattattttctttttagtctcaataaatgatgttgaatgtgactaaaaacacattagttaaaataatataaatttttttttgggattaatattaaccacccacattttagtaataataatatatttttagtcataatttttttatttttattgtgactaaacatatattttttttattatatactaaataaaaaaaatcattgtatgtttatttagtttcatttaaaaaataaaaaattattttttccctcaaactttgtcacgtatataattatgacttgtaatattagtgttgtcacgtatattttttaactttattttgtcctctgtaattttagcgttgttaaaaaataaaacaattaattttttctatgaactttatcatttatataattgtgccccttgtagtattagtgtatgttaaaaatatatttctgactttatcaatta

SEQ ID NO: 1017 - DNA, 4841 bp, Cannabis sativa
cttaaaaaaatatgaacccagagacacatttcttgctggatatttcactacctaagatacttccctttcacatgaagaaatatcatctttaaaaaatggcccttaccagctcttttagaaaagaaaagcccttcattagtcggaactccctaaagttataggcatatattcatataatagcaaacttaaaaagcatgtgctgaaaggcaccttaaagagccaagcaatgtgttataccattactgagtgtattttaatattaagtctcatacattataatttaataaatgatataaaaaaattactaacgtagtattaaacatcttaaaatatgaaatagcattctagaattattttataatatgaattggtacttgcaagtaagaaacataaccacgttctacttcctggctgtaatcaaatttgattcctctattaaaatggaaggaacacctattaagactttgttccttttgagtctgtccatgtcaataatcaaaaagataccttactcttgatattattatttttttaaaacgacaccttattcctgctttctatactaatgaaatttaaatcaatcgaatgaaatatgttgccttaaagtgggtatgggagtaaaattttcagaaagaaagaaaatgtaagtatccgattacactcgaaacacacaggtttcacatacatgatgcaacaatttttaggagaaaaaaatataagaacatacatgatactaaaataatgctacagagatctttcttttcccccttagactatgtggcttccctttgaattaatggtggatcaggtggtatcatagtttcatcgttacttttttcacagaattcttcattcagtacagacactggcctctctggactataataagtctttgaaactatgttggaagttgaagaaacagctaaattaatcttggttgggctagaactgtttcctagtggagaactgttggcagatctgaactcaaccactccatcttcgcggggcaaaggtgaaatcggtggctcgctatcattatctgtgtgttttatgcataacttgtcttccacaatgtcataagaattcccagtccgaacttcctgagctagagtacaccaacaacagcaaagccacaatgtgcagtcgcctaatgccgaatgaccaaaacagaagtcataactaggcagattgaatctcttcctcatttggatcctccaaaagccaccatagagcaaaccaaatacacatagaactaacccggtaaccccaaggacctccctaacagcctcattgtcaatattaacagcagccaagttgaaaataaagaatggagcaatgcaaaacagaaggaatgttgcaatatgaacatacatgtttccaaatccaagtctctccatattccatccaaaaacacagcaagtacagaagagagagagataagctacagatatatcattccaaaaatcaagtattcccccactccaattcagtttgctctcaacattctgttcgtcttcaactggtgcaaatgaatatctcctctcaaatgatttcaacctcaacttttccggcctttcagcagcactactctgtacctgtgcttcctcatccattccggaatcataatctttaccaagtgggctaacaattaagtataaaccagcaatggcaggagcagcaattgcaacagaaatacatactccaactcctaagggtggtcgttcagatcttttgtaaccccagttcagactacaaagagcatattgagcaaaacaattcaaatggagtaacagaacaacaaccatcatgtgagcccattcatgaggcttataagtcccattcttacagtaaagttttctaagcttggtaatgtcttttggtttccatctagatagcagaacaaggtggtaaattcttttcggatgttggtacaaacacataagtgtaaacagagcatttagaatttggttattgacttcaaaccatacatctctctgagactttttagttatcaccttgtttaacattccagtcataacaaggaacaaaattgcacccgaaacagcaacaatgaagatccataagaacaaagccatgttcattggatctttaaaccattctttgcacattttcttaaccgaaacccaatcaattttccgagaaaatactccacttatacgttctttaaaatcatgactacttgaagaatttactgacctggaaatctcatctttctcgttcgccatccgcctgaatttagcagatgctgaaccaaatttaaggaaatttctcttttgaggaatagcagtggacgtattgttgagctttttttgaggtttatcaccactaagcagtgtccttcgagacgctgaaatgtcaagaggagcttgacccttgtctttattacctccacttagctcaatttcctctttgcgagttccattatcaaccaatgacatcttctcaccaagctacaatactctcaaatcaagatcaaaattgtcacctaaaggactcagtgaataacttttctccaatggttccactaaggttcaaagccaagtaatgcatggttgttttgccaaatatttctgtaataaagaaatgataattgttctcgtaaacaaaaagaaatctatacccaagcaaaattaaaccaaagactctaaagaacataatcacagaaccaaaactggaagctgttaaatatagaaactaaactagttgataatctaaacaacaatccaagtcttgagtggagaaaaatgttcgtgatgaaaaccctcatcaattcttttgttaaagaaacattaaccaaaaatataaaacatttaaataaataataacaataaatcaatacatacagcaggaaaccccatttagcagtaaaagaaaagccgtaatttttactgttagggtcgaaacaagaacaaataagaacagattatgaaaacatacctgaagaataaccaagaaacacaggaagttaaagaaacctttgatttgaattcaatggagtattgaagcctcgtactcaagactaaagtaactaattttattggggggaattagggtgtattggtaagctataaaacgataaacgagaatccagaaataaagataaagggtgtattatcactcgactcggtattggtcgctgtgtgttgtctcgtcgatggtgggttacgcttacgcgcttgttctttttgccaattttcttttttggataaaataagcttttgtcaaagtgtgtgtgagtagaggaagaatagaacaaaatgtggtggttttgaagtgattcataatcgtacagtctggaaacgtcgtcgctttcagtttggatgtaccgcggccacgtgtctcaaaaggctgttgttaactcttattcggctcacgcgcggggaaatagttaggcctcaccaaatattttattttgacaaaagggctgacgaagtgtttaataactcttaataacacatttaattttccctgttagcggatacgacaagtagttataatgacttgttgtgagtctagaagttgtgtctaaaatataaaatagtagtttaagtgtacctaacaatcaatgggacaaaaataatataacaagatttaatatcaacaaataaaatagtaaatgttgttgttcaactaattattctaaacttcatgttgaagagttgcaaaagattatcttcaataatttaaacatcaggagctgatgggagtgcgctaatatttggttttatatcccaaacccaaaccacagaataattgtctcatcacttcttcgcactttccgtgtggccaatagataattctgaattttttatgttcgaatgcatttctaattttgcaattttgttgtaatattttcaattgaagttctctttaagattccttaagttggtcattactcattactttatagcataatatatattataatttatacaattaaatatcatattttacataattaaatttaaattacaagaaataaaatcagatattataccaacttctaactaacaagttaacagtacttacaatagaatgttgggtaccgcatgacactttcatggtttcatttcatacacatgattcatgaacaatctacatagctcattaagttcaaaatgaaatacaataatataataaacttaataaagtcatattgctacggcaagaaaccaactattttcaacacattaaattttgttaaatttttaaaaaatctgctaaaaattcattattcattataattacgataaacattatcataaatgtatataagttaacctatctagtagccgtaaatgttgtgccagtagttccaatgagttctgatttgtccattggagttgggcattataaattttaaccatgttattttcagacaaagccaaatataatcagaaaacatgcaaaagaaaaaggttaaaaaggagttacaagtcttgcaataccactctgactaaatatcaaatcaagtagaattcagaatcagcatattttgtgaatgtaaataggaacaaactcataatacaatgcaatcatcaagaacaggacccaaaaacacacaataatttcaaatcaaatttaggtaagatcgtcctcctcgagttccttggctttcagcttttccttcaccctcaacagtagggtagtcttccaagaatcctacacacgtacagcagcaatacaaacataagtccaaggtaaattttccaagaataacaagcaggaaatagcaatttaatcagaaccagagttgtaagcttaagttgaaaaagaaaaaaagatggctaaactagaaggaaaaaatatctcctctattt

SEQ ID NO: 1018 - DNA, 1699 bp, Cannabis sativa
aagtttaaaagcccttgaagttagggatattcccttaaagatattatcctagattctggggatttaattattcttttttgtaattcaaatataagataaaaatatgttatttttcctactttaaaagggatagctttacttatttgagttaggatatttggtaagtcctaaaatatataaaggacattatatcacatgaaaaatgatcacaaatcctaagctacacgcctatagttctctctttctctctctaacctccataagcaactaaggcctccttgactctaagtctaatttcttcataagttcttcatagaatcttatcagttctttatttgtaacacttatatctcacaattataatactgaagagagatatttctagaaattacaaagtttttacatgtaatcttcatggtattatcttaataattgaatataactaactgggagtaggtcattactcgttcatcaagggggtcaaatctgtataattttttttgttatttctactattaattattcttatttacacatggtaataatcagcaattaataaggctccgttgtcagttggttaaattttaagtcattagatattattactgtttggaatatttattagatttaagttttttttagtttattcttactaaaatgttgtttattggctcatgtattcctattaatatttttcattttttgtaatgaatttggtttgtgtattttgatgtttattgttgtttttaggacaatttttaatatatatttcggtttgatattatattgttcatttatagtttgaaaatagttgtaatccaattgttctttctctttttttttacaatttgctttgatcatgacactttttggtctgatttcaataatgggaatgcaaattccttgcatatgatcattataaatctaaagttgtctcgacttttagttacatagttattgagaagcttaatgctaatctttcaacaatgtcaaggcattgtactgggctacctaattctataaataattagacattctttcctgtaaattctacccacaaattgtgtatggacatcttttaagagttgtggagcaaccaaatataaaggaatttcaggcaaaccattttggtcattgtgttcgtttattgttgaagagtttactttgatttcctatctggattgtatgggtgattgcaacaaaactaatttttcttaggaattaaaccagattattgacacttatttttgcagtgttaaatagattactaaaaaatttgtagaagatgttgttttaggtgtttctttttcattgtatatttatgcatcttaaattttaggatgttgaggatctatgattagtagttccttataatcagtgaattttgactctttgttcttattattttctagttgttctactatttcttctgccaccagttttgcatagtcaataatatcaaacaatatcttcccatcttctagcattattccatccatgttttgttgttatgtaagggaaattttaatatttatacattttttgtactaaaattggtcaactaaaccaaaattattcaacatatgtagaataggtcaattttttactaaaaccccatttcaccccactcattccaaaaagtggctctctcttccttccctcactctctttttctcgaaccttctcgaacccaccaaac

SEQ ID NO: 1019 - DNA, 1968 bp, Cannabis sativa
aaaaaaaaaaaaaaagagaagaagctttgtatctccttcctttactccaaatagtaagaaactagaaagaaaagagagatagtgtgttaagttaaccatggttaaataaaaaggtgttaggtgaggtttactttgactagtctggtttggtaggcgttggtttggtctcaaaatcacctcacacgctcctcacgcgcgctcacccatacaccaacacacactatctttctctctctctccccttctacctctcaccacccccaattattatttttatttattaattaattaatttattgagtatatatataaacacctctcttatttctcgtccattcttcagtttctggctctctctctctagctttctctctcttcaactacctcacccaccttcctcaaggagagagaaagtctctctcagctcaaaattcgccatcaccaaattctcaacctctacagattgatcgctgtgttgattttattttgccggtgaacggaatctggaatattcttttctcttgtaagtatcgaattgttttggattttaggtaaaagtttgggggtgtaggagtaatggagccttcgtcttcaactaactcgatgaagctgtcgccgttggatctgatgactgcgattatcaaaggtgtaaaggttgacccgtcgaatatgtcgtcggattccactgttgctgaggttgctacgttgataatggagaatcgtgaactcgtcacgatcttgactacttctgttgctgtacttattggatgttttgttgttcttatgtggcggagatccagtggtcagaaagtcaaggttttggaacctcctaagccgttggttgttagggagcctgaacttgaagttgatgatggtaagaggaaggttaccatcttttttggtacgcagactggaactgctgaaggttttgctaaggtttgatactcttaattatgttaaactttgtaggtgtaactgttaagggcgtgttttttttttttttttggtttttctgtaaattcatttgattggaatgttttgtgaattatataggctttggcggaggaggcaaaagctcggtatgaaaaggccgtgtttagagttgtggatatggtactgttgactttcttccaaagactgacttttgatttgggtttgattcgcttttgttctttttaacttaatttgaagttttgactttttgtttttattctatatgggatggactattttcaggatgattatgcggctgatgacgaagaatatgaggagaaattgaagaaagaggatattgcattcttcttcttggccacgtgagtttcaactttcaatttcagtggtcaattttgcatagttatatgtatatgtgtttgtatttctttgatttgtacggtttgtgatttggttggttgtggatttttagatatggtgatggtgagccaaccgataatgccgcaaggttttataaatggttctcagaggtatattgaatgaatttcaagttccccttttcttttttctccctttgaaagattattgaatcacgattatttttttttccttctgaattgacattgaaattgaatgtactgtggtgggttcagggtaatgaaagaggggaatggcttcagaatctgaagtacggagtatttggtctgggtaacaggcagtatgaacatttcaataaggtttgaactattttgcatgtttcattttactagtgtattcgtggcgtatcaattgcttgatgtctaatttatgtttgttatattcttgttgatcaggtggccaaggtagtggatgatatccttgtagagcagggtaagattatttccctacttggttaaaaaattatggtaaacatgaatgttgttattatcaactttccaatatatatgatgataatgtatcctacatgcaaattgtttattgcatgaaacccaaagggtactttatctttgggttgat

SEQ ID NO: 1020 - DNA, 1010 bp, Cannabis sativa
aacaataagattgagagtgttatatgtggtgaactgaaattggtaaccagatacttgtaaccaacttataatatatgtgtatgtatgtatgtatgatgcagatcctaacaaatgagttgtacaagagtgtaaagcatagagcagtggtgaataacaagagtacaagaatatcaatagtgtctgcatatggaccaagattggagtcaaaggttgtaccaataccagaattgttagaagcaaaaggtcaaaactcagcttatggaccaccaattccatacaaggattacttggcacttttacgaagctcccatgcctccctcaaatcccctctccacataataagattgaaataataataacattccatcattactactaataccttaaatattgcttctctttaattaattccatatatatgttgtttcttatgattttgtgtaaaataattattgtccaaatattactatattataaagtagtcgctactactactgcatttacgaaaaaaagtgttttagggacgataatattaggagcgactaaaaaaagtcactgctaaatttaataacctgttattattagtggtgttgttatcgctaaaaattgacctttttttttataatttaaaatgcttttgggagagatattcatgtttttaagagtgtatttagaagtggcatcttattttataaaaattattacattataagatttgatattattgaatgaatatcataagatatatttgaattaataaatacaagagaatctcctcaagtagagaaagtctttgatagagaataaactcctaaaacccctcaagatgaagtgtataaatttggtacatttatcttggagaacacagagaaatagagatttggtgagaaaatcttaatgctggttgaacttgttcttggaaccttcttgttattggcagttggtcaatgaatctttgttcttgacaataatattgatggatcttcttgttttgttaatggcaacaatgg

SEQ ID NO: 1021 - DNA, 2720 bp, Cannabis sativa
gtttagcaaagtatttattattgatctataagtcggtaatgatatagtaccttgtgcaagtagatcactctgtacatcaccatcataatttttacatgcccaaacatatccaccttcacttttaagtgcataagccaccatgtcatcaattagccggtgctcatacctgaataacagacttgtcagggctgttaagtaatatctgagcattagttgataagaatactttcaccaagtatgatacaaaccatatcgaatgctcttcaaacttatgcttccagttctcttcgtatacctcctggaatatgtccttaaacctgtataatttaaaagactacaatatgtgtacgcataatcttcacaacgtggattaatgttcatagattacaacagaaaatctaaagcatcaggcataaatacatacttaaaaaataaaatgaactagagagagagagagatagaaagagatctacctgccgtcatattttttgagaattgtatttttggtgctcaagtataaaggccacttctttgcaaatgcataggacatagatgactcggcaaaagctcgaatagactgaaaaattacacacggttttctataattgtcaatacgtatttgtggaagctgattttaattttgacttttatatacctcatccacattatacatggcaagcgctatccctggacctttgaaattatagacatcaagttccactggtgcacccccatcatcgggaactaaaatatagatatgaaagacaacttgatgagaaaaaataactaggaacagatgagaaatagagtgcagattgattatttaatataaaatcagtttctaggtttgtacaaccagcttaccaaataccattttaagctttcctggtccttcaatgactgcatcagtggcacgatactgatcaccaaaggcatgcctaccaatacatatggctttcttccaacctgaaatttaagaaacacggttctaagcagtactatgcggtaattcacatgaatttaccccattaatgaatgcaacaagagcaatgaattaccaggaacaattcttggaatgttcttacagaggattggttcacgaaaaacagtacctgcaaaaagtataacagtttccactgtgagaaaaatatcaaacatgaaagtttaaaaatgaaaacaacaatctaacaatgatgtcgaaaatcagataacttttcactaattaacataaagttataaacagtagccattttgctgtcattacttgaacaaaatttgacgttactacattcacataaaagaaattagaagggtaaaaaacataaagcacattatcttccaattccaaaagaatgtaataaagctagccaaacctttaaatgaataaatcattacacaaatgctcttgagtcatatattaaagacataccatttaagatgtttctaatcgtgccattgggactcctccacattgattttagcccaaattccttgactctggtttcatcttcaaagaacaaaacagcatagacaagttttactctcttcacataaatttcccatagaaagtcttaactaaatgaaaggctatcaactagttccataatacaaaaataatatgatttttgagtattcataaatcttctgttgaggtgcatataatataatcattaaaaatgaagatcttagaagaagacacactaaccaggtgttatcgtagcacatttcacagcaacgttgtatctgcagcacaataaagatggcaatgaactaatgttagttagaaaaaataaaaaccactttagatatggttcctctgttcttggaatcctaacaattaatcagcattgaccattggtattagtcgatgaaatactaaaatttattctacgaaaattatacttctatataagttccagtacaagaaagccataccacgagaaagaaccctttaacagaattgagcaccatatgtgaagcatgagattcttttgtgtataaataacttacttaagagtagcttcagcactctccactgtaactctgtcatcagtagcatcacggttcaatactcctaaatcatagtattttatatccaaatctagataaggaaatataagctgcaatcacaataaagaagaagaagaaaaagaaaaagtcatcaaattataattcttctacgaaattctaattcaagaagaaaaacagaaattgacatcgaatagaagctcgtactttgtcttttatcattgtccatataattctcgtcatctcatcacctgatttttttgaagaaagaaattacatcaataaaactttcagaaattgatatatatatatatatatatgtatacaacttatgagaactaaccgtccatttcaacaataggattctggacttgaattcgatcatttcccgacgaggaagcgtaacatcgaagcgaagcgggagcaaaactggcggagaaagtaacacggttgggcagagagagtccattgaagagcggtgaggttgaagtggagaaaaagatagggtttgcgagggttttagaagaagaagaagaagaaatcatggtggcgccagcaatggcagataatcggagtttggctctaagcatttgagcttatagtgtgttgtccgtacgttacggggaccctttggtttagttagtgggcactttcgtttaggctgttcagctttagggccagtttggcacagc

SEQ ID NO: 1022 - DNA, 720 bp, Cannabis sativa
cccaatttcggagttgaaaatgcttaagccagaatgaattgaaaatcttggcagggaaggtaaaataaatattcaaatcaacataatcactgagttaattaagggtacaatcttcaccttaaaatctttgtaaaagcatagacgaagttcgtctatcgctccatggttgcaaaccaaccatggggttgcatggaaagaattctgaattgcagaaatgacacccccaagtggatatttttcagtattagaagccacatatccttcttcattaaggattctctgggaaaaatgttgggcaaaatattattaagaatgagtaacatgcattgagtgaatattatacaaggaatgttaagtgtaaacaactaataaggatgataaaacaatagattatgtaaccgataaacggttttaaaattccatatatttctacaaaataacttgaattcattcaacaatgtgcatactctatagacttatttataaacaacccccatcactcacacgcactgaaaaagaacaaaaacttgcctataagcttcctttccaaatcaatcaaatttcgtaatgtgagtaacctatgaagcaactaaatctcgtaatgtagagcagtcaaccttaacaatatactagacagcttctattcatgaatcatctacttaagagtgaaggattttgagttaataagttttctttaaaaaataaaataagaaagatttg

SEQ ID NO: 1023 - DNA, 735 bp, Cannabis sativa
ctctctctctctctctctgtactcatgaggcataattgtgcttgctttgacgtataattaatgattatacgcttccggtgattacaggagtgaaatcagaattgccaataaataagatggtccatattcttataaatatattaatggttaactccattacatttgaaattcttacttttgaacaagacatatttatgaaagtttccaattttattcttctttcctcttctttaaggaattttaattctattctatgtgaaactcatatattgtttgtatggtcattgttttgtcaactgtcacagccacttagtttatgaggaaaacaaatgtgctgaaattagttcttgttaactctgtctatcattttattatttttattaaaaacagagtaaatggagcaaataacacagaagttagatttatttatttatttttttttagaaaaaaaaaactagttagatggtgccgagataatatcaacacattagactatggtgagaaaagaaccttatatatttgagacatatcaataatgattattatcattattttatttcttgagtttataattcatggcatagcctaatacaaaatttatttgcaggtggacttttacattagttatcatctattttgcggtatgtttaacactttaaacttactcataatattactccctttatcatatgtgctctaaaagatttaatgttcaatacaaaaaaaaaaaaaaaa

SEQ ID NO: 1024 - DNA, 1976 bp, Cannabis sativa
gttacaaagatcctaagacgagtaatatttattggcctttcaaaaccagtttaagtcgtattagtttaccaaaattagaaagagaatggaccctgcccttgtcaactctccttacgccccttgtaatgtgctgtgttggaaccaaaacagggagcttggacctaccaattttagcagctaccaaaaccagcagcggccttttccaattctcatattaattatcgatattcttatagttaagatacaaaattccaaaattaaacaagaaaacacacacacatgccacaaaacaaaacacaaagcaaagccaggacaattcttgttaacgtatcatcccctaacttatttatggattaaagtacaatgtaatttccttttaaatggtcattccatgacattattgaaaggtagaaaaataaggaacaccagtgaagaaaacattgatctagctagctattatatagagcaagacaaattataaactcaaattaaatactttaattaattattagtgaaaccgacctattcatttagagacttgtatagttggggtaaattgagctcttttatttgtcattattaatatgttagcttatttaacataaactcttacaacttatgtgacatcgttacactaattaatcattataggactcccattttcttttgtttcatcattaacttatcagatcatcttttacggtgactatcaataattggttcatagagttgtcgacgattatatatatcaactggatagaaaagcaatgtcatataataataagttgtcattattttagtatcaatccgaaccatacatttatatataaatatatgtgtatataattctataaagtaaacaattaaacctttgaacactatcacatgcgatcaggaaaattatatgcattgttgaaatcattgtaaatagcatttttcccccctagataaggggatgtatagtcataatcaaaattgtgtcttgtacatgtactctcatcttttgacttagtcatttgtaaagtccgatttcccttattattctttataacaaatttattttattagttaagctacaaatgtggctaattacctgtatatatatattttttaaagcttaattagttagggttagaacaaaatctaacaactgtaacacgtgtcccgggacccagacttagctgtattggctttggccttaaatgggcagtacctaagcaactgtggaacagccacctggcctacctatagtgctacttagggtgaaactcttgtcttatcaaatacccaaaaaaattaagttcactttctgaattgaaatgataaatcaataataactgaaccacaaaaacaactctttattcacactaatttatatttaattttattcacaattaaaagtaatatttcccttagaattagtttaagtaaatatctcatatgatcagttacagaacattcatatttagaaattaattctcaacaccacgctagggtaatgtcttattaccaatagttattgttttcttttttataaataattattaaattaaatagtgtatttgataataacttgtgtcaaaattttgaagaatttgggtttagtattaataattatttaatgatagtgaaaaccaaactagaagctgctttttccttttccttacgtggagacaagcaatagcaagtacccattgcttttaaagatttataatttacctcctcattatacttgaccgaagacctagaaatagcacttgcaagtcaattacttaattaagtacatatcttctctggttggtcctcctttaaaaaatagaacagcccagagaaaaaggtgactggttaggctaagatgagtcagtgaatgggacagacatacatataatcaatcttatttactatagactggttatcttatgtatctagctagccttggaaatagatatattgttaattatattctcaattttttt

SEQ ID NO: 1025 - DNA, 2388 bp, Cannabis sativa
attttcttaaaaaaaaaagtttatgttcaactcgatacttaattcaaccaataaggatatatgacattttgaaggattgtttgattacctgaatttcaggaattattccactggcatatgtggtagcaattattgaaatggcattgaaagttccaaaaattctgtccttttggcttcctttcactgagtagtctcttctaggtgcatccttggaatgtcctgctttcattaaacatggcttttcattataattctgatttgatgtttttggaaacaagcatgcttctgtgttgaattcttaccaatatttacagaaccggctgcggcgcaagcgctgaaagcaaggcaaaggattagggaaatgaggttgatatgccttaaggagtggaaggatggcatttgagccaaaaccaaaactacacttccaaacatgatgataaattggtaaagcttcatttccccatttggatttgacaacaagtaaatgaactgccaaaaaaatatccccatgtaattaaataataaatatagctagagcaccttacaagtaatccaaactcatgattaagtaaatggatacttaccttaacgctctgccctccaagaagagtacaagcaataacagcaccaaagcatattcctaactgaagtggcccaacaaaatatttgccccattttggacctgttacggcaattgcataccaaaacatcagaaatgaaaaacatattagctagattgtgagcaattctttcaacatttaaaatggtaactcacctaaaatgtctctagccatgtctcgaaaccgaagctggcggtgtccttggtttgcatggtgctcaagcactaatgacaagaggttgtaggcatagaaagtaaccaggcctgccaaagtcaggcaaatgagtcctccaacccaacccaacagccccaaggcaaatggaatacttaaaaggactggagccactattgatgttgtcaagtggtacccacagtgaagccatgatcctaaaaattaagtaatattgccatgtaacttaatgaataaaggcaaattcaaagactgcgtagaagagaaaagtcagttgtgtgtgaaaataactacatggatgatatccagcaagtctttaatataacggttataccatagattttgacattaatattactggcgtttgtggacaacatagattctgtaatggacagtctagattctgttttatatttatgtgtgtgtacacataaatacacacacaaataatagtcactgaccttttgacttgaggacaaacatagctccagcatcaagctctttctgagagttttcgaatccatttgtctttagatcttccatggtgtttggagctgccatagttcccatgtctatgctgtgtctctagctacttgtgaatgagtgtgtggtgacagattcgaaatatgatttgctagttagtttaagaaagaataagataggattaattggcatatctttagacatgaaaattgaattaaatttggtgctaaagtcaagaattgtgaaaaatactaagaaatctagtgacatttattaaggtggttaaatgaatgtttttgtttgtcttcttatgagtatagggacaatcattgaagactattttggactattgaacaagtcaactaaaggtggacacattttctcacaagttcacaactttgggattattttccatgtctatttttggctctcagatttgcattatacttaaagccaggtatcatccattaggttcccatgaacatgaaagaaaataaatataatccaatattttaaaagattttttacacttcttctaggtctttattgtctctactcaagattaaaaaatgtattaaatttcaaacaaaaattcgtttgtcaaactcaaacatagcagtcaacatcaattaaactgaatacacaagtaccttacatacttaagtgttataaaatatggattgtttagtatcatcagcttaggaagggtatgactgtgatgtcttgtctgtaaccatagtattagccgtccaagttgaatagaggtgaaaatcagtaatagttccaaagcatgtataggtaatgggatgtacgtaacaacaaacttttgtggagtaattttgactgagaattgtcaaagttagaaattgataatacttgaacctacctaccttccataccagtgagctagtatatatcgtgtcacgtgttaaattacttagtgatagtatcaatgataagattcttttctgattattcttgtcgagtatagtatctcttagaagatgtgttgtgatcctctcttacttgagcattaccaaataagtgatgcttcaatcacatacctgattttatcttagatttgtcactttctaat

SEQ ID NO: 1026 - DNA, 1767 bp, Cannabis sativa
atgacaaaaagcaactacacttaaaatctgtacaataatactttttgcatcttcttctgtgtatcttccacctctgcataaaaagaatcaaatttaacaaaataaataaataatggtgacttgaaccaaattaacagaacccgaaagcaaaatgaaaagaaattggctataccttgccaaaattctatcaagtagttctccaccttcacataacctaacaagtgaacatattgttactaacttcatatgaaactattaaacgggaggcaactatgtgcttcgtaaaataagcataaaaacaagtggactgagggaagggaaacatactccattacaatgtagacattattcgaatcctcaaatgcatcatggaatttgatcagatttttgtgccccgataatgccttcagtattttcacctctctacgaacatcctcaatagatatagccgttgtcatctgcaaaagaatatgtgcttagcaactaggagccttaaactaaaacttgttgtaatacattttcatgagaaagtaacacattctagcttaactttcagaatataaagatgtcaataattcttaagccaaggaagaagcttgcttctgaagaacagactcaactacgataacagcatacaactaaataagtatgatacatgatacacaaatcactcgtgcagaaagccattactttcttatgataaattactagctgaaatcgtagtacttcagttcagtaatgcataaatgatcaaccaattccagtcccagaaaactatagcagagaatgtagagatttaaccctctcagactaagtgtaatcataaaacttccttccttcttatctgtttcaatctcaagctactattgtcttcctcaaatggctccttttcaacataaaaccaaaacaatatatatatatatatatatatatatatgacagctcttccagaatctctctgatgcctataatgcctataaatgaaattcccatatataactacatcaaatgccatgataattgaagcttctaaaacttcaaatactgagaaaatcatgtgatcaccattctttattcaaatttcactaagattttccattccctaattcatcagagcctaatacccacctagaatagctaagattttttcaatcacaatgatctgtctaaaaccccaaatccccccaaataaaagaaataaaaacaaaatctttaaaatctaaagaaccataattctaacaatcataatctttaccttagctttggatatgatcttcacagcaacaggctgacctttaagctcacctttcttgcccttagcccaacaagtatgaccaaaatgccctcgacccacctccttcccaagctcaaaccttgccccaaagttcttcccatacccaaagttcttatcaagctctctctctctctccccttcatctccgttctgttcctccggaatcggtccatccttaggtctcggagacttcccctgccggcgacgaagcgccgccatgatcggcttcgccggtgaaggaggcggtaaaggccatcggaacttcctcccaggtgttctcgccggcgatggagcaacaccagctggtaaaggactagtaaaaggactggcggtaaaagaataagccggagtattcttaccggagtgagaagaagctcctcctcctcctcctccggtaacggaactagtcggagcttcattagaagtctttgactggtctccgttgactgtggaaacggcgacttgctttgtat

SEQ ID NO: 1027 - DNA, 3049 bp, Cannabis sativa
cccaaagctcggagcccccatcttcgacccaccatcaacctagagcccccgagccaccccttcgaccgaccgccaaagcaatctcggagccatttaacacccttcaacccaccctcgacctacttcagagctcttgatagaatctaggaccccgtcgatccacccctcaaggaaaggttagatcttttttgttttttagaaaaaatttgtgagttaagaatttgtttgcttgatttagtttaatttgatcattatatgtattgtaatactatatttattggacttccgagagtttaatgtcaggtgcaaaatcttccctacaacactaacaggcctagctcaaaggtggtacattaagctccccttggatcaatcaactcatggaaagatccaatggatgcttttggcaaccagctcactccttcccaacaatgccagatcaagcccaatgatttggtggatgtcaagcaataggaagacgagcccctcaatgactacattcaatggttcttagaggcagccgctaagaccaaaattcttagaaaggactcaaggagatgattcctatgtggtccaactttcgtctcaaggtggtatacaccatgaacaacttcttatatagagtagatggatttatcaaactcgacgaagccatcacccaagaaaaggctcaaagggtggcaaaaagaagtcatcagacactaaaaccccgcctattgtggcagagggaaatgggaagaatggaggttcaaatggaggaaagagggccaagaacagtggcaagcaaggaaactctcccagaagaaagaagcataagactggcggtgagcccttaagagattatgagcctcgcttcaccacctactccattctcttggctccaagagaggatatgtatacgaccacacagtcaacagtgtcgtatcgcaaacctcttcctttcaaagagtgggagaagagggacatgaacaaattctgttgttaccacaacaattacggtgatgatactaatgagtgtaatcagttgcgagacgagatagaatttcttgtcagacagaaacatgctactcttcaacggtatgtacgacctgaagctctaagtgggggcaatgcacctctccagcctgcgccagttgtaggcaagttggagatcgtgattggagccctcacacaactgggaactcaaggaaggcctcaaaaatatatgcaagatcacttaactatgaactaagagctaaagtcctagaggtaacagaacgtcttccaaagtctcaacgttacggatgtgaaccaatcaactttagagaatcagactcttatcatgtcagctaccctcacaacaatcctctagttgttgaggttcaaatagctaatatgatagaggcaatggtaatgatcgacgagtgagtgtcattaaacatcctgttaaaagaaaccccactcaggatgggcttaactttagaaaacttggaatcataccaacaactcatgtatagttttagtggagctagcattcctccatccggcaagatcaaactgccacttactgttggcactgccccaaagtaaaaaaccaagagtttaaattgaactggagtttaaatcataggcgctaaaaaacttagaattatgtagacctgacccatttttctaatagattttcaacccttttcctataaagcccaccaaaatttaaccataaatagaactgaccctatccaagagaagaattactttgaggcaagcccaagtatttacagacgaacggtttatcatccagtgattaaaggataaaatggagattttgcaaaatagagctataggtgattagaccatttgatgcatttataaaacaagggcctctatatctcagtggttggtagagcgtcagtcctgtagtcccatccatggaggcactcaacgttttattcctccctatactgtttctgttatcaataagtttgcccctagaaactacaaaataaaaatatctttaaaaaataaattaacattattgacattagacaatcgagaaactaagtaaagcaaacaaaccaactaatattgataactaaagttacatctcaattctggtacacatgttcggtctaaaagtttttctctcaatgtcctcaacaacaagctcgtatggcactaattctaaagcatgttatgacaagaccaacaaaaatctgccaacaaatgtcaccaacatccatggataaatgtgataaaacaccaacatcagttgcagttcagagtataatctgtctatagattctcgccttgatgaactgccgaagtgaaacaacaaataataataacagttaaattaattagagcacaagttagaagcaaaaatggatggcattttcaataccttatgaagatgctgattctgattttgttgctccttgtctttgccttatttggtcaggaggaggcccatctcgtcgtctttcatacctcctgctctcatattttggttctctttgtttcttgggttgataaacggggtacttaccgggaataatttcaccattaacatatttatcacctatgagatccataatgacaattggaggcaacttataatctcatttacattttttatcttgaccaaataatctcatttactttagataaaatgtagatcatattgtaattattagcttaaagaaaaccaacctccataatccttgtttttaacatctatatatgaatcaggcaagacccaaagaaccccaggaagtcctacatcaggaagaataccatgaaactccaaattaaatcataaagttgaatgacacatacaaaacagggacacatacccttaaacttttcagatgtttcttcagatacagtacattggaatccagtgtaggtcgtggtgctaaaagcatacatgttcttctttgcttcttccatgctgtcacaaagaagagcgcaagaaaaacagttagcaatgcaaaacaagtaacaactacataattctatatgcacgaaatgaaggctcactttaaaaggcaacaacgcaaaaaaaaaaaaa

SEQ ID NO: 1028 - DNA, 2708 bp, Cannabis sativa
taggggcagaggtaaagcctagctatacaaatcatcttcctcagccgcaccagcagaagctgcaaatggatctgaaccagaacccccggttgccgactcagcaaatctaaattctgttccgaatccccgagactgctgcaaggtctgagcaaatgcctggtatttgcgtatgtcggcatcactaacactcctcctagcatacttcatggactcctcgaaatgggcagctttgatctctgacacttcatcctcctccatgtcctcatccatggcctctggattatcctttctccttctttccttctctatatcctgtattgtattgagaagatcgttaaaaatcacaacaaaagattgcataggcttaaacaactatacaagacaacaaatatgtaaacaattgcaaggctaatcaaagcaattaacccaagaacaaaccttttctatattctcccttatggcgtatttgcacgctcgctgacatatctctgtgatatcagctccactgaagccttgagtatactttgccaaagccctcaaatcaacatcttttgagattggcgactttctcaagttagctttaaagatttggtgacgtgaatcttcatcggggagaggaatgtaaattaattgatctagacgtcctggacgcaaaagagctgggtcgataatatcaggtcggttagtggctccaatgataaaaacagttttctttgctgacatgccatccatttcagtaagaagttgattcaaaaccctatcagcagcaccaccagcatctccactactgctccctctctgtaatattgcaaaacaaaaattagttgcaaaaacaaagatcactgaatcggatacatggggatagaaggaaacaagcaatcgagatcgaagattccaccaactccattgagcttagaactattcaaaactccaaagaattacttaagccaacttagatgatttcatataaaagtgcacatacctgggtagcaatagagtcaagctcgtcaaagaacaggacacatggtgcagatcctcgagccttgtcaaaaatttctcgaacattggcttcactctccccaaaccacatagtgagcaattcaggacctttgatactgatgaaatttgcttgacactcatttgcaattgccttagccagcagagtttttccacatccagggggtccgtagaagaggactcctttggaaggtgacatgccaaatttctcaaacttctcagggtgctcaacaggatattgaacagtctgtaaggacacaaaacatagaagaatgttatttctgtaaatagattcaaaattacaagactttaagttaaagtcacttcagtaaaaacaataactacctcctgaagctcccgcttaacattctcaagacctccaacatcatcccagctgacattggggacttcaacaacctgaaaaacaaataaataattattagcacaacagcaaaagctacaaatctcaagaaaaagcaagtttctctttttttgaccacacaagggaggtacacaaaagagcctcaccgtttcacgcaatgcagaaggattgcttgttccaagtgcagtttggaagtgctcattcgtgacagccatggaatttaatatctcagcatcaatagtttcatcttccaagtctatcacatccattttctctctaatacattgcagtgcagcttcagtgcagagagcagcaagatcagctccaacatatccatgggtttcttttgagattctttccaagtcaacctgttggaaacattttttggcaattagcgggaaaaaaatacaagaaggttgctggttcatgtagaatgtacatgatcaatggtttgttacagtagcctttttagaagtttaagagagggggttttaagaaagaaaaaaaatgcaatgttaaacttacatcatcagacagtttcatgttcttggtatgtatacgcagaacttcaaggcggccaatttcatctggaaccccaatatctatctccctgtcaaacctgccaaaccttctcaaagctggatcgatactatttggacgatttgtagcacccatgacaataacatgagcacgagatttcagcccatccatcaaagtcagaagctgtgaaacaatgcgcctctcgacttccccatgagttttctcacgcttaggagcaattgaatcaatctcatcaatgaaaatgatggacggggcattcttctcagcttcttcaaatgcctttctgagattgctttcactttctccggccaatttagacatgatctcaggaccattaatacagaagaagaaagcaccagtctcattagccacagctctagctatcagtgtctttccagaacctggaggtccatatagaagaattcctttgggcggtttcactccaattgatttaaaaagttgaggatgccttagtggaagctccactaactcccggatttgagccatctgcttccttacaccaccaacatcatcataaccaacttcatccaaccgttcctcatcctcccttttaacaggctccccctcgcagaagatttcagtgtctggagaaaccacacaatactccccaggttcagtttcgatgactttgaactccacgcttctcatccctccccttacaagaaacagatccccctttcgcactggacgataggcttccaaaaagtaagctgtagagataaagtgg

SEQ ID NO: 1029 - DNA, 2687 bp, Cannabis sativa
agagacaaaaatactaattagttaaaaatgaatgaattttatatccaataagttttttttttttttgaaatggttatatccaataagatttgaacatagaaaatatagtaaaaattaagaaaagaatttaaggtggaattttcccaccaaacacggaaaaagaaattaataataacattagaaatgtcttaaacttaacataaagattagatttttatttattctgcaccttcttctctcttctcacccaccatttttgttaccctttttggtgtttcagatctgagaaaaacaaaaccccccaaaaaaaattcatgtctttctagagagagaaagagaaagagagagagagaagggaaaatggtattggggaatggtggtgagaatggaaatgggaatggtgagtctgtttcagaattccaattgggtaaaaaaaacagatacaaaagaatggaatctgatcccttagaggaagaacaagaagaagaagaactacaacgtcatcataccaagaaatttgtggttgcttgtgccatttttgcttctctcaattctgttctccttggatatggtaattgggttgatcttaaatttaatattatgttaatgggttttattgttttattatactttttcaattgaagtattaaaaaacctttttttggcttgatctgttaatgggtttattttattatttccattgaagcattaaaaaacctttctttatgtatttgggagtcaaaattgataatgctacattttgacatagatcttcaaattatgtagaaaaaagcaaaattgagagttttttttgttgtttatgttttcatgtttatcagatgtgggtgttatgagtggtgcaattatatttatacaagaagatcttaagatatcagaagtacaagtagaggtgttagttgggattttgagcataatttccctattgggtagtttagcaggtgggaaaacatctgatgcaattggtagaaaatggacaattggattagctgccattgttttccaatctggtgctggaataatggctctttcgccttcattcgcggttttaatgatagggcgtttattagccgggattgggataggttttggtgtcatgattgctcctgtttacattgctgagattgcaccagcagttgctagaggctcactcacttcattccccgaaatctttgtgaatttcggtatacttttaggttatgtatcgaattatgccttttcgggtcttccagctcatataaattggaggattatgcttggtgtagggattcttccttcaattttcattggttttgctctgtttgttatccctgaatctccaaggtggttagtggtacagaataggatcgatgaggcaagattggtgttgtgtaaaaccaatggaagtgatattgaagttgaagagagattgaaagagattcaattagctgctgggagtgtcaatgctgagaagtatgaggtgaaatctgtgtggaaagagattttgaaaccgtctccctcggttagaagaatgcttataaccggctgtggaatccaatgctttcaacaaatcacgggcattgatgcaacggtttattatagcccgacgattttcaaagaggctgggattaaaggcaacactcaacttttggctgcaactgttgctgttggtttcactaagactttgttcattttagtagctatcattcttatcgacaaattagggcgaaaaccgttgctttacataagcacgatcggtatgactacttgtttgttttgtctaagccttactttagctttctttggaaatggtaaattaggcatcatattggcaattcttgctgtttgtgggaatgtagcatttttctcagtaggaattggtccaatttgttgggttgtttcgtccgagattttccctttaaggcttcgagcgcaggcatcagctctaggagcagtcggtagtagggttagtagtggtgtgatcgccatgtcattcttatcggtctcacgagcaatcacggttgcaggaactttctttgttttctttgtgatttcagctatttcggttgcatttgtttataattgtatccccgaaacgaaagggaagtctttggaagaaatcgaaatgttgtttcaagacgaaacagaacgagttgaagtggaaatggaagacgccgcacgcctagtacaaaatgaaccgaaatgaagaagagaaaactagttcaagcaagcaaaaggagagttatgagcaattatacttattttttagtcttagaaaaatcaaaatataccatatttcatgtctttacaagaaaatcacttaaaaaaaatgaggtacaagagtagtaaaatatacttgatttgtatggagcttggtgtgcatattttgctcctcaatgattattattgttattattattttatttttttcaaatgggatttcttctcattattcagttcagatttcattaaacacaataaatttttattatatatgtatgtataaaaacacaagatggaacatgttatgtctctactttctctactcatgctataacaattacatttacattttatttttctttatatattttaccaagaaaaacatgcccataagcataaaaagagtaaaagacatcactaatgatccaatgtggagctttattcatggaactgagttgcaatgtttc

SEQ ID NO: 1030 - DNA, 1378 bp, Cannabis sativa
atggtacaacacatcattgattgaggttcatatgagctaaaatggaatagagtagtataattcatttccccaccaaacaatgaacaatggtattttttttaaggaagcctaactctacaatatttgaagacaagaaaactatagggttactatgtaggtacctagagggacttgaacctcatgcttaactatttaagcttattagaaagtttcattgataatgtttgggaacataatactatatataagatgcatagactactccactcatagctaattcgttttgagaaagaacctcatgcatcttcactctatcctacttttcaaaccacacttccatatttgaatatagtaccagttccaaaacaaaaactctaacgagtatccgatttaaaaatccaaaaaccattctaaaaagtagagtcgaaagaaatacttgcgattcaggaacagtaagtcaaaaaaaactacttgtgagctaaaataatcaccatcttgaggaaaaatgttagacaatctcacattgataatatgagagaacataacatcatgcatgagctatttcactcataactaattaattttgagattggaatctcatacatcttactaaacacctcacttcatcctactttcaactactttctaaaccacacttccatattctaaaagctaaccctctttgggtaatgaatagtgagaatttgggtcaaattattcagcaaaagttttgcttaactacaaatatataacctccaaataaatctcaagaacaatctaaaacaaaattccaaaaccaatcagtagtggtaaagtatcaaactttacctgggaagtagcatactcaagatccttaagagtaattggagaatctgacaaaacaaaatccccagatgggaatcgagctaatggcttccgacccaaatccataacaacttcaatcaattgatgaagctctgtgtgttcaatcactctaaccctcatttcctcaggcaaaagagccaaaagacggtccaattccatctccaaatcatcatcagatgaagaaccagaagaactagaataagaacccagaaaaattcttggatacccagatgagattgtgtttggaaagtgagaaaagggtgagaaaagggggcatctttgaagagataaagatgggatttttctgggttgaaaagctaattgagaagtagttagaaatggtgagaagtgaagaagaggaaagcagagcatttggcgggaagaagataacgtacagagtgttatgtaggagtagtgttagtgtagtcactcaaactcaagcattcaacaatggagatatatttcaccttttactatttttctttttcttctctatatataattttttaaaatt

SEQ ID NO: 1031 - DNA, 1773 bp, Cannabis sativa
agtacctgttgcagcaagtctctttgcatagcaagaaccttcttgctcttctcaatggtggcctgaattgcatcatctgatccctcaagtctttcatcactaccttcagaatccttatccaaagctttcagaggcttattcctctgtaactgccttctactactgctgccacctaagattaatccattacaaaatcccactactgaagaagacccacgacttgagccagtgagggattttcttggtagattagagaagaaggggaatcttggtgggtgacaacttttgtggttgataatcacaaaagtgtcagtctttgtctctgggacaaaagggaaataccctacagaagaagccataggagatagttctcaaagaactgcgtctcaaaacaaggaaagatcgttcctttgtaagaagattgagaaacccagttgaggaaactgagagacaagaaaacccaattgaggaaacactaaaattattaagctggaagaagtgaagaatgattgagtttgagaatgagtgagtcaatataagcaagaggaaaccatggaaaatgtagttagttgaaattgggtcccgcaaaagaaggaatcacagggatggtttttgattgaggttcagaaatttgtgtaatgaaaaatgtgagtgaatgaattaaagaaaggttttttgatattctcggactcgactcgactgaccacaaatctcctgtttctgttctctaacaacactttcaaccagaagttttggatctctggtgggcctggcctttagaaaggcccttttgttgccacaatttcatgtacaatcgttttgttcttttaaaatagagttttgagggctaaagtgtctcaattattgtttcacttgtactttattttttaaatttaaattttgacggtaaaatctttcaaactattaaactcttagaaaatttaaagtgttatctggtgaattaacaccatgaactactttgtacatgtgtcatgtttatatttgttcacctaatatttttattttaaaattaaataaaatcataataaaaaatttaataaaagatgacatcttaaatttgcttacagttcagttgtttggagagttttacaccaaaatttgagcttggaggaaaattaagtacaagtgagatgatagttgacagagtttatctgcaaaaaactctataaaatatatacctttatctattttaacatctgaaataattttttaatcaaatttttttttatggtcatgtacgatgtagttatttaagatatcttataaaattttaaaaaattcaaaagaattttacatgcagctaataagattcaaccaatgtgttgcacgcgtgactattttattttatagcgtgtgaaatagactatttaaacactgctttctatattataaattattctaaatttatcaaaatttgtagaatatcttaaataactataacgtaaacgaatatgaaaaaaaattagactaaatttttttctgaatactgaaatagatagagggtgcattaatgcatctcttttaaggaagtgcattatagaagcacacaatattataaattagatgtctaaattatctaatttaactatatatatgagtaaaccctttatcggtattacacataaaaattctcaatatttcaaacaaataaaaatatatcagtacattttttttgaggatactataaaattttccaatatattagatgtgtaaattacctaaattaagttatatattatatgggtgactatt

SEQ ID NO: 1032 - DNA, 3145 bp, Cannabis sativa
ccttttttgttggcacattgatgaggttgtaggattttttttttattttttatttttttaaaaaagacatgcatcagtattattattattattattattttgaaacgtgcatcagtattattaaatatacctataataattcatataatccgtactttaatttttgagaagaaagtgtttagcatcactgattatgagattgtaaaaattaagaaaattttggtgaattaatgaaaagtaaagttatgtttttgtagttattcagtttgcttaaaagaattgtaatgaggtcacatttatttgtgttatatattttaatttaatttttcacggtaataatattttaattatatttttaaaattttgtaagtatttggttcaatttttaaagtatcaatgttactaaattttggttttttatttaaaaattaatttaaaatttttaatcatactaataaaaaaatgacatgtgaataatgacttaagacttaatgatgttctagaaaaaagaaaagttcccaataaatagagatgagggagtttattgaagtggattaaaacaagcaaatcttaatcaatgacaatatatatgctcactcataataattatataataactttatctcaatcaataatagatacacataataacacaataaagattacatttttaatgactctgcaatcttcttagagatgcaataagcagtagattcaatagtgatcattggattaaccccaatagctgttggaaaaacactcccatcacaaacaaacaaaccttcagcttcccaactctcaccattttcatcaatagctccaactttttcattggatcccattctgcaacttcccatttggtgagctgaacagtaaatggtccagtaatctcctctgctgctaggaccaccaacagcagtaactgagtccaaaaactcttcaaactctttatctttaatccctttgcactttattttctgcccatcacttctgtaggtacccacttcaactgcaccagctgacaccaagattctcaatgcctgccttagcccactttggagattgtctttgtcaactttgctcaatctgtaatcaatcattccttcttctttcacagttcccgaaccttcatctttcacaagcgaaaacaagtgagctgttcttgaatatcttaacatcttatctttcatgtcaactcctgagatccaaggaaacaatgctgcaaatgaagcaggtcctattgcaggtgtttctataattgcccttgttgtattttcccccgaaacaactcggtggagtgaagtaatgattcctccttcgttgattttgcctttgaattctgtgttttcttccgggaagtagccccaagtgaagaggacagggtggaggtgaaggtttctgcctatgttttgattcttaagaccgctgttgatcagcagaggaggagttgagagagccccacaagctgaaactgttactttcgattcgatttgcagcttccttgtgattttgttgtttaaacaatttgcaatcactccaacacatttctttcttgttattcccttattaggattcttttccaacacaagtttctcggctttgcatcctgttaagatcaccgcgccaccacactcaactgcatcaaccaaccaagtcgaatcagttccctttttatcacctgttggacaaccataacagcaagaaccacaataatgatccggggatgagtttcttggaacagaatcaacttttaggccaagattttcacacccttttctaagaatttgattttgaaaaccctcttcagtacaattgttagtaacaccaattctctcacacacaacatccatagcggattgatactcagagctttcaaaaaatggaagcttatgatcaactgaccactcgtgcaaaacattactcggtgttcttatagatgcagaccagttaatcgcagaacctccaccaacagttgagcctgataatatcatgacttttccatccttagttgataaaattccactagattcatacatttccctcattgaagggccctctaaagaagagtaatcttgtgaaacaaagtagttccctttctcaagcacaatcactttttggccagacttggctagaactgcagctgcaactccaccacccgagccagaaccgatcacaactacgtcacatttgattttgtaaacgctattgtcgttgggatcttcggtaacttcaagtcctttttgtttgagtgattgaatgagagaggaatcagtttccaacatggtttcaatgaccccattttcaagtggtctgtccttatgagttttagtcacatttttcttggtgtctatgtgataaccaattgcttcccatgttgggttttgtgagttttcatcaacctagaataggagtaaagattaaaaaaaaattgataaagattgaaactttgaaattgaatggaacaaacaaaagttaatactgtccacaaaatgttattattaattactctactaataatttcaatctattatgaataaagtcttagactttgctaaaaaataaatggttttcaatccctttcaagagtagggaatacaaattattaccctacatattcactataaaccaaccaacctaacaacaactattttaattgtgaattaagtcaagattatttcatctaaatggtataatataatttgcagaataaataaatacaggagaaaaatatatttaaatatataaaatcaaaaactcaagtaacatttatttaagaagtgaaatatagggtaacaaaattggtttatcctttccacttaccttcaagtccacaaaaagaatattaagtaattttaaaaagtagtttttacaaaaatattatattttggaaaaaagtacaattttaggaaattttgtacaaaaaatactgttttttttaaaacaatagtgaaaaaatactaaattgcattaattttcaatccaaattgcaaacaaatttgacacttaacctatacttataccgaattacaaaattgcattaatttacttataatttgtgtgtacacatatttttattctttagtcctagaaaagataaattagtaatttttttttaaaagaaaggtttatttatttaccatatttt

SEQ ID NO: 1033 - DNA, 3629 bp, Cannabis sativa
gcattccaaaagggaacgaacaacatctcataaacgcatgcacccttttggcgattcttgaaaacaatgtccagttttagattacagtaatgatttttctatttaatccttttcaagaataacagcatattttcaatgaaactaatgcttgttatgattggatatggatggatgcccttttattttctttaatgtcccaatcaagagtcgaataccaataactatttgagcgtggaagaagaaaagtataaaggtgatgcttacgctatatgtctatatctaagcgtctgttacaaggttattgttttttttttttgcttgagttgaaatggtcaatggttcactctaatactttgtttagtcgttttgttaacttgctttgtggaccttctcgtatcatattatattcttaagcttcagttgaaaagaaagttggagcatggattacattaagagaatacatcttcatattttgatgttttatgtctaaagtgtgggaccttacttgattgtgatccctcaaattagtactaaaaaattcattaatataataaaccccattaaagctcaaaaatgaaactttggttcattggttctatataatgaacaaagatttggaaaatataatttaaaagaagtggacttagctctctacttctgccatctgtgatttcaagtcaacacacccatttcaaactaaatattataatccttaagcaccagagttatggtattgatgagattattgcttacatcaattataagccattgaaaattaataataataataatagcaatagtccatgcgtctggctgttttatgattctaaagttcaattattttattattagtaacttcactttgtctagttgtgtgtgtatgtgacatgtaagagatccagattcatcaatacactgctgttggtgcttgtgttttcagttgtaaagtttgactaaaattctttcataacagcttatataaggctaacttcctcaacatcctgttctgcattcaataactctctctactgctccattaaggtatttgattatatgactctgtaagctttaaataacattgtacactttttccattgagtttacttcacactgttttttattttatttttttcaactgtttgactatatggtgttatttcattagttacagtaaattaggacttcatttacatagttaaagactttttttgctgaacacatagttaaagacttaagtgtcacaagacgactataaagccacttgctcaagtggttggtctattattaacccttctgaacttggagccaaaagggtagttgtctatgcataattagatgtaaacgaagtattatttctatgctaattgtccctccatttatatttctgcatatcagtgttctgaattcaaagtaaaatatatactgagatggcttcaacagttcattcaactgctgaaaataaagaagagatggacacgataaggagcaccccgagtgaccgatatattcccagagtttcagttccttccaagcaaaacctcttcaaggagttcaaaaacactgtcaaagagacattctttgctgatgaccctttacgttcatttaaggatcagtccaagtctaaaaagctcatccttggagtgcaggccgttttccccatctttgaatggtctagagattatagtcttaaaaaatttaggggagatcttattgctggactcactattgcaagtctctgcattcctcaggtacatcattatcagctacttctctgcttctcttgagaggtttatacttaaaagattctgtcattcacaatgttgaccaattccattgacttggaaaacaggatattgggtactcaaaacttgcaaatttggctccacaatatggattgtgtatgttatctttctacttatctatggttattttcggtttgattgtttcattgagttttgtgcttagtcttcttcttttccccgttttaatctctgcagactccagctttgttccaccactgatctatgcttttatgggaagctcaagagatatagccataggaccagtggctgttgtatctctcttacttggtacactgcttcagaatcaagttgatcatactacacatccggttgaatatctgagacttgcatttacagctactttttttgctgggataacccaagcaactcttgggattttgaggtaattctcgactaagtgtttaggcctggtatggctactatcttcagctaattctctgataaaatatgcattgatttcatgtcttctttttcatctgatattagattgggtttcttgattgatttcctatcacatgctgctattgttggttttatgggtggagctgccatcacaattgccctccaacagcttaaggggtttcttggcataaaaaagttcacaaaggaaactgatatcatctcagtgatgcattcagtagttgactcagctcaccatggggtaaacctctccttacattccctaaactatgcagtttcaataacaaatcattctatagctttctagttactgatttatatgtaccaaattcgcagtggaattggcagactatagtcataggaggggtgtttttaacctttcttctagtttctaaattcatcgtaagaatcacaatatcacttccatgatttacttcaagcgatataagctctcaatgttttcttatttttttttctaactcactcttgtgttgggaacagggaaagaaaaacaaaaaactcttctgggtgcctgcaatagctccattgatatcagttgttttgtccactttttttgtttacataacccatgcagaaaagcaaggagttgaaatagtaagcatttgacatgatttctctccctccttattgctaattatttaaccaatagattgaataatatagagaatggttttttagtacttgttgccgttgactttttatgacgtgtttgacttattatatgaaggtgagacatatagagaaaggaatcagtccttcatccttgaatcaaatatacttcactggggaatatctcgtcaaaggctttaagattggtgttgtggccggtgttatagcattaacggtaagctgatatacctatttttgaagaatttgttttggactttggagcaacatgaatctaaccatcgaaagtgaacttctttttggggttgtctatatattaggaagctatagcaattggaagaacatttgcttccatgaaggattatcaacttgatggaaacaaagaaatggtggcacttggaaccatgaacgttattggctcaatgacttcctgctatgtgacaacaggtgaaaattatttatataaatgaccaatttcaaacaataatagctgattttgaactggggattagctgctcatcacaagcaaatttctaaaattcacacttgatcctcacttatttaagtaataaacttgttttgattaacattcttaactttataataatacgtcagtaaacaatatagaaaggggatcaaactaatatgatataaacgcaagggagtcaatcattcatttcattttccaatgcttttattatgtttgaaattcttgtcatcatagatttgtaaacacta

SEQ ID NO: 1034 - DNA, 2246 bp, Cannabis sativa
aaagaaagatccttggagagttggagtagcactgacgaccatcagcaaatcaatttaaaaaccaaataatattaagccacgtcatcaattagcttcaaatcaacgttaactacggcgcatcagataattccccaaacacactgccttaaaaaaataatatattatatgatattcttcttcttgtccagtgagaaaagaatatcatattttatttttaatttaaaatatatataaaaaaaagtcatcgtttttctattcttcttttctctgtgaaaagcttctactgcggtactcagtagtagtagatcaatggcggagatcgaccacgcggcggtgacggcgactgaagtctacgcgcctaggtctgtccagctatggcgagcattgatgaactggattgatttcttcttcgagatccttcttcagatcctgagaggtaccccctgtgtacctcaggtactttcctgcatcggtttcacccataatcgcattctctcttcttcctcttctccttcctttaagcccttgcctcttgttgaactccctctctgcctcgaagatggtgtctctcacgccgatgatcctcttgaaaagctcactgtgagttcctctttattaacttcatcgtgaatgttgttttcttagggcttttgattaattgatccgcattgtgcttgcaatttcgacaaaaaaatgatcttttttcttatagggaattttgaataataaacaaatttagtcacaggaggacatagggaagtgtgttagtgttcgctttagagactttattgaatatatttgtaagtttattaatatgggtcaacttggtaatgtaatgtaggtggttttggacttggatgagactttaatttgtgcatatgaaacttctagcttgccttccatgattcgaactcaagccactgatgctgggttaaagtggtttgagttggaatgtgtctcttcagacaaggtctgtctgtctctaatctttctctctatacaaaatgattaagaaaacaaaatgattaatggggtttctctgattttgaaggaatgtgatggaaagccgaagataagctatgtaactgtgtttgaacgtcctggtttgcacgaattcttgaaacagattggtgaatttgcagtccttgtattatttactgctggtcttgaaggtatgatgattgcctttcaaatattcaattatgcttttcttttttcttttcttctttccacttattttgtcatatttctcttacagggtatgctagaccacttgttgataggattgatgttgagaatcgatttagccatcgtctatatcgtccttctacagtaagcacgtaagtactaataatatgtatatatccactttgactggattgtgtttattttgttggtgactgataaccactgttaaggatcttgtgtcagtactcattagtagagagatatacatgtttatctagtcagtgtgctatttcctttgtgcttattcccacagttttggagaatgagactaaaaaaattctggtttactttccaccttttgatgctaatatatttctgtgcaactttcttttttatctcaagaagtatccagtttttactagttaaagtagcatgttcatcattgtgggtctgactacattttgggttttgattctgttacatttaatgaacttttaactgtttagtcactagaaacccatctatttgagcatcaaaaacccaaactaaaatcaaatgataaatgatacaactcacactcttatttgtattgctttttacatgctcatattttgcgtttgagattgacaaattcaggaaatgattatcacagggaatttcgagaacacgtgaaggacctatcttgtatttctaaagatctttctcgagttgtccttgtcgataacaacccattcagttttctgcgtcaaccattgaatggtataccatgtgttccattttctgctggacagccatatgatgatcaggtaatgcagttacttttatttcaataagttctaagtgtttgcataaatgtatcttgattttcaagtccttctgcctttgaaatgaatatagcttttggaggttttgcttccactcctcaagaacctctctcgacaaaaggatgttaggcccgtccttcatgaacgatttcacatgccagaatggtttcaaatgcatggaattccctcatctaacttcaaataatgtttgattaagtctttcaattcatgtta

SEQ ID NO: 1035 - DNA, 1279 bp, Cannabis sativa
aatttcctcactttttgtaagattttcaatgctggcaactcttgaattatcttgaatgtcattattctctttcacatcattcattaagttgctatcaacatcagaaaatttattctcattcttctgcgctttccttttcttctttttcttctgtttctgatcattttcatgtcctacctcagtggaaggaagtgtcaagacatttggcgattcagtttgactgatcaagaatgccagacataacagcaaaattttgtcttagcttaatctcttttaacaaattccgagcatgaactaaatatcaacctgtctgtagctaaagtagggaaagcagaaaacttacttaacatgggccatcatctgcatttgtccatcttcagtacttgcctcacatggctgcattttgacttcatttaggacattatcacagtgtgtcttgtcactatcaatagacacgtcagctgaccgctctttccgctttaatgtaaccttacttctgcagtccacttcagaaggcaatggatcaactggaagatcagattgcctgcatagacatagaaatagggttaataaaggcttccaactaccgacctatagctgagaaaaataaaaataagggagaccaacagtaaaattcatagttaatggagttccaaatatgatcttagtttctaagcagtgctatgaggaataaagtagaaaggaaattgtcccttaatgtacccaacaactacttacactgttcacttagatagcaaacaatggtctacctgacataggaaagtaaaagggctgttagcttttttccttgaatgttatgtaaacttggaaggctaggtgaggaaactcagccttggcgagaaacaacataaattttgaaccctttgttttgttctttttttttaggccccaaggttttgagtctgcactgcagggattcaaaccttggaccaaatgcctaccaaataatgattctttgagggataggattaaacattgggctgcatacttgcatgttcgatttctactactaaagttctcaaagatctgtcttttttttatttgataagagattggtgcatttggttgtagctatagatgatcttctgccatctttgtaatctttcttatccatttatacaattttccaataaataaatctgaaaacaataaaccttatttaactcatactatagacacaagttcatattataagttccaaaaaaaagttaccaactaattagtagtttaccttattggctgatcacctagaacaata

SEQ ID NO: 1036 - DNA, 2493 bp, Cannabis sativa
ccttgtccggttactacaagatgttttatctggttacttgacacagtagattacaattggcatcttagttcgtaatttggttgataccttatcatctccctaataatttacaatctctttttaatataaaaggattatctgctacggtttttcaaaataatagatacagaactgttttattttattgccaatgaattgtatgtatatgcatgcctacttttatgttcacgctttatacagatgaatacatacaactatacttatgctggtattgatataaacaatcatatcttattcttaccttatcttattcttgtcttacgctatcttattcttgagaaaaagggatgatcctcttatttgttttgacagagagtaaatcaagctgtttctggggcaaaaaaacctaaaacgaattttgttgaagtccgaacattcttgcatctgtacagaaatttcgatcggatgtgggttttctttatactggcttttcaggtaaccttaatgctttgagtttttgttttagtttaagactttaacttcctatagctaatacatctccctcatgaaagtagaatgtggtatatgttcctgttcattgtcgtaattcaaaggttcctgaaatacaaacaataaagattgagtacactgttattaatattctatcttatgattgatgctgctgttattttaaaaaaatatgattgatgctgctgtgcctaaagaatttacagtatgctcaagaagtcttgatgaggacaccagtggtcaattgtgatggtggaagcaccgtgacattacaattttcatggggattaaaacatgttacaagaaaccctagctataatctgcacttgatctttccaattggaagaaaaatattatatgcatacatatgtccatagtaaagcaaagggtttccccttgtattaataaacacttaattagaagcacatccatctgaagaaaaaagatattcccactttcccttagaagccattggattaaaggcagtatgtatagccttgagatggcagtaagcatttatatatttctgaaaacttttgtcagcatccaaaataagtagaagagtaacccttaattgctgtaaaagaggcatttggagttctcgaaagttggtaggattatatagatgctgagaaataatgtcatcttggtcatcatgaaaggttttcatatgttcctatagtgaatcacgttcatgctagaatcttaacttggcacttatgaatctagtgaggctcaacttaagtcggtgtgatatcatgttgcagctttagtcttttgtcctcaaggattgaccttgtactgtactattttcaggctatgctcatcgttgcatggagcccttctggatctatagtagctttcttcgatgcagatgtattcagaagtgtcttaagcattttcatcacttctgcttttctcaattttcttcaaggtaaatataatatactccattggtgcatgtagtctatttagttacggtataaattaatggtgctaatttttgtggatgattctaataggagagacttcattatgttgctaatggccaaaataggagaaaacaaaatacatagtttgtactaaatcaaccataagcatttgtatcaactacttgagttctagcactattctctctagttgtttcctacaggtttactatatagaagatttcttataatcttcatttatttcctgcagctactctggatatagttcttagcttcaatgcatggagaagcttaaaaataacacaggtggtgcgatacctcttgaaatttgtggtagcagctttctgggttgtggttctgccaatttgttactctagttctgtgcagagcccaacaggacttgtgaaatttttcaggagttgggctggggattggagtaaccactcattgtatgattatgcaattgcaatctatttgttacccaatatattggctgctgtactctttgtccttccacccttacgaagaaccatggagcgttctaacatgcatatcactactcttcttatgtggtgggctcaggtgagcatgcccaacattaattagtttgatctcttttcatttttgtttcattgtttttgctgcagcgggtatgcattttttttttgaaaacacaagaaacttaaagtgtagctaccgttaaattatacaatctaatgtctaggaattaaactagttactacaggaacactaatcaggaaataattgcgtcagcaaacaagaaaaaaaaatatgaaaatttaatacacacaataagataattgtgctaaacttaggaattactactggcctgtgtcaactttgaagtccctttctgggagggattcctgtcctcatgtttgtgttgaatttacctttctttcttactagcaatctgtgtctcttatggaaaacatagttgtacacattattcttcttcactctttttttctagttacttattattattattatt

SEQ ID NO: 1037 - DNA, 925 bp, Cannabis sativa
attaaagacatgtttgggcatatttgtggaccattactaagtggattggttggtctaaagaagcctagagatcatggaattccttattcactaactgaggagtttgtgagtgtttatagaatgcattcacttttacctgaaaaattcatccttagggacatcaagtctacaccttcaaaactcaaatcccctcctataatagaagagtactatacttttctccatctctctttctctcttctcgatctttattatataatattagagtactatatttaatattttattattatatataaaattatcataaaaaaatattaattgtattttttgctttaaaggtctcagttggtttaagactgacttatcgttaactatatacaaagtaaaactttgcaataatgttcgacactattaatatttaataacaatgctcttctctattaggttataaaagtaactataatagaatcatttgtaaaagttgtgagaaaataaataaatattgcctaattcactaaatttaacatatgtaggattccaatggaggaaatgataggcaaggaaggagagaaaagactatcaaagattgggttggagcaaatgttggtgtcattaggtcatcaagcttgtggagaactctcactatggaactacccaacatggatgagaaatctcattgctcatgatatcaatggagaagatagaccacaaccaattgacatggctgccttagaaagtaaatctctacttcatagtgatactattcatacactaagcttcattcttttttggacacatgttttagctaaataacaatttaaaccactgtttttaaaaatgatttttcttatacttgattcgaaaattagattgcaaaagttttttgaatttgtttcagtcataatattttttaatataatct

SEQ ID NO: 1038 - DNA, 2322 bp, Cannabis sativa
  modified_base (2072)..(2081): a, c, t, g, unknown or other
tttctgccccggctgctgcctctgctgccgctggaaccccttatgcctataaagctttatttgggtagtttttatctttcccaattttctctcttttccaatatgcagtgaatttaaatcttaatttgatcttgtttctatatgttaactcttatccaccatgtattggtttaatgttacttaacagtaatttggtttaatgttacttaacagtaatttcaggataccaattgttcaatgcgatgctgctggtgcattgggttctgatgattatgcaactagtttcaaatctgtatctgaaaaactctttcagaatgatgctcttaaatgcagtagtactaataaggagtacaaaattgagttaaagcctctgttttcggcttttaagtttaggcccatagcagtgattatcttgaggtcgtttttaatcttctattcacaattggagcctcgtacggatgatgatgatgaggatgaacagcctgtagactatgttgctgcccttaaaaaaacagtaatacatttctgtcgtgaggtaagttttgacttttcatagtttcatttccagtttattataattcttctctgaaagatactgtttattgtttaaacaggatctgacttgtacttttcctcttgacacagactgctattgcctcaactagaccaattttggaaagagtggctgttcatcatgtttccaagcgaatggcatggaaacttctaaaaggtagtttcaactttcattcttatataataatttatagaattgatatgagaaactaatggtaatggatgtaatataacactactgacagatgttccaaaatcagccacacgcaaggccagcagaggaatgtctgcttatgttttctttttcagagttggcaaaacaactttcagaggtggtcgattttaaatttgattttatgtctcagcttttattttctgattggtagtactagtattttaattatgtataagcaggacatcttcttggaattgcaacattatggagtgtccaagttggctctgcgttttacggattcatcattcgattgctgaattcgaaagaagaagagggtcagggtgatgaagttaaacttctgcgaaagaaggtttcttgtgttacaatcatattaggttcatcactaatttttgcttctattggagctggaattggtgcagttttaattcacccttcggttggtcaatctataggtaagtaagaatatctcctcactaaatatccatattgctttcctttgtgtctaaattcttaacctttctaataccaaaggacaccttataatttgttagcagttttttatattatttattaaattaaaatgcgtggaacctaatattgaaatatactaatagcgtcatgtcacgtcttgtagtacttgccctttgaacatttctcatatttatatgtaaaatgtgcttctttctttattgcaggctgttgggtaggggattttgtagggcctgctattgtatacattttcctcaaaaaaatgtttagtattgaaattttgtaggttctaaacataatctatctatttaaatgttttgctcactcttcatattgagtcactgctgttgatagaattttcaggaggataatctaatccctgtaaaatgtgaatgtggatgggatagttaataaagtcaaagtgaatctcaactctcaagcaaaccaatttagagctttgtatattagtatgtacaaagttatttatttgaattattattagagatggaagattttattggttgggaacatatatgctcacaaccaattaccaataaatatatattgtcttgcttggctggcttaataatagttgattgtagagatcatatcagattttcacaagattattactatcaatatgtgtcttgttaattattcatcgtacaaccaacacaaaataaataaaatagatcatatgtatcaaaatcacaatagacagcattgttattattattggaataaaaataataataataataaccagcccagctgtacttgttaatcttcatcttctcctctctctctctctctnnnnnnnnnnctctctctctctctctctttaagctgaacaattaacattgtattattatatatgagtaaatgatgaagctacttcaataaaaagatgtaattgatattatctttaacttcgaagattcggccttatccatagttatccatctttaaagtttatttggtaattatcacacatattaatctaactgtattatttctacgtaccaaaaaaacaaaaacaatgccattttccgagtggcattcat

SEQ ID NO: 1039 - DNA, 6956 bp, Cannabis sativa
gatgacgccgccggttgtttccaccatccaccaccacaaccaccacagagtcctcttgcctgttctcgccgggacactaactgtgaccgttatcgggatttttttcctcgttgtgtttatttaccggaagctctcgtacaaccggactactccctttgaccagagcaaccaaaccagtggcgtttctaaccagcaccagaggttttcttactcccttctccggcgagcaactgggtcattctctgcttcgaatcttttgggtcacggtgggttcgggatggtttacaaggctacgcttccgtcaggtcagtccttggcagttaagctcatggactctcatgggtcaattcaaggagagagagagttccacaacgaactgtcgttgtcgttgaacctctgctctcctaatgtgatttctcttctgggttactccatggacagccgaagaagaaagcttttattggtttacgagctcatgcccaatagaagcctccaggaggctttgtttgatcggaaatgtgcggaattaatggagtggaagaaaaggttcagcattatccttgacattgctcgaggccttgagtacctccaccattcctgtaatccgcctgtgattcatggggatattaagcccagtaacgtattgcttgattctgagttcaatgctaagatcggtgatttcggtctagcaaggttgaagacggaggatcaggatcagggtaatcttgtcgtggaagaggaagatgagggggaagaaaatgtcattgagaagaaggagaagagcagaaatggaggagtagttatggaaattggggatgataatgggtcgatcttagaagagacagagagtgtcaccgtgagtgtgctaactagtgggtttgatcaagagggtttaagtgtaattgaacgttcgccggagagttgcatcgtcaggatctcgggacctgaggcttcgccggagacgacggtggcagagtcgccagcgacggtcgataggattggggctgcatcggagggtggtttcgatagggcgagcatggggagtgggagagatttggttgggaacgggaggagaaaagggggttcagggagggattggtggtggaaacaagacaacaatggcggagggtcagagtcagggagagtaaaggattacgttatggaatggattgggaatgagatcaaaaaagagaaacccaaggcggaatgggccgtcgcgtctccgagctcggcggatattctggggtcgtcaacaacagactccgaactaaagaagaagaagaaacggaagaaaagattggaatggtggtcatctctggacgaagagagaatagcccagaagaaagagaagaatcgaaaaccacgggaatggtggaaggaggaattttgcgaagagctcactaagaaaaagaaaaagaagaagaagaatagtatgggaggtggagaatcatggtggcaaaaagacgatgatgaacttcaagagagaaagaagagaaaaagcaagagtagcagagggagtatcgattggtggttagatggtataagcggcgacttgagaagtggccggagaaatagccaagattgggctagctccgatatccccaagagtggtggtattagtagtactccttccatgagaggaaccgtttgttatgttgctccggagtacggcggaggagggcagctatcagaaaggtgtgatgtctatagttatggggttttgattttagtattggtttcggggcggagaccactacaagtgacggcgtcgccaatgtcggaattcgaaagggctaatttgacctcatgggcaaggcagcttgctcggaatgacaggcttttggatcttgttgatccttcattgcattcattggataaggtagaggcattgctctgccttacaattgccctgctttgcctccaaagaacgccaagcaaaagaccctccatgaaagagattgttgggatgctttccggtgaggcggagccacctcatttgcccttcgagttttcgccttcgccgccttccagttttccgtttaagtcccggaagaaggcacggtgagtttataaatctgatgttttttatttctctttgtttttgggttttaccactttgattaactgtagagaatgtacttttagtaggtgattatctaattatcatgcttatgtagaaaagaaaaaagaaaaaaaaaatgatgatttttaaggtcaagagtgttgcatagttttttcatgtacaaagcactatactttgtttctttgtttagagaattgttgtatgacctgcaaaaatctatttcagtttccatatttgttttgagaatcattttaggcacacaatacaatattgtagtccctttgctcagttgtaaaattgaagaatccgaggataaatgtcaaaagtgagatgtgaaaactgatgagccttttctcttttgctttacatatggtgaggagggtcattattaatcaacaaaacctccctttgatgaactctctctctctctccttctctctctctatggtgtactcaaatgaacaaactttcttttgatgactttaggactgatagggccagaggaagatgagtttacttttctgttatctgctacccttttcaaagtaaggggatttttggtgccaaagtagcatcaaattcagtgaaaaaaggaagcaaatgttggttctttggtcccactacccattcctctcttttacaaagtgattagctagtactttgttaaaagaaagcaaaataaagtgacttattagtaaagtaggtgtaatggtaatggagcacattaggccaatgggaaaggcttaaacattgttgtaatttggtaggattgaaacggatgatagtttagaggaaagttagcattttttttttggtgtgaaaataatagtttcttaattacatcaaaataaattctttagtgctgttctaacttttcttgaaaagaaattgagtgtttgaatgaggacagatgccaattcatcttattacactgtaatttaagagtatttttttttaatgtttactaacgcgtgtaatctatataaacacgctactctgctatagttctccactgaaaaatctattttttatacacatatataattgtcactattaagcttaaaattattccataggttatggcatctctttaatgacagaatataattttgtagcatttttaggtctaaattgaaattttggtgaaatatagaacatattctctatttttttagccgcattttccaaatatttagtaggaacactccatctactagtgttccatttggggagaaatttatataaaaagaaaagggatttattaggctgtttgcgtatttgcatctttctttttgatctgtcataaattaatttatggttactgttattttcattcactgtatcaaaattatgattgaattgcatgatcagatcctgatatataacatttatgtttgttttcattggtttttgtgacttagattttgacatttatgagatggtgtatgaggtcaggtggttaaacttaaacatatgtttattataaggtagagtgtagattacatcgttttgttattggttgttaatattgtctgttagaaagtctattgagatctaaccactgcccttgaccccaaatccctatactatttgtttacctaggctcctaacactatttgtttttcctttctttgtgcatttgtagcatcccattatgtttcgaaagaagttattggacacttgctaagttaacccatgtacttgtattgttttgtgtatatatagaagatgcctttcattgattgttaggtaaaattaaagtccactagggtggtggttcaattgggtaagaagcttcctacgctcaaaacaagtgttgaaaaaaatcccaataatatggcattagtggatggcctttcaagccaactagtcttccatcttaccttccctgtgatggtaagagtgaatatcgatcattaagctcatatgaagaggttactaaatgggttctgaaaagctgacagacacaaaagctaaagctattccactttactttgttggacttggattcccaccgtaataatgaatatccttactgggttcgttatattagacacacgtgccttaactggcgattttagccagctatactcttagacaatgatgtgagaaaccggaggcttaaaagcacacaaaattcagacatgagttaactttgatatctcatatatggtaatatgttttcacttaggactcaaacaaaaatcaatttttagttacaacttaagaactgagataactttgctgctagatgtttgatttggcaaatcagattaaaaattgtattgaagtactctaattttttcagcatcaaattctatttaggtacttcaagttatgtgtaagttataacacaactttaatatttttttattgcaaatgtcgctttaaactaatctaccacattagtgtctaacatcacgagtaacaacagctattcatagtacaactaagaggttgatcttaaatactgttttgtcgcaaatattctcaattgctatcaatatcttaggtcttttcttttaacacgaatgagtcaaaccatgaatccaggtcttgattcattaatttaacatggattcttttagagtaactaagagttaattatgctaagaggcaagttagttagagttgttataaattgttggaattagttagaaatattttctcaaacttattcagctgtaatttgtaactacatttaaatatagtgcaagctaactattgaaggttgagcattcattccactctttcactctcgtcctctcattctcctcctttctttcttttctgctcaaagtctaactctaaaattcagaattcttacatggtattagagccatgtcgaatcatagcgaaaatggctgtggtcctagattttaaattgatcctcctgttagagaaagagtcgaacaaccgcaagctcgagctacaaatccaattcccgctcctaaagcttaaattcccctccccaacaatcatctcctccccctgaatcttagataggattgcacaagctacactatttggtgatcacttgttcttgttgcagtgtgtgcttatgatcttgttgactatatccttggaacccttcctcagcctctagcatctcttgtaggtaatgttccaaaccttgctttctaacaatggtttgaccaattcttgatgcattggctaatgaattctgttgttgaacatatgttgggacatgtcattcattgtcgaacctcctctaagatctagaccacctttgctcagttgtttgctaccagatcttaggcaaggcttctgcaacttcaaaatcttcttcaaaccactaagaaaagttctttctcaaacgaggaatatatgctcaaaatgaagcaatatattgattgatcatcttgcagttgtcggccaaccaatcaacaatgatgatctagtgctctacattcttggtggattaggatcacagtatgaggttgtgattgtcaacctcacatcaaaaactgaacctcttaaacatgtaacaaacacaacgatgaataaatcacacaataaaagaagaaagaacaattaattaatattaactcatgaaataatcttagacaatatctatcgaattcctaaattggaagtttagttcataatcaaatctaaaattaaactagacacagacaagaacataaaaaattaaagaaaaagaaaagaaaactagataggagattatcacggatcgtccacactcgctcaaagcttttcttgtgtttctagtgttccattctgtatacttctctaaaatttgcgaccccctttcattaaaataaagtttttcagctcaaactttaaaaaacaaagttgcccatgtctcgtatggaggtggagccacaacggaaaagtgcctcaccgcgatgattgtagaaagacgaaaatactaggtttttgtagtgcctcgcagcgacgacaattcatttgtgtactttgacctctctcaataaaatgtacataactttcatatacaaactccaaatgaactgattttagatgtgctggaaagctgaaaaagagatctaaaatttttatgtcttgacttttttcaaaatataattagaacatagtcgaattcagaaatgaagtttagctttattttcttgtaaaattttctctattttatagatcactgtattttttatatatgaccaatttatacagtttaagtgtcaaaacctaaaactaaagaaaacaagcataattatattccaaaaagtgacaatgaaaaagtcaattaactctaaaaatgacttgaacaataggctaaaaatagactaacatagaatttagaggaaacatagacatgttgttgatacttatgggaagcctttgaatctgcctcatatatcataaataggcttctcattcctactcttaactctgtttcaccatatgaaaaacttatttatcgaagttcatattataacatgatgatagcatttggatgctcttattttttttagtcataccatgtgaacaccaaaaggtttccttcaggtcctcaaaatgtcttttcataggatagaacatatcttctaagggctataggtgtctgcatccaacatgtcaaatttatgtgccaaacagtgtaacttttaatgaacaagaattttcatataattctctatttggctctgaataattcaatgtcacccatgctcctcttgttcttgatccaaattcctttcttggtccctctcatagacatgttctacctcttcttagggatgcaaatccacccctagccctcctccatctccacattatgctcccacagtatcaaattctcctccagctagttccagttctaagtcatcacctcacagtttagctacaaacactt

SEQ ID NO: 1040 - DNA, 4532 bp, Cannabis sativa
tttttttttttgttatcacttagtgttgaaaagattttatgtttttcttaggagatattgttaaagaacttagtaatagttatgattggttgtcattaatctaaataaaactagttttttctttctttccctgaaaagcagggaaatgtgtgttcttatagctaagtgaaggaatatgaggtttgacttgtattatgcaaaagaacaaaaagtttgtactcttatattgtctaataccaataatgcatctttcttctaacttttgcttttgggggtttggatgcaaatttcaaccactatattcatatccattttcgtttatctaactgggtttgcagccatatctgctatagttccgagtactattcaagattgcatagtgaaattaggcaatgggggttttataataatgtagtacaaacagggacattaaacatatccatagtacccaacagagccccgtgaaagtgaggaattcgacaaagttttttgaattcaagcaatatatgttgctttcttgtttttattgtactgtctctttggggtaacgtgtctactcgttcatctctattacttatttattttttttatttttttggtagagagaattaatgagaaagaaattcacaaatttgattggttcgagtgttaattgtagtggagcaaagttaaaacattatgtatttatattattttcttgtgaagaaacgtgagcaataatcataaagtagaagcaaattgtctattggggaagatttaattgtccagcatgaagattattgaaagaaaataaacaccttttaagactgtgagcaatgattcctttgacacaaggaagatcattatagtcaaaataataaataatacaaaactctttacttaattaacaaaccttaacctcaaaactccactttaagtgaattcagaattttaaaaatgaataaacaaacaagaaaaagtcttctcatttcaatcttaagctcaattttctaaacccaagatcccacgcccaattgaggaatgacttcttttcaaaaagtttcataaaggaaggaaattgtgggccagcttgtttgaattgatggggttgggatctgcgtgccctgcaggagtcaaaaatggaaaaaccaatgttcagaagccatcaaactgtgcagatttgaatttaaatctcaagtcttatgttacttgaattgcttattgtacaagtataaaaacaagaagacatttttccatttctgaccaaaaactaaaagcgaattttctgcatttaattccaaattcaatcaattaataataatacatgaaaagttctgacaaaaaacactgaaattccttaacaatgtcaacagcaaaacttcaccacaacaagacaaggatccaaagatcaaggtattaatttagtgtggaaacaaatatgcaatggaaaagatatggtcgaaactgtttccacgagtgtttttgtgttccaaatgcttttcctttttcacatggggttcagataattcataactaaatctcaatggtcaactagttttcatatgaagttgtaataatgttttaacctaggccttcgatttcttccctttggtttcaccggctggtttgctcttgaagggtaggaaggtcttcccgcccataaatgcttgcaatgcttccggtacctcaacaccatcttccttctggtagttctcaagaatacagcacaaagtcctctctgttgctgtgagagtagagttcaacaaatgaacatattgctttgtctgctcattgctctgcaacatcgtgaagattacattaaaaggcaatgagagaaagaaatgtgcaatggaatatgacttagctcagatataagttgagtacctttttttgtccatatcgaatttctaattttctagactgatagtctgtacagttagaacaggatacaagctctctgtatgcctgagatgaaggaaaccatgcttccaagtcatacttctttgctgcagcatcatttagcgcaccggaaacaatggccacaacttgatagggaagatttagctacaattgagaatattaaattagattagttatctcataagcaaatactgagcatcatgcctttatcatccatagattgctcaactccctataatacatgtgcaatcgaaatagatgagattcaacagcttaatacaatataccgtatgttggtttcatttactttgattagctcttccccactcccgttttagaataaaaaagaatggccatgaaattgtcaacctaagaagcaaaaagcatgttcgcgggataaaaaaataccatcttgtagaagtcctcagagttcttaatcatttcctctatcatatcccaagagtcattggcatttggggttgtgagacaaaattgctccactttctcaaattgatggactcggaatattcccaaagtatctcgaccatgtgagccagcttctttacggaagcaagatgaatatccagcatatctagaaaagagattttgatatgacataagaataacaaaaaaaaaggatttattatattctagtgagaagctccaacatgttcaaaccttatgggtagctgtgaaggatggatccaatcatctatatgatacgaacaaagtggctgttctgctgtagcaatcagatatttgtcgtctccctcaccagtcacctattaaaagctctagaccaaagtgaggcttcaattgtaatttaccaaagtttgaaattcatttatcttatttagagggtgattttttcccctcaaaggatcaactaaacgaactaactgtgtatattgaataaatgaaccttgaatacagaagaccaagcatggccaaagaaagaacacaatcaatttagtctcaacaaataaaaattatatatttgtaccaattcaaaattctaccttgtagagttcttcatcaaactgagctaattgagcacattttgccatgacatcttttctcataaaaaaaggagtctgcaatgctgtgtatccccttttctccaaaaagtcaagaccaaagttaatcagggcttgattcagacgcacaccgtcacctttcagataataacctcttgctccagctatttcagaacctagatattcaaattttccaaacatattgcactcactttacaaactaatttgtcaacagataaaaactgaaataaattactagacatcatatcatgtaggtaggacatgtgatgacttaaaatggtcttaactattcatatttcgattccccaaaagtctgatttgagtgaaagattttgcaaaaaaaattacctttctttgtgtccgcaatcccaagaagctcaacaagctcaacatgattcttcaatttgggttctgtccgtttctcaccccatgttctaatcacagcgttgtttgcctacaaaagatttttgaatctattgttaattagaaagagagaaagaaaaaaatgcaaagtaaaaatgcagcaagcgctaaaactttacctcatcattactaatgggaactgaatcatgaacaaggtttccaatagtttccaactttgaattcaactgagttaaagcttctcgaacttcaacttctttctctgcaatggacttcttattatcatcagtattcttgatcatctcagttgcatcctcacctttctattctccataagtaagaaacaaatcaagtgagaatacgcaaaatcaaacttaatgcaagcaagtcaaaagcatttaatagcacaaaatatatttgcccatagataattttcaatgcctgagattcacaataaaaaaaatgatactggataggtagccgttaatcaggaaactaaactacacacacttcttatgcttacccaattatgaaattgaagataaaccctacatttcaatgctataaaaattgaaatcactgcttcgttttctacctaaatttcattatcctacagtaaaattcccccaaaaaaacaccttttaattcaaatatgaaactacagaaaatatacataaagagaatcaaaaaataaaagaaaaaaacacatacaattctgagctgagcaactagcttgttgatcttattgaaatccttgcgaagactctcaagctcgaattgacctataagtacattaaaaaacaaatcaatatacaataatagtaataataataataataatgaactaaaacaacaaattagtacagagagagagagagacttacgttgacgccattctttgtcgagcttgataacctcatcgactatctcaacattggcgaaacgacgacgttgagattcacgaattatttcagggttgttccccttttcttctctgaaaagattgatgtccaacatcgtcgcctgggtatgtctaaagcgaaaaaacagaggttcaaactggagctgatggtgaagaagaaacaatttgtactttccttcacccaaaaaccctaagcttaagctgtttggctgaggggttattaatatccctaacaagaataatgtgtagtcttcccctttgtaatcgtgtat

SEQ ID NO: 1041 - DNA, 1172 bp, Cannabis sativa
aaactctactggctattggagtttgcatgtgaagcgataggagttgttgctttggatgttttaatgacagacccgacccaacaatgtcgcttcattggcttgccgaaagggttcttgaaggcatcacaaagggtcggaataaggcgtgttggagtgcttgcaatggcttctgtaattgggatggttcgaggtcgactgaggctgtgtcagtcgtattggtatggtaatgaactgagtaaaattcatttgaaatcatgggatctgaagatgaataattatgatcataatgaagaggatgatcatggttgggttttagtccatgatgttgtagtgcaaaattgtgaagagagaaagttgtatgtaattggttatcatcctgatccggatgatgatcgtggtgatatgtttttcttcctcggacaagatcttgttgattataagtctactttgtataaatcccagattgggagagatatcagcttagaaaaaatccgttcaacagcatcaaacataccattttcatctttacaagtttttagtcttgttcatccttggctccctactcgaataacagcctcaccgtgacataatctactctgtaatttcttattcaatcaataagagaaaaaaacgtttttactttattttgtttattgttgatattaatgactaaaaatctaatgtaaatctgaaggcattttaaggtagaccgtatgagaattgaaaaagaaaagttcatatcgaaaagtataaaagaaattactggtttctgccatgggagagtataaaaaattaaggtagaccgtatgaaatgattcaagcagagaaagaatagtttttagtataaatagtggaactcgagtcatgggagagtaacactgggttttagctgctgaaggggagatctttgctattaaaatggctttagagtttagagtgggctcgggacaagcattgggataactttgccattctctcagatgctcaatccatagttcaagctctaaatcacaagaaaagtcattcggactggcagatttgtagtagctgatctattttcttgtttttcaaatgtctgttttttatatccaaagagaaagtgcttctccaactctttggtatttttaattaagtacttaaaattagtaaatatctctcgaataattttggaa

SEQ ID NO: 1042 - DNA, 2043 bp, Cannabis sativa
tctgccacccagaaagtggtgtggaccagaaaattgttttgcacaaaactttggagcagtcaaagaaacctaaaagaaaatactgaaactcaatgaataagatagctcacactttcacttatcttcaaatgagtagctaattctatcacattctcataaacaaattttgaaataaaatcttctaaattggtatgaaaacacaattgcagtttctatccaaagcctaccaacatgtcaggtttgatgccttcaccaccaatgtctccttcttcaacatgccacccagatggaatgtccacggagacaatagcaggggttttttgacgtgttccatcataattccgtagagaaacaagcatttgaaccaaaccatcaaaaggaggtcttggggaacctgatcaatataagatggtaattaatttaaggtgtatccaattggatgcagcatcaaaaaaaatatatatatataataacttatcaccttcattgacaattatgtaaagatctagaataaatttaaagaactaaatttgatgactttactaggacaaataaagttcgtttaggagaaaataaaaaaataaaaaaagatgataaataccatggtacgagaacccaaacattgcatcaacaataatgtcaaagtcctctgacaagtctaacggcaaatcttcgacggagatgaaaggtactgagagtgattcaagctacaaaattatcaatcagatgagaatataaagcaagaacttataaaagaaactgagggttgtcaatccctatatatgaaaaacaatattatgtacggaacaaacctgagtaacaagcccatcatacaaaggcttgggagttctttttggataacaaataacaggtttatacccaaagtgatgcagatgacgagcagcaacaagaccatcaccaccattgttcccagggccacaaatagcaagcacgcgattatgctcacttaatttgtaaaccttccaaaacaaaaaaaaaacgtaatgactcaaaacttgaaagcatagaaattccaaaactgagttctcaatacctccaaacagaattaaaagacttgagtaggcagttatggaaccacttggtagcccctcaattttattttatttttccttcataattttcttcttaagctaaaacaaataaaataatgcagtataggtttttaaaaatagataaggcaatgaagacaataaggaatgataatgaatacaatcaaaccaaatcttcccccaacataatataaactataagaccatgaaaattaacacgattcaattctacggatgatcagaattaaattctcaattcatacaacagaagcgtaagaatgcaatctactaaatttgaatttggttcacgtccacaattatccataaagatggattttcaataggaaaatcaattctcaaaatccgaattttccatagtttaattatactcaaacagaaactaaatacctctgctattgcagcagccacgctcaaacctgccaattcctacaatggagggagaaaagagattaagaacaaacacatttcgaataaagaaggcaaatgaaaaaaaaaaaaaaaataggaaaaaagactgaccattaactgatcgacactaaagccaagagggcccatgagggtctcatcgatctcggcagcttgacgctgtgttaggtacgatatagagtccggatttgacatactttcgggtgacactgttctcaattcccttccgggtttggaacaaaatgcaaaacttgcagagttggcaattgggtggaggaaaacctgaagagatatatataggtaacataagaaatgggcgatgaagttgagaaatggagaaatgagagagagagagagatacttacagaagagagttggggaagatggttgttgaaggagtgaaagggtttggaaatgaaagtgtaagaactatgagaggccgaggcagaggcagaggcagaggcgaggaagagtgattgagccaagtgaaagcaagtcattgttcgactccctttgccaactaacc

SEQ ID NO: 1043 - DNA, 2334 bp, Cannabis sativa
tctaatttggcgttcgatgttgcgacattcttggcggagaagcctctgccaatccctcaattgttgttgagggttggctttgggtactaatattattgcatttagacaagtctccactaaatagaatatttcatagagatggaaggaaggcttttctcagaggaggagatcaaaggagcatttcacagatttgatgtcgtctgattgtatccaactgcacaccactcttcccttcaaaatatgtcctcactaaacgatcagtggacttggcttctatctcttcctctgtagggccactacccataggtaagccaataatcaatccaaactcaagctgctcaaatctcatgtctgtttttccaacgtaaaaccatatctcatcttccttctacgtttcaacttatatcttttgcaagagtaggttgtggaccaatgtgcccgagaaagtcaattctttagcttcccagaatggtccaaaagggctagtcataaccttttcagtcaacttcgttgcttcaaacttggctttaatatctttaaacctatctaagccacaataaataagacgtcctgtgaaatgctcgtacaccagcagcttaagttcatgagccatctgtaaaatttatgacaaaaaaagagaaactattattaaaacacataaaaatgtgtcgcaaaacgccataaaataaatcacaatatatcgcaaacaaagttgccatatatcgacaataatcgctaaacacatacacataatctgtagaaaacatcccctaggactatgtcgcgacatgccgacaaacgagtcatcacatgtcaccaactacatcaacacagataccaaacacacaacaaaaaatacctaatacacagtccacgatttagcgatatcttcacgacatgttcgcggcataagtttaactatgtatgtaaaattgtttttaattaaatttaacgatatctagcgacattataaacaacatctaacgacatcaagactaaacatgtcgtaggtagacttcgtaagatgtcgtgaaaaattgctaaaacatacacaactgctacattttgctgcatctggaaaagaaatcgacaaacgtcgcgaacatcgtcgctaaatgttgataattggcaaaatggcagatcttgaatcgtaaacatggaaactcaacccgaaacaaaaaaaaaaagaatctgcttcctaacaatcaagcatttaaaatccaaaacccatttaaaatcaagtaaaagtttagaaatataccttcttcttggcaatttcgttgtgggtttctcaattttgttgtgagttttgcgatttcgttgtgggacttgcgattgtctctaattttcgtggttgaggtttcgtcagagggacatgggtctcgttagggtggctaggtttcaagtggatttcgtttggtggaggtggtggagccagtggtggtggatattgtcggtgagagttagagagaaaaaatagagagacttttcaaatagagagggtatttttgagtttaagaatttttagtattattttcttgtattttttaaagtggaatattaaaacatcatgcattaatttttaacatgaatagttaaataacctttctaaaaagaaatcttttacgttgcaattaagttttttgttaattatttctcctatttaattaagatttttttaaaaaatattagtgtgaaccaataagtataacacgtgccatataaaccaaatcctattttatttaacagattagtagttaaaaacttaaaattgtaccataagttatttaatccgtaaaaaaaatggtatttaagtatgtgaaactaaaaggataaggtatttatgccataaatatatctatatataatatatataaatataaatcttgtctactactagaacaccattagttcttagtccatgtttgatttggggacaacagttgctagaaacagaagacgcacaaggctagttcatgagcactaaaaattacctgaataagcaaatctttgtagttttgtcccttacccagcatctgaaacaaaaatcccaagatgatcacttaagtcctaatatgttcctgactctcaatctcaaccctcacaaaaaaaccaaggtagatatttcacttaacaaagataacaacagtcagttacagcgttgaagtattgtaatgcagattggtattagaaaggcatgtttcctcctcggcctccttgcccaccatagttataaccatatgcatagccatagccatatcccctaccccaattacgtccacccctgaaattcccgccaccacgtccaccaccatatcctaaattagctctctg

SEQ ID NO: 1044 - DNA, 2127 bp, Cannabis sativa
aaaaaaaaagttcacctcatgagaggacgacgttgtaccagaagtttggactgctgctcacacaacaataagcatgcacacaaggatattaaactcacaacaatgttaagaaaattaatgatataaggactaaagctataaagagattacaaacctgagcctgtattggtggatgcaccaccttcagaacctgcaatcatttcagaaagcttctttcttctcacgtcatcaagtttctcaagtgaccgctccaagggtctcataccgaccaactaaataaacagaccaagaagaaatattataaataatgtcaataatcaaaattcaacagaataagcaacaaccacataaaattgatacaaacaataccttagctattgcactcaaagctgaaaaggcagcatccctcacatctggagtcccatcattgaggcactgtgaaaaagcaaaaaacgtgaataaagataatagaatccatgaagcaccatgaacaggataatccatggcccaaaaaaataagttgaacagaacttttaattttgtttttcatccagattacaattacaaatcaaaataaaagatcgcctaaaccatgagtgcactacattcaccaaaaccagtattgaaactgtctcttaaaaattaacgagaataagccatgtttggcacaattaacttaactgattgttcaaaaattaaaaaaccttaaaacaaaatatgttacataaatgcacttacctccataaggataggcacatagtccttgtgcacctttagaataacagccttgttactcgtttcaatacagaatgttacccagttaagagttgatgaccgtacaagagggaccttatttttcacagctgtcttaatatctgcaatagacaacatccagagtagaatcttaaaaatgatcacatctaacttttaacatagtaataaatcctatgacagtaccaaattctgaatcttagaactacagagtagaataaagatatacttgccttccacaatgtcagctagacttaagcacccagctgtatgcattgcttgaagactttgatttagtgcctcagttgaagtaggttttttctctttcaatttttcctttataataagaagaaatatacatataaaaaaataataaaaaaaagcgttagataagcaattctatcaaatctgaactgaaatcagatcaaaacatatcaaagataaaacatcatttgaacttctaaaagagaatctactagtatctgtatgactaaatgtacttttcttattattaataataagaaaactgaatgtacaagtcacaatccaaacaaaatacggccatgcttcattgtgagtttactactttaattgaagtcaacactagaacatcctggttacattcaaacagtctgcgttcccatttttaggttctatgggaagaaaatataatgttattttgttaagctagcaaaacatgaacttaccagcaaaactggcaataggaagcgagaacttgcagaaaaattagttcttaaaccacgagcaagattaccaatagcttgaatagcctcaactgctacagcaatattaacatctgttacgagctgtacagaaaaaaagttgatatttattcatccattcagaaagcatgtatcaacttacataaagaattagaatagaaacatgaagtcaaaatttcatgtatcagattgagcactaaacaatgcgatgcaaaatattcttggcaatagatagagtatcaataatgcaaaccaaatacccaaacatcaagacaatgtaccttttttagtgaccgacaaatttctgagaaatcaccgggtgctattttttttgttgaagcaagcttggttagctctgcaacagcctctttccgttctgaccacttggtggctttctgtgacatacggcagaagaagtttcaaatatcattccaggaacatcaaaaataaatattcctgaattaaatcactaaaaatgagaaaaaagaagactaaccagtccatcccaaaatccagacttctccaaaggagccaagatatcaacaggatcaacaagatcatactcatctatttcctgaggagctggcaatcgatatatgttaaactacggcaa

SEQ ID NO: 1045 - DNA, 2025 bp, Cannabis sativa
tatttggcctaaataagtgatggtaccaaagtcacactttttataattaatatatatggggaatgtctccttagtgtttctaagatagccatcaaatgatgcttatgtttgtccacattagaactatatgctagaacatcaaaaaacgctgagacaaacttctttaaaaatgaacgaaatatggcatttacgagagattgaaaagtagagggagcataagtgagaccgaagggcatcacaagaaattcatagtggccatcatgctttcgaaaagtagtttgtttgtggatgtgttttggtttcactcgaatttgatggtatctcgcttccagtttagtaaagatggtggcttcatttagctcgtccaataactcggctatcacttcactggaattgggtaattctccgagatggtggctttatttagagcacgataattgacacaaaatctccaattgccatcttttttttttttcaccaattataccgtacttgaattctttttcaaaaaaaaattatactgtacttgaacaagggctacagtttggctctatgaccccattctctatcatctctagttgttttttcaaggggaggggctacaatatataacctcaataaattaatagtcttggtttagttatagttgctcagcctgagagaaaaggtctagtttaacactcaattaattaaaaacctcgattaaattgtacttttgtttggtgtaatgttatcaatttataaagattttactaacatgttggaggatgaggctgttctatgggattgctaattattgctcaacatttctacccataaagagtaaaatatgttcaattgttggagcatatgactctaccatgtgtatttgtttttttttatttatttatttcatctttttttcattcttatttttggaagcattgtgttctcttgtatagtcttattgtttcttttatatgtttgattcttatcagaaaaaatgggtagagtacttctattttattttaagctttaatcttacacgtcttattcaaatatagaaaaggtggaattatttggtgttgtttgtgtctgcgttggtcttcttctcctccttttaatttttatttttcatttttctgacgacctttttttccccttattgcctttgacgacgaaagttttcttgtttcttactacaaaccagtggaaagagttgtgtcctttttttgtcactaacaaaatgtatttttctttcattcttggttggttcttatttgaaatttgtttgtttacttatttgcattttttgcagaatgggaagggacattgcatatgattactggtcttgtgatttgttttgtgctgcatcctctccagatttatacagaattaacttggaacaggtttgttcaactttaactagtttccttgagtagttccttagtcctttcagaattagctagtgtccttgtgcgtgctttgtatatgttgtagatttggacccaaatttaattacttctatgtttaaagtctcttgtcatttttctgttcactgtttcctaattagtttaggccagtggtcatcctatgaaatttgttgaatggtgatgagatgtttttggattttgggttttatttagttgttttgccacctctaacaattatttattttacagggacgttttctctcttctcttaccactcaatctcctgctctaaatgtagtttcccgaaggttgtgggtgatttgcagtgtttttttttccttcatgctcctagcatttcctttgttcactactcttgggtattgatatgttgttctacaattgcagcaaggtccatggactagttgcttgcggcggtgaggatggttctgtggaatgttttgacatgagaatgaggtcttctgttggtagaattaatgctgtttcacctgctagtggtgcttatgaggtaacaatatattgctttgtcttaaataatgtgcagtttttgatccaattactatgacaatgaaaggttcaaggtcatatatactat

SEQ ID NO: 1046 - DNA, 8859 bp, Cannabis sativa
atactccatgtaaattctacaaaagaaaaaggatgtattcctcaaattaatacctctcacatcttggtcggtctgttgtgggataagatctgcaagcccaacttattataaaaaagcccaaaatgcacaaaaggcccattatataaagaaatactgtacattctattgaagaatttatagctagaccatcagctccatgcaaatagtacgtagtacagtacgtaatactaaacaatgaactaattaaaaagatccctcaaaaaaaaaaaaaaaaaactaattaaaaagataactacttgtttgttaattctaaaaaatgagaacagagtctacaactatcttatctacccaaacaattatgattcgaatcagtcacataaaaatgccttctcataaagtttattgatattagagaaatatgccaccctttaaatttatattttgtaaaaattattaaataaaccgtttattttgttaaaacgtaaattaaattttttatttttgaaaattgtacaaaattcattatctaaataaatagtatttactatttagctagtttacttaggactgttttctttttctttacatttttgaggttatactttcattgtttagtgaaacgacaagtttatctacgtttcaatttctacgcggggaacacgcgtcaactgaactcccagtcaacaggtcaaatctacaaaagtgggaacacacgcttcattcttttcttttcaccgaagcaatctactaaaacgtcgtcgtttttcctgatacgatgagggcattttggtaaactaatgtcatcgtgtcatgtcggttgatttgattgtattattatctttctccctcaaataaattcacacaactctgttttgttgcgaagagaagaccaaaaatcaatcaatcaatggatgttagagaaaccgtaagcaaccaaaccgacgtcgctttgagcctcaccaagcacctccttcagacccatggcaaggactccaatgtggtcttctctccttcttcgatccatgtagtgctcagcctgatcgccgctggctctaaaggttccaccttggatcagcttctctccttcctaaagtttaaatccagcgatcacctcaactccttcgcttccgagcttgtcgccgtcgtactcgccgacggaacctccgccggtggaccccgcttgtccttcgctaacggtgcttgggtcgagaggtctcttcctctcaagtcttctttccaacaggttgttgaaaatacttacaaggcgactgtgaatcaagtagattttcagaccaaggtaagaactttgtgatcggctcatttcaactttttattagtctcttaattgttttgggttttttttttcaacacaagttattgttttatttgatttcccccttttgttaatttcacctaattttagtgggttatggattttgtgatgtagtcatttgaaattgtttggtggccctaaaattgatagattattaaagtttggaatcgaagaattaggccatttctgtatacattatatatactgaaggtttctgatgttgtgaggggtgccattttagttctttatatatctcaagaagaagaaatgtagtgaatttattaaataatgttgtgtcagttatgttggcataacaagttatttactccctttgatgatcacgcatggcaaattggctatctttctaatctacctcctaaatcagtagctgtgtcttagttgacaatggtattttggttcagacgatttatctagcatcgttcaagagcaattttattcaagtcaatttgaattttatttctttctggctgaacttttgtttggatttcatgaggttattattgctatgtagaatgcaagaggatcaatgaatttgacaaagttctaagtttgccccttttactatgatagctcacatcatttaggatccatttggttggactgtatgaggggaaggtgataggatatagtgctcaaatgtagaaattaatgaatagatctcagtagggagtagggaaatcattgataaaccaggaacaaatgtagtggccacaggccaccaagcaatcgagaggcttgggtcaatatatgcactgacttcattaaaaagcattagcgtcagtatataactaatgatgctgcttaagtttggtgaacagcgtctgttaacgttgttgaccaatgatctgggtggcgcagaaggtcttttcttgtgcagtgtacaagagagaaatagaagttgggatatgttttgtttgtataattactatgtgggttggttcttatttttattatacaatgctaaagaataattatgtaaattttactcaagtatcattagaatggacatgttactagaaagaggatcatttagaataatctactcacttttgtcttccgtcctaaagatatcttaccaaattacttaccactctacctcacatccattcactaatagtaatctctccacccatatcctttcttccgcttcttcttcctaccaagcactccttaagatttattgataacatagaaaagaaatttataccactctgtatttatggaaagaatgatacagtgtttgttttgcctttatttgttcattagttatcttagtaattctacttacaagctagttttttcaataattgattccgtgtattgatcttggggtttttgaaggctgctgaggtgacaggagtagtgaattcatgggcagaaaaagaaactaatgggcttatcaaagaggttcttccctctggttcagtggacagcacaaccaagctcatttttgccaatgcattatactttaaaggagcttggagtgaacagtttgacgcttctaaaacaaaagataatgacttccaccttcttaatggaagctctgtcaaagtacccttcatgaccagcaagaagaaacaagttgtaggcgcatacgatggagtcaaggtattagctcttccttacaagcaaggggaggacaggcgccgtttctccatgtacttctttcttcctgatgctaaggatgggttgccagctttggtggaaaaaatgggttctgaatctggctttttagaacgccaccttcctcgccaacaagttgaagtgggagactttatgattccgaagtttaagatttcctttgggttcgaagcttctgatactttaaaaggtttaggactggtgttgcctttctctggtgaaggtggtcttactgagatggtggactcacctgtgggtcagaacctctatgtttcggacatatatcataagtcattcgttgaagttaatgaagaaggcacagaagctgcagctgcttctgctgctgttataatgttgagatctctccgtgtgagtgataaaatagactttgttgctgaccatccattcctgttcttgatcagggaaaatatgactggaatggtgctattcagtggtcaggtggttaatccccttgcaagctaaattacatttctgtaaggaataaaaatttgactggttattagctgccattacgtggtacccctgaatcgagtgagtgagttaaaagtaccattgcacttgctaattattataattgcggcttctatggtttttgaatgttcttttagttgttgatgatgttgtatttatctaattatagaagaattatagtacatacccatgtctgggcttagctcgaggatcgttgtttgttaattgctggacttatatgttaagactcggatggaagtatgtaatgcaacattgtcctacatatttggtcaatataatcaagttatcaaatttgaatttgaaactaaaatatcaagtgtcgtttagtcatattaattgatcaaatttgagtgaatatagataaaatctctttttaatttgtcaatttttcttaagagtaaagtttgatgatgtgggctttgctaaacaattgatgtaaaaatttagggagtgaaaaaagattaaaatcaggacatgtcggcagactgggcattaaatacttcaaatcacgttttgactaactaaatgaggaaagagatggaatggagtgtgtagtatgaggcacatgtatggatctgagtttgtgccgcagtataatgtggacaatgttgtaccaataacaaaacagtgatgcagcaagaaatgaacaagaaaaacacagtttttagaggttcgatctatgagcatatggttagttcatggtctactctccgggagaaatcagccaccaatggcctggatctttattgctattacacacaccctttagttacaatgaatatggtgtttgacaccgatgtttacaatctgtttttgaacagaaagattgctccaagaacatgagattagagagagagagagagagagattttggttctgatgttgagtccctctctagataggataggaattcttttataggttctttggattgaagggagttgaatagagcaactgatttaactactgatggcattcggtaaactgattggttatgtcatattttagcttaggaaatttaattaatatatattcaaaagacaatttataacttcagtaacaataattagaataaataggatttatccttgaattatgattcttatagaatattgtcttttaaattttttgtttattgtaaaaatttccattgaattataaaagttgttgcaaatgtctccttgcagttacattctggtcatttatttaaataatttgttgatatatcacttacgtaacattaatctagtctaatttaagattctagtcaaaaaataattacataattaacgatctacttataaattatgagaatatatgtgtatttttagagttattgtatgtatgtttaatgtgaataaactaaattttaagtagtttaaaattattaaataagctcttgtagcataattgtacttgtaattcataacccatatgcaaagcaaattgttataaaaaaatgagaagaatgtaattggaaagagatatttccaactgaagaaaaaaaattgaaagcaaaaattctatttattctaatgaataataataataataattacgtaattgacatttctccaaaccctgtaaaaaaacaaaacttgaatcacaagtaacaagtacacaaaaaaattgtttgattttagattaatacatattaatcttcaaaagtaaatatattaaaattaaagtctacaagaggattacgtaaaagggtaaaaagagattaaaagactggactggacaagggtgcatgtgggaactcaagaaacttgtgccgttttttgtgctcacttaacgtataacgtggtatcaacctattattacttcattttgtcagtttttatatacatataaatatatatatttatatccgttactctatgaaccatataatgatttttcaaactacaaatgaggtacactgttaaatattattattactattatattttgaaagggttacctgtttataataagttattatatgatttttcacgtggggtagcgattaattattattaaacaaaacaaaatttaaaaaaaaaaacgtaaattaatattagcgcgaaatttaaaaaattctcttagaacggtagcttctgtcttcttctattggttattaataataataataatacagcattgatttgaacgaataccgctgttgtaatttcaattccaaaagcttgagaaatgctaaaagataatggagtctcgtactctcgtataatttatgacgtgcttattaaattgtaactaataattaaggagaaaactgaatcaatttaaaataaaaaataattaaaaataatattttattatgatgtttattaaattttatagaaaagaaaactataattatattattttgtttatgtacataactaaaaaagataatcagaatgttttaatttgataaaattatccttgttagaacatgtaattacattttgtttataaattttaaaggacatatttatttttttatttttaattaataaaattaaaattaaaataaaataaattaggaaaaggaaaggtattccctataaaaataaggagggaattttttcttttattttctctctaatttgtatgggtctcactacttctctctttttaaaaattagtaaataattgtaattccctctaagaaaacatatcattaatgtaataatttttaaaaaatatcactaattaatggtgccgaataataatactcattaactaaatactacaattactactcgaaagtctgatgaattaatgaaaagttcaaagtatcttttttttaaaaaagtcttttatttatttttttagtattttggttttaattttgcatagaagttgaaagattccaaagttagaatgggacctaaaatgtaaggtgaaaagtgattatcaatattgtaaaatgggatatatattgaatatacatatatatatatatatatatactttttggatctatagccgacgtgttggtgtggcatgtgggtgggtcgtcgtcggaagtattcttattaactgcatttatatgggaaaataagaagaaagttaggattttgattagacctctaaacaatcaagtgcttttggacctcattcatctattcagcctttatttctcttttattttggggaagagaaatgcaaattataacctcctattacaattttttaattaacttctacgtttgaaattaaatgtctaaatatttttttatagcggtattcgttatagttacagtatcatccctgtaaatttttgaaaaattcctaatagtttacaatatcaaaaatagagttcctgatattccaatttaccacgctcgttcaaaaacttcaaacatatgttcggcactgtaaactatttgaaatttacatggatgatattgtaagtataatgaacacccccgtgaaaaaaaaatctaaaaaaaatattccgacgtgtgttttcgggcatggaggttgactaagaggttgtaacaggaagttgacggtagcactcatctttttcagaaatattaaaaggcattaatggtatttagtacacgtgttaatatcactattagtttaactaaatatcgagtctcatataatttaatacaataacttttaaagagtattgctagccatcgtaaaatgacatattttttcttgcttgagaacaaaaagaaagaagacaatcccattcaaattaaattaccctaataattactttcttacactataataaatattatcattttatttactttataatgtaattaataactttttatatttttatttatatatttaatatgaattttttacatatatttcaataaaattttaatatttttattaattttttttatacatttttattaaaataaaatttattttatcctaaatgcatttgagcacaatgataaaattttaattaaatataatattatctcatttttttagctaaatttagcataaaatttacaccatccattaaagatgatctaaaagcatctccaataaagtgctataaagatggtatatatgtattttttagcttatattcataaaattaaactctaacactatttgacgcgtcaggaatgaaaaggcgcacaataattatcattgtaatgtgaaccaatgtattgatgatatctgctatttttatgccgatttaaaaggtgctctccttcttgttgttttctcgatccagagagaggtttggttgccttctcctcgggattggctaaaacttaattgtgatgttagagtgggatcggaaagctcttgcattgcggtggtggctaaaaaccattctagtgaggtggtttgggctaatacagcaaggttggatttctctgatgcttgttgtggcgaggcagctgcatgttgtttagctcttgaaacggcaaagcgcgctcaaggggcacaagttcatcatcgtagaaagtgactcaagagtgatgatcgatgctcttaatcaagtgtcatcggtttgggggattgagaactattcttctttgtgttggaaactctcaagatgttttgatggatgcgtgtttacttgtatacccagattttgtaactttgccgctcacaatgtggccaagtgagcctttacccacagacaatttgataacttaggaatctcttcaattcctcaagatttattttgtaatgaccgtgaggtctaattttatttatcaatgaacgcttattttcaaagtatataatgtgatctaaatttagcacatactaaaagttgtgccaagtttagctaccctaaaatatagcatgggctacaatattttacaccataataaatattatttttttatttattcttttgccactcactagtacttttaatgactttttatattttactgattttaatacacttttaattaaaatttaatgcacatgttgacttttttacatatttgtatcaaaaataaagttaatttacctctctaatgcatgataaaattgtaaaatttagactaaatataacattaattagctcatttttaacccaaatttaacacaaaatttactctacagatgatgtaagagtgtattaatacaagaaatttttcattaaatatgcttaaaactttaccccacttctaaatatattttccaaaataatttaatatcaatctatatccttagtttattttaacatacacattctaccccttttaattaaaaaacatctctttcttaatttagatatgaagagaaacctcatgaagccctaagttcccttctcgtcattgtcgccaccatcaaaagcccctcgcccgaagccctacgttcttctagcaccgcctcttcttctcccatcgaaa

SEQ ID NO: 1047 - DNA, 4005 bp, Cannabis sativa
  modified_base (2325)..(2325): a, c, t, g, unknown or other
ccaacgtttatttgtttaaactttaaagatattaagactagtgaacaaggaaatctatatggtagataacaagaaggaataaacatataatttagttagattcaatgatggatttaaattaagtgcatgcaactatcaattcccctaaagtttgccacatctcgcttatttctctctttctgaccaatataattaaattaaaaatatatatattcttgttcctagctttacagcccaagtctccaaatattaattccaagagaatttattcctttttttctaaagaaaaaaaaaatctttctcacaaagcttatctttacactataagaagcaatataccacacaaactctttctccatcgcattctcaaatcaaaagtgttctcaaaacttttattttttcttccctagagccttgaacatcatcattatcaaatgagcggtagtagtagtaatacacgaagacagagcatagaggttattagagaggatcaaacgacaaagaaatggtgcgttgcactccgagaagatgtgttcaaacgattcttattattttgtaataataataataataacacaaaaataaaaatcaacaacgtgtttggtgatggctcactcttcagtcctttcttgtttggcaaattctttgatccttccgatgctttcccactttgggaattcgactctgatatcttgttgtctaatctccggagcttaggacaaactactgtcgattggtttcgaactcctcatgaccaagattatgtactcaaagcagatataccaggtaactactataatactatactttttctttttcaatattgtcacactcgatagctaaaatatgggttttgtcccttgactctcaattactgaaaacaattaaaaaagaaagaaaaaaaaaattgtgaaagatggggtcccctccccttctacttctagtctagctatatgccacaccacacccgaaagtgtagtggattctagcctgttgaaatatatgatgagcaatattcaaaagggtattttagattatatattctttattttcttattgttggaacaggaattggggttgggaagaatagtgtgcaagtagtgtataatgaaaagcagaaggctgtggaggtgagtggtgtgtggagccaacaacagagcatgactattaataaagagtggaggagtgggaattggtgggaatatgggtatgttaggaggcttgagctgcctgatgatgcagattcgagaaaaattgaggcttatttgacaaacgacacacttttggagattaaaattcctaagaaaattttggattttgagcccaataataatactcttgcgaatgatgtgatgagtacaaaaaaatctgatgcggtgtaagtataaaaccttttattattgttatcttattactttgcttcttttaatatgcttaattgcaaagtgtattataattataaaaaagacaaaataattaactgctatcttaattaactgttggtacataattacaagaatgcctaataagagattattaaggcatttacaataacaaatattgatttatatgaatgttattttttatattacaacaccatgtaaatattagattctagaaatttagaaacgtttattctctattctccataatcataatagatcttctaattacaattaaccacatttgatttaaggtgcttctataaagtttcacagttatcttatcatataaataacataaatgctatgaggtatcttcaggtgccaaatatcataaaaattagtatattgttatttgtctattttaatattttattttatatattttaatttaataaacaatataaaaaattatgagatgtcacgtaggactttctttaaggtaaggtagttgagttgcctcatgccctttagcctaagaggcttccgagtcttttttttttcttaacattagtctatcaggggcctgtttcgcacagcttttgaaaaaagctaaaagctgctttttgaaaaagttgtgataaaaatgtgtttgataagcagttaaaaaatagctttttgaagaattttttgagaaactacagctaaaagctaaatctgctctaacccaactttttaaaaaagatgttttgattaaaatacgataataatttttttttctaaaactatatttacttatatattatatatttaaaaatataaaatatttaaaataaactaattataataaaataaataattattaaatctattatttttttttaaaaaaaaaatatgatttatattttattttaatattaacaaacaacatcaacctagaatntttcttatatacttgagtttctaacttattttatttgataaaatataataaaaaaatactataaattatttttatcaaatgcatataaatttatatttgcaaaaaaattaaaaatatatagaaaataaaatatgatgtaaaattatattttacatatttgtgattataataaattagattataacattatcattattattataatagattttaaaactcacagtactttgaaatttatagtttattaaacactcaactcaacttttttctacagttctgctgcagctgctttttctcaaagcaaaactacaatttctttttcccacagcacagctgtgccaaacgggccttagatctgtataattttttttgaatagaaaaacagtttataatttaaaattattacacacatagtctcagttaattaaaaagagtaagaatcatctaattagacgtaattctacacttaatcttatttttaatactttaagtgtcaaatcaatatgtcagttccaaattagttcaagtcattagttatatttttttaaaattaaaatttatataaaaaaatagtttaaaatctaataacaattataaaattaaagataagttaacttttgtttttttacttctccttcctcatcgtgttcaaaaaatatttgaaacaagtgggataaaattacatagtgaaacaatcaatgagaataacattgattgatagaggtggagcctcttgtctctggattctctactatatgaacttggtgttttagttttttagtatgaagtttttcagattagcaaaaagaaaaaaaaaaacaagtattatatatgaatgggataatgatcatgctagaatgtcatttaaaaatgaatgacctaaaaacgacatcatataaatgaaaaaaaaaaccaaaatatgtggaaaataattatttaaaaaaagtaaacaaggtaaaataacattttgttattattgtcagttgatttatgaacaatcaggggcagagcgatgacttgaatgcaagggggcaaaattttgtaaatttagtataaaataaaaaatttatcatatatttattgtcaatattaaaataaaaaacaaattcttttacatatcaaaaattgtctttaaaaaatattaaaataaaataaaaagtactcaatactattcaaattaaaaatattaatatacttttaattaaagcatatcttaaattttaaatttggtaatattttataaaacaaaatatgtatatgaacaaaataattttatatttaataaaatataatacttaattagaagagatcataaatctcaacttctactttaatgatgaaagttatcaattagtgaatgattttgaaccaaatgtgtaaaaataatataacaatatgtagtagagatagtagaagaaaaaatcaataattaataagcaattgctttattttatttaccttctactcatataaatttaattttatgtcaattcacttctaaaaaaaataatttctattttatttttaataaattaaacacttaatttatactatatatattattagttgtctatacactttactattatatattctatatatatattaattagtatgttattattttatatgtatttttatttacaaatatgtaaatatggggttttatgtagaacctca

SEQ ID NO: 1048 - DNA, 2347 bp, Cannabis sativa
aatcatgtatatattattgtgtatcttaaactaaattatctggtagggtgtcaatgttgatgtagaataaacaacatttacttgaatagacaagtcctaattgtaaacaacaaaatttaaatatagttgctttgctcttataaaattatgagaggcataattaaggtttgaggaagattgacaccagacaaacgcaaacttaattaaagcatgatttaaagaagtgtaatattcggcacaaaatttgaacaaatgatagatttagcacaatagcattttaagatacaaattaatataaaatcaaaatgttaatgttttttttaataaatttcaattaccatcctaggagctaagacttgagagttaagacttggtagcttaaaatcaaaatgatgtgattaatataggagagtttttacttttatggttttttttttttggcaaattttaaaacaatattgattattttcgaaaaaaaaaattattttgtaaaagaaaaaaaattgaaaaaaaatgtgaaaaaaagtaactgattggcctaaaggtaatcagaagtataactagttaccttatattacattttatatgttttttaattttttaaattttgaattcttctcatgttataaattttctgggaaagaaaacaactatatttttgcattaattatataaaaatcaataaaatatgtaattttcacattactaaataaatattaaaacacaattaatagtaatattctaataagataacagatttttacacattatatactaaatttagaaaataaaaatattatatttttactggtaacacaaaattttcatttgtatgtgtcctttttttttttttgtcttacgcagttattaaaatataatatttatctgtggtgtgatatgaataaagtttattaaataatgataaaaatataaatgtgacatacattttaaaactacacaaaaaatagtgttatgaattaaggtgcattgggtttatactatataggcatatttatcttataattggcaatttgtccccatttttataacttttcgaataagaaagaaagtataacgaaataaagttcatttgacagaccaagtcccagtcaaaatatacacttcagttaacatgataagtttagagggatgagatattttggctttttcaagtcaataaaacttagaaacataagataattacaaagaataaacatcattacaaggatagaagatgacaaaagtaacatgtaaacagagagagggacagagaatacaatagaacacctaaaaacgactgaaagagacatttaaaattagagaatgtttctcccaattttagttggattgaaataatgcttcgagattgtaagtccctggattattaggctttccactccatgcttctgtggcaagttgattgtatagtttttctgtgggatgaccattgtcaaagaacacatagtctttgacattctcacatagttcatattttttctctcctctcttacttccacagctcgaatttcctctgtagggaccacttccacagcatcctaccttcccttctttaaaaccttataataatttagtataatagcacaagagaacacaccaaagttatacatgtactaaagaaattagctttagaaaaaagaaaaaaaaaactaaatgcgtgtataccatattttgaggggtggtttattcgttcttccataaatgagtaaacgtcaacaagtgagtatttgaatcctttgagctttgactgtaaatcttttagagctatagagagttgtttgttgtgtaattttaaaaagggtgtgaatttttcaaaacaggcaccactcttattaagcactctggcgaatggtgcacacccgatgggacccaaacttaaaaacccaacttttcttcctccaatgttgtaaatttcctgatcgattcacataatttcgaatataattaatgaaaaaaaatatatatagaaaaacacaattaattttgaaagatattgtatttattttatacctgaataacttcagttatgttgcctatgaccattcccacatactgttgggttgtgtgagaatttagaacggcggggttagtatcgaaagggtatgagtaatcattgctcccaacactgaagatgtaaactgcttttgaaaacagagttttggcatctgtgtaacccatttgttgtttcagctgattgctaatcttctttaaataaccaagttgagttttgaggtttatcacctgaaacacaccctctatagtattatcatattcttctcccttacattatgcatatataattattatatgtataattgtagagaatgca

SEQ ID NO: 1049 - DNA, 2652 bp, Cannabis sativa
ttataaatttaggtttatgctgctcgagaaacacaaaattggaatgttaatggaaaggatttatctgctttgataattggtccaccatctgaatacattccttcgctggtaataacaataaactctgtaatttgttattgggctttccctttaatcctgagaattttaagaagagagaaaataaatttggaactagtatgggaacatgatagcaacgtctgaaaaagcaatgtgttagtaattggtgtaataatacaatatggtttggtggcctctgcaggaggatgtggtgaataagctagtgcttcaaatatgcgaggatccccatcgagagattgttattttaacacttggatcgggtattaatatatgaaatgggattctcattcaatgtatatcttagttaacaaaaggaaatattcattaacttgtttattttaacaggtgatactaccaccgtgggaccaaaactgctcaagaaactgcaaaagagactacaagaagactcttaacattaggggcttgtgatattttcagtttgaaaattaccattacattaccaaactggaagtttcccatgcctgtggctggcaagtggcaaactccttttgtgatcaagttactcccatttcgtggattgaaacaatagctatgaaattagggaagaagaataaagtaaagaaagtggctaaggaaatagttggaggaatgaaaaacttcaccttggctgaactagctagtatccggtacttcatcattaaattacactgatccatgcttggcaacatcatgtattatttgtttctcatacataaaaaatttgatgatatatgctgcatagatagtatagtatcgtgacgatctttttcttggtcaaacaaataaagagacatagcaaatcctttcattctttttttcctcaaaagataaatacagcaaccaagatagccttgattgtttccaatatatgagccacaaacatcgatcttgaaactacaactaaaaaacaaattagaaacaaaatcatagaattaaggcaaactcttatcacctgactgtacacagctaactataaaaccacaaagcttaataagaatacattaaattcctccattctgaaactaaaaaaaggaaaacaaaattgtacacacacacaaagaaaaatcttgcaactttttctttttttaactactaaactccacaagtgttgaattactattaactaacccccaaaaaaggagaaaaagccacgcttcttgggctcttcttcaaccatgacagccttcatactatcttgctcaaccagtctccaagctgcttgctcgaaagccaagccagccaatgtgggtggcttattcaaaaccaaagggtaccctctattggtgctcctgattacttctgaatcctccggaatcactcccagtaaagccaagcccaacatttcttgtacatccaacactgacatcatatcctcacctttgatcatatcagtccgaacccgattcaccatcatcttgatatcccttattccatcacactctaacagccccgtcaccctatcagcatccctcaagctcgtaatatccggcgttgtcactagaatcgcctcgttcgccggtgtaatggccgtaataaagccagcgtcgatgcctgccgggcaatcgatgataatgaaatctgggcaaccttcttggcgtgatttcaatgcgtcaacaagccaaaccaaagctttcccactaaaccccattggcaatttcgacctcggcttcgaaatgcaaagcaactcgaagttggaccaccgcttgtccctcaccagagcctggtccaacctacaatcgccattgagaacctcaacgacggtgtaattgacgcgattctcgagtccgaggaggagatcgaggttgcggaggccaacatcggcgtctatggcaactacggagaagccaagtcgggcgagggagagacccacattggcggtggtggtggtcttgccaacgccgccttttccagaggtgatgacgacgactcggggtgtgtcgccggccaactggggcttcctattccattgaagaacggagcgtatggaggagggtttagggttgggattggattttgggaatgtgggttttagggttttgggatggttgaaaagggtgggtgggtgagtggtggcggggatggagtagtaatggttggaatgaatggatcgaagtgagagcattgctataggtatgagtaaaggaagagcatgtgagtgtgaatgaggattgagtaaagagaggttttaggattaggagctgagcagcctcgtcattgcatcatcctcctctcctgctcctcctaatagcctaatcacactgctgtgtttgaaactaaaataatataagaaacctatttttttttttttaataattagtaattttgctttgagctttttacacaattaaattgtagttattaagatatactacttgttaataacattttccaaatataacttttaggttaatttgatctttctatcttactattgattttttttttttttttaatttttgtgaaatgagtgatacaaagggtaataactaataattgacaaatgaatgcaaattaaggagtgctactgactgtcaccagccaagctgataaaaa

SEQ ID NO: 1050 - DNA, 1933 bp, Cannabis sativa
tttcaaagaacattaattttggaggattaattatcattacagatggacaaggcttctgtgttgggaaatgccatcagttatgtaaaacagcttgaagaacgagtaaagacactggaagaagaacatgaaatgaaaaccaagaaccatgaatcagtcattatgataaagaaatctctggtagtatctacagcagtcgaagaagattcttcgtctcatcatgatgatcaagattattatagctgtggtaacttattttttccactacctgaaattgaggcgagagttttgaacaaggaggttttgataagaatctactgcgaaaagcaatatggagggtgcaatttggctaacttacttgccaaaatagaaaatcttcacctcacaattcttaatgctactgagttgcctcttgggacttctacaattgatataactattgttgctcaggtaattaattatttaactcgaaatctactttgttacttaacttatcccaaaaatcttaatcattaatattattagtccttatactactatatacatacacatataaacataattaattaattttgagaaatattaacaagtacatataagtacaggggctgttacaaaattaggaattcaggcttaatttccaaaattaaagttttgaacaaacaaaagaacaaatgagtaaataattcagaaattaatgtgatcgagatacatattaattcataaataaacaatagcaaaatatttgcttatgtattctagattaataacataacttttattaggtgataattttggcaacaattatatattttacatatcttaattggaaatagggatgtagttacatatgatttaataaattagtaatatgtacaaacataactatatatatagtaataatagtatatatagtgtgtgatcagcatgatatatttatatacgtacatgaaatttgaaaaaaataatatattgtgatgtgaatacatttagtccaaaccaataaccgtatatgcatgtatggtcggtgcctataatgcatggtcttctcttctctttatgaagaaaaataacactgatttgatttgaataattagctttaattagtccaatttttattcaaagtccaactaatccaacacaaagttaaattcttcatgtaattatttgcagatggacgatgagttctgcttgaatcacaaccagctcaaagaaaaattaagacaggctttgctcgtgtagtatatatatatttacaaacttaattaataataccctaccctagtagtacccatatgcagtacatatatattaattattttttatccatttattaattaatttgcttaattacctagatttagtataagaaaaatgccaaaaagactctctatcctaatctcttttgcattccctttaaatggatgacatttataatctttttagtaatctctaatttacaactccaccactataactttttttttcctaatattaaatagcttaacattttgttttcacaataacttgttgattgcacataagaaaagttaaatattttaaaattttgaaagcttaattattagtttggagttatgttaaccccaaaaataaacaagactagtttttaaaattaatcaataattagtctcaagaagtgagagaaactagctttaagagtcagccaagtaatgaccaagtcaacatgtacaggtattccgagatcattcgactaatcctaacttgggagtcacctagccatgtaccgatcttgcacatcccttagccatccaatatgaaagtcacttggccatggagatacaagtcttctcgccatgtcttaagctcaccgacctcatgcccacaagtgaagcattgagtaagttggaagaacttggtggttggcaagaaggagagtgggtgagagagagagaga

SEQ ID NO: 1051 - DNA, 1181 bp, Cannabis sativa
aggtagaattcatgtttgtagcctctggaatgctcatgttattgatcaattcgaaaaaagatcattgatttctgataccctttggcgtttttgacaaccccttttgttgaatttttaaggtacattgtgttaatctttcttttttgtctttttttaatgattgagttagaagctttatgatgtgaaattctttgatattatatcaggctggtttatacattttgaagaatacccttttgagttttgaacctttctttcccttctaaaaaccaaaaacgagttttcttaaccagtttttttgaagggaaagaaagtgtagtttttgaaggccaatcgtttttttcattgaggttctaatcacatatatatcaatatatatcaacaacacaaaatgggctcccttgagggtgttatttcaaggcaagttttgcctgcttgtgggagtctttgcttcttttgcccggctatgcgggcaaggtctagacagcctgtaaagaggtacaagaagctcatttcagatatttttcctcgaaaccaggtttgtgtttttgggtattcagttgttttctgtttagttttgtgtcaacacaataatgtttggtaataactttgttatattacatgatagagttaagttaatgtcattagtatgtaatctaatattactcttaaaccagtaagtctaaaattgtgagcagcttataagaattacagttgtggttgatcatcattttgtctggttaagttgatatttagtcttcaggcttaatcttttgagatttaactatctggcttgctaatgatgtagattactattctctacattaatatttataatgttgtcattctgttgatttatacagaaacagtaataatatggaagtggtacttgaattagcatagtgcaattgattaatgcttcatgcaaacttagttgataagtcttggaaatatgaattctgaaacaaggtatttacataagtaaaatctataaatggcattaaatagatgaattgttaatcacatgagttcttatattcttttgtgtctatataaattatgttgtatgaagattaatatttacttcattacaggaagaaggaccaaatgataggaagattggaaagttgtgcgaatatgctgcgaaaaatcctttgcgcatccctaaggtatgatggtat

SEQ ID NO: 1052 - DNA, 2373 bp, Cannabis sativa
ttttttttatcacgtgcatatatgtatgaatattcgatgcaaattgagatctcgattcattcatatatatatatatgtagcattgataatttcatagttttagaatttattacacttaatttatcttataaatgttaatattgccacaaaataataattatatatatgagccacatatatgtgtagaaatactacacatatatatgagggtaggctatagagggccctcgttgatcgacaaaggtacgggcgtacttaaacaaataatgaaagtaagtgatggatatggatctatatatgatatatatatcaaccagagattaataaaataattatagatccaatgtatataatatatattatatatatataaataaaagaaagatcgagaagagagagcccactgattcattgctatatatatataggactagtacagggtcatgatcacattattatgtactagtgtagtgtgtgtatagtactactaatctcttactgcctagatctttagtcgtcggttgagatgattcatagacaatgcagaagattaagtgggtcactgctatctgctacttctagctcactgtgtgcagacatttatatatagccaaggtggttggagtactacgatccaactccaccttgtggttttaattaagctcaggtggcatggcccatggggttccagcacaatgacaaaccctccatatatatttgtatatcctatatttataagccaaaccatttttttatacttaatttagacatgtgattgtttctattgtttctatcgtatattgataattgcaaaaaatagtatgatttagtggtcaaggagttttaagtgatagcaaaactcaaattgcagtagtaaaatataatccgtcgactaaaacacaactgaattcaaaaaaataaaaataataacgggtcaggtcagagaaaaaagttactacctattattaacctttgggagtttagatgattggatgctattattttagtcaaatgacattaataaaatttactgatttgttaaaaaaatattatataaacttatgttagtattttcagtactcgcgctaaaaaaataatgtagatacttacgtgtctatatacatgatcagctaaagtttcttgaaagttgggattgtactacgtgtttgcttgtgtacaacctctagtttttgtccctattattcatccacgcaattaattccacgtccttttcataagagaagagaaatgttaaaagcatggccaaacttgtgttaattgccaaaaataatacgatttagtggtcaaggagttttaattgtatctaatatctgttagtagcagacgttatttttgaataaattgtcacttttactatagagtatttgttacacttaggttctttaagtagtatttagtttgaggtaataaaatagaataaaataaaataaaaaaaaaataaattgtatttaatttttttgtttggttgtatattaaagtatttattttaatagaatgatctttttactattttagtagaataactaatttattttaaaatagaaataaagactattccaatgcatcttattatttttttttatgcattttaaaatttattttattctattctcattcttattactatgttttcattctttctaatcaaataggatcttagtgtttaatagttgagaccattttctaaaaaaaaaaatgctaaaaggtaccgattatgtctaacactctcttcggtatcatactgctattagtataattaagtatcaagtctcatataattaaaaaaaaaaaattaaaaatattgctaaccaatcgtaaaacgctacttataagaagtatcaggcattgatactcaataaaaacgctctttttacaatgtttaaaattaaaatgtccacagtaggtccttgattttctagccattgatttctcttttttcgaaatggaaaaaaaagagcaagttaaacccaattatattccattactgttgatagtagatttgctttaccatatatgcaaattggtaaggaagcgacaacaaattgaggagcaaagtatttattctcttactccgagaatgaaaaaagtacagaaagtgcttataattttataaatgagcacttattactctaattctttttttcaatttcataatcacattatgtagtgaatagtgattaacttttaggttgagaagttgtaatccaataaaagaaagaaatcaaggtttataagttggttgggtaatcattaaaagaaagaaaaaaaaaataacaaaattaattaattttagttaaaagtctcaattactagagaaaaatggaattgtggtggtattttttatgaaaaatg

SEQ ID NO: 1053 - DNA, 1608 bp, Cannabis sativa
gagtaactcacctattgtttaatataaacaatatagtattttgaaaactaaccttaatagtattcatataaaataaacaaattaattaagaattattttaaaataatttatataatcttaatttatttttcttacattattaaaagtaaaaagtaaaagttttgtagaatagttactaattttattaatatatatttatatgaaatatcaaatttgaagttttatataattttatgacttactagtcatcactgaataaaaataaaacgctatttacttactagttatttaaactgacaaaattattgtcaccaaattgattttattccaaggttggtataataaatgttcaaataggaaaaaaaaagtcaatttttatttatgttatacttggaaaacaaaggttaaccaattaatatttcaatataattcattaaataaacgattcatgggactattataattttatttttcgatggctctgcatcaaatcatttttagtgtttaaaaataacaaattttctacgactcaaaaagttattagtagcgtaattacgtacctttaataatagttgaatgttaaagctatacgagatatcatctaatttttattttagtatttttatgttctgattaagttgcaaactattattttagttgattatcattaataaaatttacttattatttattaaaaaaaaataccacttatgccaaatttattttgtatttattaaaacctcgagtggaaaaaatctgaagaacaaaaagtgtcttgagatattattaattatgaatgttaaatttattttgtatttaatatttttacggaattttacataaaaacccctattgcaactagccctgcaacttaaattgcaacaaaaaatcgtatataaatccatattacaactagcgctgcaaccactttagaaattcaaaccgtaaatttgaaaagaaaaaaaaaatgttaaaaaatagtatatgggggtaattactctttattaaaaccagaaaaaagtgtcttgaaatattattaattatgaatttatgaatataaatagagcatgcagaacaccaaacatgatcatctatagaaattcaacaatcctaaacagtcacacaagaggtgttattaaggtaacaccttaatatgcctaagcattaatcttttaaaatatattacaccatctcaaatttaacattctattctttaaattaaatttaacagtctatcatgttatcattacataattcttttagctagtacactaacgtttcttccaaaaaaacaaaaaaagattactagcacaacaaagtcgagtttaggatatttaggtgggtactaacaaaatgtaatattctatctaacattgtaactaacatatgcaccaagaacattcaatatcatcgttgttcaaatcttcaaaacatcaaagtcgtcaacaaatattagaccaaagatataaatattaagtaaataaagtactgactttaagaagcacaatcaccaacaataaccataataatatcaatcttgagttcatcatatatattgagtgctgctagaattgatttagatctcttcagtttcatatgagtatataa

SEQ ID NO: 1054 - DNA, 7531 bp, Cannabis sativa
ctccaggcctaatttgaagagtagcatccccgactatgcccccacaagccaagcgctagcatagggccctctgtctcctctctagacctcgggctattcgggacagaggcacatcgtcatctattgcgggaacttgtccttaatcaggacagacttcctcagcagctggggctccatccacaacaactaatgggccctccgcctctacaactccaaaagctggaggatacaagttgtacttctagaagttggctacattggccaacctattatgttcctcatgtccactgggagggaccggatgtgatttcccaatccctcatctacaaagtaaggatggagcgcttgcatgtcggcccttgttgaaagtggctatgctgaatcccttggacatcctaggcgatgaagtagttctgggcgtaaccaccaacttttaacatagctgtgttgttggtgtcacccaaccactgatggccgacctgactaaagtacaagtacccagtccggttttactttggagcagacttcaaatcaaagtattattaaatctcatatggagtaggttgaggccagcctagctctgcatataaaacaaacatcctcgagaggtattttatactttttggggtgatttgtgttgaacaaatctcaaagtaagcaacaatttctcgaaagtattggtgtaatggcaacaccgccccctgctcaatatggtgctctgaccatgccatccaactgagagcaagtcgatgtgtcctctaatcccttgtgggtacctcactctagacaccccgcactagttctttaacaattatccttccaaaagtctcggtggaaataatagatgcaagagagacccacctatctccttgtgatctagcatccaaaacctgaggctctaacgactaaatcaagacatgatccatacctaacaccaaaggttggcctagtctattcaggggtagcccatccgcatcatatccacccaaagggaggttggagaggacaatacaggtcttgtatctcctccttctaactggcctatcctcctcaacctcaaactcaatgtcaggactttcagccccttggtcaacctcaggcacctctgtctggttgacctctagatctccataaacacgtggctacgtggcctcgtctacaactctaactttgcccatcgttgccaccctggcaacatgagagtcatatggaggtgccctatgatacgattagtttttctagcatgactgttagtccagaatcacataaaaggagtaagggggcagactaaatgctctctctcaaaagcaaagatggcgggacctatgacacaacagttgtcacctccccatatcaacactcggaatcacttgcatggaagagacaaggcgaggtgagcaacctaacaaagctacagaaaaagttctagtccattgtacccaagggtacttaccaggtaaatcacattgtacaaggctgggtatcagcgaagtaccgtcttaagtacatctacttagacaaatagggagtactaagttgttcaattaactataatggactcactaccaagtcctatacagcgttcccaaggggaaccatgcataagactacagttgtacatgcctccaaggctgtcacgagaccttagccgaggtcaaaagaggacaaaagacttgccaccctcttggaaccttggccttgaccagccagggttcccaagccttagaagggctggctaggtcccatgacccagcctagggccagccaggaattccatttccaggcataggtcgaccagcttttaaagtatgcccctatggacgaacaaaccccatggtgaacacccatggccagccaagtcttgaacaagacctccttagtcgaccaggatgtgtacaggatccaaacatgtgttttttttcaataactcaaacacgttttcttcgtgttctttgtgactcgtgactcaaagagccaagaatcacaacaaaagtcagaatcatatcttttttgtctagaaatcacacattacatatcataagactaccatatgattaaaataccgaaaggattacaatctaacgtggaaatcaagaaacattcaaagggaagaaaagcttcatgcagtcatggcaaaatcaattaaatcaagtaaatagtaggaatagaaagcttacccactacaagaaatcgttgacgaagagaatgagaagcttggattgtcgaaacggcacaaaaatcttgggagatggagcaatgtgggttcgacctctagagtgaaggaggagcttcttcagaagttactttctagtgagagagtaaatgaaaagtgaagaggagtttccctccataaggcttttatagtttctgtgagactactccttcacttgccacacattgctcaactaaaaagcacgtagaaatataaagtcgtcaacttactgcaacaaatgagatcagatagtcaagagcaggtatttcaaagactaaaaatgcaacaatatttactcaattaaggctacatgagctccaatgtagctagtaagtccctattcacacaactgtctgcacagggacttggggcaaatgttatcctaattttttccacctgacgtggcatgtccacgtgaacaatattagcgccatgtggtagtacaactcaccaacaagaaggtcaagtcatctactcagcatcctagccaacgggaggtcccgatactcaaaggggacgacgagtgacagaccatccacctcaagggggctgggtggccacccttggtcggtcctatggccggctagcttctagatagcacaaggcctgtcagcctgcatcctacaggtgcatggatggccataacttggcatggcaagactttagtgcacatccttacatatggactgcaaactaaactgtgaattgggcctaaacagcccactaaagtagatgaaaatacttatttttaagtagtattttagtcatttataatttaccaatttaatatgtaaatatcttcttattttatttgttaattagggtttaagctctcctatataaagagccttaactcaaccctgaaaccctaagtgagaattaggtcattaagtctgatctaagtcgtagagctctaggtctgataactcattctctctctctctctctctcacgcccactataacttctctccacacttgagatttaccatctttgattcctactttgtaaccttgagagaactatatcagatctcacctatagtgatctgaatagtattatctatcggcatcaatacaactaaaatgggagtaggtcattacctgctgtctcagggggccgaacctatataaaaatatttgtgttcttttactttctaattctaattgtgtaacacgtgccaagcatcaatattaattcgattccgttatcggttggccacatctaaggtaaacataaataatatctagtcttttaataatagataataaataaaataaaaatttatgtagtacaccctctaaaacgatgttctagtagacctccttatctgttttagtattcaaaaaagttttctagcctaattttttttcttcataattgcgtataaattttcaaaaaaaatctagatagtttataatgtcgaaaataaaatttaaataattacttaccatgtgtgcataaaaaaatagtacatataaaatatttaaatcttattatcagcacggtaacctttctaaaataacaataatatacatgataaaaaaattaaactaaaaaattattctaaatgcaaaaataaataaataatctaccaaaacatccattgatacttacccaaaaatattccaatgagcatgtatatagcaaaacgtatattatttaaatattatataaatgaaaaatagaaagctgagctgatgatgtgagtcatcatagacacattattgcaaactgacaaagtcccataattgtgggaagcagaataaacaaattgttgtgtcctttatattttttatgggaacttttgagtgtgaatgtgagaaagggtaagatagtggcaaggtattaaatttgagaaagatcctttgaaaacgataattcctaacattgagggtggtggagcatggttaataagatattgaatgtcaatcacaaactatcgtaccctatttcactttaatttctcaccttggcttcactttaatttctcaccttaacttagcatctaagaaaatgaaagaaacaaataaacatggtaacaacactttgcaagaatatcaaatacataatcacttagacccagcaaacaatctggaaatattttacatgaacactcacgaaaaagtacatgggaacaagcaaaaagccaaatatgcagaaaactcaaacaagattacaatgacagtacaaacctgcaaaccctgtttgcttatttagatactgattttgcatcatgtggaactactaaggcaaaacccatacgactaagagcaaataccagaagttaagaataggaacggttctaatccactaatcaaagtgtgattttactgcagaaccaggcattcttgtgtcccagcaaccatatcagggcgagaattattgaaagaggcatccacttcttcaatagtttcaggatcaggtttggcttccggctcctgagttgcatcttcactcccatggtcaacagaagtaatggcttcaaatatgagggccttgacttcttggaacctttcctctgaaagagagacctcagcaagtagcttccaggcattttcctcagatgcctcttcgtagtccttcttcctcttcagcaccatgtgcccactaatttcccacacagcaggattcacttgagtgtccagaagctcagcactcacttccccaagagcttgtttctccgcataacactgcacatttatatataccaggagtatgagtatttgcaccaattaagcgataaaaacatatattgaatattaatggacgaagtcatgaaatatttcaaggattttgaactaattacctgtggcaagacaaagatccggtttccacaatcagcaataaggacgttgtatggtatgttattgtcttgaaggcaaatgcaggcatcagagactgcgttggacaaatgctccacagtatttcccccctcaaagacaagccccctaacaggatagttcactatctcagagattttcacaccaccatccagactggttgttttcttggtgggagccttctcgatgggaaagggtacagccaaatagtaagcctgttcagtaatcaaaaccgcatttaagtaacttataatttgtaaaaatacaaaaactgaggatcaatgtcagatataaaattcaagaatctatgagcaaggcataaagtttgaaacctggaagtgaaggtgattgattgtggcaaaagcacctaagctgttgtaacccagccggaagtaaggactcccagcttcagcagccatgtgaattgcaagcaacaagctttctcggtcaatcctttgtgggaaacaatcaagaatgcgaggaatcaacagcacatgcccatattcaataggactgacctgttaggatatacataacaaccaataacttttcaaaatccacgttcacaagacttcttataactaataatccaccaagaaaaaaaaaaacatacattgatggcaacaacacttggagaattctcagcataaatgggtgcatttggtatgaactggacgtcaccatcttcacttgcttcaaactggaagagcacctcctcttgtccaactttagtgaaattgaacttgctctcatcaaagggctgaaggaccttatcaacccggaactcagttggcctcttcttcagatggcggccctcattcagttgggcaatgaaaccatactgaccgggaatcacctaaacaaaagaaatcagattcaattcattaagttcaatatggaccttatgcagctcggatattgagatcattgtaacaaaactgaggagaaaaggatgaggaatctagaacagaccttggtttcacaggcagtgacatcgtatcgaaacagacccctctgcacgcgttcctcccactgcaaggaaccacacaaaccatattaacaaacaacaatcaactacatccaaacaacaatcaacagtttgaaaattcgatcttcatcaacttttggcttgtttacctgcccgagaacaagtgactcaagaaagtcaatggaagcctcttcttccacctgctccggtgagccctcacaagaaaccttgtctagcttcttgtacgcatataatggaagttttgaccctattaagcatacaacacagctataattcaatccttgaccaagtagcaggcacaaagatttgattttaattttattttaagaaaaaaaatacaaacttttttcataaaagagtatgagcaatacctggaaggcaacagcttctgaggcagtttcggccacaacctcctttttgggcctcttcgttctcatccttttgataattcgaaacaacagtaggaaccctcttgatccttagcatcattttggcttcttttttctttttggtttatatatatcagtagattatacacaacccaacacccaactcaattcaactttaacccaaaccccagcaaaaaaaacagacttcgcttaatgaaatcaatggagattttacttgctctaaataagatttttttttttaatcttactagtctaaaatctaaagagatgaaaagaaaaacacaatctaatctaaaatactaagtaggtagagaaagatgaagaaccaccacccgcaaggaagagaaggtcagaaggactaccgccttcggacggcaaagcgccacgcccaccgtgcggcgaagggttgctctcaactatacaacccctgcgtcgtacagagcggacatgaatgagaggccgagaaactctgtgtatagccgtgatgtctacaacgtgtctatcctgggtcttacccctctcaaagatttcaaatctatcttctcttttttcttccaacgaatcccaaaaaaaaaaccctctttctcaacccaacaagtaaaatgttttttttttctctctaaacaaaatacaagaaacccaggtgacagcaattcccaaaaatgctttcttttcacacgtcgtccaagagattcaggtcgaattcaatggtacccagatgggaatctaaggagattgtggaaaaaggaggcaaatttggcaaattggtaaaatgtttgagaaattggttggtgtcgtggagaaagtggaggtagagaaggctaccttatatagatagagataagatgtttgtgaacgtattgttgtggttgtagttcagcctcgggtctctagtacagttttcgtggccttagtttgagaagaagacaattattgaacaaaccaaaaaaagattattttttttttcttaaaataatattttcttaagattaagaccgaggatgcgagttgctcgacccaaaaagctttttaccgtatggttttttttttttttttt

SEQ ID NO: 1055 - DNA, 2839 bp, Cannabis sativa
caccagcaacaactcaaagtatgtgtattaatatagaccacaagggatgaagaagcactgacactaagaccaaaaacaatccattacttttcaatgtgttaaactactagagttagagttttctcccatctcaatgatacaaattattaaacaacaatgggccaaacaaattctagtctgaaaatttttactcaatagttatcaattatggcattcagaaatgaggtgaaaagcaaaagaggcacaagaaattttccagtcattgacaagccaatctatacattgatgatcaagtaaagtcacttcacaaatgaataaagtagaatgaataatcaaactgtgagataatttccataatgagagtgcatacttcatttcaataaccaactatcaaattgggcacattctacaaagcctcctgggaagcaaaaataagttctttggttccaaattatgacatggtttgccataattatgctgacacagttaccaattagcatcaactgatttaccactaaaggcatattaattatagcaactctatccaatccatgctatctaaaatagatgagtaaaacaaattctcttctcataaacacgacaaaatatttaaatcaaagaaaaaaccataccttagaagctttgaaatatgttgtagaagtggaagaacccaacataatgctatgatgagtgatgaaacaagaacaacccattaaagaaacagaaaagcattctctgttttgcaattataagatatgggttttgcagataatcactaaaaaatgaagggtttttgaatttggatatgtttttccttccccccaatgttcttgggggactttaatcaaatattgtttaagctataacaacaacaacaaaaaaaatagtaaaacaattagaacaagtaacaaaaggtgaggagtataactgaacacgtttaagctctgtttgttaagaactttgagagagagagagagagagagagagagagagagattgtctgaaagtgaagagtggaattgtggaggaaaatggaaaagagacatcggaagaaggaaatgactggttttcatttttttgaaagcttaagacgttatgtctacgtggcaaggatattatccaaaaatttaatttaatttaaattaaattaatttttttgtggcataaattaataaatattttggtacatttgacttgaggagaagaatttttatgaaaaaataaattagatattaaaagcatattcttttcctatattaaaattaaaaagaaagcacttaagttaaattaaaacttaaatatggcgaaaaataaaactggaatcagaagattgtttggtaccagtccaagctattcgaaattcattatctatatgttcttcgtttaaaattattatagaaaattatcgtaaacttcttgtatctttaaacaatatttttttattttttattaaacgatctgctaatatgattgtttatagagttatagttttgctagaatatcttattcttttctagattgagccttcgagaatcatatttatgttatggtacagtcttatcttttgattgatttggtaaattatgattgatttggtaaattaataaaaaatttatatttgcttaaaaaaaagttaaaaatatatatgcttcaaattgatggaaattttggaattttattttggaaaatgacttggaattcacatcaccaaatattaaaaatgattgagtttcaaaattcctaatttcctcaaaatttatgaataattttatgaaaatgaataaaaaatagtacttgcataagaaattcatcaatctctctcattgaaagtccaaaaaataaaaattaatataaacaaaaaaaaaggtttgtgtcttgtgacaaaccaaccatttatatagcatttttttaacaacacaaaaattggaaaacaattaaataatagttatatggaaataatatgacagcaacctattcttattttctaacttgtattttcctatatgtatgaaatttctataaagaattccatgttaaaatctaatgtagtctaaaattgacaattgagaaatgttcaccattttattctttggcttaacatccattaaaatgaaagaaaattttctctaccacaaatctttgacaatttgaaacacatttttcttctgttgacttggacatgtgtggacaagattcattttaatctcacacacacagatatatatacatatttcaactttaaaacccctatatataattatatatataagtaaatagaacataaaatacagtaaaatttattccatgattaatctttattatgaacaagagcaaacttaaacttcaaatgacatataaagaactcagagagaagaatctgagtttgcaggaacaaaacttagagaaacactattcacgcaatggcgttcattcgttggagttgggaaaccttctcctttaaaaacatgaccgagatgaccaccacaagctgcacaagtaatttcgatcctcattccatctgcatccgtctgataacatgaaaaactatattagaaacgctatgttatataggtcgaaaggaaagaagagcgattggaaaacttacagttcggtttatggctccaggaagaccctcatagaaagctggccagccacagccggaattgaacttggttttggatttgtaaagtggagtaccgcagcctgcacatttatagactccctcctcgtagaacttgtcatattcacctgttccggggtatctagaatatgatgatttagaacaaacactcattagtttacacttcaaaggactacataagtgtcatttgattgcaaa

SEQ ID NO: 1056 - DNA, 2797 bp, Cannabis sativa
tctgatgaatgagtgttaattatatgaaattaattatgcaggaagcagtggtaatacctccttatgtttcttttgccataagaccaaatcctggtttctgggaatttgttaaagtcagttctgaggatctctctgttgaggccattactaccacagactacttaaagttcaaagagatgttatatgatgacaaatggtattaatatataaatataatatattctcttctcttaatttcatttaactaagttaaatattttgaccaataatttattaaacagggccaatgatgaaaatgcacttgaagttgattttggagctgttaacttctctgttcctaacttaacacttccttcctcaattggaaatggacttgcttttgtttccaaattcattacttcaaaactaagtggcaaattggaatatgcacagcctcttgtggattacttactctcactacaacatcaaggagaggtactgtaaaatctttatacattaataatgttggaataataaaaatattacattagaccatcttcaaagttaaatttaacctgaaatatattataaaactatatttaccctcattaaaaattaattttatttatattattttaatattttataaatataaaaaacttttttaattaatgaaaagtagcaaagatgtaataaaaaaaaatagtatatattgtaagttaaaatttgaccctttttatgtcaaatttgatataatttttagcttatcttaaatttaacacatattttatatcattattagagttaaaaaataaaaatacaccacatttatagttcttcgttagaaatgctcttagctaataaaatatattttttcaaagtactaattgacaaaatacacttagtgcatgcacttacatgctaaaagttgatgaattcaatcttagcaaaaatcacattgaataattttctactaaaatacaagaatactacattagaaacattactaagaaagatttagagatcattaagttcaaggaaacttaaattttaaggtaaaagtttcgtagctgagtattgagattatttacatttatgaagaactattatctaagttcccgagttggatcagatgaaaatataatttaaccaagattattatcgaagttatagtaatatagtgtatatgaaaatgacaagaatttgatttttaatgccaataagctcttttcttttcctcttcttatttggttaagttctaattatatgaaattgtatgttctgaaattgcagacttttatgctaaatgaaactctaaacactcctgcaaaacttcaaacggcattgattatagccgatgttttcctctcagcactaccaaaaaccaaaccataccaagattttgaagcaaggtgatgcatcactttaaattctctccttttggagacaaatatatatgtgtgttaaatgacatatgaaaggcttttcttacaggctgaaagagtggggctttgagaagggttggggggacactgcagagagagtaaaagagacaatgagaacactctcagaggtactacaagcaccggatccgttgaacatggagaaattctttggaaaacttccaacaatcttcaatgttgtcattttttctcctcatggttactttggccaagctgatgttcttggattgccagacaccggcggacaggtaaaatattacttcgtattgtattgtatagtattatattatgttatacgatacaactcaatgttatgttactaaagtttttttatgattgttgtgtgtgaaaataggtagtgtacattctagatcaagttagagcacttgaggaagaacttgttctaagaatcaagcaacaaggacttagtatcaagccacaaattcttgtggtgacaaggctcatacctgatgcaaagggaactaagtgcaaccaagagtgggaagaaatcataggcacaaaatactcccacatccttagggtgccatttaggactgaaaagggtgtgcttaaccaatgggtttctcgtttcgaagtgtatccatatcttgaaagatatgctcaagatgcaatagccaagatccttgaacatttcgaggcgaaaccagatcttgtcattggaaactatactgatgggaatttggtttcatccattgtggctaacaaacttggtgtaattcaggtgtgttgtgtattcagctatttttgtattctagtttaacttatcaactaatgttcttatctaaataaattatgaatggtcagggaactattgcacatgctttagagaagaccaaatatgaagattcagacctcaaatggaaggaattagatcccaaataccatttctcttgccaatttcttgctgatacaatttcaatgaatgcagctgatttcatcatagcaagcacatttcaggaaattgcaggaaggttagaaaaaaacttcatgtactaaaatactttacattggaagaaagatgatgattatacttaaaaagtagtattgttttgatctttttgcagcaaggataggcctggacaatatgaaagccacactgcttttacacttccagggctctgcagggttgtttcggggatcaatgtattcgattcgaaattcaacattgctgcaccaggagcagatcaagctgtctatttcccatatacagagaaacaaataagattcacctcatttcaaccagctattgaggagctacttttcactaaagaggacaacaatgaacatatgtaagataaaagatacataactctctctttctcaacctttgtttt

SEQ ID NO: 1057 - DNA, 2883 bp, Cannabis sativa
acatcaagcttgttcccaacagctatgcagcttaaatccatcttcttgttggctgaactatgacttcccatgtaactatggaaatgcttgacaaaatggtcaactacttctatataattatcaactattcctctttttgaaaaccaggatctttcgggtgggcttgagcaacagctcttgtttcttgataatgccctttttctttgtgaaaattagcatccacatcaccaattgaatccttgttaaacctcttgagggtgtgttttagtctcataagcttcaaacaaatagctttgagaccagcacttctcaccggtaaagtccaattatccataacagtttctttaaacctagcatgataagaccagaaattaaagaaacgaatttttttaacaccaatgttctgaggttgagtagacgagactacacaagagcaatgatccgaagtagtttcccattgaaaagtagccgaagaattgggggaagcatctaaccaatcttcatttttgaacacatgatcgattctagaacaaattatttcttgaccatcctgattattagtccaagtaaaatgagatcctgaattagacaaccagtcaactaaacccaaagcaagccagttattagaatcctcgatctccttctttgaaacttgtttgactccacttctatctgaatagtgaaaaactgagttaaaatcccccaagataagccacggcttcacatgaagcttaaggttacaaaggcctttcaaaagatcttttctttcctcaagagaattagagccatagacaaaagtagtacaaaatccttaagagatcccagccatttttataaaatattgaataaactgatcagattcagccaccattattacacgcacaaaaacttccctccacataatcaaaattcggccctcagaggctgaactagcaaaataatcccatccctgtaatcgagtcttaatcatgtcttcaactttatgatttttcattttagtttccactaaatccataacaccaatattctttattctgcaagtatccactacaacatcctgcttggtactattattcaactcccttacattccaacacattattttacaattatccatagtcaatgagataaagaagtagctcccttaaaatcctctctaggctgctcttgtaaagcctcataagcattctttaatttgtcttgttgactagtttcagcttcctgcatagtatccttcatgtcattcctcatgtttaagcgtcttgcaactgtcttcttcggggtttgccaagtagagcttttattagcttcattcccactgttactgttagcaatcttactatttgtcactttattttcagaaatagtagtaataagtgcatgtttttctaaactaacttcagttttcgcctcaatagctttctcctctttcttctctatcgtatttttagcctttttaacccattcaaccttttcctcattcctgcaatctgccattccatgtccataaccaccacaattcttgcattttataggcagccattcgtattccacattttgatcaataagtctgtcatgttcattaagaaattgcatagtacggggaggcaaatcagtaatatccatctcaaccaacactcgagcaaatttcaccatagttctttctttcgtaattgtatcaacaattatcagttttccaatagtgctaactatggcactaagacacttggttccccagtattgcaaacctaaattaggtaaacagatccagagaggaaccgacttgaccatcttcaaggcatcaatatcagtcgtccatggccttactatgaatggcttccaatcaaactgtaggacaccctcttcaagcactacatccattgtagcttcatcattaaatttaataatagtaaaaccagcattcattctaacaatatgagctatccccaattttccccaataatgaatccctcaaagacagtaaatggaggattagctccaagtaccatacatatcactactgagttccaaaatgccgattgagtttgtaccttgttcaaaccaaccctagctatcttccttccatcttgaatcataggttccaagtacaaaagtttagcatcttgataagaaatcttaccatttgtgaactgcctccaatgttgctaagagttaacttgaaaatcatcttcagccccctcagcccacgatttcttcccactttcacactgctctgcaatttcgtcaaattttcccccaatctcagaacgaaaaagctcatcaacctggggatcttcctcatgttctaagcagtctgtgaactgcttactcgatttctcaccatccgcaccatcttggattgaagggggatccgaatcgatgaatcgaaaaggcttttgaatagctcgcttcttcttcgccatggaagagagagaaagctacagtcgcacgcctaagattccaactctaattttttaaaataaatattgtattttttattgtaaattatttcgagttctcaaaattttaaataatatcttaaataattataatgtacaaaattataaaaaattagactgaatttgttttctaaatatcataataataaaaggtgcataccctttttgggagtaccataaaagtttcctaagattatatatatatatatattaattttttgtcttaatgtttaaatgtattttatttttatttacaagtgagtcactcttcaagagaaagattgcaagttaaacactcttcgggaggaagattgcatgtgagacactcttcgagatgaagtgtgcaagtgctacgaattgaagggagttcaaggtctcgacacttctgaaatctaattgcaagaatagactacaacagttgcgg

SEQ ID NO: 1058 - DNA, 4074 bp, Cannabis sativa
acaagagttttgattacatatgtttattgttagtctgtttggtactacagttatctctttctctctcttcattttcatataattaacactagacattcagattgaatattgctgctttttgatccaagggaaaacagggcattctactattttttttttttgttttcttttctagaaatggttgatctagaggatccttttttcttacctatactaaagctcatatctttgtacaaaatatatgagaaaaatgtttacattgaaggagtttataattttacttaatgccgtatttaaattttgagttagggctgttagccaatacttatttaagctaggtttaaaatgttatacagtcacagttacttcgacatttttgaagggtgacaattaccttgtgtttgacgtgttcatctacagcttcccatggcagctgttgcatctgcccctcccccttctctggagattttaggtaattgccaattgtagctttgtctttagtcttaaatgtgtgtgtcaattcattttcttatttgtcttttatttgtttaagttcgaggaccggaagggttctcaatctggaacggtcccccattcaccaatggtcagccgggtgtcaagcttgaaacaacttcttgcaacagttcaaagttcagtgaagatggttccaggcttatggtggtgaaatctgattctgtgattaccatttatgattgcatcagctacaaagagatcaggagctttcaagtgccgaattctcttgcagccaccttgtctccacgcggcacttatcttcaaactttccaaaagtcctcaactccccagcaaaagaatgtaactgtatggaacatagagacgggtgacccagtttatcatcaattccaaaagaacatgaccaaaaccacttggtacttggtatcttatggggcctttttatattttgttgactacacatgaataatttgaaatttatgtaaaattatgacgttatgcttatgtttgcaattttctgctcatcaggccctccattagattctgttccaatgaagctgttgcttatcggcatgcgaccaatgagattcaatttttcgatgctggggatttttctaaagggattgtccgccggataagagttcctggggtagcagcagctgagctttcttgggcacctccgtcctatgttgccgcatttgttcctgaagccaaggtgtcttcctcatctcacgaacttgaagattggttaattattattattattttaaaatcttgctacgtgggcttacatgctagtttcaaaatggaagtttttagatcaatttttcttctcgttttaacaaagaatttttggttacaactatttcttcatgtaccttggtttctgtttgttactgttacctgctgatagtttgctgagcaatgtggcagcaaactcagaagtaagacttataaatttaaatctgggtgctaaaaatttagtaatagagctggtcaaaattatttttaaatagttataacttgtcacaaaatcagttgacgtttaattttggcaagtaaatactttgaagtataaagttaaaacagtaagtttgtattttgtagaaggatttcttacttaacaagtattacatatatgatagaatttgttcgctattgatatcttcatttaatttgaaaagaaaaagagacacaaatataacttattagttcaatcttatattcagggagttcctgctagtgtccagatattttctcgtgaagaggatgcacagagtcaacccgttgctcgaaagagtttttttcgatcttcatctgtacagttgagttggaatcagggctcaactgggcttttaattgtagttcagtcagatgttgataagaccaaccaaagttactatggggaatcaaagctcaactacctgacaacggatgggagctatgaagggcttgtacctcttcgtatgttcctagtgttttctaaaccaaaaatatgttctttatatctgccatcaactaactcctcataacacttttgcaggtaaagaggggcctgttcatgatgtacaatggtcacactctggttcagagtttgcagtggtttatggatgtatcctttttctcttttcttctaggtgtttgaacagatttccatggatgttcaaattctgcatttggaatccatccattctcatctcaaatattattacatacttttgcataagtttatgagttttcttataaattatattgaactttatttttttcatatagtgttgaaaaacatttttttggattggaaatagaaatatttcacacccatgcttttggcagttctgtatatgataactgtttgattatttctgagggaggctttcactgccgccaatctatgcatgttaaccttttatgatgtctgcgtataagtgtcataacatatatttggtataatactatgataccattgtttatgcacgcttcttgcagttttgtaggtgcatctaatgggataattttgttgcattaaactattaccattgaatactctttcctgcaaatttagtgttgatatgtgatattccttgattatcttagtcatgcctgccaaggcaactgtatttgacaagaagtgcaatcctctacttgagcttggaacaggcccatacaacacaatccgatggaaccccaaaggaaaatgtatcctttagcaaatagtttgatttactttttcagatcctctattctacattgcttgggttttaaaacagtagttatcattatttcttgtgtccttgtacaattacagaattaatgaatttgtgaacttaactctcaatagtcctctgtttggcaggatttggcaatttacccggtgatatggtatgtcacaactagatggttatgccttttttttttaataatttatttgtttacttatattttcactgctctaaagagaagaaacaaaacattgattgtttactgcaagagagaagttgaggccctagacctttatgaatttattacacatttttgtattcattcttgttgaggattttttttttcaatctgtgttgttttccacctttgggaatacataaacatagtttcattctcttttgacctttatgaatttattacacatttttgtgttcattcttgctgaggatatttctttcaatgtgtgttgttttccacctttgggaaaacataaacatagtttcattctgattcccatgtttaagttcattgtgtatgcttgaccctgtaggtattttgggattacaaagagaagaagcagataggagcatgcaaggctgaatgttccgtgacaagtgaatggtctccagatggatgttacttcatgacagccacaacagctccaagactgcaaattgacaattggtatgctaacttggtcctcatattgtgggctcggtgggattggtaaaagaggctgaggtcacagaaagtgcatttcatctaacaaataatccgcctatatgccgacttaattgagtttttttgtttctcctttgctcccaaattggcctagtaaattttaatcagtaaattactaaatttagaaaagttttttctaaccatagatgcaagactatcttttataaggcacaactttgtcttttttttctttgataaccgccacaaattttgtttctattggactattagtgttcttaatgtcttcaagtgtacctatcggttagcatttagtactcaggtaactttggtcaaagatgaataatctcgaactacagtgtaattcctaacagtttctctaatgttacatgttcatggtcagggttcttttcactacacagtttttttctctaatgttgcatatgttgcagtttgaacatgtaatttctcgcataattgcatatgtgatggttggccttctctaatgtcttctcctttataattattttgcagcaattgattttgttatctcttgttttcattacagcgttaaagttttccactacaacggaacccttttctttaagaagatgtttgacaagttataccaggtcaagtcttgtcaggatccatcttgaa

SEQ ID NO: 1059 - DNA, 3253 bp, Cannabis sativa
  modified_base (2587)..(2591): a, c, t, g, unknown or other
ttattattattctttcttgaaaataataacaagaaataattgtgatgatccaagtttacaaatgcagctataaaccctagcttgatcatcatcatcatgaatatcttcttattaataatattaatccttttttttgttgtcgtttcttcctcatcaacgacaacaaaaccattaaagaatatcaccaagaacactctttcatcttcttcttcttctttatcttcttcaccatcgacaacaaaacacggcgaagtagtgatcaaaccccgagcaccccccaccgtagcaggggatgataattaccgtcgagtgttctacatcaagaacacgacgccatttaataacaacaagatgatgatgagtagtactccttcaacgacaacgatgatcaataatagaaagacgaaaaagaagaagaataagaagaaaacgacaatgatgatgaagagaaaaaagaagaataataaagatttggaaacgacaagtcgttcattctctgttatgttgccaaagggtttcgtccctccctctggttcgtccccttgtcataatgaaaaccctaactcggttgtttttttctgtgaactcgttacatcttccaaaccctaatactaatattaatcataaatattaatgataatttttttgttttttggtttttttttttacataatatctcatctattgtaatacatagctacttgtagtttttagttatattattgtaataataaatatatagttattacacatatataatagtaggtatatataccaaaagcattagttaaagaaataaaattgaatttgattatatggtgatcttttttttttttttttcttttttctttttgtgtatatatgaaattatatatatataaagctcttatattatttaatttattaattagtttcaatccatgttgcatttactttttcaacaaattattcagtttcacataaatgacatatataacacttttaaaattatttctcttcaacaattgatatagggcttttttataataataaaaatatttaagtgtaattaataatgagaattaagaaaagttaattaatatgagtaccaaaaataaaagaaaaagaaagagaaagagagtaccgacaccaattcctttatattaattgtaaaatacttcatcactgcatatataataattgttattactgtttcttttattaataaccaaattattgcacaagtcacatatatctgtgtgtgaatattaattaattactgcatttattttcgaattttcagcttggcagatgaattctttcccatatattaattttgataaaataataattaagaaaaattaaaaaaaaaaatggcgtctgtatatatatgagatcaattaattaataattaattaagaaactatatatactagttctgttgttatgcaaataataatgcatgtgcgatgaccctatataatatataaataattggccgtaaaattttaatttttatatactcaattttattattatttttttttgaccaatttgaagttccagttaaatatctccactaattactaattgaaaattactgtacacactcatgtatatgtatataagtgaaagtaaaacttggatactaatatagttataatcctatcccattagtatttaataataatattatcagtcaccttaaattaataaaaaatataaatatatacaaaaaattttgccaaaaaaaataaataataaaattttgccgcaaataactctctatatataaataaataaatatacatattgtatgtgtctcaaaattattcgactttttatcaaggtataatggtttatatatataataataaatatagctagaggcatataaaaattgggtcagaaatagtaagatgtatgtttgttgggtttgacatgtttgtataaatatatatatatgaaattttaaaataataaagtatgtgttttgaaagcaaaaaagtcaaagatatatatatgtttgtgaaaattgaaataataatatgtaagcatgaaaagattaaagaaagccatgtgagtgtgcatcgtttgagaggtttcatttcgtagcgtatactccatgcatgcaaacaatctaaacctctctttctctttccctcatatatataaatataattatatatatattcctatattcttgccctaaaaaaagtactccctttgacaattgccaaattaattttttaattaactaaatgattttgttcatatacatctatactatggttagggtcggttctaaaatttagtagaccataagtaaaaaaattatttttgagttcttatttagaaaaaaaaaatgatattttttaaaattaataaaaaaatatgtgtaattttaaaaggaaaaagtatttttggggccttgggataggtgggctctaagcatgggcctagcctgcctatgcacagacactacaaatttttttacttttagtcacaacaatacttgtgattaaaagtgaaaaatttgtgactgattataaattattattcttacgttgtgactaaaaagtccgtgattaaaagtattagtcacaannnnnacaatttgttgtgactaaaattaaattagtgacaatttgtgtctaaaaaatatatttagtcacaagtaatttttttgttgtgattaaaagtcatattaaattacaaattttttttgttgtgattaaaaagttgtcactaaaagtgacattttttttttgtagtgagggccgacctgagtatggtgtatcaactttaggtgtttcatcttcaatttataaaataattattattaaaacaataaattaccattcttataatatcttttgaataaagttcattagtcggtaagcttgcaaaactatcgagcaataatttttacaaatctaccgactaaatataaccctacataactcgacgagaagttgttttaatcaaaaatgaaaataataaaataaaatagctagtactacaactactctcaaattttgtcaaaggtttacaaaaataataatgataaaattgaccttattaattaattgcctcgatggctcaaaataacaactttagatgcaccgaccatcttacctaccatgtaatattcagtacttcttgcactaatatataattaatatatataaataaatatcatcatttcaattaaatataaaattatttaaacttgttatgaatattaggtccgagtataatgaatatagaatta

SEQ ID NO: 1060 - DNA, 4585 bp, Cannabis sativa
tttcttagtcatgtatgattattcagaattagattctgcaaaattgaagactttttattcccagtaactatattggcccagtagtactactttgatttgttctagttggatatttgaggagattttggtttgatatgtttcgttagatttataaatagtctctattcaaaaaaaaaaaaatgaaagttttcttctgttctaccagttgttttcagacccttgactaagtgtttaaattattttatgtttccattaaagaattgataatatacagtacaattttatattatttatggatatgaaagctatataaagatatcgtcttctaattttggaagtttcatcaactacatatatatatatatatatatatgcatgtgcgtataaacaacattacattagtagtagacagtagagagaatcagaaattatttttgactgcttaactgtattgtaatggtcatcattgttttgtaatttgtaaatgtaacaaattttactacgcaaatagtttagttgttaaattttactacaataaaatataggataagtgtataataaatttaagtttacaccctaaaaactttttatattttttttttatgtatgttatttttttttttttgaaagaaaatcattttattcagcaaaataaagcttataactggtcaggcttctctgcctttaaaatggcagcagcacaagagggtaaaatctctgaccaaaaagaattacatctttgagttatagcccacttagctaaagcgtgagcaagtttattacaatctctattcacaaatttgattccagcacagccttctaagagatttgttgcaaagatatccatcaacggcactccccagtcagcacgaggagccttttttgttagcaactggttgatcacggtttggttgtctgaatttacaaagaatggacaagctttagatttctgcaccagaatcagccccaactggatagcaagacactcagccataactgttgatctgtaaccttccaagaacaatacttcagcagcaaccagacggccatcatggtttcggatgactactgcaattccattatcctgctgctccttgccagttgctgcatcacagtgcagagagaagtaaccggttggaggggcaacccagcttttgtgtttagccacaaccatcccagtgccattctcgtgaggttgctgtaaagcagttgctataaaatccatggcccagggaatccagctttcccaattagtctttttattttggaaaatgcgctggtttctttggttccatatcaaccaacttaaccccaaaaacgattcaaacttgtgcttggtgcattgttgttccatatgcatgagaaactcctggagggctgtcattaggccaagaccagagggaaataaatgccagtaccctgttgctttccaaaccgatttcagactagaacaataccatagtgcatgaccaattgtctcatctttactccaacatcccgtacaagtcttctcaatttttatacctcttttaaccaactctgtctttgtgggaagccagttatgacaaacacgccaaacaaagtttttcattttcggagttaaagtagagtgccatatccttttccactatcttctgaccatagacttatctgaagtttctgctgcctgatcctctaaacgattccgaatgtaaccactagtcacttgaaactctccataggttgtatagtgccaaattaattcatcttcaccacaatctctttgagttttgatccccaatacccaaggtatatcttctttatgcattttttcctctatggacttcactatccaatcaccatttgcatcaataagagagtctacataagtattagggggaaccgaagctggtgctttgagaaggaatgggtctcctcgaggtatccatcggtcttcattgattctcactttgcttccattagtcactctccaccgaattcctttaacaagtaactcacgaccccaaataatgcctctccacatattagaacaccaattgccgagtctagcctcaaggaaattagaactcgggtagtaaagggcttttaacacttgagctagcaaactttccgggtttgtgatgagttttcagccctgttttgcaatcaatgcttggttgaaatcttcaagattcctgaatcccatacctcccgaccatttatctttgcaaagcttctcccaatttccccaatgtatttgatgtttttctgttgtagatccccaccaaaaccgagctattaaagattgaatctcacttattagacccttcgaaattctaaagcagctcatcacatacaccgggatagcttggattattgatttgattaacacttcgcgaccggcttgagagaaaagccccatcttccaaccttggagtttttcccaaatcttgttgcgaatcaatccaaaagcttctttcttgtttttaccaacaaaggcgggaaggccaagatactttgagtgattctccgaaaaggtaactcctaatgaattagccaatcgttgaccatccgtacttttgatcttcttaccaacacataagttagacttttggaagttaatgcattggcctgataatgaagagtaaacctgaagcacctcctcaagggcctttccttcctccatcgaagcatccaagaagattaggcagtcatccgcaaacaacaaatgggtcaatcgcttctctaaagtaccaaagcggagaccatgaattttatttgctcgactggcttcatttaatagacatgacagtccctcagagcaaataagaaataagaatggagaaagaggatcgccttgcctcaaccctctcttcggtatgatttgccccctcgcctctccatttaataaaaccgagaaggtaactgtcttgacacaccccatgatctttcgaatccactgctcatcatagcccaaacatttcatcattccttcgaggaagtcccattcgacccgatcgtaggcttttgacatatccaacttaagagccatcttctttccgttcccaaatctacctttcttcatgcaatggaggctctcaaacccaataatggcgttgtcttgaatctgtctcccttttatgaaagcactttggctctccgaaatcaccttctccatactcaatttcattctattggctagacatttggagatgaccttgtaaataacattacataagcttaagggcctgaattctcccaccatggtaggatccttaactttgggaattaaacaaagtaaggtgtcatttaaaccgctgcagttcataccattatttaaaacctccaaacacgttgctataacctcttgacccacttcttcccaatgattgtggtagaataaccccggaagaccatctttccccggagctttgagggggtggatttgatcaatggcttctttaacctcttctttagtgaattcctctagaagaatagcgttgtcatggttggataaccggtttggaacacatctattaagtatctcaatcatattatgattcggctttgaagatgagaacagttctgagtaataccgaaccaaaatttcctctatctctttgtcttggttacaccaccgttgttgttcatcaaaaagaccgctgatcgtatttttcttcttcctttgagatgccttgtgatgaaagtatttcgtattgcgatctccgtgtgtaagccaaagggccctactcctttgtttccacaaaagttcctctttgtcctctgctgcgttgagatctctttctatctgtctccttttctgccagtcaacctctccaagagatgaagagagacgtttcaagtcttctttgagggcctttgtcttagcttttagttctgtttttttccctttattccactctttaaggacctcgccacacacattaatacgccccctcagaccttgaaccgatccccaatgtcctctgtccatccaaacattttcaacaatcttaccacattcctcttcgctggcccaagcatgttcatagtgaaaccgagatttccacttagaacttgctttagagaggttcttactattattaaaagtaaggattagaggccggtggtccgagttccaccaaggaaggagagtaactttagaaacactaactcttttataccaatccggattagccaaaactcaatccaacttctcaaaaactaagttgttttgacgcccgttacaccaagtaaagtctcccccttccatcttaatttccttaaaattacaatacaaaatagcctttcggaaatcacacatctgagaatcaagtttcttacctccccatttcttctctttttccaccatgatctcattgaaatcacctccacaaagccaaggtccttgcaacatgtttctaagtctctccatgagcaaccatgtatgtttccttcctcctggatccgggcttccatagaatcctgtgaatctccaactaaaacccagcccattttccacagccgcatcgatgtgagacaccgtaaaagacttgatgtttacctcccaagaatctttccataagagagccaaaccaccactttt

SEQ ID NO: 1061 - DNA, 1513 bp, Cannabis sativa
aaaaaaaaaaaaaaaaaacgaatcaatggagaatttctcatacagttcgtaccctgactcgggcgattcctcgcctcgttcaagagagatcgatttcgagaaccctccgccgtgggacgatcaaccgccgccgcagaactacaaggtcaagttcatgtgcagttatggcggaaaaatcctacctcgtcctcacgataatcagctctgctacatcggtggagaaaccaagatccttgccgttgatcggactgtgaagttcgcgattatggtgggtaagctctctgctctctgtgaaaacgaggtttcgtttaagtaccagctcccaggggaagatcttgatgctttgatctccgttacgaacgatgatgatttagagcatatgatgcacgagtacgatcggtactatcggactactggtaagccggcgaggatgaggttgtttctgtttcctgttgtggctaattccgcttcgagtttcgggtcggaaggtccgaatacggatcgggatcagtttgttgaggctttgaatttggttcagaatcatggatccgacccgaacccgaaaccgcctgttcacaacaacgtggatttcttgtttggtttggagaaaagcgttggcggtgttggtgttggtgttggagttgtggcttctcctccgcttcctccgccgactgtgcctgaaccgttggcggcgccgcctcaggaatatcaggttatgagtggagctaatcgggttatcgggtctaacccggttgatattcagagacagttacagaagcttcaaattgaacatgaacaaaacctaaatcatcatcatcatcaacaacaacagctaaatcatcatcttcaacaacaacaacaacagcatcaacagcaacaacaagcgatgtacggaagaaagagcgaggaaaatctagtcggtggaggaggatacgccggagaaaattactacatccataaagtaccggagaagattccggcagctatgacgggacctcctcagccaaattactggccggaaaagcaaggactcacaagcagcggaggatatccagtgagtcacggtggaggaggaggaacacaagatcatccggtgtatatgatcccagctcacggtgctccggtttaccaccaccaacctatggtccgaccggtaaccggtccacccggtcaaccaccacaaggatactaccaagttcagcagcatcagcagcagcgattgggtccggatgtttaccaggaacagccggtgtacaatgtggtacctccgccacagcagccgccaccgaagattgcggcgacctatccggaagggatgggaatagtacggccgagtagcggcggcggaatggttcccactactgatatgggtccgtacactcaggtggcgtacgatagcgcgacgggaagacaggtattctacaccgccggcggtgggatggtgctggcatcttctcagccatcgcagcaggtcccggtgggacctggaccggggccggggccggggccgggg

SEQ ID NO: 1062 - DNA, 2516 bp, Cannabis sativa
tactatgtgagacttgcccagaaatatataaaaacttgcagtttagattaaattacaactttgagaaactggagtcattagaaggtcatcaacaatctaacagcaatcaaatgacctcatttctaaccactaatgaggtgttcatttcttttctttctttcttcttgataagactgtcagctgtcttcaaaaaagctgttgttgagatgtccataataaaggaatgggaagaaagccatataataactgacaacatcttattcactggatcatacaacgtcagctacagcaatttagaaactaatggaagtaacctctcaacttttatcactatctgctagatatgttctacattattagaacatctacagttaattgaatccatcattaagagattgaaacaggaatatggtaattgtggcaaaaatacctaagttattaggtttgtagcacttgagtatccaagttatctttttggtagcgaaagtaccaaaattattaggtacccaaattatttatttggcggcagaagtaaccatattattagtacgttcgtagcactaaagtatcgaagttatttttttggtattaagtttgcctatgtgatatcgaatttgcttataacttggtacttttgctgccaaaaaaagaaaaataacttaagcactaaaatactgcaaacataataatttaggtattttctccgtcaaaaatataacgcgggtacataagtgctaaatatataaattcctggtgcttttgccgctaaaaaataacatgagtactgaagcgctacaaacattataattcacttgccgcaaatatcccaaaagaagctgacattataaaaggaaatataatcacaactatcagaccacattaacacagtctgtaaactgtggactcaaagaacctcttattatcattgaaaacgcatatgcaagctagtaattctgtcaatcgtcctacccaaagtctgaacaggaaacaaatatttagcaggtacagttagtgagttccacaaactaaccttgactggtataacaacttcataaagaagtataacatccctagcagcatggtagaattccaaagcgactttggttgacgacaaacaaacatcctgcccatgggattaatcaaaacactcttcagaaaaataattatgcttagtgatttattccatcaaaatttgcattgacatgaagaaacataaaatataatccttacttatatttcttacatcagagcatcctaactaatgtagtaaagttaatgctatcagcctagcctgtaagacaaatggcattatcataccttcatgtattcaggttgtctaattttaaataattatcaattcaatatgcttataaaaacactattttaagaagcctcttattacttctaatgctctccgcaacttatccctcaaatgctgttacaatgtgttcattcatcgtatgtatgttccataagtcttttcattatagaagaacaatgcaatatcctacttcatgacacaattctagtcatctccaactatagatcccaggtatcaccctttttcaaaatttccagcatggctgaaagactccttgatgagtaattacagtttttttttttaattcaaatattactcagtaactacaatgataggcttctctgaaataagtatcttattcatcctacttatagagcggaattatagacagttgctgcaatcatgcatgcaacaaaaccctactccatttccattatttgaataaacataagcttcagttatctcaaaaatcatctgatatgggatattactttcaactagactaacaaaataatgccatatgatacacaatcaaactccaaataagcaaaacaattatagaagctcgtgctcatgctaggctgagtaaacaaacatcacaatatttagcagggcaggccaatcaactatatgctaataaaatgggcaggttcattctgtaatccacaccttaagtgtctgatgcacaagctccatcagctgaagagcagctttagataccacacacctttctgagaggaacagcaattgcacatgttcagaagtgttgacagccaccctatcattttttgcatactcctgcagcaaattccattggtctaaagctagcattatgaagataacaacaaaagcagtgatgttgatcctaaatactcacttgaggtatggaaaaatcacatcgcagaagcagctttctagcattcgccaagatttctgttttctttctagatgcaaagtgaacctcaacattctctgcataatcgcacaatctgttatccttgttatcagattttgaaatatatgtgatttcctttaaagcattttcaaattcagaagtgtgttcaatgatcttctgaaagtcagcaagttttgaagcatcttgggggacaacctgaaacaagaaatgaaacttaaggtactcgactcatggaacttgcaccacaaaaatatgcatttctcttatcttgaaaatatc

SEQ ID NO: 1063 - DNA, 3871 bp, Cannabis sativa
accatgttttgaacaatgacacgtttcattttatttattctttttaaattcatttccaccaataaaatttagttttataacggtcaacggaagaaagaccacagttttacaaaattacaaaccaacgaagattatagtaatagtgacactactttcttttcaattagggcttcatcatttttctcccttgaacaatgcttcaatcccagtacgaaatcattgttttgatttgcaccttggtaagctttatcagaactggaattggcggaagaacaagtacttatattcgctccgaatggccatcttccgatatgccgcttcacaacgatgtttttgctgtcccaaaaggccataatgctcctcaacaagtaccaatcttgaaccctataacaattcttctctctatttcggaattgaatttgctatttgaagtttaccaacatgattttttttcctttttttattggtgttaggttcatattactcaaggggattatgatggaaaggctgtaataatctcatgggttactccaaatggagtaggttcaagccaagtactttatggtacattggaccagaaaaatggttttagtgctcagggaacggtcaccaactataccttttataactattcttctggattcattcaccattgcctaatcgatggccttgaggtaagatgaccgtttattgctatgtatttactgggcattcactatttcttggagtttagatatctaggatgattttcttgctttctttttctttagtatggcaccaaatactattacaagatcggagaggataaggctgctcgtgaattttggtttgtaactcctccaaagattgatcctgatgctcccttcacttttgggattattggtgaggatcttaatctagtttctttcaacagatgaactgataggaagtttagttagttagggaaaatgtgttctcaaaagtttctgatttcaattgtttttgggaaattttttaggtgatttgggtcaaacatataattctttttccactctcgagcattacatgcagagtgggggacaaactgtcttatttcttggtgatctctcttatgctgatagatatgaacataacaacattggtattagatgggattcgtggggacgctttattgagaggagtgctgcatatcagccatggatttggtcagcagggaatcatgaaatagagtacatgccacacattgtaagtaaagctttctatgacttttgcatcttaccaatcatgtgatgcaatcttgttctaatgcatatttgaggttaagaatttcaaccctgcgtattatgcagttccatggtttttgttctagtacattatttgcaggcctctggtaatggatgatagttttgacacaagttttctttcataatttgtgtattgtggatgcttttaattattaatgtaaactaacctttataacttaaatttctgcttaaatattattttgatgtaattatttcattttttgtttagttactcactagtatcttgaactcagggggaagattttccatttaaatcatatttacacagatttcatacaccttatatggcctctaatagtagcaatcctctctggtacgctgtgcgacgcgcatctgctcacatcattgtcctatctagttattcttcatttggtaattttttatatactacatctggtttaagcatttgtttaattccaatgtttacatgtcattgttccataattctctccttttgttcccctgtagcacccttcttgtgtattttactcttaatttctgcaaattaattgttttcagtcaaattattctagatttgtactcctaaatttgctgtaaaaatatcttttcatcagtgaagtactcacctcaatggatgtggctgcgagaagagctaaagagggtgaatagaagcgaaacaccttggcttattgttgtcatgcatgtgcccctctacaatagtgaccaggtccattatatggaaggtgaaggcatgcgggctgtctttgaaagctggtttgtccagtcaaaagcggatttcatctttgctggccatgttcatgcatatgaaagatcggtatggagattagccttcttgtgtctcttttttttccttttttatctctcttcaatattaaattattcatctgtccacaaaggtggtcactagtcagagtttaattgtttggacatgctttgtatttcatttttacacctgaacaattcttcataatcctgtcatttatgtcccggttccaaaattgtacttgcttatgtactagatactttccgtagtgtcttgcagagtcaacaatgttattctaaccttatcacatgatcacatacatcctgtcaaatcgattgaccttttacttatttcctgttcttgtgtatttcccttaaattttgcttcagtagctttatcttatagtgaaatactgttaatttgtagtatcgaatctcaaacatttattacaatgtatcaactggtgatcgttaccctgtaccggacaagtcagctccagtgtatttaactgttggtgatggtggaaatcaggagggtcttgctggaaggtagtgctaaatgctaattgtactgcataaaatgttttcaagcagttttatttctatatgaatggaaatgatatgtctgccaacgtaatctttctattctgttacttgtaattcatcacaggttttgggatccacaaccagaatattctgcatttcgtgaagccagttatggtcattctacattagagattaagaatagaacccatgcattctaccattggaaccgaaatgatgatgggaaaaaggtaccaactgatgatgtgatattccacaatcagtactggtaagtgtgctaactaaatcatgtttcttctttcatacttgcacaatgtaaaactactttgatccctggtttcattgatatgaaccgattcccccttagcagtgaattcaataaaccagaataataggaaagcaaaggaataataagtgaacaactcagtagatgaaaataggtgaaacttgtatactatatctgctatggcagctagagaattacagtaaaaatggaccctaggcattcgagaggctaggctctccatgatgcaatttgagaatactcaattcattgcataaccctccaatagtccaattcttcttagtatcctatatatagtactccctcccgaacactacccttaatacaaaagcccatatatctttttatttgctatgctctctcatcctattaatcatgggttctaacattcatcactcaaatcgtttttaacctaccttctgattcttgagtattggggagtactgaaatgtatttctacaatgactaataagaattactgtttcatgggtcataaaacgttaaaattttggcttttaaatcagggcaagcaacttgaggaggaggcgactgaagaagaatcattccaaggttgaaggggagtgaattgcatgtgtggatgatattacttgcacatttatcagatcagggcatatgctttctagctattcttttaaaatcttgaggattttttttagttgaattgcaattttggcatgaatcaaccatgaatgtggtgtggacgtaaaaagagatcaacaatttaagttgatggataattttccaatgcctggctccgtatagttgtacagcttgtgaaaggtgtccctgtttgttagtattgtacctattgattgtactgtactaaattgtaaatctgaaataattgaaaagcaaaaaatgtatggtagttgccattttacttgaattttgaactcttgttggatctctataatgaaagttttggaatagttta

SEQ ID NO: 1064 - DNA, 2438 bp, Cannabis sativa
ttatggtcctattaattttcgtttttaataatataaatattttgtatttggtgaataaggtaagggcgtgtttggtgaattgaagattctcagttgaatggttgaggagtcatttaaggtcatgccaaacaagatttttgaatgaggaataagacagtagtggtagtgaggttttcctaaaataaaaaacaaataaacgaataagaaaatgggagccaatatgatattgaagctaatatgaatggaagagaaaatatatctattcataaatatgaagtttttttttttttgtgggaaaagaaaaacatttatttttaaagaaaaaaactcttaaaatatatgtattatatatggagagaagagaaaagagacataataatacgtgttgtgcaaaataaaatattagttgaataatatgtatatgctttataacttgtgatgtggagatcagagctcataataaatttttatatttggataaaatgtggttatcatatggccttgagaaagttgatgaatattaattaattatatctacttttatcttttatatataaataataattatgtagtggattatcctaccaacaatttgtcgcttccttttttttttatgccgccaacttaatcatataactatagttttgtatgtatagcttcttccatttaataattaatacacatataatttgagaaatctttttgagtttgcaaaaaacaattcaacaaacaaatatatattacgtctgcacaaccgaaattaagtaagaacatatcagaagattccgtgatggttactgggaatctgccattccagtgttgtgccatctggtttttgaaggttgaaagccaaacttttttgttcgtaagcactttggcaaatagcacatgatcagaggcaacttgttggtcaggaagtgccatatcagaaagatcgaaaacagactcttcatccactgttaatttcaaaggttgtttcatcttttgcttgtaaggatccattgatatattgcagaaaaactaaagggaaagaagacagtgtgtcgggtgagaagttaaggttgtgttaatgttgaatggaaaagggaaaacctggggaaaaccatgggaaaaactatcaaaaacagttaaaattcataaactgccacagagcacaaagagggcagacgctcatcacaaagcgcgagttttacttcgtgaaccatttcactttcaaaatcaccacattgtattacactcccctacacccggacaaagtgttcaaccagagtcactcatttatacgccattttgggtacagatttatcgattaccattcctcagcaagactaaaggacttgcaattgctcttggtaacatcattggtgaatatgtggatgtatttgaagactctctcaatgaaggatgggggccatttctgcgtgtaagagtgaaacttgatatcagtaagccacttttgagggggagaatgatcaccctaatgcaagcaaaagaggaattttgggttgaatttaggtatgaacgtttgcctgaatactgcatggaatgtggacgattgggacatcctttcgataagtgtttgatttatcttgaaaaattggacaatggggaagaaccggatttggagtataggccaacattgaagggttcaccactcccagtttcaagttatgaccggtacaggactgacttttccaaggggaatgcctggcctttactcactcgattggccaaaacctctttactctcggccattccaacattaaagaatcgaaactctcctcaaccagaacaattgctcagaggtgaatcctcacgatcgactgtttcttctaatgtttttactgctgctattactcattccacaccatccacacaacacaagacatctctgaatactggactttctaatgcactgcttactgatgttgttcctgtgcttgataaccccatttccccacccatagtccacttcgcaccagccacacttcatccagaaacaaggccagcaaccaaacatcaaaatagcaacctgctgcatttttctgcagcaatgactcataacacttccaagccacttaatactgatagtgtggttgatctttcaggggtattcactcctttgacagtcatggacatgaggccaaatgtttttgcaacatatccaccaagccattccctaccagactctatgataaaccaaattcacactccattaccaacccaactttacaccaatcagaagccatctgtcagttccagtggtgaaaaacaagtggggaaggaaaatttgtcaccaaatcgaattatcaaaagatcttctgagggcattaatttgaggcaaaccttgaagagatgtaggggtaatcaaccacttttcatttctcctatgtcagaggagaatgaattacacatggatgtttccattgatgaaatgg

SEQ ID NO: 1065 - DNA, 7802 bp, Cannabis sativa
tctaatagcaaatctaattattacacagttctttgtctgaaatgttgacgcgatgataaaacgacaataattttaccaaatcgacactcggtgataaaacgacaataacatcacaaaaactacacacataaaattgaagcgacacagaaatttgacagcatcatttttttttattatttattttaaaaagagttattagggacgaagccttttatatttacacactcaacaaattgcaaaactcattcagtcaaaaaattgcagtcgttatttgccacaaatcccttaatcttaagagttttttttttattattattttggccttaatctaagagttagtacttagtagcacttatgtcaccaattatattttatgcttaaaagaaaaaaaaaaattagaaaattggataatgcaccattcttgagttcacccaatatttttattagttttgtcatttgtagaaattttgaggttgtttgagtctctttttaattatcagttgtggcaattgtgtttttaaaaatgagaatagaaaatagttttttgtcaatttaaaaatttaatagtgttttgtcaatattctacatcataccatggcatgaacctatcttaccttggactggatcccgggcctagacctggaccccagacaatgaacccaggttcgagtcctggtccgggttcaggtccaattttagcggtctgcattcggatttagttttttgcgtttgggtataggctcgagtaggggttcgggttcgggttgaagtctttggttcgagtcgtagtcaggtggggtccgggtcttggtcggggtctgggccaccatcgaactttcatcttcaacctttactcattttaacaataggaaggcatcggtccactaataaaaaaaccatgcccaaaactcagatctggtcgttttcgaccctaaatctaacatcagctcatagattggatctatggtggtcattgggtccgtgggttgttgggtctgtggtcacaatggtcgtggagagagggtaccaaggttgtggagagagggtaacaagtgtacatcattgcaatgattgatgatattttagccataactctctcaatattgattggaatcgaacgattcaatatgttttggaaattttaaaaaaagatccagaacttttattcacaatatttttcctaaaagtgaacgcatcatagtcaaaaattagcttgaggctttagacttgattttcgatcatagacgaagcgtgttgagcatacaaaacttagaattcttcacccattatatcttagaacgtaaaattctatgataacttcatcatattcacctcatttaacatatttcttcccatttcaattcatattatgaactttatcatttaagcctaaaacaaggaaaacaagcatgattttcgtcccaaaaatatgtattcacaaaaagaaaacagagattaaaacactcaaaagtatgccaaaactagcctaacaaccatctctcagtcactcaaaaaacttggaagacttcttagcttgagccatgccccaaacccccacgacatcaaatccatgatcctcaacaaaggatctttgccaatcaaaactatggttgtgtgatggctccaccagcaacgacaatcccaatcttgcgaccctctacccatcctctcagaagggaaacccttcgaacatatcgacaaaaaggaagcattgttgagaaaacacacctccaacgcagactcataccatccaaactaaaactgtctgggactcgatttgtcagcgaggcaaagagacactgaccaaaaaccattgaaagcaacgaatagaagagacaactcaaaacaccctactttgtgaaatcaaaaaactcgaagagagccaaatctaaacccagaggagggtcgacgggttttggtcagagataaagaaaaactccacgcggcgattggctagagttaaggaagttaacaagagagaaaaccccacttatatctactattgtatatgcagtttctcttttgacatgctttataagtttctttcttttttactcatcaaagagtcaatctaatttttcatatccttccaatatttatttattattattttgtaagttttttgtagagtgtttatgatttaacaactttatcgataagtttaattttaattataatatgttggagagtaattatcttctaattattgagaattatcttttataagctttaaatattattgctagggtctaattcatgttgctagggggatataggtttacataattttatctcttttatgcaaaaagaggcaaaataaaaataagaagaagaaggaaaaagagcacaatagtatccataaaaatagcccagaaaattataaaaaataaaagaaatgcattatgtacatatattatgagtaaaaattacaagttacaacatcactttacatacatgtatgcttttagcacttctgattataaattcccaaaattcttgtttcttcgagaaatcgagctctgcataaaaaaaaaaatgaaaaaaaaaaaagattaattatcattaatcattttacttataattcagagttatttattttacatgcatataatataacatacctttgttagtctaatcattaacatacgacaatggattatatggaaaatcccattgagttgcaattgcagccacatctctgctacactgtgattttatatacagtttattgacatgtcgtttggataatacgacattggggaaccataagagttgtagctataacaaatgtcatgaatatgatttgtctagctgaaagtggaggagggggtggacttagtgctactctcattagcttccgagctgtaaaaacgacaacgttttagtactcaaaacgacacataacatccctatatatattatataattttaagaaacaaacctgatttgaattgagagaactcggtagccatggtggtaagaaggagtgaaaagaacattatagaaagaaataacaaagagagcaacttcattttattaaatttgagattgtttagtgaagaagtgaagaaaaataaagtgtttgtttgttcttatatatgtatctgggtttagttttgaggtgtgaaaattgaagtgggcacttcttagaagttgagtttggattttatttttctaagtaagtttcgtattgaatgcattataatttctcaatttgggttttgaagtttctcaactattttcttccaattgtgaaaaaactcaacatactgaggtgttgacttaattgacgaaaatagtttcagcaatcattaattagataatttttattaataaaaaacattacaaattgacaaaaataacactacttaaattaaagtgtcaaaccatatgcttctacaatgcaacttctaaaaaataaatagagatgttctataaatgttaaaaaatacgatataatttataatataaaaaataagaagaatattatcactaatctcctattatagtattttagtaaacctcctataataaataccattataaaaaaattattttgtcatgaacttgaaaattaattaagaggttgtgattatcattttttataaaataatgctcaaaacatatgtagattatttgaattttatttttaaaatattaaattttttcttttgtttaaaattttatgaaataatagaaataattacaatgtacacaacaaaaaaaattagattaaaattttttcttgccatcaaattttctaaatatatatttttcttttaaattcatctataattctcagaaattaaaaaaaaaaaaaaacagtgagggacaaaatggcggactcgcggccttgcctaagttgcctttgctctttgaacttgtaaccggaaactggagacttacaacggggacaaccggtaatcctgctctaataactaaaaaaaagccctctcattcaactttttacaatctctccaatcctcacattttcatggcgtcgccactgcctcggcctccggtctccggtaactgttctttctccttgcacctctatttccggttccgtttagttgctcagaaaatgaaatgagaaccatagtttcagatttaattggtcttagacgatataattctactttagtttttctccctgagaactgttatggtctgattaatgtagcagaaaaattgaagagtaagaagaagtttaatccatatatttaagcttaatgaatctttcatgtgattcggtatattgtagtgccgtgtaatgttttctcctttttcgtttttattttggcctcctcgagtgagaggtggcgtttgtcaacttttagggtttatagcttgcattttcacttcggatatggggttttaggtttctgcgatatgttttgtttttttaattctataatttggattaatcgctagtaaaatgaactttcgatgtgtgtttctcttttcttggtttcatatggcagattctgatgaattacaagtatgtttccgtgttgtaaactgtattttgaatatgaacatatatatatattttgtcatataattcatttataatttttgctaggggcctctgttgaacttgatggtagaaggagtacagtcagtacttcctgtgctatggattttgctgcagaaatttctagttcacaagatgtactccaaaagagaatgagagagattgaaactcttctacctactctacagaagcctgagtattatatggagccatgctttgatgagttggtctcgagggaattgatggatcctggttattctagccgagttccagatttcacagttggaagatatggttttggttcagtcaagtatattggagaaactgatgttaggtggctgaatctagacgatattgtaaccttccataggcacgaggtagttgtatatgaagatgaaagtaccaagcctttggttggtcagggccttaacaagactgctgaggtgactttggtgctaaaattaacatcctcaactattgaggaggatcagaaagaaagtgtggtgggtaaattaaggcagagtgcccagagacaggaggctcagtttgtatcatttgactccgctaatggtgaatggaaattcttggttcagcattttagtaggttcggattaagcgaggatgatgaagacgatatggtaatggatgatgctcctgcagttcaagagccaacagcgatgattggtgaggagatctctgacattgatgaacaaccacaatttgataattctggaaacttgctttctcattctcttcctactcatcttgggcttgacccaataaagatgaacgaattgagaatgttgatgttccgtgatgaggaagaggagagtgatgatttcgaacaatttcctagtcatcagaaatcatcctttaataaagaatctgtcaaaccacctctgcagaatttgacaccgatgaatcatagagctactccactagttgcccgcaaaactccattggcattgcttgagtacaagcatggtagttttgattcgaactctcctggtaccattttgatggcccaacaaattaaaactacacctctcaagaaattaaaaccagaaggttttcagctggacctcaagcatgaaacaccagtaactagaagccatactcagtgtgtagttgatgcgggtttgttcatgggtaggtcatttggggtagcgtggggtccaaatggaacactcattcatgctggtaaaccggtttgtggtagtgattctcagaaggggttgtcttctgtgatccacttggagaagattgccattgacaaagtggttagagatgagaaaaagaaagtgagagaggaactagtggattttgcatttgattctcttctaaatctccacaaagaaataaatcacgatacaaaagaaaaagaatttgggtcttttaaattgaagcttcaaaaacttgtctctaatcaattacagctttcagagatttgtagaagctatgctgagattattcagaaacagctagaagtacctgggttgtcatcttctgcccgctctggtttgatgcaccaaataatggtatgggagttgataaaagtccttttttctgaaagagagaataatagagaaatgaaaccttcgagcacagacaatgaagaagatatgatgcaggaccaggatgcaaaggaagcttctcttgatgttgatcttgaagcactccctctaatcagaagggcagagttcagttattggctgcaagaaagtgtttgtggtcatgtacaagatgacataagttccctaaatgagactgattatcttcaacatatatttttactccttactgggaggcagttggatactgccgtggaactggccgttggtaaaagtgatgtaagacttgcttgtttattaagtcaggctggtggttccatggtgaatcgttctgatgttgcaaggcagcttgacctttggaaaatcaatgggctggattttaatttcattgagaaggataggataaggctttatgagttgctttctggtgacattcatggctctttgtacaacattgacattgactggaagcggtttctaggtttattaatgtggtataaactacctcctcatgcttcactgcctgttgtctttcacacttatcaacatcttcttgaggatggaaaagctccatctcctgttccagtttatgtcgatgaaggatttgaagaggaggctgtaaattggaaatcgaaggagcgttttgacatctcatactatcttatgcttcttcatgcaagtgatgaaacacaacctgaatttttgaagaatatgttcagtgccttctcttcaacacacgacccacttgattatcacatgatatggcatcagcgtgctgtgttggaagcaattggtgtcatcagttctgatgatcttcatgttcttgacgtggcacttatttctcaactcttgtgtttaggcaaatgccattgggccatctatgtggttctccatatgccttatcgtgaagattttccttatcttcaagctaatttaattcgggagatcttgttccaatactgtgaatcgtggagtactcaagaaagtcaacgtcaatttatagaaaatttaggcgttccagttgcatggctgcacgaagcactggtaagaatttttcatttgtcatggtttcttgttttacataatgtcatcttgttcatgtatcaataacaatcgtatgaattttgtttaaagtcgtcttctatagttgaagatggaattcataaatatcttgtcaaaatatggctggaatgttaatgttctttccttgactatctaatggctcaactgtcttattctacaaaatgcaggcagtttattacaattatattggggatctctctaaagccctggtacactttcttcaatgtgctcattggccgaaagctcataccattttcataacctcggttgcacatacactattcttgtcaggtaaaagttatatctcaaatctgtttcttttgaggaatatcgtgatatttaaacatgtcaaaaaccaattgtgctgaagatcatatgatctatttaagagaattgctaaaagacaccactggtgcctaacactctccttagtgtcataccgttattggtataattaagtagcggttgtcatataacttaagaaaataacttttaaggaatattgctaactaattgtaaggtcccaataattaaaagtgctaggtattaccggtgcccaataacaatacttttaaacatgatgctaaagatttcttctcccctattatata

SEQ ID NO: 1066 - DNA, 960 bp, Cannabis sativa
ctacttaattaacttaaactaccagcttagatttttttttaattaattaatattcaaagaaaagttgattttacttcctctaattgtccataacataccactaaaatatagaaaaatagtttagtacagtgataagctaagaaattttgttctgccagggacttgattattataaaataaatatttgtgtttactttaaatggaaaatacaatcattcttaataaacttatatagtttaatattttttcatgattcatattgtagctaaactatacatgttttagtttaatattaaactgaaaaactctcttgaatgacgaaacatagtgcacttattacttaccctataattttttataatggttacaaattgttataaactgtaatttttcttggcagcaatgatggcctacagaaccgtcccagctgagatgagagtaaaaaagatcatacacatgctattacatataatagccatagttatgggaattattggcttatgtgccgtttttaggtaccataacatgatcaacttaggcgatatgtatagtttgcactcttggattggcttgaccactttcattttatattgcctacaggtaaattcatttaatttacaaaattaccacaaaattataatttgtttagaaaaataacataacgtttttttttgggcagtggttggttgggtttttggtgttcatggtgggtcgttcttcagttactaaagaaagaatgattgggtggcacatggtagctggaagagcacttctattcatgtcaatttgtgcagctcttacgggcctaatggagaaagcccagtttcttgggcttaaatatcaacacgaggcccgtttggttaacttccttgggctttcaatccttctctttggggttttcgtagatctttctatcgtttatggtcgttacatttaaaatgatttttatgtatcttatat

SEQ ID NO: 1067 - DNA, 3593 bp, Cannabis sativa
ctcgccttagagtagtttgatcttcactatgaacaacatatatattacaagaatccctcaagacttcgaatcataaattccttggttgataatttatgttttcatctctcagtttttttttttcgatctcacactgacacactttctttttctttctttgagtgatattacaaatgagctcgagaagcctttctctcttctttcccacactacaattttcctcacgaagagaatgaaggtctcaagtattaaactacacctgaatctggaaattttataattcgtatgagtagataaagtagtaggatttgttgagctgtaatttgttacgctttttttattgtaattagtttctggtattatcttttgtatttgaaccttcaggcacgcttgtaatagttttgttagagtctacatgtgtatgaaacttctttcacaagattttacatattggagaaaatgagaaacaacaatgatttggacttcaacttttaagcttctaaatctagaacaaattaatataattttttatttgccatgaaaacaaggttagtgttaaatgaaaatcgtcaaagcttagagactcttattctatttttttcaaataagaaaaataaaaaagatgaagagatgaaacacaaaaaaaatggttggtacacatgagaaaatggagaagatttttttcttattcaatttatttccttttttttttttctagaagagtctctgtcatttcatttaaaaagcgcattaaaaaggaaaaaaaattaaggaaggtaacaataaataaaaatggaagaaggatatggagatggatgtttagaataaaaaatatctgtatcaaaactttttgcttcctctctgtcttttaatcattacgtgtaccatggtaaaatattgagatactataccattatagtatctcaatattttaccacataattaaaaaataaccttttgggtatagtaaggtggagttttttttttttaatgaaaaaaaaacccagatctgtgttagatttaaagattagtttgtgacttgggaatgtttaatttgtgttatgaatttcagaattcaaatctgatattttcatacgagtgttcttgagttgtttttttttttttttttcttgaatctgccttaactaattagtttagtgtataatatttctttgaatctaatgtagtttaaatcgaatttaaaattttaaatatttaattttgttggcagtttaattttggattttagattggtagtttgaatatggttttgatggtataatctttgttctcgccatttgatttagaaagtaagaaaaccacttgaggctagctcaagtgggcataggtgggtgtgtgagtgttggaggtcctgggttcgagtcctagctgaaacatgttgtaatatataaacgtttaaatcaaaaaaaaagatttagaaagtaaaaattttttattttttttatcaaaaaaaaaaaccaagaacaagaacattgttcttgaaacaaaatataatcttatgattgctgaaaagatgaatttgtgtttgttacctttaacggttaactggggttggttgcgatttttatatatgattttacctaaattttgcttgaagatgttatatttatcaatgcaaaaggaaatctcatcttcacattatcgtaacatgtatttgaatagtaattaaattgttttttaaatataaaatgagatgaactaataaaatatggcattttagaaaatacagtcagcattcttaacagattgataataatggaaatgaatggaactaacatgtggtattttcaaaaaaatatgtggtattttatccgtaaaaaatataaattttctttaaaaatatacagaaaataatgaactctttatattataatgatttgataaattaattctttaatataatactctttttcaaaataatttagttgattatgtattagagaataaatttattattttataataagagtaatatttatttatttatattaattatttttcaagaaaatttttttatattaaatttgataagattaatgattgtttcatacagaattttaaaattttactgttaaatttaatgtttgaaataataaatctgataatgttgaattggtaaagtaaaaataaggaagtgtagatgccacatgagtttttaaagaaataaatgtgtcctcatttaataagagggataaagaagagacagagagagttttgagagagaagagtttgataggaatgtttgagggattataattaattagttggcacagattgggagagagagaaaattgagaaaggaaatttttattggtttatcttctttctacacaaatcgattgaagaagcaatttagcaccacactatctaatatctctacctttaaattttgtggatgaagtattttattaattgagtggggtaaattaaatagagtaatgacatgtatatacatatttatataatagaaatgctaaagagcactagtggtgcctagtacccttctatgtgttaatattgctattggtccaactaagtatcgggtaccatataatttaatataatagcttttaaagagtatcgctagccaatcgcaacgcgacatgtcgcaaaagtgctaaacaccactgatgcctaatattagcaatgctctttatataattcacacatgatatacacttttataatttcaaccaattattttatttgggctagttacaaattttgtactccaaactttaacatgtattaaattatactccttaaacttttaaagtcattaaaaatttccttgaattattacgattgttgcatttaaatatttttgtctaattttagtaaaaaaaaatgtctaatatagatgaaagtttgacatgatttagtacatgtcaaaatttaatggacataatttaatagatattaaaatctgtggagcataatttaatatgtaaacaatcacaaaatagtaaaattaaatgaaattagataaaaaaaaataaattttataattttaataattaaaaaaaaaattaacaaccaaaaatatttaaaaaatataatttgatagagcaaaaattccaattaggcaaagataagttgataaaaacttactacctatatttatgtgcaaatatgtatgcatatcatttctcaattaattaagaatactagtactaccaaccaaaccaaacacattgcagggaatttaattattttgttttttactagttttttacacacgtgaaatgcctgtatgggcatatatgtaattttatcaatttttttttttaagaaaaagattgaaatgattttttttaaatataaatttaatttaaattattaaaatatatatggtgtatgaattgaatgtctgaaactcaattttctggtggatcttattatctaaaagaaacccaattttctgtttttgtgtgaaactctctgttgtaaggacaagttggaaagattatgggttgcggtggggtttgatggtttgtattctgctgatgcgagagggcatagtggtggggtggtcatgctttggcgtaataatgaagatgtgcagctgctta

SEQ ID NO: 1068 - DNA, 1078 bp, Cannabis sativa
ttgaaggataaaagaaaatgattttcggatggtggtgtgatatcgccgacggaaattatgccactgccattctgcaaatctagttcaaaatggcaacctcgcgagtaaagtgacgacactgagcgggtaccaggtatcgtggagaggaaggggagttcagtcaacaagatagaagggggagccggagaggaaggtatggctggtattgggttggtttgttttcaacgtgttaataaaaataagaatcatgtgtgctaaggcatagcaacataccatgggctacacatgctccagccaattaatatctaaaagtaatggtgtctatcaatgtgactttttttaaggtgtccttgtagaaggctcttaattttttactaaaaataactgtaatttccctattattaatatttatttaaaaggataattaagattttttcctggctcaaattttgtaaaagatacaatttagtatatgttaaaatttgatggagaaaaattcctagttagcctatttaaaattgatggtagttttctcatgtacaaaggatccaaactcagatcgaaatcatgggttattatgagatctactgtaaaaaaaaatggaaaatagttctgactatcgtgtaaagccatatgtaaggaaaattgaggtagcaagaatttttcatgatataaaaccattgtttgtctctactccgaagttttgacttgtgccaatgttgccaattctttcctcgttacttctgggttagatttctcctttcccaaacgtgccacaaattagttataagaattaagaagaccccaaaatatgatacttccaagtcccaaccatacatgatataaccaaatgtctgaaaaaaaaaatcaaagaggatacaagaagttgaacttccagcacatatcttgtttcatgttctcaaccattaaaggaataatgagatgggcccaccactgacttgattagagtagcatgtgacatgtttcagaattaggagtatactttgctaccactccacatattagtttgaaagaagagagagctcatcagatgttttcactgccatatattatacaa

SEQ ID NO: 1069 - DNA, 1706 bp, Cannabis sativa
cggagaacggatggaatgcgtatctcggccaaaaagcgcatggagcgcttggtcgacatgatcgcgggggaaagcaaaatattccaaatgaatctccagttttgactttctttttcttacaattcaactttaacataaaagaattgagttcagccaaatcgacactactttagttcattctactagttaagaaaatccaaatcacagggtttgacagatacagtagagcactgcagttattttactgattaggcatattacacagcaaattaacatcaatctgaactaaaaactagaaaaaatcaatgacttgcagtgaagaaaacctactagaagcagtgcccgtagtgcagcagcaaaagcatggttgaccaggccattcttgaattgtgaccttgattcaacaaatcggttgatcaacatgaagctttcacacaacggaaaaatccgcttagctaattcctgaagcagtatgttttaaccagcatagacaacttaagtaataaagctagaatcagctgtacagagaaaaaaaaatatgatgattttacttctttaaatgaaataattgagcaaaaccacatgctattagtgtcccatttttaaaaaaaaaaaaaaaagaatcattgtttccatccttttatttttttggctggtaaagcttatttcaatagccatatagtccagaaatcagaagtaataaagccacattacatttaaagcacatggcaaaacgtattcaattatacaacagctaaaagcatgcactaaaccgcacctgtattgctaaatccatggacgcatccatctggaaagtaaaatcatcctccattccacggacccttttaatggaaatgtatcttccttcaattccaaccaatgcagaaagtaggtcatcaataagaataagttcctgcataatcaaacaacatcaaaataagaactaattttcatttatttccagttcacaaaatgaagttacaaaaacgaatcacagaatatctcaatcgaggaatataaatgctacctgaaccgcagcattgtaacacccaataggattgtccgatcccaggctgcagaattcaaaaaataaataaatgtgttcagtttttgcttcagtgttacctaaacttattactgaatcgatacctgaaggaatcaacggaatgactcttcgtttcggcgaagcgggaggcagtcttaacttcctgagtagaatagaatcgaataaaatccccaatcgaggaacaatgtgaaaatcatggaatgaagaaaaataagtaagaaagggaagaggtgagagtgacctggtgaaagcgaccagtgagaaatggcctgtctgagttccatggaggggttgaaggagacgatagcgtggaagaagatgtgtccatgaatacggacagtgggagagagtaaagtaaacacagcactgaaactcaaatcaaatttgtaaatcaaactaagtttattttacattattattattatttttaagaaatacaaaagatatattattttctttgattttggatttgtttcccgctgcccttgtcacccaaaccttgctcttccgggactcacaataactaatattattcaatcaattagcttttctcaacataatcataataataataataataatactcattcaaaaagaaaaaataaggctaatttggattttttctttgaactttgacatg

SEQ ID NO: 1070 - DNA, 898 bp, Cannabis sativa
cggccgaagtagaagccggtactgggtaagaggaaaccaaatcagggaagttcaaggcagtgtcgtggcctttcaaggcgagcgccgcaacgtcatatgctgcggcggccatctcgggagtcggatacgtaccgagccaaacgcgtgtcgttttctttggctctcgaatctctgaaacccatttcccactcctacaacggattccccggaaaaacgggtgcttcctcaccgaagcagaccctgttcgtggggaatgaaacgggttttgcgggggcgggtcttctgatggccgggccgtaaccgggcttggtagttgattttcagatgatattgggctcagctcagactgtgggattactgatggtgatatggatgggttgggtggttggtcacttttgggcaagtctgttggaggattagccatacgacttcatatacaattatttatatatatagtgagagaatgtcacaaatggggtcttattctttcaaatatttatatatatgttgagttgtgagatttctaaagagagagagacagagaatgtggcaaatggggtcttagtctttcattttatatatataaataatatatatatatttttcaatttattgagctataaagtgaaacattagggtggagcgtgggaaaatcgcggaccattttaatattaagtgatgtgaggccgcagtgggcacacgtattagccagccttctataaattataaggcgcaagcttagctagcgattagctgtaatataaccatgtacatctcatactctcggctcggtcgtctttcaatatgtaacaaaatatactacttagtaattggataaataatatttaattcaaatgttgaaattaaataaagatatatagtgaaaaaaaagacaaaa

SEQ ID NO: 1071 - DNA, 1700 bp, Cannabis sativa
cactttagaaaaacgacatctactcgtggaaaaagaacgacaatattcttgaaaacgatacaactttacaaaaacgacataaaaaaagtaaactttcttaaaaacgacaatattcttgaaaacgacaccactttagaaaaacgacatctacttgtgaaaaaaaaaggtcaactttcttaaaaacgacaatattcttgaaaacgataccactttagaaaaacgacatcaaaaaagtaaactttcttaaaaacgacaatattcttgaaaacgacaccactttagaaaaacgacatctattcgtgaaaaaagaacgacaatattcttgaaaacgacacaactttagaaaaacgacataaaaaaagtaaactttcttaaaaacgacaatattcttgaaaacgacaccactttataaaaacgacatctacttgtgaaaaaaaaggtaaactttcttaaaaacgacaatattcttgaaaacgacacaacttcagaaaaacgacatctctaactcgtgagggaaaaaaaaaatctgacacaatgaggtgaagttaacatttctctctatcaacacaaaacaacactgtgaaatcagaagaccaaactccgattcttcttcctcgattcgatctccgatctcatcgatacggcgtagtttaagagattaattgcttcattagccagaattctgatcggccatggctccgccggcacagtctcaacgatctgcttcgccgtctcaaccttcagggtcagtacaacttttactctcttaaaaccctaacacattgaactgttcttgtggttttagtatttttcttcttcggtttttctcggatgccaaacagtagggtaactacatgcttagattttctaattgcgaatatatatagattcagttgaaatgaagtgatgatcaagaattatttgaatttaatttgatgtattttgtatttcttttctactttcggcatccgagctcaacttaattcatactcattgatgatactttgtatggaagaattcggttttgattgtaagaacacgaagattaactcaaaatttacttctcaattaggaaaagcgaagtttccgaccttaaatcacagcttcggcagctagctggtagtcgagctcctggagttgatgattcgaagcgtgagctattcaagaaggttatatcttacatgacaattggcattgatgtctcttctctttttggagagatggtgatgtgctcggctgcatcagatattgtgctaaagaaaatgtgttatctatatgttggtaattatgccaaggtcaatcctgatcttgcacttttgacgatcaattttcttcaaagagattgtaaggatgaagatcctatgattcgcggactcgctttgaggagtttgtgttcactgcgagtggcgaatttggtggagtatctggtcgggccattgggatctggtttgaaggatggtaatagttatgtcaggatgattgcagtcacgggggttctgaaattgtattatatctcggcctcaacctgtattgatgcagattttccatcggttcttaagcatttgttgcttaatgatccggatactcaggtggggatatcttgcttaagtggttatttctgtaccttgctaaccaatctttcgagaagaatggatgctctatttagtaggattaattggtgaaaaagaatcatgtatatt

SEQ ID NO: 1072 - DNA, 3934 bp, Cannabis sativa
ttttttttttttcattttaaaattttttaggtgagaatcaaaattttataaataaaaaaaaaatctttaaacgtcaatttagatcttgcaacctggaccccgacccgatccgaaccttgacctagattggtacaccgaacacgaatccctacccctacctcgaccctaaccctatatcaagtgagcattatttaaaacacaaggtaccaaatattttttttttcacaaaaatacaaaatactaaatgagtatatttccttaaaaaaataagttactttatgcaactttatgaaaaatatgtataatttttaaaataatttacttatattgactaataaaattgtgccacatgtataatgtaaatctaatgacaattaaccgtcaaaattagatagaaataataaactcttaacaaaatataaattttagagattttgtaatcgaaaaatcaattttgagattagttgcaagagtaataaaattttaagagattttaccgcattttagttaaaaaattataattaaaaaatgtttaaataaagtataaaaataactttaaattttaaattttaattttagaaaatcgaaactttataattttgatttctgatttttttttttttaattaaaagcacaaaaaatcttgttcccaaaacttaaaaaactacataaaatacaaaagaaataataataaaataaaatattgcatgttgtatttctattggtcgactcatttcctctaccgtgcaccttccttcattataaattccattatttgccatctattctttctgatgtcgaaggaaaaagctcagacctagaaaccatccatattcgatctccgcactcttccccaacctcatctctcccatattcactcatctttttcccttactctaaccctaatatccacactccatcaccagatctgctccctacttactccccacactgtttactttcttctcttttgtattctgcgaaggtccgctcctcactctaggtaccattgttcgttcgatttaccttttttgtatttttttgccctccccaacggagaattgtggttcgtatttggctttgtttttcactgtaatcagggatttatgtacgcggaatatgaatttccttgatggttgagacttcggttgtagtaagaaatagtttaaatgctctcatttctatattactcggttgtaatcagggatttatggggcggggtttataggaaatgttagatttagggtttattaacttcgccattttgatttaatcgaaattctgatagtttgataccaataccagtagtctagtttctgatttgacgtcacaattcagctttgcgtagattgaaatcaactgtgctcttttgttattgaaaatacttgtattttatacattcatggtgtttgtatcgactttgcctaaatcgaaacagcttcatttcttctaagaagagtggtttgttatgcttatgcgttttttttttaatttatttgcttgtaaattatatgaattctattttgtcactcgaaaagccataacgtttgaatatcttctctgcaactccatcctctatataaatatttatagccagaaactacccagtaagttcccttttatgtgcattcaattgatgcgatacaatgtactttctgcatagttgaatcttagagtttatacagttataaatctaagcgtgaatatatgtttctgtatttcggaatgaatatacatcgcatactcattcattgtcttcaagtactgaatttatatagttattgaatatcttgcagaatttgggtatattattcttaaacagacgctttttttacttctgttttttatattttatttagctgtttttcttacaattatggtgtcttttcttttattatgtttgtaggttgaaaattttatagattgaagtttcaaatcgttctctgacttttttgactctcaatacagagcaaggactgttcatgacattttaatgctcatgcaatgtcgggtctactaaatgtaatattcgttgtctatgtatttatttaatttaacaagttttgctcatggctagtcatcgcttctgacatgtcatgaaaaattgacaatatattgcattacatgtcaaatgtcaatgaatggtcatatgcatttgttttggacttgctatgtgttgatgagtgagtttctgttcacagtcctctttgaatggatcaacaacaaatcttcaagatagcactggacgatcttttgcaacatctttctcgagtcagtctggtgctggatcccctggttttcatcacactggtgggtataagctgcttgagttcaacgttttgtccgttcaaaatttatgaagttcaatgtttttttcttggcaggaaatatgccggggctacataacatccatggcagctttaatgttcctaccatgccaggtgcactaacatcaagaaattcaacaatgaataatgttccttctggtggggttcaacaacctactggaagtctctctagtggacgatttacatcaaatagtcttcctggtggtatccctcaggtacctgtttcttcatttaatgtaattgcagatttttgctattatctttatttatttattaaaatattatcagcattgacattcttcgtttttttcttctgtttttcgtgcttgtgtacttgaccttaatattttgccctttgttcccccagttacaacacggtagctctcatggtcattcaggggtctcaaataggggaggtataagtgttgtaaaccctggattcagtagtagcacaaatggagttggtggttctattccgggcattctcccgacctctgctgcaattggtaatcggaatgctgttcaacaattgggtgtatcaccaattttaggaaatgcaggatctcggatttctagttctatggggaacatggttggtgggggaaacattggaagaagtattagctctggtggagggatatcggttcctggtcttgcttctcgacttaatctaggtgctaatagtggatctggaagtctaagtgtacaaggccaaagtagattgatgagcggtgttcttccacaaggtatgttgctttgaattgctagccatgatgtactgaagtgttaagtgagatctctcatgctggtagaacttgctataccgtgctgttttcattttctcatgtcacagaaatatgaatgtcagtgtttaagaccatttatgtcactatgcttcctgtatatgttttgtcaattgatgacttataaatgcgatgtctgttcttcctataatttctccttgcatttgctctttatgcaactactttgaaagaattagcgaaggtcaaaattgtataactattctgtttgcatttactatcatttggaagagttattgtggtgactgacagtacttttgtattgtaatggttcttcctttcccttgaattgattataatttctttcccgcaattcctattttacttggtttagatatctgtagttgcagttctgtgagaaattggataatagcatttttcattccagtggttgtatactatgaaaatttgtgtatagggtaactatgttattttgtattttgttaatttaagtagtttctaagttcgaaatagattgtttttttttaaagtaaataaaatcaaattgatttgaatttttatgatgaggatgaggtgagcattaatgtgtcactgttttttcccatatggccatagtgtgttatgggtcttaacaaagaaggcaccttattcgcaagtcatgtagttaacaatagatttatcataatcactttaactagatgccatttttattccttaacatggattttatgcagtaagtaaatagatttgtaaaaaatgagtgataagtgccaaatttgactgtcttaataattttaggtatgc

SEQ ID NO: 1073 - DNA, 2969 bp, Cannabis sativa
tgaaataaggaggcataaatggaactaccttgtccttgcaaatgttcatattgttagcttatcataatttaccggaatttgtatagagtaattgatgcctattgaaagtggccttattattaatggtgtctacattgtttaagatttatctcagaaatgtgtcttactaaccaggtcaagcttcacttggaggggaatggtattgaaatacgggaatacagtgatgtaagttcagatgtcaaattgcttgcatctaataatctcaaacatgttgacatcaagacagtaggtaatggcacatctgaagcagaagagaatgattatgagcttgtatgggcagaccctagtacatgctgttatgctttgtacacaaaattgaactttgagaacgccctcttgaaaccatcaccattggcacttgcaaaagctttaaaggtgacatttttagtttctttatgatttgcattgcttggagacatttatgttttccaagtgtttcgttaactgactgatcaatacttgtgtgttcttcttgtatgattaactttggctttcacaattgactggtcaaaattttagaacccaatcgagttggaaggattaaaaaaggcacatattcgagatggtgcagctgttgtgcagtatcttgtctggttggataaggaggtacttcatgaaacttacatgtagacagcttctgaatgttcctttattattctttcttttagatgatttagtttattagccgatgcaactataacaaagggctcacactgaagctactctacgtaactttcagatgcaggacaattatggcgcttctggttacttcttggagaaggagagttcaaagcagaagaataatttgtgagttaatttatcaaggcaatattgaaggctttgttaactgattacttatacgtttctacatattttctctattaatacaatctaaagtttctttaaaaaaagaaagaaagaaaaaaaaacagaaataaaaattaaatagcaaggacaacttaatgttggttacttatcaatgtctttcagagctacgcctcagatcctatagtgataggtagccatgataatgtgatatgctacataggaagctttacctgcatcctatacatgatatgaaaggaacctttctgactgttactagaatattttaaagaagttaacggtctattatataatcttttggtgtgtttcatatgttcaatcattatggcaggggaaccaggaaattgacagaactgactgtaagtgataaactggagagtttccgagcctcaaaagaggtaacctgtagcttcctctacttttcatttaggacaggtgacttggttttgaactattcacaagctgctccagaaataggtgtattctaatatgttgtaggatatatataataagagtaatgattttgacacactcaaattgcacacatcttttttacatgtgtgtgtctagcattactcgtataaatttatatgtatacagtacaattagaaaaagaagtgttgagtaaaaatgatattcattcatgattctatgtttttgcaattgaaattataataaagatagtactacccaaaaacttaaaagtaccatactattttaggaatggactagaattatactttagtttatcttgaagccttgcctcagatatttgttgaaatattaatagcatgccactgcttgaacaaccttgtcattttaatgaattcatcgattttgcagcattttagaggcttaagtttccctactatttcgtctgtgggtccaaatgcagcaatcattcattattcaccacatgaagaaacttgtgccgaattagatccagatagcatctatctttttgattcaggagcacaggttcgtcaattttcattagtactccagtgtatatatgcctggaaatcggtacacttcaattctagtatgccatttaactataaagccttttttgccttttaactgtaatgtcgattgcttttatgaagtatttggatggaacaactgatataacaaggacagtgcattttgggaaaccatcagcacatgaaaaagcatgctatactgctgtaagtactgtttcattttcattctatcatgctttatttaaactttgaaacttgtctgattttgcttcatttctgcaggttctcaagggtcatatagcacttggaaatgctcgatttcctaatggaactaacggtatctcacctgtcctgtttgtttatttttaattactatgaagataaatggaaacatttatgtatcctttgcttacaggtcactcccttgacattcttgctcgagttccgttgtggaagtacggtcttgattataggcatggtactggtcatggaattggatcctacttaaatgtccatgaaggtagatgctaactaggagtgtttgcttttcctgaattatccaatagatagtgttacttcagttgattcatgaaaatttatatatttcttgatcatggttgtttttttttttctattgaacaggaccccatttgattagtttcagaccacatgctcgaaatgtgccattacaagcttctatgactgtaacagatggttagtatctcggtgtcattgtctttacttgttgaaccccttaatgcaatcttcaattataacccatgcctagtagttagattttcattgagactcagtagcatctgcaagtgttttttcttttcttctttcaataatgtatataaattatatttttatgtacttaaaactaaatgacacagaacctggttactacgaggatggtaatttcggtataaggttggagaatgttcttataatccacgaagctgatacaaaatttaactttggtgacaagggttacttatcatttgagcatataacatgggtacgttttcgttaatatttttttgaattgttgaatgttaagtttgtcagctaaactgt

SEQ ID NO: 1074 - DNA, 1599 bp, Cannabis sativa
cattgcccaagtggttcgcgaacaagacacagtgttcgcgaaccgatatgttagtactggtgcagcagtcatcacacatgatggtcaagacattgcttttggatcgtacggtccagaatggaagaagcttcgaaaggtgtttgttcgtgagatgtcaagtaataacatgattgataatatgtatgagctaagaaaagcagaggtgaaaaaatctatgaagtacatcttcgaaaggatgaatacccctgttgatatcggaagcttggtgtttcaaactacaatgaacactgtcataagtatgacaattggtgcttcttttagaggagctgatgctgctattgatagtgatgagtttaagaaggcagtggaggaactcattaggatgttggggaaatttaatatctctgatgttttcccagctctcaaatggtttgatatacaaggaattgaaagagatattacaaagattacacatatgtttgaaggcatgtatgataaagccattgataaacgaaagaactctttgaaagaagggaaatccatggggaaggactttttacagtttcttatggagcttcatgaggaaaaagatagtgaaactcctattagcatgactgaaatcaaagccttgcttacggtatctacatacactctcatctcttttctttattgtcactattattcatttttttctttatgtgctataatgactcatacatatgttgtgttaaatataggacactttcttggctgtaacggatactactacgaccacagtggaatggggaatggcagagattctaaataagccagaagtattgaaaaaaattcaagaagaactgaaacaagttgtgggactaaacaacaacgtagaagagtctcacttacccaaactaacctatttgtatgctgttcttaaggagactttacgtttacatccaccagtgccatttttaataccacgtaagccaagcaaaactactgttgttggtggttataccataccaaaaggaacaaccatttatctaaacatttggtcaatgcaaagagatcctaatgtttgggaaaatgcttcggagttcttacctgagaggttcttggctgatcaaagcaaaggagatattgattatagcttttctggtaaaaatttcaagtatcttccatttggatctgggagaagaatgtgtgctggaatttccttaggggagaggatgttgatgcatatgttagcttctttcttgcattgttttgattggaaaatgcctattggtactaaggttgagctttcagacaggtttgggattattcttaagaagaggaactctttaattgccattccaacaccaagactttctgattttgacctatacactactactactagtacttgaaaacgtttgagcatgataactgtactgtactacttttttttttatatatgtaataataaggtctaatagccgtcaatattgtaatgtactatcttgcatcgcaataaataatactaaaaattatattctcttgcttaacattatttctatttattataaattttctctcttacaaatagtgtaatagattatatgtgatgttggttgt

SEQ ID NO: 1075 - DNA, 1182 bp, Cannabis sativa
atatgatatgatcacattatatagtgaatattatttattaactcaattttaatttcttccctcccacacagcccaactttattgactattatttaaatagtacagatagtgacaatacatatatacacacaataaattttatatttttatccatattgaagtaaaatgaaagtgacccacaacttgtgttgtggtgtcatttttttatatggaagttacactgtcacaaaatggtccaattggccatgttacaatatatgattggattgaattgtaagaaaaatcaggatccaatctaatcagctgtagagtaacctgaggtgttaatttcttaattacatcgagtttaataaaatcaattcattaaaagtgtcattatatagagatattaaataacaaagctttccgtgtaaacttaaggatgattattatggagttcggatttaatccgaatttaatgtcattttttataataagatttggaaatcaataatttgataagggaaaataataagatataagaagatagaatataatattgtttgacattttataaagttatattacaataattacaagtaatgtggctcacgcataagttaattaatttttaatatcatttattttttgcttagcttttgtttgtctggctaatattattatattatatatctatgcactatgcacatatataataataagaataatatatctataaatatatatttattgacaaaagggacaagttgaagagggttaagatgcatgttaacatgcatgattctttgatgaaaagaaacatatataaattatttaaattaaatatattatatttatataatatatggtgacacccaaaagcacatggatttgagatgtgaaatatatgtgagaaaaacaagggatacaataaattaaaaatatcaattataataaattagggaattaattaaggacttcgataagaatgaggcaagtgattattaatgtattatatattaattaaaaaaacaaattaaataaaccaattagagtaaagcatcgcaattctttattctaaattctaatcttatatactaattgcgaatgtcgagtttacggccatgaagtaagcaaagattttagagttttattttttatgtacataattccacaaccattgattgatttatttgtttttat

SEQ ID NO: 1076 - DNA, 1995 bp, Cannabis sativa
tatcttcgtgatataacgaaaagtaacaagttctctattatttctctcattgttaaaaatctaggaatcgcgcaaaagatgtgtatcaaattttatttttgtaaagggtttgtgcttgtaacaatatgaagaaaaagaaactggaaacaaaaaatttaagttagcagagcaaaacagtatacactgaattctaatatatgaagcttcaaggacaaggtgcgtgctagcctacaaataaataagaatatgaagctgaatggcaatgtggctattggctcgagactttgataaagtaacagatggccacttgtatacacctgccagaaataatcaagggagcactttaggaaacttagcctcatcaatacagaacaataaatctgaacaagttatgttacaaatacaaagggttcactccaaacgaatctaaatacgtgaaactgcaatcgaccaataaggtaagtctataagtcataaccatacaataactccactcacaatgaagactaagaaaaggtataagaaaatgtactacggaccaccaaaacagctgaattatctgatttttcttttcctcatgactgaagactcaaaagatacatgcactggtatgtgttctctataagtctggaatattacctttttaatggttcaagctttgtattcgctgacacgcatccatttagtacttgaccacttatttcccttaattacggggcatccacctgaatcgatcaagagaaacaatacatcgttagtaaatatataaatccaaatcaagtaatctttttccaaatgacaatattttttttttcatgcaatgcacacttagggaacttccatttctttcaatggtgaagtcattactacgatttcaagatgctttgattatttttcaaacgaagtaaaatataaaaatactaaccatgtaaactggatggatctagcgtggcatcaggcttcatactccaaaaaagcaatgcatcacccatcttaggtttaacagaaagtcccttttttccacaatcagatagttcgttccaccaaggtacagaactaaaattcccttttgcagcagggaacactgtttcacccccttcttcgacatctgtgctgcaacacatcagaagaggaacatcagagaaggtacaaaactacgcaatgtatgtcatagactatacaatcagattcaagtagtgggaaaaaacattagtcacttacaggtacataagaagtgtggccatacgctgacctccatttacagtgttaaaatcatcaagaaagtagtcgtagtgaggctcgtatttctgtccaacttcatagtggagaatttgaagtccttccccatgttctgtagataatgttattggttaaataacaaacggtaacttgtatcacaaacctaagataggataataagagcagagtacatgatgagagaacaaaaaaaagagcaaagatgattgatggcatacctacggggataaaggtgaaatcagcaattcttttctcaatagtcctaatagttttatcacgtcctctggccaggaatgtgccagagcttgttcgtaccctgcatataaatgagatgttaatcaaacatatcatgagacctaaggggatcaaaaagggaaagcaaaagaaaaaggaacagcagcagaaacacagacagttgaaaaaggaattgccgtaagaaacacagacctgctatctctgctctttccagtttcactatcaacaacagtcgattttttcatgttaggcttggcaagattgattagatattcacattcctccttggtctgccgtagcaaaaaccaattcatatgtaagtatgtctacattaatcaaaggtgatgataaaagacaatataaaagtcagttgatgcattaatcaattctagtttttgatgccttgattcactcttaacacccttaaaaacctttcttgaacccaggtcacaaaagtcagttgtatacttgacagatgcattt

SEQ ID NO: 1077 - DNA, 2320 bp, Cannabis sativa
tattattggtgctttcattgatttggattcaccatgaagaatgaggaaatcgccggactgctacaggtattggagctcaacttcaaacagcattccgatgctcaatttcagaagttttcagctctgttggatcagcacgtatcgaagacggaggagcgactagctcagatgccctctcctacttcgggtgaatcggagggtaacatgagtggggaacgggacactggccgatcgggaaacagacgttcggaggcgatggatgacaatagagaactgaattctttactcaaaacattgagggtgaaggtacccaggtttgatggagctaatgtagaggattgggtgtacaaaatcaacaagttctttgacttgcataaggtgggggatgatatgcgactggcaatggtggcttttcatttggagggaacgccatcgacttggttccaatggatggaaaaagggggtgcaattgcggattggtcttcttttttgagagcattacaacagcgttttgggacatcaatctatgatgatcctttgggaaggatttctaagttaactcagacgggtcgagtctcggattatcgagccgaattcaaagcactgatgccaagaattacaggtgtgtcggaatcaatgtttctgaatttttttgtgtggggattgaagatggaaattcggagggaatcattgttgttgaaaccagtagatttaagcgatgctatggcgaaagctcaattgtttaaagatcggaatgaagatcttagtggccgacgtcgaggggattcatctcgcactccatggtacactaaaaccccaacatcctcagctgctacggccaacagtcctacggggtcatataaatcaggtacttctcaacaaaccactcccactgctagcatcgctccattaccaattaagaaactctctccagccgaactcaaggatcggagagacaagggcctctgttttacttgtgatgagaagttcacaaatgtaagaatcgaatgcttgtactatgtgcctcggaggaagacgatacgaatatggctatggaacacacggggtctgagttggaggatagtacagaagatgaaatcagtttgaactctctgtccaacccattgaatccacgcatcttcagaatcatggcacaacacggacccgagcagctggaagttttaattgatacgggtagcaacaacaactttatccaagaatctttggtgactcaattacaattgcaatgtgaggacacaaaacgttttaaagtctatatgggtagtggccattttttgttgtgttgaaaactatgccgaggggtggaattattgttgcagggacatcgatttgtggtggatttatacgtgctacccatttgtggcttggatgtggtattagggatgcaatggttacaaactctaggtccttgtattcatgaccacaaggctctcactatggaattctcatgggaaggaagtgtggttaaacttgctggtgctaaggatgtcaaagcacaccaactatccttttctcaaatgcacacattgatccaagaaggagatgtgcgggactgttatcgactttgtgcaactatcacagaacaagacttgaataccaaaacgctcaccacagaacaagagatcttgccaaaagaaggggccgagctattgacggagtttcaagatatttttgccgaacccaaaagtcttccaccacactgcaacatggatcacaaattttttttacaaccagggacacaacccattaatgtgcgaccctatcgatatccttatttccaaaaggatataattgagcagctcatgcacgaaatgaaggaacatggttttgtaagaactagtaccagtccctattcttcacctgttctattggtcaagaaaaaggatggtacatggaggttttgtgtggattatagggctctcaacggtattaccatcaaggatcgttttcccattccgacaatagacgaactattagacgaattgggtcaagctcaagtgttctctaaacttgatcttcgggctggttatcaccaaattagaatggatccaagggacatccataagaccacttttcgcacccacgagggacattacgagttcgttgttatgccgtttggactcacaaacgccccctcaacatttcaagcgacaatgaaccatgttttcagaccattcttaaggcgctttgtcacggtgtttttcgatgacattctagtgtacaaccgctcttgtgaagaccatgtgacacacttgagatcagtgttacaattgttgagaagccataacttttatgccaa

SEQ ID NO: 1078 - DNA, 979 bp, Cannabis sativa
aaaaaaaaaaaaaactatattaaaaataataatttgaaggcaaatgtacaagttgtataggcttgtgagaggttttatttttagttgtaattattctttttctaaaattgaaacaaatagcacacttcatttctgctgtagcacctcaaccatgaagtcttcattggatcaaagcaattcaccggatggtgcagtggaatcttgtgtgaaatcatgtatgtttagtctaaaaaaacaaaaaaaaaaaaaacatagatgctcacaacttgctgggaacaatcacactggactgctttcccctttcgccaagttcagttggcttctgcaacacctcttgtctttcggctataaatttggcaaagcgggaaccttttgcttctttcttgttctccttgtccaccagaagaggcactggcaaggcaggcaaaggaggaaccttcggggatagaggaggcatcaatgcccaaacaaaggaaaggtcctcatttggttgatcaagaatttgtagcagcgaggaatcttgcatgtctgattaaaaggagaaactcatcagcttcaactaatcacaactacacaagaaacagaatcatttttgcaagtagaattaaactttaaataggtcctctctgtctctctctcatcacctatattattgtgaaaacaaacaaaaatatacaaagcgccatttaactgaccaaccttctgagaacttaaagatgggtagtaaggctgaacagggaatgctgaagttcagatgtggaataactgttcctccaccatgccttgcattgctgtatcaagaaaatatcccattaaatatggaatatattatatatagccaacattagtgggattttttgtagataatttttgtcctggtacttggtgtaattctaaaagcatcacaaatgcacaagtatggatttatttgtgttgtcaagatttatatttttaatgcataagtatggaatcgagaacc

SEQ ID NO: 1079 - DNA, 1640 bp, Cannabis sativa
tagttggggtgtttttggtttttactgatacattaaatgattttgatattgaatgctacaggagtttggtttatgcattgtcaccttgacatacaccagtcatggggattaggcacggtgatcattgtgaagaatggtaagggagatcctgagacccttccacatcctcccactgacctgccaagatgctaggatatgcagttaagcattcttgtagtaattaccacttgtttctccttttcatcccaaccaaggattcttttggagcaagttttgatatgttatatccctttgacaaaatgactgtgtgtgtgtgtatacaagatgcaagaaaaagaacaaaaagattggataaaaaactatagacctttttctatcacattttctacccttattttcccaattctctaaattgtattctatagaataacaagcaaaagaaaaaagatcacgaaatgtatgtcctgcaactacgcatataattatttatcagcataaagtggaatacatgcagaattttggtgagtgacgtggagaatagcaaacaccttgcacagcacaagcatatacaaattgttgtgagagtgctcaatcaatcattaaagccatatgcatatacacagcttcataaattggagatctaagaaagaagttctatcacccactagtatagtttgtaaaacgcaattgatgatcatacatatacagaggtacaacattaccttcttatttattcccaatgttggatggtaacacgttgcattgaaatcacaatacagatgttaaggattaattctcccagaagtccagcacttctccccgctgacaccttgtctagatgcaaagcttagcctctggttgctcttcaaattcaagtaatcaacctgcaaatggacatggattaaatcccaggaagttagaactgtgaaaatacaatgacctgttgactgaaaaaattagtctagagaaacctataacctgatctggatctaaaattagcacacaaaatgcattgactgggccgctagaattgtcgagaaaagtttctttagtcggatcttcatctatacttggaagacctggattaggccccaaatactgcagcctagatttaagagaactggaaaaccatgatttctctctttgctgcatcattcagaaaagaaaagacaaatatgtggaaaatttagatagttcaaagggaagttaaaagctgaactagctcagcctttatagccaaatgatcttttgaaatcaaccaatgagaaaaacaaaattagttacactttttcggttttaacatctctaaactttaaaccaataaacacgttccagcattataagggtgttcgttcagctacctgaagttttataggatcaggatttgatccatcaataatgtcaatagctccattgatccggaattgctcccaagagtcagtgaagtaccaacaaatctggaataagaaatttgagtttcaaaactagtgcaaagaaaattaaaccagatgattcctttgtataaaaatcccaccacaaacttagattacctcagcaaatggacaatgcttaagctcctcaatctgcaaataatattcattcatctatcaggtcaactccccaacaatcgaaattccagt

SEQ ID NO: 1080 - DNA, 1192 bp, Cannabis sativa
  modified_base (277)..(291): a, c, t, g, unknown or other
gtttctaataattaagcctccacattgtaaaatttttaaatccctcactacctccacaataagttattattacatatgattttgatgaaaaattactttaagatattattctatgttatttgaaaaaatatatcatttaaattatcatttaataaaataaaaaatctaataaataacttttactacagtcagaattgcaaataatatttaatcattattatttgtatttaactgaataagataagtactttattcagaaataataataataataatnnnnnnnnnnnnnnnaataataataataataatatgtaccataacaacttgctaaagtaaattaacatggacaagatatataaccattaactatagagctagaattaaaacataacggaccattatccttttcttttttgataaagattatactaatatatgtatacaaaatatagaaatatataacaaaaatttaaatttaaattgggcaaacatgaattttttacatatacttgtaataattatttaaaaaaaggtaaatattattttaaactttgtattttgtaaaagttattgacattctattttattaaataactgatcaaatcctgtatatttcaaaatattataaaatagtaccctgaattctttcgtcaaattttttaacataaccaacataaagctaatttcttgcacaaacaaatacaaaaaatgtaatcagtctaggcacttttatgtcatattattattaagttttaatttgataaaaaatgagttttggatattgttttgtatcattataaaaaatacagcattcaacttattattcaacaaaataaagaattcaattaataatttttacaaaatacaaaattcaacacgatatttctttttaaaatatattatgcaagaatatagaataaaaatttagggagttcacgacgcacgacattcaactatgtcattgcccaataatttgtaatttttgttttgtttaaatgatttttccaaaattagattttaggagaaaaaattaaatgtgcttccaaacatttctcaactatttcctaattagttccatagatgaggtaaaagtttctttattataaatatttcttaactatttccttagctaaatgtagctacaaatttaaaagagttttaaaaatattttattgtatttttattacttttt

SEQ ID NO: 1081 - DNA, 555 bp, Cannabis sativa
ttttttttttttttgcaaattgatggaacttctaaagactaagagtggtccatattatttatttttctctttatcatattgggcattattatttaatctactaatgtctaagtagaccatattggtattgaagggatgtatataccttagttgtttaatgattgtgttagagtgagtaggtgatgggaacccactttaattttatgagtaacccatcaatgcatattaaccattaattttatgaggtacaattgtgttctcctattaattgggtgacaatctaattgatgggacaaatgctaagattttatgaacaattaaggtgtcttattcaaataatcaacttgtatgaacttataattctatctaaagagtactttatagacttgacatgcatgcacaacattagttcatatccacttaaatttagtataaaataatgataagcaaacaagataatataatagtaataaaaataattcaatgactaaaatatttaatattttttaaatggtgcagtgagatttaaatggttttcacttgcattttaaataa

SEQ ID NO: 1082 - DNA, 2594 bp, Cannabis sativa
ccagacagagatgtataataacctaataaaaaaccattaaaacattaggatgctatatagaaggcttgaatcttacccaattaagagttgaaaagcacattcctatccgaacacgaggaattgaaatgttggaagtattagtattttcgaaagaaagaagtgaccgaggtaatctcgctacattgtttaagttccatcctgaatctgcaatttcaggaatactagatgtttctgaaggattggatactcctggaaatccactgccgaagaccctaatcgcagaattgtcggaacaaagtacctttggacaatatagaaagacaacaatataaggctaccagataaaacagaagaaaaagctgagggaacttgagatacattaggaacatacctcaatttcttcggttggatcttcaacaatgcgtttatattcactttcaatattctccaatgagggctcccattgtgctttagacacattagaacaatcatttgaatctgtatcttcactcttgcagaaatattgacctttaaaatcatctgcatatctaataaattctttaacagtaagttctggaccagctacagattctaagtgttcattatccgaatccccagcttcatttcttgatattcttctcctcttaatcttcatatcatgagcaaaatcttctgtttttctctctaattttgagtatggagctggaagcccatcaatccgttgaacacgagtaagaaatttattattttcccactcgttattttccttaaataaacatggaggtttccacgatggaggaggaacaatacgacaaatcccgtatggctctgcatcttgacgtatcttttcaatgtactcaaaggtgtcctcgaattcctgcaggagaactccaaagtccaaaccgaagatatttcaaatatttatacatagcacaaataaaaactcaaacttaaaacaaatttcaatttccatgacaagagaaaatgccattatcagagagtttaaaggaccttctcagttgggtgaaatacagcggcctcttcaaaaatgtcgttttcagtttctgcatcagggtgccaccttgcttttacctacttgaagatttcaacaccctttatatacatcaagcaaaagataaaagcactggtgtgatggtgctctaacaagatcaagatcaacttggttggaatgtaaagaaataaacaaagaaatcaaccttgacacaattactacactctggacacccgcgaataacacctttagggaggcaagtttgtgatgagaaatcctgaaggaaaaaaaaaacattaaaagtgtacaagtgaaaattagcatgaagccaaacacaaacatagattaggtaataagtactctcaatccatggccctgttcggtttagcttctataagcatttttttagcttttagaattaaaacagtccttcatcttcaaacggtgtttggataaaacataaaaagtcctttttgagagaagcttagcaactacacatgtgtcttcctactgacttaaattatagtactcatttttctagctaagctaaatccaaggtatcttttcaaaacatatgaccagatattcaacacaatgtaatttccatgacccaccataaacacctctctaaacacattcctcccaaactaatcatgaattaataactttccaacacaaaatcatatgataaaaaaacactagtaaggaattaacctcatcaagcttatcaatgtctgattcctttgacttgtcatttgtttcatcaaagagtatccagggtctaactctcaaagcttctttcagcaaatcattgcctgataaaccaaacatagtgtctttttgtagtgagtcttcttttgattcatccaagcagtccttggaatgatcagattcccataccttcttcagattaaaagatgtaaaaacctcaaatctaggtggaacagaaaaatttgccatagtaaccttccttctcggtttagatgccacacattttttccccattgtgtctgtaacaatacaatgtaggtaaaaacaatcaacaatccattaaagggtatcatctcatattaatagcagagcagaaattaatgagtacaatttcaaattgattaacccaactgcaaattttaattctctctatcaaaaatcatatttttaagaaccaacaactccacaataatgctatacaacaagattctaatctcacaattaagctttgttcgttaacctaatatacaaattaatcgaaatatgcatgaagaataccaaaaaaaaaacagatgagagggaagagtacagaaccggcgaatgggtggccggaggatccaaacaggagcggcggcagagagaggaaatcgagaaatttagggttttttttctatgaaatttgggaaagaaaaagaaaatcttttgaatctctttttggggttttaacaagtgagaaagtgaatgaagaacaagaaagagaagaaagtacaaaaataaattgtactttaaggcaaaagccctaaatttattctcacttttgcaattagatcctccaatattaaattttagcatttgaatcccatctctttta

SEQ ID NO: 1083 - DNA, 8837 bp, Cannabis sativa
tttttttttttttttaatgttattctaatctttttattattttagttttaaaatggaaggaagaccattaaattcaatccaaaaagaaaaaaacttaaataattttttttattaatttgttttatatgtattttaaatttaattttatttcgtttaatttatattattatttactgaataaacttaaagtaatagagattttaatttatttattttatgttgtttcatttttttttttatgaaatttagtgtatattatggcattgataatttgatatactattttttataatataaatatttatttggtattttattaaaaatatatatttagtatcttatcgtttgaataaagatcatttggtatcctttatttgctaaaattacttttagtactcttattgcatttaagattttaatattccaaatctacccacattttaatattaagctgattattatatatcttattatattcatttaataaaaaaattgattgattaattttcatatattaattttaaaatattttgacaaaaaaaaaatcaaaatataaactatatttgaaaaaagtattaattgactttaaaatgaaaaaaaaagtaattaaaatatttattcagaaaaaaactagttaaaatataaacaaaatgaactataaaacaacaaaaatcaacatgtgacaattataatacaactataaataaactataatataataaaaaaataatttattgttcttacaaaaaaaatatttttgtagataaaaaaatcaaaacataaaaatgaaaaaaatttctaatgtatttttataatttttttaaaatttcagcatgtaaatttttctaaaatataattctaaattatataaatcatttaatataattaaattaataaatttaaaatcaatacaatccacaatattgaaataatctacataacttgttcttcattttctacttcttattaatccaaacagttccaagttcaacaatattattatttttataatatttttttttgtaagaactatttctgtaatatttaaatcaaaatcaattaaaatatctaattcatgtgatagagtgcaagcattcaaactaaaaactaataaaaaaatcaaaatcaaataattaaagcattcacaatttttattaactcaattttaactataaacataatctcatatcaacataaaagtatatttcagaatttgattttttttttactaacaaaaaaaaaaaaaatcaaattcaaatgccaaaagccaaaagccaaactcagtatatttaaataatttcaataccattccaaaattcatattcccaaatcaatttaacatcacactcacgaaaaaaatttaaatttcagatttgaacccaagaacaatacctcaagaaaaacacaaatctaaaccctatgtggtgagtgaacacccccgaaaaccccaaatctcgtttgaccttaaaacttagatttggaatctatccagatacacaaccatccttgtcccccgtccctgtcgtcaacaacccaaaacttgggttatccattcaccttcgtcaccgacgcgaataatccaaaagtccacaacaccaaacacaacaaaagctacctctaactagctatcacaaggacgatgatcactcaaacccagattcgacattgtcgatctcttgccatcgctaacatctaccttaccctcaccacaccattgtatcattgaagaaagaagaagaaaaataaaaatcatgaaagcatagaagaaaaaaagtacagaatttatttacggggaattactccgtatattatttttttaactttttagttgcaatagggatttgttgcaatttaggttgcagcactagttgcaataggagtttctaggtaaaattccataaaaatgtcaaaaaaattatttcaaagtgtaaaaataaaaaagttcctttatttatttatataattttatgcttagaaattaatatatgataattaataaataatttttttaattaaataaatatgataagatatataataataaatgatggtagtttgagaataataaagtcttaaatgcattgagtactaaaatgagtagtttttacaaagggaaaatgctcatttagtacttgtgttttcatgaaaaacatatttggtactttctgttttcaataatttttaattggtactttatgtttttaaattgtgtatatttgataccttaaaataaaatttaatcaatacaattttattaatttaactaaatagttctcaattatatgtaatcaaataattatatataaattcagaattcacaaaattttagactattgattgtattgataaaattttatcaaaaaaaagaaagttgaatttagggaaccaaatatttataattttaaaatacatggtactaaataagcattattaaaaacatagggtacaaaacttgtatttacataaaacacaaggcaccaaatatgtagacatccttttacaaatatataagggtatctacatatttgatacttgtgtttatctaaatacaagttaggtaccctgtattttcaataatgcttatttagtactctgtattttaaaatcatacatatttggttcctaaattcaatttttttttcttataaaatgttatcaatataatcaaactgtgtaaaattttataaaatctgaattcaaatttaattatttgattacatataactgataaattgattaaattttagtttagagtaccaaatatgtacaattcaaaaatataaggtactaattaagtattattaaaagtacaggtacgaaatatgttttttttattaaaaggcaaagtactgaataagtatattaacactaattgatattaattattcaaaatataaaatactaaatgtgtattttaacaaaacacaaagtatcaaataggtatttactttttctgtatgatgggtcagcatcacgtattcttcatataaacactacccaccccgtcctttacctattttttatatgatgagttaatgtatatggtatgaagttgctctgtattggcacattttgaaagttgaaatatttggtaactttcactgcttttatgcctttttaatatcatcatcttatcagctaggtttaatattttttataataaaaaatcagcttctttaaacacaagtacaatgacagaacctttggtttgtttcattagttttactgatacaagtttttgtttttgttgttttaggatggaaatgaaatatttagaaatgaaaaagatagttgctacgctgagggcgctagtagaggtcatggaggcgcttagcagagaagcagatcctaggggagctggtggacttatcaaagaagaggtacatgttcttcaaatattttcggatgtgcacagtgcacctacaaatatactgatttgtagttaaatacttgatgtattttgtgtcctctaaattatatttttagacgtggtgtattcatattgtactaaatatttaattctgttatttttggttgtctcttatgtatgttttataatatatatattttttgattgaatgtatctatgttttataatatatatattttttgattgaatgtatctatgttttattaattatttatttattttttttgaaaacaatgtatgtatgttttgtcattaaaataaaaaactcttacgctattttcaaagatatgcggcttttctttcaaaaagaaaaaatatgcggcttaggaaagtatctaattaccattgtaattattgacgcgtttgattgaacttatgaccttttgttcttggggtttcagctgagaagaataaaatcttctgaggcaacattatctcgggagttcgcgccttataatatcgtaccactggaagggccgtcgaggaccaatgccattggaattttcccagaagtatgttgaacttgaattcatattccgaattccttttccttcaatattctgtatttcttttttttttctttggggggatatattctcattgattgcattgtctagcttccatagctcttcaatacgtagaacagtcttccaattaaactcatcacgttcattttgggtaatataatcattgtggtaatttttttatttttttttttgttatttgtttgtaacatgaaatttcatttcgggtaattttatcaggtcagaggcgcaatatctgctattagatatagtgaacactttcctagacttccagatgattacgtgataattggcgaccgagacgctgacatgtttgatcttctggaagttgtgtttggatttcaggttcgtatatgtacttttagtttcttacatctactccttatatctttctgacatggaagataagtataacaaaggacaatgtagtggatgtagattttgtttactatctaccctgtatatttataatgtttatgtttcttctatattagaactgtagattatgtttttgattgagtagtagaacagagttctccaacaatgaattctggtactcatctgattattttattagttaaaacattgaatgacggaatgaccgcattttacagaaattccttatgctcgtcttaaattggacatccacatcttctaagcctttggttaaaaggaatgaaaatataagaatgggaatgagaatggaaattgtagcaggaatagaatagaataaaatttaaactgcataaaaaaattattaattttttcaaatcttgcattagaatggtctttccttccatttcaaaatagaataatcattctacaaaaataatggaaagaccattctattagaatgatattccaatagttttaaatgcaactaaacaaaagaatggaataaaaattattttctttccattccattttatttcattacctccaaccaaacgctactttaatgtcattagatatttgaagtgttttcaaaattttgctttatttttactaccacctttaaattgtgtgatctgaaacatttttaattcctaaaactgacaatgttcatctttgaatatatatgtatatatatatgtatatattttgaataattcagatatgtgtattgcacttcaaacaacaatttacatcctatacatcaccaaataaagttaggcctgtaaacttctctattacaaattcccaaatcaccttttttggcatcacacttctaattctattctttacatcttgctgtatttttttttttttgtcacaaatatagctgtatataacctttgattccacacaacttcgaattcatgtcgacaagcccacaagtgatataccactgctgcaaagtcataaccaccacctgctttccaaatttagatagctttgccctagctattctcctcaagagtgttggtaatatagcagccgtcactctccagccaagccactgttttatgatcagtaaacaatgtctactaacatgacaatcaaaaaataagtggcctcttgtctctttttccaacccacacattgcacatttatcatcttgagctatattaagcacatgcaatttatcaagcaccgacaaccatagaataaatctatgtttcggaattgttaatctcttccacacttccctgtaccaaaagactttcggttgagtagagcaaacgagagtgtagccatcacttattttgtaattcccccagatgaagttttgcaccatattaagttgcttgtaggcttctttcactcggaccacttgacgtcaataccaactacttgtacttgggaccttgtaggcccaccaattctcgattcctatatagactgtgtgaacccatcgaacccaaaaagtatcttgctttgtctgccactgctgatacatatttcccaatggctgcttcattccacatggtaatcttctaaagcccattcctccttcactcttagaacgacacatatcttcccaggccacttgactcgagctattggagtccaccaaacctttccataagcagtttctacatatagcgttcactctatgaagaactttcttacgaatgatcaaaatttgtgcccgaaaagagtgaatagtcaagagcaccgaattcactaacgttgctcttccggcataggatagattcctagaactccaagttcggatcctttgaaccatcctttctataatcacctcacatttcatagctgaaatacgcttagcgtaaatagggattcccaaatatttaaaaggaagggaactcctcttaaagccaaatacttggatcaccctttgtacctcatcttcattcatgttactacagtatattgaggatttttcctcacttggcagcagccaggaagtttgacaaaacctctttagtccttggagcaaccgataaatttacttgaaatctccatgacaaaaaagtaaaacattatctgcaaaacacaaattattcaacttaagcttttcacacttgtcatgaaatcgaaagtcctccttcaagccaattctcatcagtattctcgatagatactccatccctaacacaaatagtagaggtgacatggagtttacttgtctcaatcctcttttagcttcaaaaaagtcatgcaaggagccattggacattaaactaaatcttgaagttcttagacaagtcatgaccaaccaaatgaagtcttctgggaaactcaaagcatgcaatatctcttcgataaagtcccattctatggtcttacaagcattccccaaatctagtttgatcatacattgaggcttggcctttcttctcccataatgtcgaactaaatcttgacacaccattatattgtagccaatgtacttaccttgtacaaatccacgctggttttggagtatgatatctggaagaacatttcgtagtcttgaacaaattagctttgttgcattttcataaataactttgaataagctatcggtctgaaatccatcactgaaattgggcatttaatctttggaatcaaagtcaaggtagttgagttaatttcttttagaagcttacctgaatgtaggaaagacttcatcttcgaattttattatgatatacttgtacctttgtttgattacctctgtaaactaggattcctctgtcatgttttatgttaagtgttgatttctttctcttctccttgtttcctcgcccagaaagacaatatcaggaaccagagagagaatgttgttctgtccattgcaaatgcacagacacgacttgaagtacctagcgaggctgatccagtgagttcttttcatcctctaaccatgccatattttcaagggtcatttctgctattattgactgaatttgctaagcttagggcaatcagatttatgtgcaatttattttctttgtagtactcattgtaaactgtaatcattataatctagataatttattgagaatacatattctatatctatttttaataatgttggttgttattgattacttctaattttctattctactgtaaattaaaagaaccacattgttatatcatatgcagtaagcttcacagcggcaagaaatttaggatgtttctctttcattaattactctagctggaaaacacactttgtttagtttcttatttttggtttaatttgtatttttatattttatattctcgtggacaccttatctccccttgtttcgttttttgatgattagtataagttttgtttagtattaatagagaaaggaaaaaagtgacatatttcaactactgaagttggttttgttgcactttctgagttccagctgcttcctacacaagttccagtttatatttagtattaaaatcgtaattttttttgtagaatcttcagaatgtcgtacttgacattgtaaggtactaaggttccaggaagaaaatttggtgggttcagtcttgtgttaacagctggtacattaattttgttggtctaagttattgagcagatggtatcttatttgattagcaatataggtagttgacaagttagttatagatgtaagttgctgttatttcttattgtttactttcttccctgttaagttggttcttcattttctgttgtgcttgttaactctgctctctatacgagttccttgctaagctttgtagcttcttacaaagacttagaagttctcattcattattgtgttactttcatagactttgtattgataaatctcttcactattgcatgcgaagggagccccaaaaaagatcactttggtctcataacctttttgtacaattcttgtttcaatttcatgctgaagtatatatctcgtgatcatgcaatgtttgctgtacagattcacaaagacagtgattggcagaacctgtgtggtgattttaacttccttaaaaaatgtttctatgtttcagaaaatagatgagaaagcaatcgatgaggtattcttgaagctactggataattatatcaaatggtgcaaatatttgcgtacacgcattgcgtggtttaggtctcttttacaacctgtttctttttcttaaatttcttgcttcagattttactcttcttatttcattgttttttacatacagtttagaagcgatcaatagagacaggaaacttttacttgtttcactgtactttttgatatggggggaagctgcaaatgtccgtttccttcctgaatgcatttgttatatattccacaatgtaagtctccagctttatcagtgaaattcattgtagtgtttttctgataacttaattagtctcattttctataactgttgttgttaagtgggatagttattacgaaaaagaaaagaaaacattttattgatct

SEQ ID NO: 1084 - DNA, 3531 bp, Cannabis sativa
tgctgaaccgctcttccgatctgagtataatcaagatgcaaataagggatcgggaatacaccaacttcaaaacatataaggggtgtactattacaagctaatgtcgttcagattaaagaatgtagatgccacttataaacgattggtaaacaagatgttaaaggagaaacttgggagaaatacgaaggtgtacatggatgacatgctcataaaatccaaaactttcacaaagcacaatgataatctcgaggaggccttcacaatcatctagaagtatggaaagaaacttaacccagaaaaatgcacattcagagtctcatccgagaagtatctaggttttatagttagttgctaagggattgaagctaattcagagaagattaaagctttcatcgagattccttctcccaaaaagcataaatacatgcaaagcgtaacaggaaggatcacaacccttagtcaattaatctcaaagtctacaaacaagtgcatcccattttcaatattttgtgcaaaaacaagaaatttgaatggactaatgaatatgaggtatctttccaaagttaaaggagcacttgactaaagctcttatcctatcaaaaccagtggaaggagaagcgttgtaccgttatttggtagtgtcttatttttccataagtatcgccttagtgcaggaagaagaaacggtccagtttctgatatattaaagattgctaggtgcagaatcctggtatccaatgatacagaaattgacctttttctggttaattgcctctagaaagctgagaccttactttcaagctcatgccattaagttattgaccaatcatcctctctaccaattgcttcaaaaactggactcatgcagaaggctattaaaatggggtatagagcttagccaattcagtatccaatatcaatcccaggtgtcaatcaaggagcaggacctagctgattgcatattggaatgttctggaataaacaacctctcgaacgagccagtcgtagaactactagcctagaaagtctacgctgatggtgtgtcaagtgaaaagggagccaaagtaggaattgtactactttccccgcaaggacatcagctccaaagttccctccgctttggatttccatcttctaataatgaagcagaacatgaagccatgctagctagattacaattagctaaggaagtaggagcccatagtgttgaagtgtacactgattcccaactcgtagtgagctagctatccaaagaatagcaagctaaaggtgaaaagatggatgcctatgtaacacagccttggtagctactttaagggtttaagagctacaacatttaccatgtcctgaaggatcaaaactcatttgcggacctgttggccaaacttgcaacaaacttggagatcatgaaatatggagtagtggcagtaggccatataaaggctccaagtattgaaacaatggggttaatgccattgttaatcactcaaattcgaggataggccccatctattagttaagttttggagagcttctgggtaacaaagctgcttcaaggaaaattcagtattaagctcccaaatatgtgattttagatgggaaactttaccacagggggttgtttgtaccatacttgtggtacatagccagaaccgagataagtgtaatcatccacgaggttaacagaggtttctatggacaccacaattctagacgaagcattgccaagagaattcttcgtcaggggtacttttggctgatggtgaagaaagagtgtgtagaagatgtccgaaaatgtgaacaatgtcggaggtacggcaaggttcttcgtgcgtcaccaactaagatcactctcataagcagttcctggcattttgaaatttggggaattgacctagtgggatcactaccgacaagaaattaaggagtaaaatatgcaatagtcgatgtcgatacttccccaaatgggtaaaagctgaacctatgaatacaattacctccaaaaaggccttggattttgctattaagaatgtagtgtgttgcttcagacttccagacaagattgtctctcataactagaagtagtttgatagtgtacacttcaccaacttctgtgctcaacatggaatcatcaaaagcttctcagctgtggcatgaccacaagctaacggacaggtaaaagttgtaaataagatttcaaaaacatcgttgaagaagaaactttaagcttgtaaagcccactggcaagaggagcttcctaaagtcttttgagcatatataacaacggaaataacttcaatagtgcacacaccatattcgatggcttatagatgtgaagaaatcataccaatagaaactacaatttcttcgcatagacgagaaacttacgatcaaacttagaactatgctctactccaagaatctttagatttagccaaagagctttgggaaccatcacacatctaattaaaaatgtaccaaagcaagatttaccaacactttaatgctaaagtgaagagctgtacatttgaagctggagacctagtcttgcaaagagtattcccagcttctcaggaattgggattgggagtcatatgaccaaactgggagggaacctatgaaatccaccataaggtggggaacagagtttattagttaagagaatgtatggatcaaatcccatgcgcaaggaatgcgaatcatttatgccgctattattagttggttggggtgcccgaattaagatattaccattatgaaaaaatgtaattttattttctttcttcttggtgtatggctgatggcaaaataaaatggaaatagaagaaatttgaaaattaatacatttttattttggcttcaatctacattttaaataagtgaccatgaatttagagacgtccaaaataccaaactcacatagggagtagtatatctagctatgtacatcttaatttttttgaatatttctagaaatctaggaaagagaacgctgtcggaaatttgatgcgtttttagtcttttatgaatctgttgcatacttagcttgttcccttagcagttctgattgatttttggttgtaaaaagaaaatagtacttgaccttcaatgcattttttaatttttgtttcctgataagaaatatcacctaaaacacgttgtattgtcagcttgtttttctatcacaaacaaattcaatcttttacaatttttatagaaaaattggagtatgaacccttgcctaaaatctctcacagttttagctgctccttcatcacattttggcaattcagccttgatgatcaaaattacaagaggaaaatgtcacctaaactttagcgtcttcaaccttatttcttgataagaaatgtcgcttgaagtccattgcactttcaacacttttttccttgaaataacgaaccttcccaaagtaattggattgatattatatttcatctaagaaaaataaaactatgtctagaacatggaaacctatacttggtgagaaacctactttaataatgcatgaaa

SEQ ID NO: 1085 - DNA, 1583 bp, Cannabis sativa
aactcagatatgaatggctccaattattacctgaggcagcatttagttttttcttcctcttcccatgcaacagctctggattcgggaccatttttttggcagccactgacgttgtcaatctcaaaatgcctaaggctctttgatatctcctcctcctcttcttgcctagaactccaattggaagtaacggaatcataatgtgtgccaagttgaagcttggctaaatggcactcctgcaactgagcaatgtcaatggtgctgctggtgctgttagagtgctccaaacccaatggtccagacctatccgctggcgtgttgtgccgcgcaggggatgagatcacgaaaggtgtgtggcaccttgatgttgttgagcttccaagaggagtcatttctgtcccaacatctctgtgttgaaccatttctgtgcctgtgcttttcatggtttcacatgctgagtttttgaataggaatccttctttacttgactctgaggttctgaacttgggcaatactggttctacatcgtccgtgaacttgtctgcatcaaccattttgataagaaatttggccgaaacaaatctaattcatatgctataatcagctgaaaattgaaactatgcaatccccaatttagaagtataatttataataaaattaccttgtttttaccaatagttttactaagttagcaatgattcttattgcagcatagaaaacaacttctcttgttcatttcttggttgaattgttgaaagaaacaaaagaaacatgttcatattggtttggcaaatctcatcttaaataaactaaaaacgcatatcttaaacaattgaacagtgtgaaaaagtcaagtgctttattatgttttttagtaagtatatagagaaaagaaaagactgtaactaaagatgaaagtggcacaaaaagggaagaaccatccaagagaagaaaaggcaaaagttgtaaactttccacttcaaatttaaaaatggaagattaccttttagaaagacattatcagttgaacatgataccccatcgaaagctctgacagagttatgattatccaaagacacagagcagtggaagctcgagaattctttttttgagactttttcttctgtgacccttgatttatcagaaaagacctcgacttgttgctgcttatagttatagtcacttggcttggctgttctaacagaatctgggggctttatagtatgagcaggggattcatgacaagagctacttatgagccatttttctgcatcatcccacttcgaaggaaaactttttcttgaaagatttccagcactgaagctaaaaacaggtcttcctggtgtaggaggagcttcgaatcttctctgggtaacaactgagttgactcctactacctctgttctcctctgagttgaactctcacgaaaaaccctgttgctttccgttccaccatgtggcaaaggaaaggacttgacaaactcagaggtttctttaagattaagcttgcaaagtgggtcggggaaggtttctacaaaagggttgctcttggttctcccataaaagcttgcattggtctccaatgg

SEQ ID NO: 1086 - DNA, 3097 bp, Cannabis sativa
aagttttacgaaaccaccaatggagttcgagttaaaacttggcaggtgcgtatacatataagtgaaaataattgtgtgtattcagtatatgtacctatctttctataataacataaaaaaacaaacaataattttttttatgtaaacactaatgcagggaggtaaaggagaggccaggaatataaaatttcaagacatagaactgcataatgtgcagaacccaattataatcgatcaaaattattgtgatcgtcgtagaatggtctgcaaacaagaggtgcgtaataaacaacatagtaaatttgtgacatatatttgatcttaattataataaatgtgtatttgtgtgaatatatataggaatctacggttcaagtgagtgatgtgttgtaccaaaacattaaaggtacaagtgccactcaagtggccataatgttcgactgtagtgagagtcatgaatgtgaaagaattatattacaagatgtcgagctacaactacaccaacatagagcacatgctgaagctttgtgcaacaatgtggacctcactcatattggacattttactcctctgtgtccaaattaggattattagtcattaatttttttaattcgtttgtatcttagttttcatttggttctttatttttaaacacctgaactaatgggaatattttatgaaactatgcaaaaatgaacttgtgtgagcattattaagaatttgtaaccatttttttttatccctaaactataaaagtatcatatttaagttcatgatcactttcaaatagtgtcattttactgcataaactttggaattttcccaccgaaaaaggaattcacaagtatgattttaggtggtgaatgaaccattaattggaaagagaaaaactgtataactatataaatataaacaaacctgtttataattaactgagttttcttcagttgaagtcgttctccttaggaatagcccacatctctgttttagttgagtaccatttcttttcaaaagcagccttcagttgcaaaagtaataccttttaatgaatgacacacaattaatagcaaaataagtataaactgcaaaacaaatacttaaaaaaagaagaaagtgatacataatttcagctaggctgttaaactaaaaaaggaaatttaaactgaggaaagaaacaaagtcagcttagtagggaattacctggaatgtgacaaaggcattcccatggctgcttttttcaacaatgagtttgttgagctaatttcaaggacattactctctgtatatacataatctcctgttatttattttttcatttttttgaaagattatttgtttagctttttatcattgggatgacaaaaatttccgccgaacgtctgtttatgataacgaaaaactattaatttacagtgcatcgcttatctcaatttaatttgttatactccgtcgaatgtggagaaaatcataatggttttactttggcgtatattaacatagataaagattcattattctgaaatcactagtttccaaatgtatcatgactcaaattaaaagaagaatacaactgaactttcacgaattttgattagaatacagctgaacttgccgtggccaaacttgaccataaacatccttcttgtaatattttcggtcccaagaccagggcacatctgcagtgcagcagaataaaagtttgagatgagtaaacttttgaaagggatgatgaagaaaatactacaccaacctaaaagaagaaaataatagtaaaattatgaccttcggaagtgtatggctgaggaggaagctcatatggcacaggaagttttattacttcatcagatgaggaaactgtatttgagcttctttgccaatttaaagtcacaagctctaccttttgtgctttagaattctcagatgattcacagttattctgatgtatgtatggtcaaattacaaaagttcaaaactctgcctgagcgtatatattcacatatttaatataggactttgtatggaatagaagtcacgaaggtgagatacctctacaatttttcttgtagtacaagaaaaaccagaactgcgccttttgaaaggtaaaataagcaccccgagctgaaaacagcacatgaaaggatgttggaaatggaaaccaagcaactcctacgtgtgtatcgagccacacatatcttaactcgaatttgaaaagtaatgtatttaccatacagcctacctcataagatcggatcattagttgagaattattcttctgcagagctccccaggcagctttactgagattagcggaagttaacaagaaccaactgttggggatttgtacagtgaacagtcagcatgagttggaaatcctaattaatggcagaacattgaaggaaaaaaaaaccgtgacaagagaaacaaaataaatgagtttaaaaaacactcacgcaagtttctgatcattataacgagtgtatgtctttatatgtggcattgcacgactgaaatgaaaaaggatatgcatgagtatatataaattaaacgttgtaaggtgtttcattctaattccattcaacaaagtcaaaacactggaagtgactggttatgtaatatggtcattgaaaatgtggcagaacagcagaaagaaatatcaaacacacaaacgataagtcaagtttcactgcccgaatttacgataaagagaagagaatttaccagcggccagtgtggcttgccttccacttggcccaatactttttcaagaatgctttctcgacatttttcagtggacttggaacagcattcccagctgcatagccctattgaagagtggaaacaataatattaacaagaatagcaagaagacaactgagcaatatactcttgcacacgcattagacagacacactggaccttacaaaggaatcttaatttcaagttgcactataactaaatgaaattgtcaaatgaagtcaactaggaattttttttataaacagagggaaaaacaaggatcacccttcttatgtttgtcttaacgtgccccaacttactgaccccgaaaactgataagtgaaactgttctttttttttt

SEQ ID NO: 1087 - DNA, 3001 bp, Cannabis sativa
gcaaaccaaaaaaacacatatacaaatagagcctaatgtacaaactaaatcccaatagtaagtgataaaataccactattttaaagcccaagataacatctaaaagcgaaaacaaacaataaacagcaaaaattaaaagcacccaaaaggaaaaaaaaaataaaagtaaacaaccaaagcgattggtcgtaattaatttgttcttcgtgccattgttagtctagtgagcctccaaataaactaacaatgatatgaagaacagaataactacgaccaacaaaagagccaccattgcaaaatcagtggatagcacgagtgaagggaagggaacactgaaaatgcctctatcaaatctaaggaaactaagagcaatttgtataaactttgttcacccacaagttattaatcattgaaagctaaagtatatcaaaacaagtctaaattacattaaatcaaagtcagtagtttacattttcaaacaaaaaaaacttccctaaatttttattattattaagaaaataaaagtaggtttcaactgcaatgcatcactcattttcaggtcactgtattaatcaggaaaataaaagtattactgccaaaggaaaactatactgggttgatcaaaaaatacttattactattcgacttcaaataggtcaaaaagtccatgttgactcttcccaccattactgtctcaaccgttcaatgtgccagtttatacagttcaaaagataactttgtaagagaatatagtacttttattttttttgtattaagagttgtatctttcattggttgcagaaaaaagaaaaaaacaagtttgtgataacatattttttatacaatacaaccaaacaatgtcttcatctatcctaagattttcccaagccatacatcacatgaccacaccaccaggattggagagtgttataaaaacaaaggaaaaaccagtagagtacactacacctccccaaaacgcttttgcagtagattcttttatcttaaaacagatttttagtctaatctttctttctttttataattgtgtacctcctaatttttagaatcatttaattcaaattgatgcataattgccaagcttatcagaaaaatagttaagcttaaaacaaaatattcaaaattctataaaaaatttaaaaatagttataaattagaagaacaaataaaaaagaattatgataagtacaacatacttaatcatcaaaagtactcatttatgaaggaaaatttagtttatcgtggttaaatgtaaaatatagtttaataccatccaactaaaaataaattacttctaatataaaaataaacctcaaaatctctacctatcattgaagttctcaactcacttgtttttttttattttgacgatgttgcaaaaatcacaaaatatcacgaaatcacactcaaattttcacgataattaacaatgtatagtgtattttttaatcttatatcgcaaatacattactaatatcatcgttaaatacgcaaaatatcgctaaatatcgttaatctaaactgtagtgttatcattttttactaacaaaacttcacttatgaataatttacggaattggtctatttttaaaagtttaagatttaggagcatatatcaattaaaaggacatgaaatgaaaacaacaagaaataaaaacgacatcaaactagaggctttctacgaagaggtcttaatgtcgttttgacataagaggaattccaatctcctccatcttgagcataataatccatcggataattttcatctccatcattattattaccacaagagtctccaccaccaccacaacaaccggaatcatcattctgattcttctcccaccaaccaggaatggagcccaatgcaatatcagcctcaaacgacgtaagaagtggctttctaaaagcttcgccccaatcaatcgacagtcttggacaagctatctgaacccatgcctcaactgagtcctcaaacaacccaattctcaccggactaatctccgacatcagcaccaccgtgtaactaaaccctttctctttcatcttcttttccaaaagttcaagaattctagggtttccttgccttcctaatgtccccagaatcattccccaattcttcgcctctttcgctttcgtgattgcctttcttctcgtctctctcattcctttctgatcgtattcctccaagaatagcttcctcatgtacggatcgtaacggaatgttctcactcctggattcgcgatcatcatcgcttctagatggaacctcccatccgcaacgaatacgattacggcgtcgttttcgctcatagaaggtgagatttttggggctgtgcagccgagaacttccccggccgataagggtttcgattgcgggatctggaccgtgaatccgcggcgttcgagctctggtttagcgaatcggattgcagaggcgaactgaatcgttcctgcgaggacgatactcggagtggatcggaggttgagatcgatggtttggattagacaatcgacgtcgattgttatgtcgacaaagacgtagaggcagggcacggcggtcacgttgacggggaccaggcagctgtggccgtagtgaatgagtagatcagcgccgagagcggaagcagctaaatcgtcgacacagcacgcgccgtaggtcacgtcgccgaggacgaagcagtgtgacgcgccgccgaaggtggagatgatgtctgagaggacgagcgagtacattagaagtccttcggggagctgtagcgccacgcgtgaggcgttcgtggaacgaacgcgccacacggatttgtggacctcgaagttgtagttggaaggtaagagagcgatggcggcgttaagggctgcatcgttgaggattgaatctgggatttggctcttgacaaatcgtttgggaaccctcttctgggtagtactcccgttaccgccattgatattctcggaaggcttttgggtaagaagggaaaggtct

SEQ ID NO: 1088 - DNA, 1920 bp, Cannabis sativa
ttattcatatttcacttctctccccaaatgtatccttcaggaaactacataatgcagattctaaataagaaacttagcttcaaatgtgtatgatcgtgcttcattgatggtttgtgtgtgtttaatgctcaaaattatttcttcatatgaatatgaaatgttaaacctttatctactgatttaagtgactactactatttatgcaccattttcttgtaatattgatgatgagaacagtcaaatttctcaccttggagaaacttacttcaattctggcctgttttcgccaacataataaagcagtatccttttttcccgttgtcttgtaccattgaatcttgtaatttgtgtgtctcggcataagaaactaactggggtaaaagagcctacataaattgttaaggacgataaattttcattgttaacttacttaccactttactataatctcttcaatttgaaagaatgaaattaattttctattgacaacttgacaagtaatcatatttcacactcattttcgacagatcatcgttgatatgtaataatgtaaagagagcatgttcatattgttctactacaaacagctatataaacagcaataggaaacaaaataaacctcaatgtttggtcaaaaagaaaagtgaattctactttttctaatacacaaccaatgaccaacccaattaagataatacacacgtcactctgttcaggaatttttaaaaggttttctgttctaagcaaaagacaaaaaacttgagcagtttacttagtcttgcaaagaaatcgtgttctctatgcttcaacaactcaatattcgtcagccttgtgatcaagctgaatcaaatcaacgaggttggcatgtaagctgttgggacaaatcaagtttaaacctatcacaaattcatatcaatcatctaataatagatggtgtaacctctaaaatggagcccatattttgaggtaaaaactacaaaaagctaacttaaaccgttcaccatgttataaaagcttgcataattgcattggtagagttaccaaatcaaacaacatcatctctcacatttctccaaggaaaaagaaaagtatggatttggggaagtttttcctgattgctctttcgcttgctgtgcttttcgagctagctcaaagctttgaattccatgaaaaagacttggcttctgaagagagtctatgggatttatacgagaggtggagaagccagcacacagtttcgagggaccttaaagaaaagcatcaacgtttcaatgtgttcaaggcgaatgtaaagcatgtccacaaggtgaaccagatgaacaagccttacaagttgaaactgaacatgtttgcagacatgaccaaccatgagtttgtaagatcctatgctggatcaaagattaaccactataggatgttacacggtgaacgaccaactactaccttcaagcatgaaaacactagtgatcttccaacatctgttgattggaggaagaaaggagcagtcactggagtcaaaaaccaaggcaactgtggtagctgttgggcattctcagctgtagctgcagttgaaggtgtcaaccaaatcgaaacaaaggagctggtatctttgtctgaacaagaattggttgattgcagctcgaaaaaccatggttgtgaaggggggttgatggaacctgcttttgcgttcataaagaagcaaggaggtataactactgaaaagagctatccctacacagccagtgatggttcttgtgaatcatctaaggtaaagtaaaacaatctatttcaatcttgactcaatcctattccaacttttcatgtatctaagcaaagaaaatgagcataattatcatggttttacagttcaaaaactctcctttggtgaccattgatggatacgaaagggtacccgaaaac

SEQ ID NO: 1089 - DNA, 4193 bp, Cannabis sativa
aacatagaaaccaagttaaatgaaataagaaacaatctagaggtgaacacaaaatcaaaagaagctacttttgccaaggaattacatactacatactaagaaaacagcttaattttttctttggcaccatgtgttctttcattgagttcatgtataagcaccaataccaataccaattagagatgaaggactaagaaaacaattaaattaaagcaaacccatttcaatattcacataaataaaaatgctcaatctctgctctactacaaatagaagatcaattcattaccaaaaaactaaaactaaaacctcatttttattgaatctgcattttcaaatcaaagggtaaatctagcataaatcaaagaaaactaaaaccccagaacagaaaatctgaattcatgtcttaatttgcaacctaaatttctcatttttctatccataaaacaagttatttatcaatcttaatttcaaattaacagaatacccagaacaagaaatcttaaatcttaaaaagggcataaacctccattgccaaaagaaccaaacaattacgaagcccagacaaatagaatgagcaaagagtggaatgaatacaaacctcggctcataagagcccaaggaacggcgaaaacaacggtgataatagcgataccagccagtacatgcttcttctctccgctgtacaagtagtgctccattctacccctaaaacccccacctcctccacctttaccaccggttttagcgtcgctgctcatctttctttatctttttcacttcacctatgggctatggaggtcgtccacagtcgccgaatctctcttgggtttgttccggcgagttctctgttcgcaaatcaatccacgtatttgcaatgaattgaaattatgaaggaaaaagctttaagctacgctagtagtaagtaactgctctcacataaacgacatgtcgttttatttatttaaaagggctttaatatattaattctgtttgtcgttttacctaggttgacaaaacggatttagacgcggcacatgaatacgtcactaattttatgagctaggattgagaaaattagacgcggaccgaaaatagatcaacttgacagaacaaaaaaaaaagaatcacaagcacgatcagtttaacatgaattgaatatgtttgacatatatatttttttaaataaaataaaatataaaattattactaatattgtaactatgtaaaaatatatattaagttaattttttctttaaaatttaattattttaaaagtatatatattttttaacaatgtatataaatattctaatggaacaatttttcttttatatatatataatttaagtttcaataataacaaaattagtcaaagtgggtcagaataaacaggagatagttttttatgggtttgatgaaggctgaaaaaaattaaacacgagttaaaaataaattaatacgcaatataaattaaataaaatatgacacaaacacgacataatgatctgttttgacactcttagttttacctactaaccacataattttttgttttgactctaagcaaaaggttcgataaacgacatgttgctttatttgtcgttttataatggatttatcaatttgaaattatgaaggaaaagcaagtaaaagcagaaacactcccgtatgaggtctaatacttttattttagtttttgtatctatgaatgctttattttccaaaaaaaaaaaaacattcccacatttcctcatttaaaagggttgatcacttcatcttgatgtttgtatttttgatctgaattcttaaattagacatattacattacttagaaagataaacaagtaaaaaaaaaatagttttcaataaaataaaaccaaaaaagagaaagaaaaaagagtgataaaaagttctcggcggctacgtattgtgtgatgtaatggtaggaatgtctttactagtatttattttgtttgagtgaagaatctgaaatccgaaacatcctttcttaaaagattttatgagtaacctttttaaaaactatcttactgtgacaattcatctttaataagatgaaattttttaaaatatatctaatattgatgaagttccaattaaggtaaaggagttctctataactcatctctaatcttcgacatcatctaaaactaaatgaatgagaaagagatcgaagccacttgatcaatatatatgaaaaaaaaatcagtgtgagagaaaaactatttgccatttttttgaaaaataaaagataaaagataaaagctgcatattttgtttagtatggtagtaaaatacaattacaatgaaacgacatgtcgtttatgtttcaaagatcggcatccgtctctgagtttgaacggcatgtcgtttggtgttttttcttcttcttcttcttcctgtaattgtaaatatagaaccacgggaatccaacagctaaacgagaaaggaaaaacggtaactttttagaaaccgaacaagctatgttcttcagagatgtcatttgccacgattggtagaagattacacagaatccaaaaccatctccaattcttgttaccacttgttctactctcgccacactcaacctctgcttctcttctttcacattcttctcatcattgtctctttcaagcatttcatcaaacactttccactcatcaaaactctcctctgcaaatccaccatttctccactcttcaacaacattcatcccgatttctcggcgacccatttgagttcaacccggaaagatttcagattcatgatgagctccaagaccctggtcttctccggcttcttaaactactcgaacaagttgctccgctttctacggaagcagaagccatggcttctcttgatgaatcgggtattgagtctagtgtagatatggttcgttcggctatctgggtattgaggaaagagtgtaaattggctcttttggctttcaaatggggtgatagatggggttgttgtgatgaagaagcttggaatttgatgatatgggtattgggtaaccatcgaaagtttaatactgcttggtgtttgattagagacctgcatcgatcttcaatggatacgaggcgagcaatgcttatcatgattgataggtaagatttagttatcatcgttttactatctcagtgatataaatgatgaacttaatcaactacttaaatgattaaaatttcaatgttgaatcttgtaatagtttctaatggctaaattaatccaacatgttgtttgggatgttaatcaggtatgcatttgcaaatgatccagacaaagccatatggacatttcatattatggagaagttcagattgagtcctgaccaagaagcattctacatggccttaaatgctctttgcaaacatgaatttattgaagaggctgaagaatttatgcacggaaacaagaagctcttccctctacaaactgagggctttaacattattcttaatgggtggtgtaatgtatcagttgatgtatttgaggccaaaagaatttggagagaaatgtccaaattctgccttacaccggatgaaatgtcttatacacacatgattgcctgtttctctaaagttgggaatcttttcgattcgcttagactgtacgatgaaatgaagaaaaatggttggtctccaagtttcaaggtttacaattctttggtttctgtactaactcaagaaaattgcttgaaggaagctcttaagttgctggagaagatgacagagttgggtttgcagccagactccaccacctataattcaataattcgtcctttgtgtaaagcaagaaagctagaggaggctcaaattatgttagccactatgataggagagaacataagtccaaccatagacacctaccatgcatttcttgagagtgcagatttttcggaaactcatggaattcttagtcggatgaggaaagctaagttaggccctaataatgaaacctttcttatgcttcttgaaaagttcttcaagttggagcagtctgagaatgcaataaagatttgggaacaaatgaaggattatgaagttgtgccagattctacacattacacggttatggtacaaggactggcaaaatgtgggttgttaatcaagggtaaagagtttttggctgcaatgagatcacatgggtttttggtggatccaaagctt

SEQ ID NO: 1090 - DNA, 5497 bp, Cannabis sativa
ctcgagatctcaccttcaaagttctcctatgggagatagagatcaagaaagaggaggctcaagtggagtgatatagaaagaataagaaagctagagagaaataggaatggaaatgagtggtattttcttctttaaaaaaaaaaaaagaatatatgtaacattagcatattttatagacgggtgaatatgtaagattattttgttaaaaagtaactagaatcaaaagaagtcaaattcccatttgtttttctattttttacactaaacatgataaaaaaaaaagcaaatttaagtatcaacattacaagctcatttttatttattgatgttttaatctttaaaagtaaagatacaatattactatgatgatattttctcaaaaaaaataatactattatccaaatacttcatacatgttcacatatgattaaatttaggataaagactaagataagaagttataggaagaggagctactaaaaaacacatgtgcaaaagataagaagtaattataatatttgaaaaaacactactcaacctggcttaatgtaccatacaaaagttaaaagcaaatgaatgttccttactaaactactaaaacatatatatgtattttaagcatataataaaaccatactcaacaaagtaattaataactagcatgaaaatagaacattgaacaggtttcttattacctaaaacctaccaagttatccaaaccagatacatgatagccatcacaaaagattatgtcgacacatttctagcaagctagcgcaaacagagcaggcagcataccagtacgactcctccaacaaccaattaaaggcatcctcaaccttcagcttttgtcccgaatgcttctaattcggtcttcggttgcactggaatctgcaatttgcaacaaaatttaattattagaattcacagtaaatccttgaccaaaagataatggatatttggaaataggcttcagggacattaagaaataggcatgacgacaatgcaaaagataacaaataccagtaccatgtgctaatatcacaactcaactaagtacgtggccatgccaccaccgttcactttgtcaagatctgtctattcgaacgtgttgtgtttttctttccccaaatttttggccctgccacttcgaccgtggcccgaaagtttttgagggtaggatttgaaccttggaacaaacacattccaacacacctccctccttaagactagaccaccctctggggtttgaacgtgttttgtgtttaaaattgccaaatggtaaaactactgaatacgagctctcaccattatattaaatcatatcaagatgtcaagtataatcaaatcatgaacccatagtttaagatgttggggctgagtttctcgtgcgaatggttggctattaaatataagaacctaattggtaaaacgaacagatggcaaagttcataggatggaaggcaagtgggtgggaaggtaaagcaattttttggtagtttagtaataacttctccaattatattaataacaaagtacaatattttcatatacattataacctctctttatctgtagttttttttaactactactccacgtttcaatgaaaaaataagttgcatgatgttgatgggtactttttaacaaaaaggtcacttattcacatcaattcaaattatgttaaactacaaaaccttgatatgactttatagagaatattgagcaaatggtattgaaataaacacaaacattatgtgtatagtactacacatctgagagattttccaaatatgacaagcatttttgcaaaaagaataaaaacaaaaatataccttgcattgaagcttcgttatggtggacctcaacaaattatctccaactatcaatctcagctttttaacaaattcatcacgatctatcttctttgcctgacaatatgtcaatacaaggaaaatatagaaaatgaaaatagtttaaacaaggctttaggacacttccagattacaatgtatttttgcaaagttgacaaacataccattgtctatttggaaattacaaaatctacagtctacacatcacattttatatgtcttgcaagttcctttcgttaaataaaaatacagaaaatgtttcaaaattctttaaaaataaaaaatgtgtgtgcgtgtgtggctatacattcaaagcactaactgtataaaatataattgtcccaattgataagtaggcataccctaaaaagttcataatgcttatttatgagatccatatcttttggaagaacttcttttgagatagcagtaaacagcatggggaaaggcatccaaggggatttgggaattcttgaagtgctagaacccagacttgccgcatgtccctgaaactttccagaatctgaaattaattgacctcggcttcccagaggcctcccaaaatctgacattggctgctgcttattattctcctaagagataacacaacgttaatatcactgctaatataatccaacacaccctatagaagcttacactgaaaatgtgaaaaatcactcgtactccaattgcatggacaagaacaatgaactacaaaaagacacatacacctacagcaaaaacaaagtataaccaaacaagtttaaaagccaaatgaatttgaccggtattcaggtttgcatgtgaggtcacaaacaaatagtctttttttgtgaaactagcatccccgccttgctttaccatattggggattaaaacactaaaacaattgccatcccattacctcacaccatgtgggagcaaaccacatgcttgactattagagctacccttcttgggtataaacaaacaacctattatctgatgtaaacatttgggtgtaaatcagtagttgatgaagcctaatttgattaacattcaggtaaatccaaatgaaaaaatctcaactcaagagatagcatcaaagctgattgctcattgccattatcattattaacacaaggcataaatatgattgggatgataccatattaactgtagagcgatttatttgtagccggcctaaaggctgtgaagatgaagtaaccacggaagcatcatgcttactctcagttccaaccatataccctataggagcaaatcaaaacactacccataagcattcattaaatttcagaaacaaatttaggttacttatacaaatctgcaatagagaaaactgactgcttcgctgacttttgcacagcctagagagagagagagaaggaggggaggaggagagagaaacaaatgtatctactaaactttctcatgttaatgtccaaaatcaaaaaagaaagtaccagaaaaagataactaaaataccttgtgtgaaagatggagccttgaaactaaccacaaattcaggatagatgtgggtattgatattcatgttccagacaatatagtgtcttggattctggagatcatctactccagtatcatactcattgctactagggtaaaattgtttacttccagggtgaataacttcaacattccccgttattacgcgacataacactatgtgctgtacattcttttcgtcaatatcacagtaacttgcactgtgaataaatgaaaggtcaattcttctcttaagcgtgtttacaagaaacaaaacaaaaatatacattttacagatggaagtcatacaaatatcatatttatagaaacaaaaaaaaatattaataaccaacccatgaaatcaagctaaaaaagaaaacccatacgagtgcaataatatattaaaaacattaattacagcctctcaagcctgaatatacaaccagaggaaacaaggccacttatatggagttactgcatcgtctactaagattagccaagaaataacacaataggatgatacacatctccaatatcacatagcagtaataccttgaagcttgactatagtgccaaaaagaactattcaacagttccttttgtagtgcccatcacagaagcaaaacagcgagagggcacaggaaaattcacccgtgatgctttaccttttcatgtgtatcccattttatccaggacgcaaggctctcacgccaacaaagaaataccgtaataaacacgaaaacaatgaacatttaacaatagaaaggagggactgaaaataaaaagaagaggggaaaattttccagacctcattgatggaaagctggcagctgtcatgtgaacaccagtgccatatctggacttaactgaagctggtccagaataaccaagcccataaattgttagtgcagatattgcttctttcgaagaaggcagccatgcatactgtatatttgcattaccacggcactttctagtaatttcagcctgcttctcaaaaagctcccatctagattgcatcaaagaacttatgcaagggtgtatatcaactatgtctacacagcccaagcctcccattcccaccaaaaacatatttcgcacagtatcacaatctatcttcttatttacagattcatctattgacaaggatttgacttccatctcatcacactcaactttcatagtaggttctctgttgcaactatcctcagcatcaacaataaatgcattactagcaggctcatgctcaacgtgaattttcttaacaagaacgttggactccccgcaacattcatccagcatagtatcagccactgcatttatttcaatttccacttgcaacttgaaatcacgagacccacaagactcagctaaagcatcgttatcatcgtcaccagcatcattattgtcatcttcagcatcattcgagaaagtttcagggaagaagcaacttcctgcttcatcaatccaagcaatgggttgctggaatcctgatctcaaatccactttgaacatgtgcaaaaaatcaagcacatattgccgaccatgcaactcaatttcactagttgccttcttcgcaataacatcttttcggaccatctcaacaagatcttcagggaaatcagtccatttaccattctgatgaaacattagacgctgtggtgcaccacttctcataaaattcaaataacatttcagcaaagatgtcctagaatgagatccactgcttgtgcatccttttaatttccttcgcttgccatgcctactagagttcggtgactgcggcaactctgagcgggtagctcctgtaaaatatgcagcacaccgggttgaccgctttctttttaagttgagtgtgactcttggaccactatccaatgcctcttcaatatttgcattcatttctgtttactagactaatatctatccacaagttgaaacccaaaactatgataagaagactacaatagaactctaactccagatcagtcttaaacaaactggaaaatggaagatattactaaaccctgtgataaacggagaaaatgtcagtatatagtaaaccagtctatgataaatctgcctattacaagctttgaacataggaaagtattcaa

SEQ ID NO: 1091 - DNA, 2564 bp, Cannabis sativa
tattatttttgacaataaaacttaaaaagtataccaaaattcaacaagtacttcacatttgactatttgatctatactttttggtgctatttttaaattttacatttgtagaaaaattacgtttttttttagcttcgggtagaggtagaggtgaaattaggtgtacgtggcaattgtagagagaggttttaaatacataatacaattaattatcataagaccttttttattataaataaaatatatatatatttatcctctcatctaaatatgtaaatcaccctattctcttcgtttttattattaatttttcaggtattatctttcttgagaataaaatttcaatccaatgagacctaaacctaggaaattcatgaacaaaataataaaaccaataaaacaataaaatcaccatttttcgatttttttttcttcatttttattcatctatacatatacatattatatattatttatgaaaaacaatgtgcttaattaaatgggtacaagtttaatttttgcttttgaagtatatgttagtcttttctatatgttacttttatcttgcatttgttgaaatatatgtttctaaacttctagtctagaaggtatatatgtttttttaggtcttcttttgtaaagttatattttaaatttatctgaatattaaataattgtaatattataaaatattattgatcataacataacccagccatgcagcaggagctacgaggtaggtaatcattttcttatttattattatttttctctcttctatatttgatttttgttatgcttttggtttgtttgcacaaaaataacaataaatcgtacagtgggtgtggccaagtagagaagtggtggtctcctcaagaaaacaaaagtgataggtagagtgtgtgcatttgctatggataagtttggagagtagtgatactagcattttttataggtgacactttacaattagtcaatgttattgtttaaatataattttttttaagttttataagattccattggaaaatttgattttttattcttacattaaggagaaattttttccttaaacctaaaataccctatattggtaaaataggacaacatttacttaatacccacattacccccctcattcaaatttgactcaacatttacttaattttttttgaaaaatcaattaatttcattgatatagaaaatttactgattagatctttatttttattaaataacaaattagattatgtatttttttaaaatagtactaatagtactctaaaataatttttttattaaaataaaacttaataataacgcaacttaaatgtcttataacaaaactgattacatttaaatttttaatttttgttggcggttgaaataatgtagaagttaattatattaaaaaataaaaaattaaactcaaatattatgtgtactattttaaaaattacaatatttattttgtaatttaataaaataaaagtgtaatcaataatattttgaagaaaaaaaacagaataaaaaatgatattaatcaaatacaaaaatggtacactttagagggaagtttgggtaatatgatgtgagggtacactgcatgcatgaggtgcaccatagcagcataaattggagccttttttagttattattatatattataattgccttttctgattaattatttattccttaattttgcaatgtaatatttatttaatattctaaaagctttgtaactaattttgcaaaaataacctgttacgaatttcccacctaccagtaaaaatataaaacttgtccatataatttctgttaattagtttgaatctgttattggttctttaaataaaaattattactgtcttgtgaaatagtaattattatttatgagaaaagtggaaagtcagcctattaaaataaatttattctttgttttcaaaataaataaataaataaataaataaataaatttattcttatccaaaaataaatatttaaataaattaaattacagtacactagtgttctattatattaatatggacactgtttcttttttcctttgtaatatatatattatatgtatatactgtaaattactgtaaattaaaattaaattattttgttttataaaatttaaaattaaaataatttactgcgtaaaaaatttaattttttacagtaataatatctaagttatatttatggaacttctgtaagtaaatgtgaagtctctcatttttttattgatatattaaattatttttttaaaatgaaaatttagtgacatggaccaaccagaaattgccacatggctatttacttaacatttaatcgataggtacctaaaaatttaatgacatgtaccaggattacgacgtgataatttacttaacactgtacctaaaaatttaatgacttggaccaattaggaattgccacgtgccaatttatttaacacttaacaatcagttacttaccgaagttccagaattataaccgtataattagagcaaaaaattaaagttaagtcacaaattattgtaagaattata

SEQ ID NO: 1092 - DNA, 733 bp, Cannabis sativa
aaagggtatcatccatcctatcttacaatcaagacaccaaacatgggaacattaactgcttctgcttctttgattattatggaagaactaaatgttagtaattcttcttcttgattattatcgataactgaatgagagttgctttcattcagttaccaatactaatcaagaagaagaagcacaaactatatataattcttccataactttattttagcactactaaatgtactatggtaagcaaataatcaagaagcagcagctaaatgtttacctattccatagcagattttttaccgcgaaagttctaattcatgtggtaacaacaaatcataacaagggttcatagaagctataaatttacatataaaagagtattggtagaaatgttggattacccaagaaccaaccaacgtgagtaaaatactttcatcacctctgctagtattgtaacctaaaaacagcaaaaatacataacttcaaagccatttgttgccaatttgttttgatatattcagcacttaattaatcgttgcaaatatcttcataaatcactggaattcaactttattcaagctacattgcacaatttccaaatcccaaatttgcacgcaaccacaattttgtataatcacaacacaaaaaagtacaaaccatacacaaatccaaataaaaaaagaaacttttttcttaaaaaataaaacaccagagaaaggagcttcacataccttcc

SEQ ID NO: 1093 - DNA, 1260 bp, Cannabis sativa
tattttggtgtatttttatattgtcttattgttattttgttatttatatactcttttatgttgttttaatttatttgtatgtttttttttttttgaattttttataaaatatatgtaaaaaaaaaaactttaaatataaaaatatagattttttacaaaaattaacgtgacaatcgaccaaactccaatatagatgatggttgtatgttattggttggttatactgcgaaacgacacatcacgtgcacgagtacttatcttcccccaaaaaggcaaaaccctcatctctccaaagacgcaaaaacactgaacattaaacccacaaagagaaaaaaaatggcggacgaagagaccagcgagagccgcaaccaggcgaggctaaagatacttgagctggccaacatgatcagcgtcccaatgtcgttaaacgccgtcgttcgcctcaacgttcctgatgctatctggcaaggaggttccaattctcccctcaccgcttctcagattctgacacgtgtcctcccctcccgcgacggcgccgacgccgagaatctccaacgcctcctccggatgctctccagctacggcgtcttcgaagaacacctcaacggttcagagagaaagtactctctcaccgacgtcggtagaactctcgccacagactccgatggcttatcctacgggccgtacgttcttcaacaccaccaggtattctcatcaattaattaattttgtatttaaatacatttaaaaaaaaagagatatgttgattatcaaaatccatttttggtaggacgcgctggtgagcgcgtggcctcttgtgcacgaggcggtggtggatccaacgacggagccgtttgtgaaggcgaacggagaaccggcttatgattattacgggaagaagccggagatgaatgggttgatgcagaaggctatgtcgggcgtatctgtgccgttcatgaaggcgatattggagggctacgatgggtttaaaggggtccagaaattggttgacgtgggtggtagtgcgggggattgtctgcggatgatccagcgtaagcatcccaatgtacgcgaaggaatcaactttgatctgcctgaggtggtcgctaaagcgccacctatttctggtcagattacattacattttttttatcataattttttattttattttattttgatattgagtgtgagagatttaaagttcggacttccttattaggatgtgaaattattaggttatatataagagcatctcta

SEQ ID NO: 1094 - DNA, 2850 bp, Cannabis sativa
aagtaacagttttttgtagtgtcaaattgaatcggatacccacccaaccgaaatctgttaaagaagatctctcaccaaaacaggatgaaaaactgctatgaactctcaatattctcttattcacaactaaacatgagtttagttccttctaaacatagttgctaacaagtagattttaataaggtcaagcataatgcatgcctagttgccaatattaataataaatattacatagacttaattaatgcaaaagattctatatctcctcttcctttacctcattttacaaggttttaaaatcagaataatttatttacgtttcattcaagtttatattgattaataagcttagtatatagattcctttccttctctccagggcaaggataacaagagatttatgtataaatatatatatatatatatagtgtatttagtttcttcatcaatacttttttaagagatcaaaaaaaaacaccaacataacacaaaatcctctcctctcaaacacatttaatctaatgttgatcaaattataagttcagataaaaataaggcaaaagaaaaagttagcacatggccacttaccctaatttttatgattttttcacaaccacatcgaactatcgagtggttgcaagacctatggccatcctcggcggtacatacctagcgttcgcttacttgcacagcggcggttggtggaaagaaaggatgcctagagtatgtaagaggtcgataaccctagccgctctgcatgggggagaaatggctttggggagattaaaagattatcaagaagctcgaaccgatgctcaaaacttggatggagctgagaatacattgcaaaatttattattcttaaataataatcatgatcaacttgattttccaagtattcaggttagtttataattaacaatatctctttatcttttacgattaactatttgtacctactaactaatcctagctagtaattttttttttatttgttttgactagattttatatggggtcattataaaaactatttttttttttaatttttttgtccctattgataaatattaaagttttatttcccatcattaggtgattcaacccaataattgagaatatgaccccatagaaaattgatatttttatataaatataccggattttgggtaaatatttacaattttattgtcatatagaattttttgcaaaaatactgttttttttataaaacaaaaaaatagaacaattgaaaacaaaaattgagcaactaaataataaccgtagaacagtgaaaacttaacacggtacacaatatttttgaaaaaaaaaatacattattattgaaagaaatttcgtcccacagtaaaaataaaaaaaaaaaatgagaatttgtgttgagagtttcatttaaaacttttaaattaaagtcatgggcttcgttgggctttttgtcctctggctgaattagcccatataaccttcgtatgtctcttcactcagtttgtactatcttctaaaaactctattttacatcgatggaaaaaaaaaaaaaaattgttctattagcacctccactttctttatttagtatctcttttagaaataaaaaaagtttaaacaaggatatagattttaaattaaattcatacaaaattaaattgtgtttcaactaaaataatttaatagataataaattatagatatttgttatgtatattttttttttgacactaagaaaaggggattctaatttgggacattctctgtgaagagaggtgtaaaattattaggttatgcttatgatcactttgatttatgttgtttaatattaaaatttatatgcacaaataagtaattgatatctataaatgtgtggagatgtaaatttttcttatttaatcaaacatgttttttctaactagactatgaagttttgaaaatcatttataacaaattttcttaatctcatttaaattaggcatgtcgaaaaattcatttagttggatcgagttggagttccgatctaacagatcacttctaatcggaaacattcggatacttattagatcttggattagattcgctccgacccgcctaatttttttccagacacggacgccctgggacttgagactctgaccccctggggcccgagacctagaccccttgggacccaggacccgaacccaaatgtcttgggacctgggacccggattccctgggacctaggttctaaacccgaacccaaaccctcaccctggaccttggctcccaggttctggctcggacctcagacgtcgaccctcgccatcgcctgatccgaaccaggcctctagacttggcccctgcactcgaacctagcccgaactcgagcccaacccatagaactgtactcagactcgtaccctgggctcagcctcgaacatagtcgttggaccccagtcccggcgcaggcccccaactcaaactcaaaccctggccccagcactcgaccctcgttccccagccctgaatccaaacctagaccctcgacccattttctctcacctttgtttctcattccttacttaaattaaatgaaaaattaaaaaaaaaaaatacaaagcacaatcttgttttttgttttttaaaattaaaaaataaaagtaattagagaacgtatttttgtgattttacttttatttttgtaatttattaaatgtgtaacaatatattatcactgtaaatatgtaattgtgagctataaaatctttcaaaacaaaaaaatgagagatgattttgaatggctacatgaacttgaagggaacattacttgagcttcaattgtgtctctattattattattat

SEQ ID NO: 1095 - DNA, 1286 bp, Cannabis sativa
tatattgtaattttaattataacaaccatacaaaagtattatttcagtggaaaaataatatcttatttatttattttgcagaaaatttcatctcaaaactcccaaaatcgaaaacgaagaccatttgaaggggggcatggctctaagaccattgtgtctcatatgtacgatggagtaagaattcagaattattctgtttatttatcaatctaacttataactatctggtaactcttaaaatttttcccctaggctgatcctctaactggtaagctacctagtgttatcgatacttttcaacaacttcattgtaaaccaaaaaagggatggaggaacgagtatgctgcagagaaatttgtaagtagatattttatttatgttaattgcataatggtatcatatttagtaattttctattttctggtttaggatgctatgacacaaatacgagattctcaaccaccaacagcagcagccactggcgagtctgctggatctactgaatatggtgaagaagtggctcagccaaaagacttggagattatgacagaagtcttgggaccccgatcccgttatcacaaaggatatgggtcaatgcctaggcttaaagcaattggaggtaatcgagcagtcaatgtgagaagcattatccaggagcgtgagaaggacacagccatcactgttctcaaagaacaagttgctattcaaggagaacaactggcatcccaacaagctatgttggcatctcaacaagctatgtttgctcagctggcttctcagatgcaacaattggtaccaggctttcaatttcagcctccaacattacctacaagcgccaattctggtcagagtcccagccgcactcacactcaatcatcaagacaagatccttcttctactatctagatctaattttatttttttttttttttaattgtgttttaagggtgcattttactttagattattatttagcaaatatagttaaattgttaaagtcaatgggaagttacctactttccttaatgaaactgtaatttcgcttgtccctaaagtggagaatccaaaagaggccattgactttaggccaattgcttgttgtaatactctttacaaatgcatctaaaaaatgctttgtgctagactctctgatgtgctgccggttcttgttcacagcaaccaaggagcctttgttaaaaatagacttttagctcacaatgtttcttatttttcaagatcttctgtagggttacaacagaaagaacatctcaactagttgtatcatg

SEQ ID NO: 1096 - DNA, 13014 bp, Cannabis sativa
aaaaaaaaaaaaaaacatgtatacctacatttaacaaaaattacaagtacttttagtaaatttatttaatttgataaattgtggggggctttttcactattttgatgcttaattatccaataaaataaaataaacaactaacttttttaagtataattttttttgtgggtgtgctatagccccatagtcatacgtcccacaaactgcaatttataatataatacactatataagattttgatattaattaaattgtattgtattataaatctattcaataatcaaacacattttagtagtcttatatatacacaagtgtaaactttaaacttataagtttagttggcataatcgttttggtctctttctcgcggctaattaaagcatgtgaattgtgccttgtaccatttcataacaactaattattaatggataactttcatgctgctaattataattaattaataagtgataaaatatcaaacacttaaattgttttggttggttggctggttggttctgtctataaaatgctaatgattaatggaacacatttattatataataacattcaaatgaaacataatgatatatataccacattaattctagttattatctaatataaagtaatatatccccagcaagtttattcgtctacaatataataataatatactaataaaaaaatacattaaaaaaagaaaaagtgagaaattaatagtaaaataaaatatatatattcgatcgttatacttaaatattgagacaataattaaacatccatatatattattagctttacacaaagcaaatattccgtacttttattatttatttaataatacaataatattaaataaaacttaattaataataattatggcaaatatacatagtatttatcatgaagatcatgcaaataatatatgtatatgtataatggatggagttggtgatacgttttattaattaagggcacttgcgtcttccaccatgggtggtcatattggcatagcaggggcagacctcaaggttaccggcagtacccggtggaacgcagttgcatcgttgacagcaagtaccgcaagccctcttgcatagccgtggtctcgacgataaccgacacctggcagcgcatgaccccccacaatctgcaaaataattcatttattcaactgtacgtacgaaaatcatataagtaaaaattaaaaaacactattaataatatatatatatatatatatgtgactccattgataacaattctcaaatttatgaaattaactactagctgttatatgttacatatatatatataatatgtatgtgcataccgatacttttcttcttaagagaaccctctgctacatccccgattgcctgcagttttttatttttatatagtaatagtacataaaaattaattaaattgatgatgaaagacagagctacgtacataaatacacagcttatatgtatatatagatgaaacgacaataaaaatatatatatgtgatgttatgtatataatgaggggaacattaattaattaattaataataacttacagtagtatcatcagcttccacgatattgagaacaagaagagaaaagagaagtgaaatgatcaaaaccttggagagagccatggatatatatatatatatatatttatatatatatgtcgtttcaaaatcaaagctaattgaaactgtagttgtagttggtgtgtctaaacttagatgcatggtgttcctatttatagccaagagagtttgggggttgcatttgcatgcaatgacggaattaattaattaattaattcaaagtatatagttacgcggaaaatctttaatttattactattattattattattaaataataacataataatatataattttgttgcttggaataaagcgctataagcaattgagcactattttgaaaagaaaaaacaaaatagagtaagaaaataaaggaacagtcgacctaaaaaaaagaaataaaaaggaaaaaaaaaagatgattgtggaatggtgacatgtcttaagagaatgatctggaaggtgcatatagaactgtgtgtggtcgactctgttccaggtgtgactgtgtagtgtgtaaagcatttgtaatctatttattttttctttcttttcttattttataataatcagataatatataattgaaaaacaattaatgttttagttaattattatgaacagaacttgtttagttaattattaattagatacaccaatattatcaattatgcataagagattatacaccaataattaagctggactactaaattgacaagagagtactataaagttgacttgaaaaacaaagacgaaaattagtaattaatgcacggacaaaaaccctaaaggaaaaaaagaaaaaaaaatcaattcgaaaataagtaactgtatatttatttgctattttttcagtaaaaacacacatggaactatttatttatttattatgagttaattaattaattaattaattaatattgttttcgttttggataagtacttaattattttgatcattatatcgatgaacaattactaagaatgaactaattagttgaaaatatcatgaatagacacaaataaagccagctattttatatgataaaacttcttttttttacatggcactgatattacgaatggtcctgatcgatatcatgctgagctatataatatgtaaactacagattatattattcctttcattttcattccagccaaactaacaatattgaattgtttattactaaattccaaaaccccattgtagaattcatatataataattatatatatatatatatatgttgagtttctaattattcaaaaaaattccgttccacaactttaaacataattatcttaaatatatatacatgaatgacttaattgattcctttctcaacaaaggaccaatagtggttaggcatatatacaatgctttattattggtgccattttgaaataagtaactcaatcatttgccaaaccctagcctaaccaatattgattactagccattcatgtctttatctcttgggttatatattattattgctaagtcccaaagttttataatgactaccatgtcggaccatttttttggtatatttctatcatgtatttacaactcaacatcattttcactttatataaacaatatttgaattgaattagtatacttttaaaaatatattaatttatatactatattaattagcttcaaaaattaaattcattaaatcccaaatgcagtttagtcatgaatttttgaatgatataacaagtctataatgtttactagcttgcatataagtgtctcatttcataaacatgtaatatgaagtgtagatatgtagaaatatgtatcgttgctagctactactactaactattatattatatgtatagtttgttattatatttagtttcttttcttatttgattaatactttgatcccttatgtgtgatttgttttctaccattcaaacaaatagtaggaataggagtaatatatatagtaggtgattctattatacataactcttcttttttacctgcaagtgaattatttttataaagatattattaatatatatatatatatataaattcttcattttcatatttatttttactaattaaaaaagtattttcaattttgcgttttaatgtttctgttttcttttttttttaataaaaaaaaaacttttggtttttagtatttacgaagttccaaatgtgagaaataataacagctctggtttatagctatgtatatccacacgtgcagttgatggagcaaatgtcgttttagcatggatataggcaagtagatataattataaacactcaaataaaatgtgcatatctttcagccaaatccaataatgaatttatttagttaaacttttacttttatttttaatttctagaaagttctttctcaataatattatttaaattagagttttatagagtcaggaaattaatttaaattattagagtcaaattataaagtttgagaaattaaacttaataattaaaaacaaattttattgaaaaatttacactaaagcaatcggcctttcatattttttacactatgataatttatatcataattatttaagatattatataaatttttaaaaaaacaaaataatttcacataataaaattcaaacaacttagtacacgaacgtaaatttgattacgtgatgtgaataaataatttcacttttttatattttaaattatttctaagctcttaaaatttttgtaaataaatattaataattatattatataccgtgatataaaataattaagatgacaattatttatatatcaaaaatacaaaaaattgtatcagtacactcgtagcacccattttcataaactcagaggccgcaagttctatatctgattaagatgagaccaatgtttttttaataaactattattatatatgaaaaaactggactatatagtatatactcccatttttgtctagtctaatttattatttattattgttattttcttgaaagaagaagaaaaaaaaaattaagaagcatatttttggatcctctgctgtccataccaacttgacagctcagactagactactcccctatcttttttattttttgcttcacagctgtactcagctcatccacttttatttatttatttatttatttttttaatatatatataaatatttctatttcacaaactaatctgttgttatatgtaacattttttcgttgttgctattctaatcccataattgtacgtacgtctacacttatcatcactattatgacataacaaaacaaaacaaaacaaagcgaccgactttcctttcttcttctccaaattaacttttccttccaaattctaccttccattttctgatgggacgtttttttcttttagtatttaaagaaactataaattattttttatgtgagtgtatattaatattatagtaaatagtaatattatatattttgtatttttaaaaaaatttaaaaaattttaaataatttacaacactaaaaacaatatataaatatttaactgtatttatattcaatagcggagccaattcaaaatttaaccaagggacaatatatgtaaaaatataaaaaagaaaaaaaaaacgtaaaagttttctctctccttgctcttgcagttctttcgaactggtgctatggcaaaaacacgagtgaaattacagggaagctaaaagttactgcaaaaaagaagaaacgaggccctaattcaactgcagatgtaaggaaaacaaaatccatagaagaagttctcagtatcgaacctcttaaattctcagaagaagaagataaatgttctggtaaacattcttcaatggctccatattgcaagatatatttcaagcacctctatcttcaaggtcttctctgaaattaattcaacaagattatatttgagctgaatattctttcttcctaggggctaactagaattgctcgaagtctttaacgaaaggtctctctgcgacacctcctattcttaggtttgacagtgttgttaggaacctggcaacatcttttgaaaactcaagtaaggatagcaagatcaaaatcataatagaagacattaaagaggagatttctttttggaattcctctttaggtgccaatcctcccctctctgctctagaaggttttgcaaggcaattatagaaacaaaaaattgatgaggttggtatgctctcatatggaattttcctgatttgtttttattgtgttgaagatagaaatcgaatacttaagggggaatatactttctttaataagaggcatgtagttatgaaagctttggctcccaacattaatttcaagaaggaggacattcgagctattccaatttaggtgcagttgaatgacttcgaattgaaatattggggttaaaagtctttattcaagattattggctaagttagagaaccattaatagttgatgatgttaccaaagagagagacaaacttaactatctgagagttctaattgaagtaacacttcatcaagaattcttagatattatctactttgaagatgaacttagaagtaatgtttctgtagcagttaattatgaatgaaaacccatcatttgtagtgattgcaaaggaatggatcatgaataaaaggactgtcgcaggaaggagggtcgaaagcaagaatagattgttaaaaaagatagcaagaagcctgaggtggatcaaccagatgttatggcatctggttcagatgagttccaacttattaccaaagggcggaagttcaaagctaaagcacctatggaatgtcttaccactttgaatttgttccaagccttatcaataccatcaacaagtggagagaatcaagctggtgtaactgcacaaaaggactaggagcaaatgatgaatgaacagtacatcacaagaaggagggagtacttcctctctccaatggataagataataagctagaatgtgcgagggatcagtagccaacaaaaacagaaagaagttaagcaattcattgctaatcaaaaagttggtttagttggtctcctcaagacaagggttaatgctccaaaacttagagctttataccaacacatggtcatggggtggtgttttaaatcaaacattgtgtggcatagaggtggtaggattattgtttcttggaaccctttacagtttcatgtaagtattcttaaatgtgcaagccagctcatacatctatatgttgttactccaaataaaaaatatagattcctggtgacttttgtatatggttattgttatcctatttttttgcactatgatgtggtaagtagctgaatgacatgtgtctcatattttcttactttggcagaaggttacactcttagaagccctcaaagattggtagaaagatccatatcaaccgtacataggaggatgcccgagtagaaccataaggagacatctgaccaaagctcgattgtgtgatcaactcacatgtaccgaacaagatatgtgagttggcaatttcagagatggaggttgttgcttccaagacgcgaagataatccctattttcgtgagattagttcagagagtaaaggcaataagcctaggtttcctattctttgcattgtgattatagaattaacttagtttcttattttatttattatagattaatggaaaattcttcatgtaataagcctctataaatagtgatttaatctcactattcagggacacaaaattgatctatgagagaattactcaaagatccattgtaagagctttagagagaagacactttgttctttgtctctcaagtcaatacaacaaaaaagggtgtaggctattatcattctcacggggtcgaacctctaaaaattttggagttctctttatttactgtttttgctttttattatttattttatctagtcgctttattttgactctctgttgttggctagaagggaggttaatattttggtgctttcattaagagcaaaaacacgagcttttgtcttaaagtcttgacaggttaacggatggttgtaactcatgggggaatttagactaatccagtcgatccaatggtgactaatccaagcgtccagactcctagaaacgcaagagatccaccaaggacaaaccctgaataggttaatacacaaccaccaaggtaggccatggagtgacttccccctggcgagtacaggaaactgggaatactggtagagcggccgaaaaaatactcctagcactgagatctcgtccaccacaaacacttaaaggctggttggaaatgatactaagcttcaaaacctgtgagctgcgctaggacttatgcaagaccataataacatgttgcaccatgatcaacaagatctccagacagctatcaatttggcttttgatgagcaaagatgccaattcatagaatggatggattgggagatggaagtcatgaatcagtaggcagccactgacaattatttcaggaaagccaccatgctgatcagaagagcctactaaattaccgatcaacaaccagtatctgattctagcatccccttgggatcctagagctggtcaaaagagtataagaaataaccgtctaatccaaggccacaggttcaaactgtgggccaaacagtagatggctaaatcctaccaaaccgcccattgtgagcaaatactcagctaaataatcatacttcgacagagttatcaggttagtcaacctctcaatcaagttgattaaacccaaagacctcttggtacattagtgtttgatcggttaggtaccgtacatgacctcagaaataatctaaattgcagaaggggacttgggcaaaacattccaccagtcgcccaaccaaatatctatgaccaagatctagttcaaagagatcttaatgtgactcaagtcggtcaacaacctggcaaagttcatccacttgtgcaagcataaatagatcaacttaaaagcctcatacaaggcctgaccagcccaaaactcatagatcttgaactcgaatgggcaagaggatcacccttcttgcctgaattcaatgctcttgatctacccccaaagttcaaaatgtcagtatggaagttgtgcatagcgaaggaagatcctttatctcatttgaaatactttgagatgcaaatatatttgcaggggtgagaggcaatgtacggtgcagaatttttcttgccacatcagcaaaggcttcccaacaatgacatttcatgttacatccaggaaagtttaattcatggatttccttctcatctgagttccatgcacaatcttcctcctcttgttagcttccctcacacctagaagacctggtggaagtgaaacaaatggcaggagaacctctaagggcttacattagcaagttcatgactgaagcaacaaaagttaaggggctgactaaggaaggaaggttggctgcaatactggggggcattaagccactgggagaactgtggaaggatattaagagattaattgtgggatcaatgatagaatttctagattaagcttttggattcattaaactcgaagaggtagtacagcgtgtggacacagtgcgacagaagaaaaatcaataacacaccactacaactgctacatctgcccaaaattcacagcatcccaatagttcgaattaaaatagaaaaaggtcaaacaacagtaatagacaaggcaatagggaaaaaagcaagttcaacggtaaccccgaacaacatcccagggagaatacctcaaaattcattgttttctcagtcttaatagaagatatagaaacaatctatgcaactacccagtctatatatggtgccatacaagaaaccatctcccatgaaaaaggacatgagcaaatgaatgcaataatttgaagcgggagatcgagttcctaatcagaaaaaataaccaacacttacaaaaatatggaagaaactatacaaagctaatatcgactttaggagttggatgtcgtatgacaattggattattctataaaaattggaagcaagtcaaccctgaatttaaaaataaaatttggaaagttatacatgtaactggttctttgttataattttgatttgtgtttgattaattcaaatattaactctaataatatttgcttaccttaaaactagacgggttttatagtttggaatgatttcaaatatgattgcatggacatggccgggcagttaatgaaagatttcgagaacagaatgaccaaggacatcattatgcccgtattagaagaaaatgatttgtaatggttggctgacgtccctaaaaaacatcataaaattgacaaaaatgattagttgaaatttgttacaagtcgcctaactcctgaatttcaagtactaattatatatgttaagataaacttttaaatataagtacttgtagctaacatattatttttgcatggtaagaattgagtaaagtacaaagggaacgatcggtaaaaaactaattcagacatcaaaatggtcggagtagaatggtgaacgtaaaagaagatgtggtaagtaattaatataatgaatttctagcaatgtgcatcaaaatgtagtagtactcatttaagttttgtaaaataatgcagaaaaaggaacttgaggttcaagatctcccacgccaccgtatttggatcaaatctcagaccaagaaaataaaacttatcactgattacgacaagaaaattgccaattagatactaagtattaatctctgataaagtaataataagttaatatataaaaatcatatactaattgcttaaatatgtgcactaggctcaaatagaggagcaagttagccagggataaattaaggtccatggccaaaatgacattctgacgcaggctctcgggacactagagcatcctggacatgtcagggctgggtatgctagtacttgaatttttttaattatttcaatagttagacagaataaatattcattaactttatttatttatttgtaggttccttggcaaggcgtctaaatttattgataggaagaaaagggaagtttctgatgctgatgtattatatggtgttttgtatattgtctacttgcacaactaccatcaagacgtgttgtgccgaagggaaaaggtcccatgccttttcgaaaggtggtggtgatcaagctggtctattattcactctagagatcatggcgctaatctccagggaaatcagatggatggttgaagaatttttgagaataaaggagaaaaatgctataatttcaattcaggtaccacgtggattcatagcgccttgtacctagatcacgatatctggagaagatttacagcatgtggcattgtgtgacttcatcaaaaactaaggaataattttcggaatgatgtatactcttctttaacctaattaaccttatatatcaatttttattgaaattattataaaactttaatacttaacaatttaatccaggcatatttgggagaggttacatgatttgagacagattttcaagtttcacggctcatagcttctcgcagtgcacggtataaatgatatagagaaggaagagtcctttaaagttgcattaaaaaattggctcattggttatcattgatatacaccaaatattctttattccctagaatatggggtaaacactacttaagagataatttaaaattgttttatttattataacttgaagttatttttacactatcttatatacatatatatatattagtgtccattggatgctagaggtcgttgcgccaggaaaaaatatctatttagaccctatatatggccacaaagttccccaataaattcatgcgatgttgaaaatataataatttaattactaacaaatattttaattcactaacttatatatatgtatatgttaattaattaaaatactaatataatttttaaaacagtgcacacgagactttagggggatcaaatgaatttattagggcgtggttaggaatatcactagtaaattatccaaaataacctaaaaatcaagaatatggtttttatgtattgaaacatgagtgacatcgtcgcacgtgcaaaccctaaccattatttaaacgaaaaaactgtgagttttaattattaattatcttatttattatattaacaagtaatatatatactaatttaaatatttactttttaacagtttggggaaaagaagacatgcgatacaaaaactgaattgttaccgttacagcgacaatggatagaacaattgatagcggtgattcacgaaggcttggattgagttgaaatgtataagaatttttcttccctggcttatcttttttatgttaatttgtaatttttatatatttaattagatatattaacttgttaacactttaactaattttaaaatatttgtgtaatataattataatttttttaattgcttctatgaaattaattaagtatattggttagccatgaaattaatttaagttaattaatatttaatttaaataaattaaatttttgaaataatattaggttttaaaactgaaaaaataaattgatttttataccctatgtcgtcggttattgtacatatggcgtcagttgttatatcctatggcgtcggttattgtataataaccgatgtcatatggacattatgtcgtcagttattatacaataattgacgccataaagtttctctatggcgcccgttttatttgaccctatagggtcgcctagatcagcatctatagcaaattttgtcaaaattgacgctgaaagaccttaaaaattgcctttaaagcctagatttatagtagtatgcagtgtttgaatttgtgcaataaatttcttactcattcaccaaaaaaaaaggtgcatacttttaaattagttttcgtgtcattttcgagttaggcgtttaacatgaaaattacccatttaataaatgggttagtcatgtcaacccgaaaatgatccagacccatataaggaaaatctaaaaacccatcatttcgtacgaattttaaattgtgttatcgtatcttactcattttgccaccgtgaataacttacttctaaaaaataattgagcataaataattgacccatatacataaactatttggatgatttcaattatatacagtataaatttatagagtctttggtttcagtagtcatcaagatcaagatggtataacaaacaaatcaataacagttaaaacgtgaaaactaattactcccttctccgtctctggtcggcaattctctagaagtggaatcaatgaagggcgattgtaggaaaaccaatcgattgagcagtgtggctttcggtttcagttggattggagagagagagagagagag

SEQ ID NO: 1097 - DNA, 753 bp, Cannabis sativa
tcttcattgcttccaaccaaataccaccttagaatttgttttattatggtaaaatatttactttctaatccttcccaaaattaaataataaataaatacatgcacatagcctctccgaaccaatggaaaccgttcgtttatatatacaaaaaaatatacgttaaaaaaaaggtcaaatacagaatcagagccgttggatgagcaaagagtgacacaaccttcagccatatatatatatggctctattctctaatcttctcagactcagctcaagagcttcaccctcctaaattaattttgctatttatttttaattttattttcctctttgtcaccaccacagccgccgactcatatacatatatacatatatttatagagagagagagagagaagtgcagggatatgggtatggtagggaggagagatatcgacgatcttccgaagaacgccgccaattacacggcgttgacaccgctctggtttctggagagagcggcgaccatacatccaacgagagactcagtggtccatggatctcgacgctacacctggcttcagacgtatcgtcgatgccgccagtttgcctctgctctcaccactcattccatcgccctcggaagcacggtactacttcttttttacttacctacttacttaatccttttgctaaatctgtttggttgccgagaaaccgggcgccgtacttaagtttcggttgaatcattcatactcaaaagattggcatgttgt

SEQ ID NO: 1098 - DNA, 7284 bp, Cannabis sativa
gaaactccacctatagctcacttgagagttgagacattgggatatgttttatgtaaatggacattattaatgatatttagagtctaaatttctgattgtattgagtttaactaaaaatagttagaattttggcagccactttattacgattggcggccactttattggcaaatcatttatgagtgtcctaaaacaagtaaaagaaatatccaactactgaactttgagttgacaaaatggtaataaaacagaaatattcaagtacaatactaaaaaattagaaaagagaaaaaaaataccattaaaacatagggggtgctaatgcaaaattctaaagttgttttcttataataaatttcttacaaatataacaagttatacatagaccctcctcatctcaatcaatatttttggactatagtagtaataaaagaagaataccaaaaacgatgttgcatttaacagaaatttaataagcagtggttgttatgtcttttggaattagtatcatcagtcccaaattgttataatcaactcatatccagtatagtacaaaagaactttctcagaaaaagctgggtcctttaggtctgaagtggagtggtccattttggccaaggttccaacagatcttaagtccacttacccaataaagctgctcagcataatacatataaacatcagtttgaaccaacccattacaagctcaaacaattttatacatatatggtattctcacaattatagaaactgacctttgaataatctccccattccatttttaacaacttgaaaaaaggggctcaacgagtgctcttatcatcattatcgtctttatcgcttgtttgtggggtgtattgactcgtagaagttggtgagtacccaggttggctgggtgaataccctgcacttggactgcaaagaagggaaaataaaagttgaagatacaaataacaactctgtttgatacaagttaagggtttaaggaaaatgatgttttgtctttgttttttacctgtattgtggagaacttgggctatagtccggattaacaccagagttatatgggctgttagttacataaagaaagaattagaacataagctattccaacattctcagtataaagtcttgagaaggttactaaagctacttacctgttgggagtatatgtggggctagaaggagaataagatggagatgtaggtgaatacgacggtgatgttgggctgcaacaaaaaggaaaagctcaaccatataagatgttgtgtttataactaagtcaaataatttgaaatcgcagccatgcaatcgataaaaatataggtcccaatatttttaacccaactcacctgtaatttggagatgtaggactataaggactggctggtggcaacctcggactgcttggagaataagccaatgatggactgtattttgctgattgaggattgtaacttggagatgttggactataacttggtgaggttgggctgtaacttggcgaggttggactataaccaggagaagttggactgtaggctggtgaagttggactataggacggagatgtagggctgtaggatggtgatgttgggctgtaggaaggtgatgtagggctgtaagaaggtgaggtcgggctgtatgaaggggatgtgggactgtaagatggggaggttgggctgtatgctggggaggtgggactgtaagcaggggaagtggggctgtaagcaggtgaggtcggactgtaacttggtgaggttggactgtaacttggagatgttggactgtaactgggtgaagttggactgtaacttggagaagtagggctatagcttggtgatgtgggtgaataagatggacttgtaggagaataggcaggacttgttggactatagcccggggagctaggactgtaggttggagatgtggggctgtacccaggtgaggtgggactatatccaggtgaagttgggctataaccaggggaagttggactatatccaggggaagatgggctatagcctggagatgatgggctgtaaccaggggatgaagtaggtgaaaacgccattgttccagcatatggcgagaattgcgcatcagtaatgggagacagacggagatttgggctcagcagatagtttggtgacatcaaaccatcatggtaaggagtggccgacattggagaacgtgaaggtgtcatactaaaatcaaggccctccatataactaggtagctgcagttcaatagcatttttcagcatctcatcattgagatacaaggtaggtgctcctgtaccaataggagccagctgacctaacattatattttcagtcacacccctcaaacaatctgtttcagcatacactgcagcatctagaagaatatccacagtttcctcaaaagagcatcgcatcattggaccagtgtcgttcctattgattccatgtcgagtaatagccatcaagtgtccacgataggtcatggtatcacaaaggatagccagatgccggtagttcacataagatccatcaaaagaaataacaacacgcaattcatctaaaagtgacctacgaacagcctcgataccaagaacttcaataacctcaatcaagtgattactggttgttcttttggaatcaacatcttcatggcacataactgctaatagattaacaccttctgtatccagcatccactcattctctggtttaaatccatcattctcatcaaacttatttactttaccatgtttgataaagactttgttaatatctgggataccacgaagagccatttctgtcagcatgttactttcgattttctttaagaaaacatcatcctctgcagactcatcagttaattccccttttggagcttcatcattcatgatacgaatccgaaggatcagtttttcagcgttgtcatcgttaaaaatacaagtcaaatcatcatcaaattcaaggttgatcttctcagcaatatcagccatgctcaatttcttgtccaccatcatttcacgattcaactcaatacgaagcaaccaaggggatattttatctgggttgacctcttcatcaggcatttcataataagacctgacaaaatcaacatcttcctcgatgattgtgctcatggggtccggatcataccacacttctgtggcttgagttacactccggagagtggtgtactccaaagcacactgaactgttttggccctctccttggttttatttgcttcaggcttcaagtagacagagagagatggagttttgattctcttggccacatttataatttctctcaacctgggaacaccaagagtgacattctttgcactcacaccagcataatggaaggtattgagagtcatctgagttgcaggttcaccaatagattgtgcagccacacaaccaatcatttctccgggtgctacaagtgattgcaagaagcgagattctatttctccagtaacccactcaaatgcttcccgagtaagccgatactcttccagtacccttttgctagcaaaagtgcttcggagcaaaatgttgaaaaacaacgtagcgttcttttgagcctcaacactcaacaagtcatccccaggaacaaccttcagcctttcttgaagcttatcaacagcttcaacaatttccataggatgcatatctgaagtccttctgaagtcaatcttaaaggtcttctgtgcattctgaataagcctcttcaagttcacaggcaaaggccaagaattatcacctgtggttgtaatctcagttccaagttgtaatctgtctgtttctagtttctgtacttcagcatcaaatacattgcggaactctctgatggttttaagatcctcaatatgttcaggcaacatgtaatttggattccaattttcatcatcaaactcgtatctgaacaccctctcaaattctgcttttttcatctttaatgaatctagcttctgcgattctatccaaacagcatccataccatcttctccatagagaaattgaataacatcacctaatgagttcctaacagtcccatcgtattttaccataatatcttccatagccttaactagtctcctctggatgtaaccagtctcagaagtcttcacagcagtatcaataagaccttctctaccacccatagcgtggaaaaagaactcctgaggtgtcagtcctcgtagatatgaattttcaacaaagccacgactttctggcccataatcatcttttgtgaagtgcggcagtgtccgatctataaacccataaggtattcgcttgccctctacattttgctgccccacacaagcagtcatctgtgagatattaataaaacttcctttggaccctgcagtaaccatggctttaagattgttgctttcagacaaactcttttgggcactatttccagcatcatcacgagccttattcaagacctaaaggcaccaaacatattagttctcagcagaaggcagagaaaagctaataaaataatgtcaaaccaagtcacatattagttatctaggcacctggttcactttgttttcaaacgaatccatcattgtccgcccaggttcaggctccagctttttctcctgggcttttctgataagttccttcacatcatttttggccgtcgaaatggtctcattaattttttccatagttgatgcatcagcaatagtatctccgataccaatgctaaaagcattctgcaaaagccaatagttcacaagccactgtgtatgacccagaaacttacgagcagcatctggaccaacctcttccctgtgcacagcattgacaaagaatcaaacaggtttcaagtaaaacagttgaagctcaagaaaactaaaaatatacaacagtttaagactgctatgacaccattcactgtgcttttctatccaagaatggatatataatcatcataatggctgaagttcactgttgtgtatttatgaaaaataaaattttgtttctccaaaatttcatctatgaccacctataaacaaaacagtgcaatcttacaattccaattaaattaaaagtgttaaagttcgacatgctgcatatgcacaaaaaaaaagataattgcataccatataacatgtataagacttcctgaagatgtcccaagagcctttttgcaaagagttccagatagaagctctcccttttctattctaacaaatgtatcccctggagttatatttccagtttctgtgtcagagtgccaggcagaagttctgttaagatttatctgttttggaataataagattaaaaacttgttttccagtccagagaggccgtggctttaaaatcgtaggagcaggaacctttccatcaaaatcctcccaccacatcagaatgttcatgaaaacatcctgcaacaaatttaaaaagattagactcgcaccaattactggaaatacaagatactgagaacatttaattgtgagcctatcttctcaatcactaaccttctctataaatgtgtccctctttgtgattttacgacaacctaagagtgtatcctggacaattcccattactggccgatttgactgaggggatacaatgcatttcggcaccatcataagctccagaacttctgctcttgtttcaaatgactgaggaacgtgcatattcatttcatcaccatcaaaatcggcattgtatggagaggtgaccgataaattcaacctgaatgttgaatatggcatgatcttgattctgtgccccataatagacattttgtggagactaggttgacggttgaagagaacaaaatctccatcattcagatggcgctcaacctgcaaccacaataagtataaattggaaaacggtcctaaagatggaaacgcaatttagaacctaggaaatgtaaaccgtgccttatatccaagctctaaatgatgatcactacttttcttcaagtaacgaagatcaagcctttgtccgtcatccctaatgatatacttagcaccagttttaccaggtgggggatggggcccatactcaacaagctcctttaacctgaagctccataaagaagcaccctattagaacctgatatggaaaactacataagaggtgaaagtgaaactctgcaaaagaagactaaccgctcaatattatatggagtcacagtctctggatacgtaagattcaaagcaatactccatggcactcctaattgatcgatgttaattgttgggtccggggtgataactgttcgtgcagaaaagtcaactcgtttccccatcaaatttcctctaattcgaccttcctttgccttaagcctactgcaaattgatttaattggcctccctgatctctgtgtggcctggaaagcaaagaaagcttcagcaaatgcacataaaataaactcatatgacaccaaaatacatataaatatgcttagatgaatcatcatataaatgatttcaagcaggtatacccttggcaatccaggcaactcattgtcaaaatatgtggcaatgtgaaactgcaatagctgagcaaactctgaaataatgtgagctggagacccatttctctcctgtcttcttaggttctcattgtgccttataatcatggccaattgatgagttaaatcatcctgaactcaacaaagacaaaagagttaaaataataatctttgtaagaactagagctgtcaaggaaaaaaaaacaatacagtagcaaaagaaaacttgcctcactcctagaagatgtgtccatcatcacagaaggccgcaccggaggtggaggtataggaagaacttgtagaatcatccaatctggccgagcatactttggattcaaccctaaaagctgacaatcctcatcacttatcctcttcaaaacactaagaacctgcaaaaattttcaataacgtataagtgtaacatgtcattagtactaacactcataactaaaatcttgtagaaccagatatccattaccctctctgcagtaagggtctgttttctttccacaggttcaggaagctgctcttggtcatcacttttcttcctagcagctttgtactctgcaataattttcattccatctatagtgagctttggttgctgagcaccacagccacccctactctttttcacaggttcctcagtttcttgaccttgaacatcaatttcatcaccaccatcacacttttgcttgtttttacaggcgtccagaatctttctgagcctatttttcgggttcttaattttcatagcttgcttaaa

SEQ ID NO: 1099 - DNA, 759 bp, Cannabis sativa
ataccttataccaattgagctcccattgcatttgaagtgcatcaccaggaattggccaaggcctagggtttctaatagatgccaaatgtaaggcacaattccaatccttatctacttttcgaaacaaaagcttacgggtgtagatctcttcttcttgtgctaagaacttgagcacattcaatcgtcgattctctactgctaacaaaaatatgttcttcttatctttgtttgtatcatgaatcgccaccggaaagtgttgcaagattttctcaactatttccattatcccattcttagcagcaactagtaatgctgaatcattctcttcacctattttaaattctatatgataatatatagtgacaatctcttggttagaatataaattttttgtgattaaaaaaattataattttttatttaagactaaaacatacaaataataagtcactaatttttttacttttagttacaagtttttgttgtgactaaaaataagacattttgtagtatatatatatagtaaaataagttttttcttttcaatctaaatattttgttacctttttcaccaattttgtgtagtagatcctcatcctcatgaatatgatgattattagggttgtgatctggtggggtgttgccagagtcaaattcatacattgttgtacattccaatactttctctaatacttcaaccgcaagtctatgtttcaacttatattctctcaatttctctatcctcctatatccttccatt

SEQ ID NO: 1100 - DNA, 1551 bp, Cannabis sativa
ttaacgaatatataaaatttgttagaataaaatgataatcctttatcaaaaatgaaaaatgataatctttcaactatatccaaaacaaaaaataaaaccatcccaattcagtaactaactaaaggtcgtatccgagattcggttcctcgcgaactgaagggagataacagaaaactgagtggaagttcacagcagccatttttaacccattatctacctccattacagaagcagttatactttcgctaaaaaaaaagctatatttctatttttcagcaaccaaactaacctaaccgtaaagggattttctttaaagaaaaaatcctaaaagaatttctattaaaataacaatgaaagattacacaatagtattggaaactgacctcttttggttcacgagaactctcagaaggagaagagaacgatcttctcagaaatgcagattcacccatgttctttctttacagttttaaatgatttctgagccctttaaagttagtaactttcagatgctcccttctccacaagaaaaacccttgaagggttttgtctaaaacaaacaactctttaaagggtgaatcacaagaggctccttcttgggtccatttcacagttgagatgacactcaaagaagaaaaggaaaagaacagagctttttatatgtgttatgagttttctactcagcttttaaccaatgaaaaagaaagaaagatgaaagtttcaactttcgaatggaatggaggggagtggaatgtgactgtgtgagcgtgaaactgtgaattaaaataaaatattgagagaaaaaaataaataaaaatggagtctttaaatctcaacgtctagtttctttttatttttaacttttttattttaaatggagttgagtgtgagtgagaaactgatatatgcaaggaatctaattaaaggctttaatttgattaggtcatttgttttaatggattttattaggtcatttaattcggaaccactagcaaaattgtccaaattaatagacatcatttccacaacggctatattctttcttatgattagtattgcgtgggtactttactatctcatcctcatttgacttttccagacacatgctcatcaattttcaattcatcatgaagcaaaacgaaagcccacattttattcaacctgacataaagattgagttataaaattagtatgaaaattgcaagataagtcccaaaaaatctagtttgatacagataaaatccttaattttaaaaattagtattaatagtctccaatattataattttcataagtctattactacttaagttgattgatccgtttgtaatatgctacgtgtttaagtattactaatccacatcataattttaattaaaattaatttaaaaaagaaaaaattattaaatcataaaaacattaatttttttcattttcattttcgtctttcttttttctttttcttcatctttttcttatctctagccaaccccgatcctaacccctacccaactcccacaatggacagcaatactccggccaccctcaacc

SEQ ID NO: 1101 - DNA, 1506 bp, Cannabis sativa
atatatatatatatataacactaaaataattttatattatttgtactgcttctttttatgattgtgtatgagttatatttttgtaaaaacaaaatcaatattatatataaatgaaatatttattaaaaccgtaaaaataaataaaacactttgtatatatgtactaataaaaaaagccccaaaaaattattaatttttttttttatctttacattgaaatagtcatttcttccattttaaaatagaataatcattttatttctcttttactaacctatagatcaaagattggagcctgtacagtactcttttttctaccccaccaccgagccaacctcagtggctagtaacaaaaatctctaaatattcattttattgcacttatatctctttgtaaattttttagtggcaaaaatttcaatgcaattatttggttacaatgttaatccatttattattagccactcaagaactaatgttacatcaaatgtataaaagttgaaaattttgccacaaaaaatatgaaattctaccgtaaaaaacttgtacataaaaatttaaatacaacaaaataaacaacataaagagttttgcaataggaatttaagtacaacaaaactaactacatgagaatttaccatattgtaattctaaaataatataataaattaaaataaaatacataaaaacaataatttaaatatgcccattggtattgtttgcaagacatttcacaagagaaacttcttcatgtcatatttatatatcttgcttagagtgagatttaagtgttttgggcaaaagtggttcataggatacaatgctacacctccaaccaacatgcttcactcactcgtcctcccattgctatacatatgtatacatacatatacatatatgtattgagcctcaaagataagaattattgtactactagctaataagtaagaaacagcaattctcctagtacaagaaagaactcgaaacagggtaaacttttattaagcaaaacaatgactacactcaagactcataaagcaatgatgtcctaaacaaaacataataattggatatatgacaagaaactaagtcaagctttaccctccttagtctccacggaaaaacagcatacggctcgagttcatattcaactcgacgactatgaacatcttactgtaagaagtctctagggtctgtgacatagccggtcaatgcagacgctgctgctgtgtacggtgaagcaagatatatctcgccttccttgtgtcccattcggcctgggaagttcctgtttgttgtcgacacacaaacctacaatgaccgaccatgctccaaagttataaaatggacattatgtacttaactaaagacaaggctgtgcaaactagattgttttaatggttaaaagagaaacgagaataacacttgagaaaataacttgccttaggttcgttcatgcgtgcgtaagtgtcttttggaccccccaaacaagcaccgcaactaggg

SEQ ID NO: 1102 - DNA, 3855 bp, Cannabis sativa
aataagtaatattaatattttaaaaagaaaaaatacttacataaaagtaaattaactcccaagctttgcccaaaatgaccaataacccctccacattctataatgaaatacacatgaatgaaatttacttctaaattatgttcagttttgtgaactaaaatacatacattcataggctttccttttctacaataatagtcactacttttttctttatttatttatttttggttgagggttgggggtggttggaggttctaaaataatagttttgttcattacaaataataaatgtttctaatgttgcgaaaattgtaccacttaatggaagaatggacgtggaagtggaacttatgaactctctttggttcatttgctctcggtatcacccttgacgggaggagctctgtaatatgctggtatagttgctgggaaaaacatctgccgcagtccttctgccttgattatgggaaatataatacctgatgcactctataaaacaaaatatacttgcttagtcccaaatgttcatgtgcagagttttcaagttgctgtactagtaaaatgctaataatttgaaagccaaggtgaataaagctactactgttataaaaggaaaagatgggactgtgcttaccgaaatcaatctagctccaatccacattcgtttgggtgatggaaatggaaatagaaggcgtccaacaccatatatagccacagcgaaaaaatggagaactaaacttaaagggcgaggatttagaccagaaagtaaggccactggtcctgttgaacaagtacccccaaggcttagatagtcaaaacatgcttggcgcatctccttccttgcctgatcaggagaggcagagaataccttgtacaaggcatctgctaatgtgtttattgtagatgccacaggctgcaaaaccaatatacaacaaatatcatcagtacaagatctgtatattcaaaagcagtcactaaagacatattagcaagcataaaatgattaaatttgcttatttgactacactgaagcaagctgtctaaagcagatgtttaccttgcgcaaagtgtagaaggactcgagatatttgcacaatgaatccgcattgtttaagtctcgcaatggactgagaagttcctgtagaacaacaatatcagatagagctacagtcattcctccgccagtcaaaggatgacgcatgttgaaagcatcacccagtagaagagctccaggagtaggatgtggattggcaggcatacttctgtttggcatggttctaatgtttcctttatcaacagctgatatgaaggcttcttgaatttggggtggtatctgaaatagacatcatttttcaatccagcaaaattacaagcagactcaaagaaataaggaaagaaatatgagcccttcaaacgagcagtttttgccttttatgtagacaaagttttgaacacagattctaacaagaaatatgtaatatcagatagagctacagtcttcaagaaatattctaacaaggaaagaaatatgagccctaaatatgtaatatttctattcacgtagcctgttattaggtctctaattttgtccatctctgcaatgtgtatcatgaattttaatgaatttatgcaaggaatttctaaattatcagaaatttgagaagagaaattgtaagaaagattgaaatattattgaagggagtttacctgtggtgccaccacagtcttcaagtacttggccatctcaccattagcaacagaaggcaccttttgaccaggcacatcaaccaaacagcgaacctcagtgctacttattggataaaacaaaatcggagaaggatcagctaaaataacatgcccatgatttgcataagggagttgacagttctccaaaactaaacctacaaaacaagaaggcacttgcacctgtacacaaaattgatacaaaatctatcagtacatgttggaattcaagagtgaaaagcaagtgaaacttcaatataagaagacaacaccaccttaggctcacacagattgcgccgcaaattcgagaagcagccatcacaaacaattgttagaggagcataagctttgtgttcttcaccatcctttgttttgtattgaacccctttaattgtcccatcttcttcaatcaaggatgtcacagtaccttgctctaactgaacactgttacagaaacggaaaacatacaagatctcattactcattactcattagcagcatgtaacaagctaataaacacgtgaatgaataaaagagccagagcatacttgggaagagtagcagctttttctctcattctttgtataaaacgcccattgtggaaactcctcccagctacatctgcatgaaacttctccaaaggatatgaaagactggtgttcttcccatccttgaaaagagcatatcctagtattctttgagcgtcaatttcctccacacaatctgaaaccaaattcaaaatacatgtaataatcacatcatagcctaaacattatacacataaaccattggttcaaaaagtactgaaacataccttcaagacccaattctaccagcttcagatacccccctggctgaagaagctcacccacaattctatctggctcggtcaaatctctttcaattacacgaactctccttccatcctgcgattagtactaaggcatgctcagttgataaaatttaaaccaaatcctgttgtaaagaggtatctaaaaacacatttactaaacaaatccaagttcatgacatcaaacttgttttgttctttcatattctttgtattattgcaatcctgaaactctcttagattatcataagatactataacattttccatggacgcagagagttttggagttttgaagatgctaacatttttacaaatttctgacatgtttatatatttgtggcttcaaccattagaaagacagcagcttcagcctcaaattatcattattcacgcatatccaaactttcttgggaaaaaaaaaaaaaaaactcaaagaggagtctcaaaaacgaaaattgaaggaagaccctgcaaatgtcaatgtcttcgtcgaaaagaaaatgagaagagatgagatgataaccttgccgagagtgcacgcgagagcggagccagcaacgccagcaccgacaattaaaacgtcggtatcagaccccaaaacggccctggaatctctttcgtcaccggagatcctggcttcttgacgactcaaaagggtctgggtggccgtcgtcttgttcttctcgacacccgcattacggcgacgtagaacgcagagagccaaaaaacccaaaaaggaggcaaggaaagtccagaaaacgtagggatcgaggggcaccatcttgggcggaagcaaaaaacgatacccagaagaagaagaaagaagaggagaatgtggggatagaagggtgatgttggttgtgtgatgatggtggattaattggatggaggagaggagggtgaggctggtcgctggtccctggtccttggaggtggaggaagatttatggaggaagaagagaggggttttagggaggtgagttgctggaaatggctgtgaatggaaatgaaaatgtggatgtgattgagttggaaaatgggatctaacaccgaagacaagatgtggttgtttaattactaccattaccataacatcatcaattcattcatattcttatgctaagcttctctctctcctctctcccctctccctccttccctcccacggtgaacaaatataaacttttctcttttattttcttttcacaacacgtaactttgattaaataattgtttctgtcgctttcaaaaaaaaa

SEQ ID NO: 1103 - DNA, 2314 bp, Cannabis sativa
ttcttcttctttttttttttttggctcgatagtttatggagccattcatttacatagattaacgtttcattctcttattctttcaacaactctgctcttcacggaaaactcgagcagagtacaattttgcaaattttctacaatatacaagctttgaattttgctgtcaacttagaatgactactttatctcaatgacaaaataattcatgacattgaataagtcatttctttaccattgcagagccatttttgttattcttttaaagttgtaaatttcgggtatccagattccatatcaaatggccaccacggtgcaacattcaaggtcaagaacaataaaaagtataacatgtcacaactcaaaaccaaaatatatacacatattcatcatatggtagcacagcaaagtttatactccatagtaagaaagctaaaaacatttacaagttttgtgatagttcagttatcagtcagttagtcatcagcaacaacaacataacataactagtgccttcccacgtaaaaggtcagtcaagatttgatagttctacagtaagcatttcaatcacaagcagatgagcaatataaggtaaaaacttcttatctttgtttactgcggctgcgactactactggaagagagtccacgcctcaagccaagaatcagctgcctgatgctgctattcgaggaagtgtcagctagccatccttcttcttcttccccacttgaggatgaagaagtcgaggcagtgttcccatggccgaaataaggcgaaaccaagctatcaaaataggcagtttcctgcaaataatgctctgcgcctcgaatttcaagctgtgtgaaagtgttcttaactgggtcatagctaagaaacccttctcctcctccaacactgatcagcaaagagccactcttggtgaagcacagaggcgtgtaccgtgagccatagaccgatggactcgagccgtgtgaccgtggaactgtgatgagcttcgtccaggttttgtcatctttggttgcccatatatccacatagctcaatctctgactatgaagcacgcaaagctgatctttcaaagtcccaatccacgaaatatttcggttcaattcatcagctggcggtggcaccacgctgaacttctcaaacgataaatcgaatcggagaatcacgcaacgaagcgaatcgccttcttcagctagccagtacaagccgccattggcgttcgtggcttggaacacatgctcgacaaaataaggaggggtgtcctcatcggggagtttcctccacgaattggatgtgacactgaaaacctcaaccttggggacgaaattcggaacctttaatcgacaatacatggaaggaaccctgacgatcttgtaatcatcagtggaagcatcaaaccctagaccgaaaacctccctagtgctcctgaaattagcaggaataggcattttcctgtactccctgatggaagcgttgtacaagagaagaaaaccctgagatccatcattgacaacgcagcagatgagaccatcgcagtgacccttgacataataagggaagtagggaagcatgggaaaatcaagctccatagcttgttgagaagcctcgttctgaggatccatggacaagagagaatccccatagcgagagagaatgatacttgaagccaaacccagatggtagtcggatcgaatcctggcgaggtgggttttgacgaagtcgggactggtgataagacgacgccatgacttggaaacgcacctgaatctgaccaaggttttgactggcagtcttctcagaatctcctcaatgatgtccactggaaactccataataataataataataataataatgatgggtttagcaggaacggtggctgggtttgaggttgggttgttctcgcaaggtagtaggtaggtggtttcttttcttttcttttctttttgaggtgggtttggtttggtttcaatttgtgggtgtattttttcaaaaactgtgggcaaagtgggaatgaatgggttgagttaggtgcctcaaaacaaagacatgtggtagataaataagttatctttgaatgtgtgtgtaaaaaaggtggtacacatatatgttgttttagtactatatatgtcgttttaagcttttttctttttataaatttgcttataattaatgaagggggggtttggtttgggtgtggagtggaggaaatgaatatgaaacatttgatttatatttgttcataatggagcaaatatgaaaattgattaatttacgtactgaaactttaggaagctggcgttagaag

SEQ ID NO: 1104 - DNA, 1990 bp, Cannabis sativa
tttttttttttttttttgccagctcatctgctaagtagagtttgttagccaaggaaggctgttaggtaggggatggggatagcttttagccgggatgaggtttcgggagagtgcgtggtggatcatcattctttttctgatttgtatgaaatttcatctcttcgtaattgtacgctctattaattctcaatagggttaagtttcaatattgggaaattcaatttcttgggattaccatttcttcagaaatcctactcagcacttacaaaattttttcaaatttcattccgttatctgtaatggagggattgaagactagtgctgttgtttagccttaaggataaagtaagtttaaattaattattttttcttccgatcgcaaactcacagtagctttttcttttcagttttcagaagctatcttctgtttggtaacccttgttctggctaaacttcaggttcttggttagcttttggccctaagattactcaaatatattgctattactctatttaaactgagtgttcagttatttctaagaaatataccagtgtttctatatagtcattcaaaggtctatccagtaatttatgccttagatatttttcttttctttctaaaatataaataatatcttctggttagtgtgctctgtgcttgaacagtaacaaaatggtggaccatatcttttgttatggtgctgataattgaaagaaatagaaggtggtttatataagtgtagaaagatgtttcagaaagattgtttgttcaggttaaatggtaggtggattatcgtgaagtattaacatattatgaatttcatttccttttctcgtctatcctgcagctttggttcagtaaatcattccgtctaagcagcttgcagatctgtagtaatacttcgttatagttttcaggtcaaaattttacttggttggtacaaataattattggctgttttacctcataagctcgtacttcatgtttgctctctgtcccttcttagctatcatttgtatggtgaagtccactttttccatttttcatttgaacgtagtggacttcaaatgtataattcgtcaattcagaacatcatttattgttctttataactgggattttctctgcattctatctgtttcaattattagagctgaggagccctagtaacctaagacaaaaatgaatagaaataaataaataaaatcaatgggttctttaggtatacaggctgttatttcttttaaggaaacttccttctctattcttctggagtttggattgggtaagatgtgttgaagagaaaagtactcgtccagttttggttggagggaaattcttgatgagaacagcttgtactaatagatgtttatgctttattagcaagacatgttcaacaatggagctgaagtttgagtttcttggtcaagtaagtttttacttttttacccttttgctatgtgttttggatttgatctgcccatcatcagtttatttatatatataggcatatatatataaatgtaaaacactttttcttttcttccattaatttaggccaatatgcctgttctttccttaattgtattaaggggcaattcctagtattctacttataaggtagtatgatgtttaatcgtctcatttctttttaatttctgtgagaccaggagattaagaaatcagttcatatgagctattttgatggtttcattttggcttcagttaggattatgttccttgtttggggtagcttcatgaatatatttttgagaaacaagctttgaaaagtttctgtttctacctcatttaatattgttgcagtaaaatttgtttagctttatgctgctacacaattcctccattgtcagaagcaagtaatgctgcatctaaggttatcaaatgttatagtgagagcaataagtatcaaaaatatggaatttcaaggtttgtggttaatggagttttggatgctgcagaacatagata

SEQ ID NO: 1105 - DNA, 768 bp, Cannabis sativa
atttaaaaatattggtcgatttaattcagcggtttaattttatttttaaccgatccaatatataaatttgacgagttatatttttatgaagtttttcaactgtttagttagaacagcttattcgagttaacagtttacgaaaatttatatactaaatcaaaccaaacaaatcctaaatattcttcacataaaaataaacttgagaaataataagtacaaaagcaacccaaaaataaaccacacgttattccccatattaaccctgcattccctactttctttctctttgtctttacaaaaagtcaaagggatggcaaagtgggacccaatgcttccatttaggttcttacaaatgtcatcgtcacacaacacactcagaaagagttgaggattttacatcattattgtacattctacatttttatttggtacattttttaaatgaaaaatgcaataaatatattttgttgagcaaataacaagtctactttcaaaaaaaaaaataaataacaagtctcaatctgagtctttgctttcatatttcattttttttcttctttctgtggattgtagtaaaatttgtgttacagagaaaagccggcaaatgcttatgccattggaggtggttttggatggtttttggtggcttttttcagtacctaaatagaaagattatagctccatccatgtctttggctgcctccgatgatattttcctttccacttcactcgcaagctatcttgatagtactctctctctctctctct

SEQ ID NO: 1106 - DNA, 1334 bp, Cannabis sativa
tgtttttagttagcttgcgtctttctaaaccgtatatcacttcacttgcatgtctattatctgaattggattaagatccaagctttgttacggtcactaagatttccttggtgccatggcacaatttgcaactgtgttcacttgatattattatgtaggtgattggataagtgaactgtagtggatagctgcagtcttttagaaatttatatatacatatatttatccgagttattgcttattaattggctcaactatccttcatctggaatcttttccttgcagtatgttgaccttgattctggagcagattcgggttacatatgttttcaagaaccagaatcagctataagagcccgtgcaactgcagcatttgtcgaaggtggtgttatttcaaaaaactttattatgttcatagaagcagttactggtaagccacaattttaatacttctctcattctggcggggttttaagtaattatttcattgactccttattatcattttatctccaatattaaaatgcaaaccacatacccttatactaattacacaagcctcccttgctctgctctatacaggtgaggctgaagaggagtactggaaatcttaccattgtgatagtggcgacgataagtaagcgtatcaatagctttatgtcacatgtttaattttcttctctgatgccatttgaattttgaagttatgtaattggtgtttcttcacttgttcgaggaataatatttggtttcattctctacctacctatgcatatattagttgttattttttacttacagatccgggaaaggcagaaagggcaataatgcatgatccagaggacatgagtctgcagactagagctaatttgatagtcagtgaagattttgaatattaataaatattgatatatatttggcagtgtaaggaaattttcaagggaggtgagacttgctggccaattttttgatgagatagaatgtcttcttttcttttttctatctttctttctgaactgtaagtgaatgtccatagctctagcagcaacaatttctttttgatgagataatagagcgtcttatttatttatttgctgaactgtaattgaatgtccatagctctagcaacaacaattctccctgtacattttccctactttgtcaatataggcattaaagattttcaagattggaatgagtttttctgctgtggtgaaataatgccaattttttatggtatataactttcactattatttaatattaattagtttctttctatgcgaacttttttccataaacgtgcgaaacccccgttattgagggggacacaa

SEQ ID NO: 1107 - DNA, 1878 bp, Cannabis sativa
gatgcatccagacaagtccccggggccagatggtatgagcccgggattttatcaaaaattctgggatgttttgcgccatgacgtggttcaactagtaaaagatttcttccaaaatgcaacctttccagatcagctacctgctaccaatattgtccttgtgcctaagaagaaacaacccacttccatgactgaaatccgaccaatctctttgtgtaatgttctgtacaaagtcatctctaaggtacttgccaatagaattaagtcggttcttaatcatgttatttctgaaacccaaagtgcattcatccctaaccgattgattactgacaacattatggtggcttttgagattatgcactacatgaagagaaaaactgcaggaagaaatggggttatggcactcaaacttgacatgagcaaagcgtacgatagagtggaatggggttatttgcaagctgtccttatcaagatgggattcgataatcacacaacctccctcctaatgagctgtgttacctcggctacataccagattgctcatgctggcagactctttggctctattacaccgggtagagggttacgtcagggagacccattgtcttcttatttgttcatcatttgcacagaaggtttctcagcattactgaaacattatgagcagagacaacaattaagaggcattcaaattgctcgtggggctcctacagtatctcacatgttttttgcagatgacagctatatcttctgcagagcaaatgagagagaagcttccaatgtgcaaacgttactgaatgtgtttgagcaagcttcgggacaaaagataaatgcagaaaagtcatcaattttctttagccgaaacactgaagttcatgtaagagacaccatttgtggggatatgggcatacacgaggctgatgatcatggtacttatttaggccttcctaatataataggcaggaagaagtctgctatcctgggtttcttgaaggagaaagtgcaaaaacgtatccagtcatgggatgggaaactcttgtccaaggcagggaaagaaatactcctgaagaccattgtccaagcactccctaactatgctatgagcgtcttcctgcttccaattgaaactagcagagagatggaacgtgccatgtgcaaatactggtggagttcttcatccaaaaaggataagaatattcattggatgagttgggaacgcatgtgcaagcctaaatcacaaggagggttgggctttcgaaatctttatgatttcaatgtggctcttctaggaaaacaagggtggaggttaattgtacaacctcattctcttgttagcagagtcttcaaagctaaatactacccaaatggcacctttctttcagctgagctaggcggcagtccaagcttcgtgtggagaagcatcatggaagctcaacttctactcaaaaaaggggctgcaattcgtgtagggtctggtgcttcagtgaatatactgaatgacccttggttaccagacaattcagacccttttgtgcacacagtaagtgaatctctcattgataaaaaggtttatcaacttatgtccatagaccaagatcaatgggacatggatattctaaatgacatcttcaatgagagagatattaacttaatggttagcatccctatccaagtcacagagccggacatttggtattggaagagagaaaatttgggacactactctgtaaagagtgcttatgctatcattcaagaagagaagcaacaatcggcaactcctgttcttacaggttactggcgtaagtgttggaacttaaaagttcccccaaaggtgaagaactttctgtggcaagcctctacaagctgtcttcccacgaaaac

SEQ ID NO: 1108 - DNA, 1924 bp, Cannabis sativa
ttcccattcactgcaaaggcaccacccagaacaacaatccggccaacattttgggcaaaagccggatccagttgaatcgcctgcaaatgatgtggggtaatattgtgtctgattcataatataaataaagaaagaaggttgagaatgtgttatgttactaccaatgcaatattagtaagtggacccaaggctacgacagtgagttttccagggtgaagatttgcttgctggaccaaaaatgcagcagcggactgttggataggctttcccttaggcggagggaaattttggttgccaagtccatcggcaccgtgaacaaaatcagcaatccggagctttgtacctttcttattttattttatttattattgaacatgatagagatacatacagtcagccatacagatacagataggagcatagtaactgaattaaaatacaggtgagtaagaacaaaacataaggacgaggatgagacattgagaatgaaattgaaaataggttaccgtgattgtgacatgagatccttcagctacagggatatcacttcttccaccaatctccaactaaagtaattgagtaaagtgatattagaatggatggaatagattatagaaatgcaaaacatgaattaaactaaaaaaataaaaataaaagcaaattaggattaccaaatgtaaggcgtttcgggtggcgagagtggtataaacgttgccgtagatagtggtaagtccaaccacttcaacttcgggacacttgagggccacgaatattgccatggcatcatctgcataatcaagcaatcaatcaacgtattatcaataatttcatttcattaacaaacaaaacaacaaagtagcagcttaccgataccagggtctgtgtcgatgatcatcttcatcttcatcgccttaaattcagattcagattcagattcacccatcccaagttcccaaacccaactactactttttctacctcactttttgggacacaattcaccttttttgttaatcacctttcttcttttcttctttcttttttagcttgacttccttgtttttatggtgctattcggtaaccacttttgatttttttattttaaaaataaaaaataaaattatcttctctaaaatttatttttattttttatttttttttattttatttaagtcggatttatgttcagtatcgaattcgagttcagatcaagggccaagggaatttgagttcgggtctggtcgaagtccataatattttttatagaacatatttttaaaaaatatttttacttttttaattttaaaaacagaaaactaattaaaaaatattactaaacgccacctatataagtaaataatcctctcagtacatatttcacctaatattttttaaagggatatttgttgttaagtgttaattaagcctgtattaggtgtgagctcaaaaacacgtgacgatatattttttcagcttatttgatacgtgctctgataatatatcacttcgtgttttttaattaacacttaatgactaaaaaaatacgactattaagaggttttgctgtaaatatcatttttttaattattcccaatctaattttctcccttaaaattgtcctattcatttttttaaaaaaataagtcagttaatgtcaatgataatttgagtgttttgtaaaaatagttcaaaattttatttagtaaaataattttatagaaaaatttattagtaagtaaccttgtatggtcacataaatgaccataaattatactgtgcaatcataaataactattatagtcacaaaataattatagatttacattgtacaaccatcataatcacatgtagaataaattaaatgaaattattttgtaaattttagtatttcacaatgctagtttgacaaatttcacatgatatt

SEQ ID NO: 1109 - DNA, 2331 bp, Cannabis sativa
agaatcttagatctaacacaagagatatttattgaattagttttgaagactaattcatttctagctttctaaatttactcaaaagtcacccaacaaaatgtaggaaacacaatcttagatcactggaaactccaccagctaaaccttctaaaatttctaagatctctaatcccattcgattagtttgcaaaatcaaataagagccataaaaccagaaggctttggcaaaaggacactcccgaaaaaggtgaattggagtttccaaattaacttaacaaaataagcaagatttgtctttgataaaatccaacttgtctcttgttgggagacttcctacaacaaccctcaaaagcattgttgtaagtctgaagtgaatcagttgattccaaatcaactttaaaaatattttgctttcccctgctaaaagcctatgaacttctatgaaggcatgtttgaccgagaaaactctatcagtggagttcttccaaaccatagtatcctacataagctccgagaaccaaggaatagtaccaattctatctccaagctcctttcaaaaaagattatggaggatatatagattccaagaatttccttgagaggaaagatatgctacttttttttagagaggggtttatggatttaaccttctctgtcaaatcaagaaactcttcaaaattaggctatagaatccaaggttgcttccataaatcaattgagtcccctcttctcggtatatccagactccctaagcaaaaaatacctctaccagagaatatccccttccacatgggtgaatcacttcctttcatgtcaatttcccaagaatacttcttcttacaatacttttcattcaagcatttcatccacgttctttccaaaccattggccacatgctacgccaacttagaaaggagaaacttgttggtgtcctcaagatgtctaaatcccaatccacaatgggtcttagggaggcacaacttgtcccaccttactgttgccttatatctatccttctcaatacctttgtccaccaaaacttcctaatcagagcatcaagttctccgtaagttgaaagatagactttgcaagtagacattgaatacaaaaggatattcatcaccacaaacttaactagagtaatccttctagagaatgagagaagtttaagtttccatccttccattttcttcatcaacttatcttttaatttgttgtagtcttctcacttcttcgcttgaagataaaagggttaccgagatgttggtcttcttttgaactctttcgcgcttctagaattttgaggaccacattttttctatgctgactcatgtttgtagagaacaaaatactcgactttaatttactacatttctgtctagaacaagcttcgtaggttttgctacaaccatgaaacactctttcatttttctcatttgtatgagcaaagaattgtgtcatcattgaacatgagatggatgattgggggatccgatcttgagacctttataccttgaagatttcctttaaatttctcattagaaatcagcttagacatgacctcatggcaaaattagaaaataaaggaagagagagggtctccgtgtctaaggcctttttttaggtagatttttttatttttgactaactccattaagcaggacaaagtaagagattgggggtagtgcaggtcataattagcttgcacacctaataatcaaaatcgttagctcaaaacaccttctcaagaaaactccatcaattttttcatacgccttatgtatatttaatttccaggaatgaacacagattgaaggggagaaattagttcgtccatgaccaatcttagtctggtagtaatgatctatgagataattttgtaagaaaagctgcagaggctaatgggtctgaaactctatattgagcaagaatttttcatctttgggattcgacaaataaaagagtatttgagttagacatcaagaatacttctggagaagaactattgaaccattttgatcacattgtccaatttttttagaagcatcccgatattccatatggacttagggacttcaaagggtgcataacagccactatactagtgatctcattctctaaaggaaccttcttgatcatttaattctcttcttggaaaatattgggaaagactataggaatcatcatttagcacaaggtgattggaggaaaacagatcctagaacaattcatggaacacctctccaatccttttctcccgactaacccaatttccttccttgttcttaattgttaaaaccttatccattcttcttctaataattgtgtaag

SEQ ID NO: 1110 - DNA, 1969 bp, Cannabis sativa
aagtttagcaaataataaaataacttcttccctttaagtatgttcttccagtgttagtaatggttcagcgtctcactttacaaagggcactggaagctcacataaatcatgaaaaagcttgcatggaagcgtcatttactgggatatatccaaagatgtccttgttagtgttaggttaggaggattgaccaaaaaaatattacaaagcaggaatctgcagagctgacaaataaatttagaaatataattaaaattagaagggacgcccctttctaagtcgcgtccaggccaaagctgcaactgctgcaccgccaagatgtgccgatcctggagtgtctccctgaaagaatataacagcacccaaactgatccacgtaataatatgttcacaagattgtaaagtaacgcaaagttctcaatttggtgccattgtaggttggtgaattggttgatggaaagggaggtaaatcagtatgatgtatcaaacctgggatttaagaaaatcctatgatatcctatcaactatcattgttcagttcagtagctagctatcttctagctaagctttcgttctagttgagtttacttttctacatatgacctttgtaaaaaaaaaaaaaagaatatcctatgtaataaatctagaagtttagtgaagttaacattaaagttttcaatatgaaattataacatttttcagactatttatttttgctgattctatgtttcgcttttgttccttcccattaacctattgtcttagtttcacacacacacacacaaataataataacaaaaaaaaaaaaggtagaagtgaaaagaaaaaagatatggagcaaagtgttacacttcaacaactaaactcacacaagcagtgaaagtaaatacacaatttaaaagccattgacaggaaatacctctatcatccccaagacatctttgcctactagatagatcccctaaaaagataaacaaccaaaacaatttcataagattccccatgatttagaaagtgtaaacacagtataaaaaagcaatcttaccagtaaaatggcaggaactggtatgaagaagttaaaatacaaagtggattttgggtagaggaatatgtcaagcaaaagtatagcgttgacagccccacttgccccctaaattcacaagcacaaatgatcagcagataactttagagttgccagatgacactcctactcatccaaaaccaattgatgtataaactgtgcatgctaattgctaataaatgtagatccatgtaaaaaaaaaaattatatcttaactttcatcagttgtttctttgacaaatatactggtggattgaatgctcttgttgacttattttctaagcaggcttcagatttggtataaatacaaaatcaaaacaaaagtatctgaatcactttgctgctcagctagcaaagctaacaaaaaatatatatatttaaaaaaaggttgtaaaaagcataccaatcctggtgcttttagagggtccatccatggttgtcggccctgtgaatagaaactaaaaacatgagtcctcaaacatgtttagaagttgccaaccactgcaaactaaaatcttaaacgtccttattgaaaaagaaagcggtaacgagcggacaccactttatccaacaaaatattgaatatcagcatagtgttagcagagattctatccttcatttattcttttccaaaatctctatttatttctcaaccattctacaaaaatgtagcccaatatcactttaccatagttaacatatgtacacacacatgtgtgccactgccacttaaagtgtactctagaagaaagaaaaatatatatatatataactgctgatgtggcaacactggtcaaaggaagtgattagtctggggtcagttttagtgagttgggtataaatagaaagtcttattcttttatgtagggcattgagaaaattgtacaggg

SEQ ID NO: 1111 - DNA, 4146 bp, Cannabis sativa
tattttcattttgatcgtaatgacaggagaaacgggttcagaattgtgattgaaattcatcagagccatctctaagaatcaaattctgggtaacctttcattcttacttagttgcatgtttattttgtttgtttatttatttttcattgtcttatgaatggaacatatatattttctggcattgttttcggttagattgttaaactgttggtatgaacttattaggttttagtgaatgctactgaaatttttgtctggttgaatgcgttacatgagctgttttttgagttttaattgaaaatttaatgagcaaatgataatgggttgatatgattttactttttttttttatcttcatgttcgtcatcttgattatggaacttaggttttggattgtgttggaagtgtatattatcaacaaagatttgaactttatgaagcttttattgtgtttggttattgagaattcattgagcaaaaaaaagtgaactttaagtttcatgaatccattgaatgtttaatcatttacaagcataatcagtggtgtgtttatttaatttattatctcatcaatggagatatgcctatactgatttcagacgttttgtattgtcatgatatttctgtttgggaatgagagagatttttggctggcattgtattgtaaccaaaacattttcaatggcagtgtatgtcaacttactgtggttatttcaaaaattcggtactcaagcttcttcaactgtcattgtaacatcaaatcttttggcgggtattcgctgtagattattcgattggtttctgattggttgttacaaggaacattgattaatatgctatatctttgaatgcttcctatgattaattgtgagttgtgttatgcgaaagattcgaatctttttgtttgtctctagtatataagtagtttccttatcctcttttcctttttatactttgacctatgtaggcttgcacaagtagaaattcattaatgatatggagataacggagattagcgaatatggtaatggtgctcattagtttttgattgcgtggcagttgcgaaaatggaatgtaatcgagaggctgccctcaaggctaaagagttggcagagaagaaatttgaggaacaagatttttctggggcaaaacgatttgctataaaggctcaaagcttgaatccagagcttgatgggatttctcaaatgatatcaactcttgatgtctacatctctgctgagaagaaaacaaatgaggatgtggattgctacagggtccttggtgtggattcattggctgatgttaccacaatcaggaatcgtttcaagaaattggcgcttgtcattcaccctagtaaaaacaaatctgtaggagcagatggggcttttaaaattctgtatgaagcctggaggttgttgtctgataaggatcgccgaattctttatgaccagaagaggaatttaaggtgtaagtctgaaaatggcttggaccagagaacatcagtatctaatggaaaaaatggtttccataatcaatctcatggaaatggttcgctccaacagggttttaaaggtgctacttattctgggtcttctccagcttccgctggtccagtgaaaccctcattttggactctatgcaatgcttgcaggacgtactttgagtaccatagagttcatctcaatcacaaggtttcatgttccaactgccgtcaacccttttttgctatcgagatacctgccccaccaatcaatttcaatgatgtatctagtgagtttaccattaagaattctgtttcagctcaagttgcaggtggttttcgttcaaaaactgagaaatcgaagaggaagtatgaaggtaccttgttagatagtaaggaagtattgaataatgcaagtggtagattgaatacaacgccctctgttgttggtttgaatactgggtcttctggtgttggtttgaatactgtgtcttctggtgttggtctagacatcgaatccaaagaagataggcttcataaaaaaagacgaaagagtgagcaaaagatggaaaattctgtgggagttggaaatgggaatgtacctggcaactgtaaaactaaccgctttagggaattttcactgcttgaaatgcggaatatgcttcaggagaaggctaagacagtgattagagagaagcttaatgaatggagaatggctgctgcgttgaaagtccaaaatcaatcgaaggaagtcagggagaatgagaaaggaaagaaagaagctaacaaacctgttgtaaaagctcatatgagtaaatgtgataatgagcatgtagatcgcaagaaggaagagcacgctgcaaggacctgccttgtgaattctaatgtgagctctaaaacaaatagtcctcctccagtaacaatgagtgttccagatcctgatttttatgattttgacaagaatcgaacggaaaggtcatttggcgataaccaggtttgggctgcatatgatgaagatgatgggatgcctcgttattatgcaatggttcatcgtctaatatcaactgaacccttcaaaatgaagatcagttggcttgcctccaaaggcaacggtgaactggccccattaaattggattgcttctggttttcctaaaactagtggggatttccgaataggaaagcatgaagtttatagctctcttaattccttctcacaccaagttaagtggactaaaggcacaagaggaggcattttgatttatcctgccaagggagatgtttgggctctgtataagaactggtcccctgattggaatgctcttactccagatgaagtcatacacaagtatgacatgatggaagtacttgaagattacaacgaagagcggggtgtgactgttgtgccacttgttaaagtagctggtttcaagacagtgtttcgccgtcatcaggacccaagtaaaatcaggacaattcccagagaacagatgtttcggttttctcaccaggttccttcttacttgcttacaggtaatgaaggtcagaatgctcctaaagactgttgggaacttgaccctgcatctacacctttggagcttcttcaagtaatctctgacgaaaacaatggaggaataccggtggaaagttttgaataccccaaagtacaggaactaatagagaatgggaaaacaaatactgaaaagggtctggtactagattctgaaaaagaagttgtagcagatgtttcaaagggggaggagaaggaaaccatagaaaacaaattgaaagtatacaaacgtaaatgtagacagcaaaagggaaagaaaatacatgagaatactctctgatttccaatctagtagaggcttgatcatactggaagggatttttatttgttcaactattcatacaaagctcacaaagtattctaacaaggtataacagttttctgtttttagtttatttgttcttctttggtgtattgacagtgggatctagtagagcttgcagacagtttcagaaggaacttttgcttaatttctcagacacccttctaaagaaataattccttgcagctggcctaatttgaggaccttggagctagcttcatggcttattttttgtgcacctcataatctttttcattgttttttttttttttttttcaatttgaagtaaactacatatgttagaccttgttagtttcatgcttttctatagactacatccctgtgatcaatcttattcattttttttgggaatatttagttctgaatagtgaatcttgtacagaccacagtatttttttggagaagtaagctctgtagattgagcctatttttccataaaaagtttaagttaaatgccttccttcttcattctggttcatgtttgtgttttatataattggattggatatacaggtatttgtattagttttagtcaatatatttttattcaataattacagttggtttgaaaaaccaactatataatcagtatctgattatttaatgatggattttcttctgtaacaaagagaacattcaggcaaatgagactgcccaacaatagtctcattcttcaaaaataaattaataaattatgggtttttctagtggaattgaactcaatgtcaatacgcaaaattatggctaatcctaa

SEQ ID NO: 1112 - DNA, 4593 bp, Cannabis sativa
tggtaaaatatttccaacagtaccctggccacattaagagttggtgtttcctttccacaactgaattttgttgtgggggtatcaacacatgaattatagtgcatgatacctgcactggtatagaaagaatttatattgaattcttttgcgttgtcagttctaatggctttaatttttgctgaaaactgagtaagtatggaggagtaaaaagcagggatgggtgtttgcacttcccctttggttttcatcatgtatgtccaggtgtatctggatttatcctcaacaatggtgaggaagtacttgaagccttcaaggctaggtaaatgaaagggaccccaaacattcatgtgtaacaaatcaaagcaacttttagagaagttgttatgagaaatgaatggtagttttttttttatggcaagtaagacaatgtaacatagactgtttattaaaagaaaaagcattctctttagtcattcctgtcgaaattgttaagatggatgaccaaggtaattgtgccataggtcattcttttgaattacagtgttgacagtacatttatgatatgataaatgaggttttgaaccagttgagattggtgtttgcttcagaatgtagagctttccaatctttctaggcatcccaaccttcgaagtcactaagggtgcctgaacgaaactgtgagcattagtgaaaaataccaaattgttgtggttttcaaggtaggattggacagaaaatagtttatatctgaaagaaggaacattcaatacatttgtgagtttgagatgctagcttatgtaaacaaccatttggtaagataacatgttttggatgagcattattattgaaagaaaaaaattgctttggatcaaagaaaatatggtgagtggcaccactatcaataatccaaaaacaagaagagaaagaatgattactagtgaggttggtagctacaacaatagaagtagtgtcagattttgagttttattgttgaagctgctgactcaagaatgagattaattgctggtaatgagtagtgagatctggtggtggattggacaaagtctgaacaggttcagtgcaagaattgtgtgcagatgtggaaccttgagtggtgcttgtctggttggcctggggagtggatttcaagttctctggtttgttcttgtcaccataaccagggggaatccatgagcaaagtagcatttgtcaacaaagtggtcaggcttatgacagtgagagcaagaaggcctgggtttcttgcttcttggctgatttggggactgaacaacagcaaccataagaggcaggctagaaccaagagttctttgtcattatgcattattatagttcttttagcatttctcaaacaaaaataggagtagtgagctacgatgtctatcccctcatggtgatgagattcaacaattcctacccttgaggtgatgttgaagatctgctatctatgctagattattcagacatattctatgttgtaatgtgtatgaaatatggtaacatgtagtgattttttctttttagtgtcatacatcttcaaaaattaaccaccaacaacaataaaggggactaacaacaccacttcatgtgtgtgtttatcttatattattgatatgtgagtaatctgtggtgttaatgttacacttagattgtgtttgttacgagttttggtttgtatgagaatatgagcaagaaaattatttgtggggaaatatgaaaattaagtgtataatggtattatacatagttaaaatcaaacaatactagtgaaaaatggaaaacgctattcgtacgcccaaattttttgattgttagggtttatagtgaccctccttgagcggtatagggttttttccccttgtatctctttatacttctctgtgtgccttgctatttcctgcttgttgctctgtttctctctgcttctgaagtcctttttcttttctctccctatggttgacaaaggaaaaatagtgacaaggaatgaagataacgaagttgatgtttgtaaaatcgaggaccagtccattttgttggaatcgtctgctgagttaggaaaggatatcatcaatctctcggtggtggttcccattatttccaggaaggtcatctttcttggcctcctctggtctgtgctcactcacaaatggaggttgagaaaaggatggcaactgacaaaggtagctcaaaatacgttcatactctgttttacgtgccataaggaagcagagtttgtggttaaacagagtccgtggattgtttgtgatggtttttatttactaaacatatgtgaccactaccttcttaaatggagaactagaagagtatatatatatatggaataacctaaagggtacattaaaaaaggagaagaaaacctagtttgcaaattggaaaaaaaatttatatgggctcaagcagtcaccaaggcagtggaataaaaggttcgacacctccataacaaaataaggatacatgagaagctattatgagcattgcttgtaccacaaaagaacaaaagcttatacatcaatctatttacttctatatgtagatgatatgctaatcataagcaaagaataccctcacatctttacttgttttattttctcatatgttgttgcatgttttctctcatcaagcttaagaacagagttaatgttctctcatattttctcttaagattttgccctaataacttgtgtccttcgaagcctgttcagacaagaaattagtaaagcaaagtcaaaatcaaaaagaaaacagtaaaataatacatgtcaaaattaatgtgtgcgtgagttgtgtaaagagataagtgtaaattcctacaacaacaacattgtaaattatagttataacatttttttatgagtttttggaaacttctaaataattttagtagcaaaaatatatatgtatatatagaatcaaataacatatttgcactaataaatttttttttttgggttgtttaattataaacattgcattagacctaacataattatattaaattgtgttgtatattatatataatgttcaatgttcatttatgatttatatcaaaatattgtgtatatttataaatataaaagttaatcaaaggagagagtaagagtaagtagatttaatcaaagtattgatacaacttgtgtcctgtgtggcaaggaagatgaaactagtgagcatttatttttttaaatgtgattacagtacacgttgtctgcagcaaattaaagggttcctgcagtggaacacaacagcagatgacattgcaaagctgctgcaagcctgccaccaatcgaagagatttaatgcagcaaggaaaagcatggtgaacacagtcattgccagccttgtgtatcacatatggaaggccaggaatgaagccttatggaaccaacaactttggctgacctccacgactgtacagaaaagcaaacaactttgcttgctaagaattaaagctttccctcctagaaaagcgaaggatgaagacatagattggattatgagaacataaattgtatatgatcaaagttagtgacagaaaaaatagcttgttaagatgtaaaatgctgtgatgtaatatttggtttgagcaataaaatttcgtattcatcaaaaaaaaaaagttaatattatataaagtaataaataaaactatgatatataatacaatatgatgtcccaaatagttgtcgtttattaaaaaaaattacttacacctccataaattataagaaagatttatggtagtttttgtaaactttaaaaaaaaaaattaattcaactttttttctttataataatgtatgttgtacttgattaagctcatttgtaaattttttaaaaaattttaaataattatagtgttaaaaataaaatttaagtagttgtttattactatataaaaatataatcacatgtacaataaaatatttgaactttatttttgaacattataaattattctgaattttgtgaaattttttagataatcataattcataaataaatacgcatacgattatgaaaataaattaaattaaaaacctcacaagaaaatagataacttgcatactaaaataatatttttataagttgtaaatataaaataactccaaattatataccatatccatgacatgatgaaaactacattcacttctttgtacatataaagaatatatcccatttatgtactttcttcaattattgtgaataataattttaagggttggattagggatgtacattttttctatagagataaagctttatagggacttgcccttgatgaggtaaaaattctcaatctaaatggggagtgaagtaaggatgaaaattatgttttattcctggatgttaaatgggcggggagtcggggacgggaatgatactcactgcccgacgagaattcgtttagtactttatttaatagttctaataatattttataatttataattcatgtttgtaatttttagtatgctagtatttttatgaattttaagttgtatttagataataattaatttatagaaaaataattaatgtgtaatattttaa

SEQ ID NO: 1113 - DNA, 1878 bp, Cannabis sativa
tatttgagataaagaaatttcatatttacgaataaacatttattttatttttgtacattgtgggatctatttgtcaatataaattttaagctaatagttttttttgcttaactaattttaagctaatagttattttagggttattatatttacatttcataaatatataaagacatttcattcactaaaaaacattaaactaatttaattatttttactttaacatgaaaacttttatatatatatattttgtttaatttctttcattgaatatttaaattatattttattcatgtgtatttttttagaatattaaaattaagaaaaaataaaaaagaaagtataaatcttaaaaaatatatattatatatttatttttaataaaattaaggtgtctgaatataagagtccctttttcttggaaagggaaaaacacaaaattccttccaaatttaaacaatattattccttataagcaaaaataaaacaaaatacatatattttgaaaacatttatgcaagtaagtacataagcaaaaattgctatatttatatataaaaaaaatcacataagcaaaaatgataggaaatttcttgggattttccaccacataaagcaagtgttattgtatttatttttacttttaatcacttttgtttttttcgttttcgctttagttgcaattatttcacttttactttccaaaataaaactaaacaaattactttctcaaaatcaagagaaaaaagaaaaaaaacataaagctaacaacctaaccaaaactttgcctcgtcttttaaaagtaaattatagcaacaaccaggggcaaaagcgctttttcatctgaacccgcaattcacgcttaaaaaaatcactccaaaaaaaattaaaaataaatagaaaacagtcaacgacatcgattccctattctcatccccacattcgcaccatacgtgtgaacccctcactggctcgaaattcaataaacttttttcttccgctctttaaaccaatataattctgacacgtggaatcgcccccactctatcaaataccaaagcaaaacttttttcactagctgagtcgactcgttgtccccactcgaccattctctcttaaccgaccgagtcacaactcggtccttaaccccaacaccatcatcatcatcatcatcatcgatatcacataaaatctcgacgccctttctttcttctcctcattatgggtttagtgttcttaaagtccaaaccaccactcaccttatataaggctttcagctcgataagatttcgggcctggttatggcggagccgacgatgaactcgccgtccgatacggtacccggaactccgggaatccgggaggtcagggccgaaactatgtcggagacttttaactttatgccgggttcgggtggtggagaatgtgaaattcagggaatacggagggtgaatatgagagcagagattgacacttctccgcctttcgggtcggtcatggaggcggtgacccgttttggtggccacggaccttggattccttatgtaagagtaatagtatagtagtacacttgttattttttaagcaattttattttattttattttatttttttaatacacacacatggaagttttttttttttttgtttttttctcaagtaggaaaaataagatgcatatctaattttagtatccatattaactaattatagagttttgttaggtagtaggacgtgtaaaattttgctatatttttataaattttcacttgttaccaatacttttaatttcaatttatttttactctgttttcatctaagtcttcaaaggcccacttgaaagagtaccttcattcttcagttgatgtgcaattcag

SEQ ID NO: 1114 - DNA, 859 bp, Cannabis sativa
acaaatattcaacaacgaaaatataacaaaaacaacattttgggtcaaatataaacagcttatttttacgttaagaattgatcaaattaatttaatagtaataaaaaagaattgatcaaacttacgattaggcttttattatcatggatcgaatgaatgtcttaggtaggtaaacactttgaaaaataattaaacataatacaaaattacatatttataggtagtgacaaaatgataacaatttatgagaaaaaataatttaattaatggaacacactaaaaaatgctctaatattttatttatttatttatttaattttttaagagcttattctaactcgtttatgcaaattaacaatgaatttaacttaattaatattcatatttatcgatatattaattaatgaaaaccaagttaataaaaatcttcttgcattattatatgactcgttcaaaatattaaaccttttgaaccacatatataatattatagtcaagagtcaaggccaaacttttaattaatattaaataaaaaaaatgtaaaacaaagtatatatatagaatatcatgatcacttacagaaatatcataccaaaatatataaatctatagtctatattatttacaaacctctcttatattagccttaattatcataaaaaaatcatcaatatttttgttacatatttacatatatcaaaattaaatattgtaataattaatatgatgatgaggagaaataacataatgggtagtttggttttgggtattgtgtttgtgattattatgaatattaatattggttttagtgaaggtggtagagtgatgataattataagagatattaattatgatgatg

SEQ ID NO: 1115 - DNA, 5329 bp, Cannabis sativa
aaagtaaaagaaaaaggctcccataaacaatgacaacaaataactgtcattgaaattttatgaagatttaatgtacactacgacctctgtacatttaaatttacagtggtggattttatcaattaaataaatttaaattaataataaaagatccacagtgactagtgactacaactatatcctaacacataaatcaaattttattttatggtcaaatttgatttttgacaattttgacactgctgtagaagcgtttgagatcctttattgctttctcttctatctgaattgaacgtattgatgagggtgtgtccacctctggcttgaaccaccggttcatggctggggtgtcggatggcgagccctgaccggaagtaacggcgaatcccgatacttttgtctttggactgtgggaaagactttgatggtgtttaacctgctcgagacgagtacagcgaatcattgacatggctatcttttcaaaattgaaactgagagaaaaggaataataatgagtacctgctgcaattggatgtccctaagagatggtcgagaatgacgaggaggtgttcctgatgattgccacggtggtgtgcttctttctccatcttgtgcctgtgatgtctgaggcgagaccattggtataggcttggaagccataaacgaactcaacagaattttcccctcgcttttgctatccccgagatcttcctccttgtccttggcgcgaattggctgagtccctttgattctgctttgctcactttgaatttcgcggagagatgcaggtccttttggaattttagctccaccccatgcaggaccctcggtttttttgggtgttgggggagggggtgcaacatctttcggcgcatcatcgagggcaccactcaagaacatggagagacctcccttcctgttctttttcttggaacctgtcattgacgggctcttattctttgacgaatttgaagtctcctggacacagaaacctgactcttttgtggcttcgcttgtcaaagtcatttcaaacatatcactcatatcttcctcctataagaaaattccactagtaagtaaacattaattaagtttaatatttgaatccactgctttatcactgcaattggtgagaaattcaaatattttaatgtatcacttcattagaatacggtttaagtattatcttaaacaaaagcaaccataccaacaaggagaatttcaaaaaacccaccttgagttttaaggcctgagagacttcaacattgaagaaatccttagcagtttcggatacaacttcagttccagaaacaccagacggtgcctcgatttctactgccctttgtttgctcttctttctttgtttctttgcttttttatttcctttgccatcttgaagagctgcggacgatgctgctgcatccacctgctcggttatgactggagcaccaagtgcagcgagtgagttctcaagcactggtcttgttttaagctttgcaatttgttggtcatcgagaagatgtccttttgattgctttacttccagcatctcaatctgttgcaactttttccgtaacgctcgaatttgtttatcaagatcgagatcatccctaggctgcagaaaggaatccattcttaggttcatttcatttttcgagatagatatatggttgtcacgagtcctctggacctcattatcactatcttcctcttcactattaatgatggcaggaaaagtagctgtgggagttgggagacgacggtaactccaagattcagatgatctttggtccaacaagttttcaagtttaactaaaatttccagagaagcactagcaacagcttgtgaagacactgtgaaaatgtagtcaaggttgcggataacaatttcctgaaagaaacaacaaaaagagcttccgtaagaaaaatgaggatgaaatgtcatcaaatgcacaagaaaaaagattgttctaaccatcaactgttgcataaataattttaaaaaaaaaaaagtttgaaccattacaaccttcgaccctttcacaaggaaaattttttgtaaagaaggaaaatattgaagactagctaataaaatggaccagaggcaaaagttgcatgccgccatggccagaattcagatgatcgccaatgttaccttttaaaaaagaaaaatcttaaatttaaactagtaaggctattagattcaatgaaaggtgagcctgtgcaatgtggaagagcgcaagcctacaatagaaggttttgctgcagttatgtattagagtttgaccaagcaaaaaagagggagggagacgggtatagaaggtgacaaagcctaacattgttagtagtaaatcatatgtttgacctgattgatagtttgatacaattaataccactgcagtaagctataataataaaaggccaatctaattcaagtcaattaaaaattagtcatttctaaagagattgaggggaatacctcacaatgcttcctcaaaccctctgcatcaagtgagtcagcaatttcaaccatctgaatagcattccgtggctccactagattttctgcggccactttttcacataaactttttaagcttggtacgagcacttttcctgattccgcatctgtactaggtggttggctaaaggattccatgtcattagtcatgagatattcactaaactcttctagctcatcactgacatttgacttctgcttctcgggatccttcaccatattgtggggatagacaggatgataaagagaaccaataatcaacaaatgagtttcaccaacggaaaccgaactagcccgcttttgaccatgtaaacgagttggcataggtggtttatccttgcctgtcttcccatcccacatgtaaacatcacctgttgctgtgactgctgcagtccagtatttcccggcagatacatttacaacattgtgtccacatagagaatatagctgaagaaaaccaaagataactaataaggcttttcatcaaatgataaagacaaaaccaacaaagacaataagtacagtctagtaaacacctgttgacatctatgatcagtatctgaggagacccaataaaatagcgcaccgtcgtcagtaagagctgagctatgtaccatccctgcagctatagcgaccacatgaagccgttcactacgatgaaacttcagagcagcacccccacccttctttaagtttctagcaatgacaacacgtttcggggtaaccagtcgatgaccccacgtgtatacctgccatgcatgtcacatgactaatttagacatcattaatcctcaacaacatataagtcgtataattttggatgaaaactccaataaataatccataagaatgacctaggcatccacctagttagtacttagtggttagcaccgaattaaagcccatggtataatgaccaagtgagtactttatgtggttaatgttacctctccatcacctcctaacacgagtgtatgatactttgcagcagaaactccagtgaaaacctttcccttcaaggattcaaccaatcttggggtgtaattcgatgctgaatttgatgtaccataaccaagttgaccttctctgttacacccccatgtaaaaacttccccagcctcagaaataacagcagtgtgcttatttgcagcagcaacagccacaatttttgatcgaagagaactcactctgcggggtgtgggctgtgtatccacagatgtgtagccgagctgaccctctacagaagcatgtaaaaaggatcagagtcattaatttcagcataacatagatgactcaagcacaatttgattcatattcatttaattgttaacttaaatcaacaatagataatgttcagatttgatatgcacactagtccgtattacatagaggtttatgttctcttttcacgaaaattggagaagactttttagacagttttacccagattcagtgtggttcaattaaaaatatttttgaatcaagatactatctttcaattctctatttaataatttaaattatctttctgtagctaagatgatatggaaatataccactgtcctttaggtttgttttactgagtattgaggtttttgcaaattgcaagtggtgttgaaaatagaagaaaatggtgataggcccgtggttagattttcagttgccagctttgaataagatcagtacacatatcataccattaccaagctctccatgaaagaatctgaaaatgtgaaccacatgcttcattcattgtcaatttacatcagtctctgtgatcaaagtgtgtgcaagagtttagaattccaagctgtaatgattttatggttcatgattttgttggggatgtacttaatacaaaagataattttaaattgtttagagatagttgttttgtggacagtttggacttttcaaaatagagagaattctatcaattattggaaacaggttgctcctttcataaggttttttggcagtgttgtggcttggaataagatagacacgcttagagccttcatattaatgtccttaccaaactcgtcttccggaattgtataaaagaatctgagaaagtgagtcacatatttgttgattttgaatttagcttctctctgcaatcgaagtttctgttaagaattttgaaattcatgagttattccaataagttgtcatgattgtaaagtttgtaattttgtggggggtacaattaacaacaaaaactgcttcaaagttgtgaggagtgatatgtaggcagattggttggaaagaaataagaggattttcaagataaggagaatctttctttcttttttagtctttcaccgtattctcatcttttgggagaatggaggttctggtgtaatctgtttctattttatgtggttggtcctacagcgttctattcctgtcaagtagcttttgtttcaggtaagtttgattggaaggatttttgttccactgaggctctttcaattttgatgttcaacctatagccatagtcatgtttcttcttaaccaaacaacttataaactgataaagaaacaatatttgcaaattttgtatatgcaaaatctcaaatccccgtataatttacctctgttggatccccaggtgaacacttcaccaccttcagtagaaacaacagtgtgatgtttagctgctgcaacagccttcacccgacgagaccctaaaccggaaatcacttggcgaggtgtaataactgcagcttgaccgctgaaaagataataacaagttgcatctaaaataacaaattaaaaatgagaaaggtaaacagccacagctta

SEQ ID NO: 1116 - DNA, 1266 bp, Cannabis sativa
ttatcatacaccatcattgactggcaccgctgagcatcattcatcaaatcacgcaaatgggtcttcttaatgtcctcaacatgagcctggaaaagcaaaacgacacatatttggaatcatgtatggattttaaatgttatgtgttactatgttatctctattaccttcaattccttccaggcctccatgtcagatatgagagcagaagaagccatttcaaataaatggaagcactttaaaaccaaaaccctgttcaataacagcaataaatttcacaagtaacaaaattacaagaatcaccaaactattctcacacaagcattaacaaattcaaaaaaaaaaaaaacatttgttggaaaatattaaattgaaagtcccagataaggatgactttaaggttacagtagaataggaatagaaatgataaaataaatagtaatggaatagaatagaataaaaaatgacaaagggattgttatctagttacagacttacagttatggaatcaatgccataatagctacaaaaatatcccttaacataaaattttatttaataaatttaaataataataataataataaaatacactttttcaacagcaaaattagcatggacatttagaatttataatttttattttcatatattcttttttaaacatacttaactatttaattaaatgtttaattgatattgataaaataatttttggttaaaattttacaaaataattatttcactatcacataaaagtacgtgactagaacaattttttcaatagtacaattttgcaaaattagataggtgcaagaaagagaataggtgcaattctacaaaataagtgtgacttgagcttgaagaaatagcattaataaaaagtttctccaacatatatttgctctaaaaaacttgtctaaatttgaaccaactagcaaccatattagaaaaccagtcatgtctcattcatgagcccattttcagcacacaaaagattcatataagaagttaacttgaaaccaaatttcagcttcacatataatacaaatagtagattgtgcttatttctaatgacatcgaaatgaacatcatcaaaaaataaaatgatatcaaaaagaacaagcaagcagcaacacacattgtgtgtgagttgaaagtcccaatccaatttaacaaagttaattcattgaggcattttcccaaacagacaacagactatttgcattttataatattaaccaaataaacactccaaaacatacacca

SEQ ID NO: 1117 - DNA, 1980 bp, Cannabis sativa
tttttttttttttttgacaaaacgaatcaacaagtttctgtcaacgtggttcagcaaagatttataatgtgaaaattaacaaacagagagggaaaaaaggcgtacagcagacacatgtaagtgtgatgccaaaaggaactaaattaaatgattggaatacacaactcaaacagtacagaatggtgattcatgctataaacgaaaccacaaaggagaattcaatgagagagaaagagatttgggtgcacctcaaatgttagatagtgtagaaggctgttaataaatttaagcatgctgcgacagagcaatgatgatctgggaatggcggttccacgcattttaagactacgaactccctgcagtcattaaattagaagagaaaaaagggaaagtactaattgtctttagaaataacagttgatagagaagtagatcatacttgatgaacttgccaagccccacaaagctgacgatcaacatgtttgcagtggaaaagaaagcggaaaatcaattgatacttggttagggcttttttagagataactattgacaatggccatcgaacctgaaaaagagtgagacaatgttcatagtgagctcaatcagttgcatattcgtatggatatggccacatttgagaagggttataccccaaaaattaaccacattccaaaaacaaaattgatacaagcaatataatttatagagccagtaaactatgtcattcagcagtctagcattgaatgagggtatgtatgaatccttcatcaggaactctgtgcagcggaaaatcctgaatttgagactttctacaccaaaaacattctcttaaacctgtaatcatgatttctcactgcaaggtgcactctcagcagtcactttagaccagcaactgcaacgtactatgttttgaatatttttttatacattttggggacttgagccccaccactcacccaaccacttgagctaggctaatgcggccagacagtcttttggtagtagaaacgtccaaaactttaactagaaaacaagggtaacctcatattgctttttcaacttagttacataaaatgataatttgatgaaagaagatgcctactcgaaacagaccttgtaactcaatgaaagtgtctcaagaccagttacattaactggctcccctaggtcattatcgtgagtatttctgctattttcatcatctttgagagtccctagtctttggagcaaagaacatgtttcctgaaacaaaagaaaaaaagaaaacaaatagatgcagatttatgaaaggtaacaaacaagtttctcagttgcagacaagagaatgagctgtttaccacacaacatgttaagtcctcatggcaaggatcagctgcagctgctgtagtacgcaaagcaaggtctagcagtgacttcagcaaaaaaaaccagtcattaagccttaatattctatgagatttacattttatgtgaaatatccatgaaaggtaaggaccaaacctgcagcttttcaacagaaatctcatcaagcttttttgtcaactcatccttagctatatccataaaatggaccaggaaatcaccctgtaatacatatcaccattttagaactccatttatgggtaaaataaagattagcaatacacaggtacaacacacttccagaagaaaaatgaaaatgccgctatcgcacacccaaattgaaacatgcacaggcctgctgtaatcaattctctataattcagcgaagctttttgtagaggaaacaatcatatcaaggagatctacttcctgattcttatagagatgtggctttatattttagtaaatataagggatattctcggattcccaaaactcaagggttgtatagtgttgtacttcacaggtgtagccctaatccctttcttatataggttgccgctgtaccttgtctataaaagggagagtagttctgcctctctcttttttttttttttt

SEQ ID NO: 1118 - DNA, 1042 bp, Cannabis sativa
cttttacaggaacttggtctatacaaggctcaaacaaagcttccatttaatgcatttggaacaatggccatggccagagatgtaagagtttgaacttccaaattgttctcttgatgtttcgaagactttgttgattagatttgacaatgacatgagttttgcttgttactaaattttatttacaggaatttgaggacaattctgcatctagtcaggtgttttggttactaaaagagagtgaactaactccgagtaatgccaacattttggacggtcggtatgcagtgtttggttatgtgacaaacaacgaagaacttttagcagatctcaaggttggtgatgttatagaatcgatcgaagtagtgtctggtttagataatcttgccaatcctagttacaagattgctgggtagatagctttctcatgtatttttttggtgatacgttacatctacataggagagttaaatctgccaagccaagccaagccaagcttcttgcttttatgcctacttccaaaatctgaaatctgtatctttagcatttgagagagaactgacatttttattggaaatatgtattctttcctttcttttataaccctgaaatattactcatttgccactagttaacattcttgtatcatgtcaataaaagaagatctttcctttgcataatttgccttacatgtttcttgttggaaaacattttatgtcaacctgtttactttgacccattttgattgtttggacccaaaaaagcattgcagcacataattattacaagagatcttacataacctttatattggtttgaaaacggtttcataacctttataattttctttcatctttattatgtaagaaaattacttggtttcatccaaatcatgcaattgcaagcaaaatgtccatttacaatattaaccttattcattatgaaaatattatgaatctttaatataaaccggtttgactaataattcattgtatggagtaggctactcatattgttattcgaatgaatcctttggtttgactaa

SEQ ID NO: 1119 - DNA, 1984 bp, Cannabis sativa
gtgggtgtgtacatgtaacaaaaggatcttttgtggttgcttatgtagatgtagtgggatatgtaaatgtacagtaggagaagtgcatttagaaccaacttgtgcttattctcagaaatcagaatcttactgttctaatatttatttatttaagttttaaatactataatatattatttaaaagaaaagaaaacatataattaataacccaacatatctctctctctttctttgatataattaaaggtatgttagctagctagtgtgatgaaagcacacagcagatgtggttcagaagcttcatgggaattaaaataattggtagtgatgcattgatgagtcagatatcttgaagattgtattgtcttattaatagtgtccattacaataaagaacaggaccaaaagaaaagtgagaattaataaacagacaaattaaaccaatgtgatcagctcaactcaattgctttttatgaaaaacaccaacacatgtcttaatcattcaacttaaagtaaaactaatcttctttagtatttgtatttgtatttaaactcatttaactacttctctagcttaaggaaagactaatatatgtgcatattaaaaaagtcatcaagacaaatcatgtcacagtcttatcttataatatacatagcatcaaataaagtatgttgttgataaagatccaagcaaatatatatatatttatacatatatatatatatatatatgctattcagcttagcattatagacatagtgatatagaccaatcaattccaagaactataacacagatgacagaacataacttgttgaaaagacttagctttaaagtatatagttctcatcagtatgaggacacttatattatatatgtacattattggaataattatatataagatatatagtaccagtaatgggattaaactcaagaatctatatatgaagttataattgaacatcatttttgggtggtttattctgatatattcttagacaaataattaaactcttgcatatgctttagagaaatgttaaaaaaacattcatagtgccacccaacaccatctagaggaggtatcatacatttattattttaatttaataattattacaaaaaactactaaatacataattattaaccactgtgctcaataatattgggaataatatggaaagggtattttttgttttgagatgtacatcaagaaaatgactagtcgttactcttcacaactccctcaaatcttgtggatctgattcccaattaagcaaaagagtttccaaactgcttatttccataaatgataattaataataaaccagtgttataattatgatgtaatacagtctgcaaattatttgaagaaaaaatgaaattaaaaaaaaactttgtttttgttttgttccctcaagttgaaacttacaattaatgtatatattaagcttattattatatctgggatgttgactttcttcattagaactgggaattgggtactttatattgactccaaaacatcttaaaacaagaagaatctattttggatagcacatgaaaaaacacttgtttaggatgaactaaacgtgtttcattcagaaccatgaaatattagccatactatatacgaagtggaaaatataaaaggagtaattttttttagatcatgttacaaattacaatcggataatattagaatatagtacagtacataacataagtatgatgagttataacaaccaaaaaaaggaatttaattacttatttggcaagacattaaaaacatttcattctaaaaatattaaaagtactctttaggtgtcttacctagataaacacaaaaagacttttagcgttttcttatgggagacacaaaaatttaagtcgaagacagctcaaagtgatggcctttgtaatattcatatgaagaaggtaaagagtctttactaaagaccttctaggaaaaactgctaggaa

SEQ ID NO: 1120 - DNA, 1255 bp, Cannabis sativa
aacatcagacccttttgaaattggccaagataaagcacagcaaaaacaatgagagaaatcccaactcccaaaccaaaccctgaaagtacttttcttctcagccatggaaactgttccccaagtgaaagtcttttcaagttcatggcttgagtaaatgcataacaattaaaggttaagaaaacagtggaaacaaaactgtgtttcgaatggtaaagacaatgagattgagatctatgaggtcgatattcgattataacaactggcagagtgcgtaataaatattcagatgttcatatgaaaataaaaataaagaaataattttgagaagtgtgaacatatgagatcggtttaaaggttagaaaagctttacacagtgcttcttttgcgtggatacacagaatctgagaagttgaaaatggtaagaactgctaagacaaagtgagttcattgaagtaccattttgcccatggtaggttattgattggtttttctatttttgaaactaatagcttcatttgatagacttaggtctttttattttaattctatttttaaaattaagagtacatgactgactaacatgtactagagaaactaaaattgcaattgttgacttttatttaaagaaaattaagtcgtgaccaatcatgatgaattaaaataattgttactattttgcattttggaaaactaaaaactatttaacagaatatcaaatgacaaaatgcatgtgggagaattcatttttaatacttagattcaactctatgatgctagagctatttaattggtaaaggataagaaggtaatttaactaggggggcaacattttcagatgaaattaatgaaagaaaaatgaaaaattaagctacaaattaactgtcaagacaacaatcggagaccactcccgccgacagtcttgggacacgtggcctttttttttttataacgaacggcgatagaagtgcatgcagcacgtgttcctgtccttattggggtccacattttaccaattatatttggacacatcagcagaatccgctactcggcgctgcactgaaccattttaccgccctttagtattattttacttggatcaatttataaaggaaaggaaaggaaataatagaacctggcgagattccagaaaacggcatcgtatcaggcacgaatcgcgtgtagatatgatataggagttatatgggatgtgactgagttatgccatctaaaacacgctgagtttggagctttatta

SEQ ID NO: 1121 - DNA, 4435 bp, Cannabis sativa
tattattattattattataaggatccaaactaaatcaatagaatgaaaatgacttgagacttgaaaattcctctctattgtcatacttttttacattgtcaaaatgtgaaagtgagaacttgcattgcatgccgaaaagctttattggtgaaaaaaaaagaagaagaaaattaagagaaaaataaaactcactcactactcactattattatctataataatatcttcaacgaacagaagcacatatggttgtttgattgtacaaaccattcactccattactgaactgttgcttgtttttccttctctttgtcactactataaatccttcaccatctccatttttcatatttacatcagaagaagaatcagttgattctgaaaccatgtcgtttgttgtattcttcccttcatttccatactcaatctttataatggcactgtcgttttctattgcatctgagttttgcttaaactttttcttcccactgtttccagactcactcggagagtccatgttatgttgaacagacttgacaatgaagctaagtagaatttgccttgcaagctctgatttttcagactctgatatggtctttttaccactctctttagtagcttcaccattggatttcacagcctcttgcaatgtaatttcaattgatgaattcgaatcggttgggacccctcctacagggtcagtttgccatgctcttcttggtacaaactcaggtgcattggggttcatgattctttgaggccctgatccaattctttccaatgtggggtttggaaacttgagaaagtctcttctcatgtggaaagaatagttggttctgtaatacaacgccgaccttggcccgcaaggtactctagcagccacaggaggaactactggctctgcaagcatttcttgactgactcttacatcataaacacttgtggcaggtactgagcttaaggggtgagacatggttactggtgctggcttgaatggctcagctgctgcagaaagtttgcttccatttttatcttttgatttttcatcttcaacttcaacttcttcttgttcagttttgttatctctatgagtctcactagcaacagtttcttcttctgtttcactctttgtgattgcttcaactacagagttgcttttactttcttcagtctctgatgatggtgtctctggtggaacaacacttggtgttttggtttctggtttctcaactgttatctcttcttctttatcaaacactggctttagaaccgttccaggtggtgccaaagctacttccttgtaagatagagattttgaagccatggtactatgagtggttggtgaggaagaaactttagatacagaagctcttacccttgtttgtttctgtgaagaaagctcagtaggaatagtagtagacttggggatcactttctgagatggcgaattgatcaccttcccatttctgttttctctagactttgaatgttcattctgtaacttaagctttgaaagagctggttttctacgtccaaactttctaccggtagcagtgttccctgaacggctctttgaacttgcttcttgccacccttcatctgaagttgtttcttccacaacttcgctaggcgctataaacccgtcattttcttctagctcttgaggaggagaaggaggaggaagaggcgcgttaactgagttaactttcgtatcatcctctttctctatgctattatccactacatcatttggtgtgtcattgtcagctattggcacttgatgttcttcactgaccttatcaccaatctgtagtacctgaaaatttatggaacaccagaaaattgaagcataaataccaaacttatgctgtgttctcaggtgaagcaagcaggaaaagagctatgtacctttgctcttctttgcctcttttgtgcgtcgcttcctttagaatcttgatcaggacttatgaaatccagcagatcagatacactgcaaaaaaaaggtttaatatgttatggtgccaggggaagttatgaattactttgaaagaaagttaatatggggaataccatatttactacctaagatgacccttgcttgcaattaaggcatctggctttggggttccagttctagctgcctcttgctgctctaaagcttttgattcgaaatactcaagccatgcagccgcatcctgcaaaagaacagcataataaaaggtcaaaaatcactactttggattaaaaacaacagaacagataatagtacagcgacattgattgaactacctgagttcgaagatcttcaggcccaagtttggcttgaagtattttaagtgtagtttgctcatgttggacactgagagaatatgcttccatcaatgaaagagcaatagctatggcatgataactagcagcagtctgcaagttcaaaacaacaaagtagacataaatatttagactgagagagcctataaagtgttggtctttgagaaagagggagagagtgagaaagatacttgtatgtggtctgctcctaatagtctttggttgcacttgagagcttcatgtaggtatctcagagcaacatgaacattgcccatgccctcttccatcatagccacgttaatgtatgttgctgcagtgtttgggtgagatagtccacaggtaaaatggaggaggaataaagctcgattcacatacctacaaacaataaacagtttaatcaagagaataatggagaaaaggtaatacaactaaagcaatgtaagtgagttatgctgccaaaacatgagaaagaaaatggttgaggaaatgaaacatattcctacttcaaagccaattcaatatgttgaaggcgataatagaaaaccgaaagatccccatagcttttcattgtatctggatgatctaacccaagctccctctcattaatatccaaagccttttgctgatatacagttgcctttgaaagataaaacaatagtaatcagaaaaaaactatcatcttagttgagaaacactgctattgtcataaccactattgtttgttacctgattgaaatccccagtgtggtaaagaaccactgcaagcagactgtaagcactagcagtagcacgatgattgggaccgcaaacagctatcatcttcgttagagccttcaaattcagaagataataacagttaacttctatggcattaatagaccatacatggcttctatgtacaagatagttgagttagtacctttgttccataattaacagcatcctcaagctttcctttatcgagagcaactttcgatgactcaagaaaattccgaccatcagctgaagagcatgctacatgctgtgtaatgaagggggtaaagttgattataaatttataatacactctaatcacatttagctccctcagagagaacaaactctcaccttgcacacaggaaccaagctaacaatgtcatattttctgaaggggtttgggctttccatgtcataatctctggggaccaactccaacccaacctgggaaaatagtacatattcaagatcattacaacgttcttcattgaaactaatagtgacagtgacctataagatgataatgatgatttaccttatggcaaagtccccggagaattgagtactttctcaagtaaggaagttcttcttttagtttccaaccaaattttcttgataggtatgcttccaaccattgcaacttgagtgaatgatcacctcttgggttttggtcattttcttgtgactcagaatgtccaagcaggaaatttaaagatgaggctattgcttcagacaagtctgtttggttgtaaacagaagctgcaataactgctttaagtacatgcttgaatgctctagtcaccatctcatgaatgcaaagtgactgtatatgaggaagcttgtctgcaagttccacctgttatacaatatcatgttaaaacaaaacaaagttttgaggaaaaagtttgaaactttggaatgaaaatctcaagttactaaccacacgacccaaagatctcatctgaagtcccctcaaatgcatgaaatcagtcagtgtacggccatcaactggagaaagctcaagtgacccgaaatctgttacctaatgtagtaaaagatttagctcataaaacttgcagaaagcatcataaacttatgtcacaactaaaaacaaaagattaccagctttggtagagcaacttcatcataatatttatgtgccatcttcataagttcatctattgtctgttgcaagaaagagactaaaactgttaattcatctgaacatataagtaaagatttttctttaaaaaaaaaaagaacagtaacaagaatttgcataaacctttagatgaagaccagttccagattctttgagacgcgagtaagcatcttcagaaactagtttctt

SEQ ID NO: 1122 - DNA, 1144 bp, Cannabis sativa
ggcacccacttcctcattactgttttcttcgagcaaaggcttcctgttgtctctattaattacagcgacttgattttcatcatcctcattggacaagtcaaaactattcaggaagatacctgtaaatgcatatgaaatgaaatgattcataaaatagctactctgcgattgcacacaatagagtttcaactcttttttattatgtcgagtaaatagagcagtcatatctgatgcgtgtgctcatacccccgcaaatagatcaagaatgagaagtttcaactttactttactcttatgaaacatagcatgtgtgattttcatttgtagacaaagatagagagtagttttttcacaggttaaaacatgtacgaaatttgcaacagtatgctgctcacctatgaaccatattgcagcagcaataaacagaatagcagtcagaattagagctgttgtcctccagttgttaagatgatcctgcattatgatagaatttaaatatgatgccacaaaagagaatatttcggtgagaggagaaagctaaaaatacaagcatgtaggaacttatatcaccaagactaatcctttacaaataatggagtctgtataatctaaatgtaggcaagaagcaatttgatccatagaatgacaggagtagttggcatgacactagatggtagaagatataattcaaggagtgttttgtaaaaattatgaaaatctttatcagcaaaataactttacaaaaatttttattagtaaaataaccttctatagtcgcaaaaacgaccatgaattacactgtgcgaccataaacgaccattatggtcgtttacactgtgtgaccataaacgaccattatggtcatttacactgtgcgaccatagagtaaattaagtgaggttattttacaaattttagtatttgaaatggttagtttggcatgcaactttaagaataaaccttaactaaagagagaggtcatctatgaaagacaaaaaaggacagctatttgaatcctattaaaacatcaactaagaaactaaatgtaggttaaagtgtccaactagttgaattcacagaatccataactaaatcagggtttttcgagcagtttagcccaactttgtttaagatgtgatgttgg

SEQ ID NO: 1123 - DNA, 2181 bp, Cannabis sativa
ttttttttttttttataaaaaacctatcaaacttgcttacctctaataaaaaatgttgagggccactagtgccaatagtaatgatgttttacaaattccaccgaaatttattatggtagtggcaataacttaattacacgaagcatagtaatattacatttccatttcacactttcaatcctaccactctctctccctctttctgatttgggtattccaattcctctctctcaataaagatttggtatgtacctaaaggattgttctatctctttcttactaatgattgtgggactatttttaatatggatgatgacttactaatggttctgggactatttttaatatggatgatgaacggtaagttagtttgtttattgtttttttttcttttctaaataatagaataactaaatatatttttccaaaattagattttgcaaggggtttaaagtcattggtgaatgagaatcgaattaattatgttatactatgttttgtttcaatatagctttgtggctttattatacaaagcttcattactatatctcattattcctgatgtgggaaagagacccacgggttttctgggtggtaaagagagcatggaaagaaataattcatgagcacccgatggttaacttataacgcaaatcaaacacacaaaggctcacctaaccaagtggaataagttccaattcaagaagctgtcaacacagataaatgaggctcgtataacactcaggtctattgaagaggcgcaaaactttgatgagaaggctcactccgaagctagagccaatctagaggaggggttaagaagagaagaaatcttttggcgtcaaaagtcgagagtggcctggctaaaagatggagaccgttcaacgaaattcttcatggccagcaccgtaacaaggagaagacacaactatatttaatttctaaagaatgaacaggggacgacgattgaagaaatgaaagacatagcccagttattcattgagaaatttaccagtaccttctccaagaatggctcacgacttaagtttgatgctgaggagtggactcatatgcggatggacaatatgttaaaggaagatctaatggaagctccttctgaggaggaagtattgaaagctttagcatccatgggaatcgacaaagcccctggaccggatggatccccagttgtttttttttcggtctcattgggacacaatcagagaagacttcctcaaatttattaaacacttctttgaatctgcagaattaccccactacatcaatgatacaaatatagtgctggtgccgaagaaggaatgtccatctatggtttgtgatttttggccaatagccttgtgcaatgtggtgtacaaatgtatataaaaaattattgccactcggcttcgagatatcctaccttccataatctccccgacgcaaacgactttcatcaaagggagatgcatcactgagaatactgcaattgccaaagaaatcattcattctatgtcccggaaaaaaggttcgaaaggttttatgatgataaagctcgatatggagaaggcttacgacaagatggactgggactttttaatggaggctctcagctttcatggttttaagaaccctctgctggggtggatcaagagctgaattaagaagatgaatttgatgattaatggggcgaaacaaggcactatcacccccacgagtggactcaggcagggtgacccgctatcccccactctcttcatcctagctgcagacttgttatctcggctactacaggactacacaaacaaaggaaagattaggggggttcaaagttactcttacagctccctcaattacacatcttatgtttgcggatgacgtagtcttatttggtcaagccactatcaaagaagcacaggccttcatggagtgcattcagaagtattgtgcttggtcgggacaagcgataaatcttcgaaaatcgacagtatacttttcaaaacgggtacctagaaatcgagttaatgacatcacaagtctcctaggaatgtgcaagatgaagaatgaagactcatatcttggaattcccctctttagatccaagaaacgatcaaaagatgtgcaatatttggtgcaaagagtgcttgcaagaatagatgggtggaaattgttggaaattatttt

SEQ ID NO: 1124 - DNA, 2435 bp, Cannabis sativa
atgttaacaacaaaaccttttgaatcgacgagaattatgatatcatgctttaaggtctagacattataatgcagtgtgagttgttcaaaacatatagaattggcaatttgagataagtattattttatttattttaacatacgatgcaatgttatattaattaagcacaatgttttgcttttccttctcatgcatctatcaattggactatgtggctatgctatggtcctaaattaattttgtcaacattacgttcacatatatatttatactcatcatacctttaaaaagccattaatattaatgtcaaatttacatatatgcttatatatatatggaatacatatgtatatatatttaaatacaaacacgattattaggagaaaaaaaaatgtaacattgtcccaccaaagaagtacgtaatatcattgtcattggattttatttaatgactcgcaatatctctttcatctatcaattcacaaaattattatcaaataaatacttacctgtgaacagcaatgacaaatggtatgggtttcaacttttaaccatgatctttgtactctagtgtaaattctttcgattattattattattattattatttatgagtattaattttgtttatgaatgaacttgaacaccgagttccagaatagttggaaaaagaaaaggcttgaacacatggtacaacaagttcgactgttaaagcttggtcttttatacaattatccatgtgactatcattcatgagaacatggtgtctcccaagctagaagacccccccaaaaaaaaaaattaaaaattcagaaaaagggaacattgttcggaggaggggtgtttatgtctcttcaggaaatgttagtgaatttaataaggaaggtctgacaaggacagtttggtaatttagctgtaagaagtgagcggttaaagagtcctctcacttctgttcaaagtctcttacctgcatagaagagtttcttctagtgagagaaattgtagagagagaaagaacaaatttacaaggataaagaaaggaacaaaactgcaaactttgaaaggaaaaaaccaaaaaactgagagttatataccttactctgctctgattctctataccttcaatcttgtttaggagctcactttcagaattggatccttttttttttggccttatctgattctggggttcaacaagttggtcatgtttttctgaattgtgtatggctttttgctgtaaaattatttgactttggagctagaagtgaattttaggaggaagatgtcttggaaaagcagagtagagaagccttcagggagcattatacctaaaaaatgggctctttttctatgtttaggcagcttctgtgctggaatgctcttcaccaataggtaattattagttcttagctctcttgcttctaatttattcatatcgttagcaagtgatcatttgggggttttggttcttgggctaattttgtataggaatatttggaatgaattaaagctttgttgactctactgttgaagtcaattaacgaagccttatgaattatatttttattttttaagatctattgttcatgattgttttttattattttggtttttaattagtgcctcaatttttttgtatgtggctcctcttttgtctttatttttaattaatatgttggaaaatgaatttttgatggggttttcatttatgggatttctgttctcaattttgttatttcagagcatatgaattcagggccttctttattacttcctgttaagaacactgttctagtcttaatgtctgtgcccatcttctgcaaactcaatcctcatttatttggatcgtaaaatgaattttgattacatgagttttggactggtaatatttgcataggttagagtcttgattcagactctacttaccagaattaccaaaccaaaatcctgattaaaatgatctctctcctttttcatctagtactatgtcgttttgtaaagtaactggttttataagttttaaatttgagtcatattttattgttatctgaccacttttcacttttattatcaaacttttgctttcatgatgttatcaaattcttgtcttgaaaattactgttaaaagtttgaaattgtcgtacttatattgttgaaaaatgtacttttctagtttgggtgatataatttaacgatgattttgtattgaaattaggatgtggaacgttcctgaaactaaagatattacaagaacaacttcagtggaagctgaaaaactgaaactagtctctgagggttgtggtccaaaatctgtgagtatctcatacttttatcgtattcttacttttaataagcttgtcatttttttcttttggtttttgtttctttggtctgatttgcgtcgttttagttgcatcagaaggaggtaaggcgcg

SEQ ID NO: 1125 - DNA, 4555 bp, Cannabis sativa
caaattatatatagcaaaaaatttcaggtatgaacgggtacaaaaaattaaactcaactcaataacattgtttccgagtctccgacgtcgacattgatgggttttagcccaaattagacctaaaaacataaaggaatagatttatgaagatttggtgagcaaaaaacatgaaaaaatctaacttcaggtcaccaaaaatatttagggtatgaacgagtttgcagattttcatttagtaggagagtctcagcacagaattaaaatcaacagaattgagaaaaaaaaaaagaaaaagagaatttttctcatatttaattaaattacacagtttaggtgtgatgacattttaggtgtcactaaatgttatatgtgctacacttttgacataataaactcgtgaaatgtaaatatataatgacctccgctcgttatgaaccactccaattaaaagctaaaccaaaattcatacacgtagaagtaataggcctcacatgtaaaggtcattggaagcccagatttagctaagtaatcactgattcagacttaagaagaagaagaaaaccaattccattcaaagtgttcaacattaaaaagacaaattcattactaaaagtgaaggaccttaatagtcaattaagaaaagaaaataaggatttcactttcaatcatgtaagagacataagaatagaagaaagagaaatgtccttaaatttgattatcaacagcaagctgttcaataactggtttttctgcattttacaagattgactgacaaaaaatggaaaaggaaaaaaaaaacacattagcttctgatagctgttgaaaacaaagatatatgtacttgtatggtacagtattggaaacatgcatattaaactggatatcagtctgaattagtgattctcatacccttttgacttcaacaaggagagaaagtcttccctaagatgcgtgtatcaagaaacaaatgaaaaagaaaaaggtcaaggcaaatcaaactcagcttacaacctacaaaaatatcagccctccaatgaacgaggcaaggggaaactagtgaaaattactacaaggatgtacgcctaaacaaagagtgactgagacattacttgatgagactggaaattagagtatcccctgtacccgaaacagtgtctagtaatttttacctaaatgccagccatatctgtttcatagctgtgaagtgtattgactgcacttaatagcatctccattcctcctccactcttatctgatcccatgtttcctttacgtttcaactttccacggcttccaaatgtcactgttcttggatggccttgcactatctgtttgtttgaagaactctcatatgcccttttcgctgtccttattgtttgcaatttcacattacaagaattgcaaaaccacttcccctctggaaaactagtcagttttggttgcagacagtagagatggaacgcataatcacagccatcacataagatgatcttttcatcatctctatcagtaagacaagttctgcacaagcaagaagggcagtaccaaccagtagtactatatgatttcagctgcttctttgtcaggcaccttgcatgatagagtttgcaggggcagaatgaatggacacatatctttatgttgtcaccttctcgtatcgcaccattacaaatcttacagtgctctacccttttcctcttttccatggttctctcttcatctgtaacacagtttgaatcatcaccttcaagtgtggcttcatttgtacaggaacttccattgccaacacccttgaccacagtctccttaattttctcgcacaccacacatttctcatgctgtgaacgaattccgcaggtagcacaagtggcacaataccaacttttcgggggaatctcttcaactgctggtttaatgcaggatatgtgatacatctcctcacatgaatcacaaacaaggcaggtcctcccatctgctttgtctccacattgtctacaagggcaaattctgtatttacggcagtcctctctctgaaccaccttagtgtgagagttaggttcccagtggcaggactgcttgaagaaccatggtaaacactcattaaataaataaataataacataataatcaagatgaatatgatgtactgagaattgtagaaacaagtataaaaggtttcaaaattcttaaacaactgactcttatcttaccatgacttctcacaactgtcaaagaatactggaattttttttttctagttttaaggtttcttatagcacacaacctatcataatacaagaagaaaatgcagaaaataaaactcaggatttttggtcaacagtatctgaaaggcaagcataagacaaatgagacttcaaagaaatctccttcttattggttgaaagagtagaatttcattttttatttaaatataattctgagctgtagaatttatttctacctttacttgtatattgtcattttatattttgttaaaaaagagataaatacagcttcagatcaacaattaacagcacaaccatgacaacaccagtcatccatttaaacgttttcccagattttaattgtcaatgttttcaaatgtgctgtgaattaaaaccccatctggcagaaattttactaacaaactaagaaatgttattgtaataactgattgaagataggaaaaggtacaaaacctagacattaagagtaacaaacatagcaatatcctcaactgaattgtcttacctgcttattatagcaagagatcgaaaaatcagataggctttttgcaagagaaatcatctcagcaccaacttcttcaagctttccccaaccctggaaatatataaaagcacacaagggtaagcccccacaatgaaaattctactcagtaccacacaaagataattatccttgactttcactggaaaggatcaataatttagccgatgtataataggaaaaaggaaaaaagtatgaaaccgtgtcgacaatgcctttcaaccaactttaaccagcacattcagctctaaactgcataaagtgaccttgtaattttcaaatagttcatatgcagaacagaagacacaggagtactaatactaaagactacaacaaacaaatgcaagaaacatcacgagaacaaataataataaaacaatgaaaacaatccattaagagaaaaaaaaaaaagtcctttaactttcaactatcatttccttaaacataacagacaggttcagaattgatgtaaatctattatgtaagagtaaagcaaaagaaaacaaacaacagagagacagaacttttagaatttggatcatgacatgaaaagaaaaaacaagacatagtgttaccccaacttgcctgttgaatatctgaaaggaaaagcaaaggagattggttataggctccagtttctatccttgagtttataagtgtatagtcaagaaaactgtcgatcttcatttcatggaaatgatctaacataagcttgcaaagtgaggtaaacttttccgatgttacaacatcaaaaaaagtacgatgacagatctcagagactgactgatgatttaagctatccaaatgcccattggatacagcacccacttgcccactagcttctttctgaaatccttttaaaagactgtctgttagtgaagtgcacctctgcccattggatacagcacccacttgaccactagcttctttctgaaatcccttcatgagactgtctgatggtgaactgtacctctgccttttatcaacgtgatgatcatactgctgtaaaatcataaagaaacaaaaacattaaaattcaaggagagtcaaaataaaactacagatttcaaagaaaatactaagagtcacaatcactaactctagttaaggcacaaaccttagttcttgctacatgattagtatctggacagaattccagtgcatctcgaatgcatcctttcagaccaccttcactatcacgtaaagactgaaacataccttccaaaacaattttccaaggcttctgtgaacaattcttcaaaccatccatgcagaagtgagttcgcttatgctgacaagtagtttccatgctaatgccttcttgttcttttacgaactggaataaataaataaataatggctcaggtttttcttacagaacaactaaatccttaaccgatattctaaacatcaatacgcaattaaaagttaaaaataaaaaattggtaaaggaaaaatatttatatggtaatgaaaaagaataaaatgaaaattgagcaatcttttctcaatttcactaattcacaaactatgtgaggtaatccctaaacgcatatctaaattggcaaatgaacaacgcaagggacaagaaagaaaaatatttcccatatctccattttcatgtaagtccaatacgggttagcaaacacagccctaagtaaatcccctaaagcagtctgagaaaatagattcaaagaagatttcgatattgattattggaacaagatttgcggatttatatttctatgatattaatatacgtatatat

SEQ ID NO: 1126 - DNA, 2508 bp, Cannabis sativa
ctagaacgaactcttccgagtagagcaaccactcctattatgtccttcattaaatcattctctttctcttgaaatggaacttccttagatatgctgcaaagaactgcagcagcaacagagttgcccatctttactatactctctatcacttcttctttcgtggagaactgattcacgaaacccggtcgatatagttcggtagaatctaaaaattcacaacaaatacaagatcttgacaagtatttcaattaacacaatcataatataccaaaatgtgataaagaattgaaaccatagatgtgctagcaagtcaaaaccttgcaagtcttttatagtttcttcaatcttttctttctcttcatttaactgatgatatttatcttccaatatttggatttctgaaccaaattttaaaaggtcatcttcaaagacctgcagtgacaaaaaaagaaactcatatagatgaatagaaagaactatttcaatggttatctcctaagccaagataaaaactatgcttgcacctttttataattcttgatgaacatagaaaattccattccatcatgctcctcttttgaattttgccttgcaggtttgacaatcgaagatttgtaaagatctacggttttatttttctgaagccgcttatccatttggttattccattcagcagtttcaacaggtaagcactaggattatagaacaaaatgttgaacaaataatgaaagcaaattcatttatctttgtaccataaggaataaaaaggaaaatggaaaagtatgttggaacctttttggaatcgattacgctgataggtaaagacaaggagcgtttcatatcaagagtcatcatcccattaacttctgaaattatgcaaccatcatcctctggtgtaccaagtggcctttttaatccaatgaagtacagatacttactgtcagaaaattattcaagtagttgaaagaatgagtaaataaagagcctcaacttctcaaaatatacctgcaaataatctgaacttcgcctattcgaaaaggcacaaaagagaaacaagagtcaaatcttcaccccaaactcttgcattaacaataacaaaaagtattgacaaggaaaaacttacctcctgtatctccttgtaaacctccaagtataaaatattgtatagttgcatagacattattcttatgaacaccagcacatgctcccttcaaaatcttaacatgttggccagctttccatgttatttcattcctcttaagaacttggtgaacccttgaaactttaatttaacattgggaaaaaaatggaagaaatcaattggaaaatgaaccaagaccagaaaaccaaatacttttccttttttcatgcctaccatcatttgattttctgattgcctttccttttgatgggcttgtgataagtgcaagtataggttcgtcttcgccgtgatcaacttcttcatcatacttattgtgcatctggagaatccaattttgataatccctctctagttgcgaatttttcaatggcttcccatctctataaactctgatttctatccctgcaagtgtaaggactgagtttgaatttttgagttggatacaaactgaataacaaatgatgcacaacagttccaataggcaaaaaagaagacctttttcattctcataaagaatatttccgaaattccttagtgcagtggtaaaaggactgtgaggtgcaagatcatgctgcagataaatacacacttgctgagtaactttaactttagttataaagtacacaaccacaaataaaaatagttagatgttttatgcacacaaatgaagctctgacatctttgtttttacaatggctaatatacaaaaaatcttatttttagttacaacaaaacttgtgactaaaagtaaaaaggttgatataattatatatatcatttctatgttcagactaaaaagtctgtgactaaaagtattagtcacaaaaatcataatttactgtgaccaaatgtatttttagtcacaatacatgttgtgactaaaactaaattagtgataacttgtattaaatcaaaaggatagaacactaaggaaacatgctatcttttaatcaatggtgcatctgtacaaggcactcaacaccagctacgagcaaagttggaaggtttaggaagagagagagagagaggtagaaatttgcttgaatcttgatacattaatgaaagaatagcatcaaaacttaccttcgacggagtgggattgataccagcatcagtatctgcaacatgacattgtttaacttaatcaagaatatgaaagcaatatagaaaatcctcaaacaaaggaatgttctcttcataaagtgcagataacacagtgtcagcctaccaataaagcatttcactctgaaacaacatctcttcaatatgtgtgccctatcagttccctttttttgccttaagtccatgaaaggcatccaatcctgataaaaagttttattaaagga

SEQ ID NO: 1127 - DNA, 2906 bp, Cannabis sativa
tgtgtattgcttctcgaggcattgctggtggtttttgtctgatatggaatgaattagtgaggattagtaatttgtgtcttgataatttcatcatcgattcggtacttcaggatccagattcaggcaaagaatggagacttattgctacttacagaactccttataatgtcgagaagaaggtgttttggagttcttttcaagacagattaatcaattgtggtttaccatggttggtggtgggggatttgaactgtattagctcgatggaggaaaattctgggggcaaacgcactagttgggttgagctgagacattttgatcttctgttcaggggctacaaatacacttggcagaataatagatacactagggagcttgttcgagagagattagacagagcaattggctcctttgattgggtttcatggtactcaaaagttggggtgcggaatttgcctatcacggctttggatcatgcttgtatcttgctcgatacgcagatgttttgtgcaaaaaatttcattccattcaaattttttgaagcctggacattggtggactcgtgtaaggacatggtgactgaatcttggcgggtcgttggttccgaccctgccaccacttttgtagagaacttgaacaaagttagaatttcccgacaaagttggaagaaaatgaattatggcaatagtgaatcgattatttcagagttggttggattcaaaaccagccaatcactgggtcattggttcatgaggaagttactatcaaggaaaagctgaaagagatttggcaaaggaaagaaattgaatggagacaaaaatcaagagaagtttggctctctctaggcgatagaaattcaagatttttccatgcttcaaaagttattcggagaaggagaaaccaaattttggtgcttcaagatgacttcggttcaccccgtgaggggaggagacactttactacgattataaacaggtatttcactaagctctattataccagtatgcctgaaatctcctcggctttagatgatcttttctctaatagagtcaactcagaggataatgagttcttcaccaacattctcaagtttgaggaaataagggcaactgcttttgagctacatcctctgaaggccccaggcccttatgggttttcgggatgtttttttcgtaagttcttgactttggtgggagataatatttgtgaggttgtgaaaaagttcttcagaacaagggtcttggaaaaacagttgaattataccttaatctgtttaatcccaaaggtggaacaccctgatcgtatcgaccaattcaggcctattagcctttgtaatttctcctataaaatcattgcaatgatcctcgcaaacaggctaaaacgggtcatggatgagttgatttcccttgttcaatcagcttttataccaggaagatggattgctgaatcgtctattcttactcaagagctggttcacatgacatataagaggaaaaggtggactgatggctttaaagctagacatgcacaaaacttatgacaagatggagtaggggtttattaagcgtgttcttctagctttcagttttagcagaagaagccgtgatatgattctggaatgtgtcacaagtgtctcctactcggtcttgtttaatggtagtcctttgaagaaattctcacctcagcggggacttcgtcaaggcgaccctttgtcaccctttatttttcttctttgccaagaggtattgtctaaacttctttcatcagcagagcatagaggtttgatccatggaattaaaattgctagaaatgctccgacaatctctcatctaatgttcacagatgatacaatcttatttgcccgtggaaatgagaatgaggcaggggaattactcaaatgtttagccacttatgagaagtggtcgggccaaacttgcagcaagcagaaaacttcagtgcttttttcaaacaacttaagccaaaacagaaagtcctccattctttattgtttgcaaataatcatgcttaatggtgaggagaagcacctaggtaatccctttgttttcaaaagaagaaaaaaaggaagaatatgccattttaaaagagagaatatttaaatgcctggctagttggaaaatgagatttctgtcatatgcgagacgtttgaggtttatcaaatcggttgctacatctattctggtgtacgccatgtccactaataaagttcccatctctatttgtagagatcttgatgctatggttagaaaatttttgtggaatggtcaagtggggaaagactaatttctagccttcaaatcttgggaccatttgtgtcaacctaaacaatcgggggggctgggagttagaagatttgaggatatgaacaaagatctcctatcaaaacttgcctagagtattgcaaggagaaaaccgaaaccgtgggtgaactgtttgttgtccaaatactgcagccacgaaaatttctggatggttaaggctaaaggcaatgattctttcatgtggaaaagtatactggaaactcgggagattatcaagaagggttcgatgaccttagctgcaagtggaatatcgatagatttctggcatcaacaatggattccctggttggaagttagagaattcaatgatcttatggagaatattcgaccaagaagattattagtgtggacgctgacggatatctcgattggcagtgactggaatgaggaacttgtaaggaaaatttttggtgatcaaatggggaaacttgttatggctatcccaagattgaacccccctcattcggatatgatcatttggaagtggaaagataatggaaacttctcggtcaaagaggcttaacgtattgatcaagagcatcgttttgggcagaccaaatcactttg

SEQ ID NO: 1128 - DNA, 743 bp, Cannabis sativa
ggagaggatttgtttgactcgggttgatctaaaagtagatggacatatcttaatgaagatgcttgacaattgagattgctggtgtttcacaatttgttttgtacacaaattttctttaatcttttttcatgttaaagttagtaatatgagtagtttatcatgttaaaagttgtgattttgtggaaagattcaagtgcttttacatcaagattatatacagatcaagtatgtgatttgttcttataaattttgaggctcattttttattttctttctagtcaaaaaatgaaaaaagaaaaataataatgttgctgcccaggatcgaactggagacctttagtgtgtaagactaacgtgataaccactacaccacagcaacatattatattggattaagcttcatttaatttaattacaactttattgtttttgaattctttcataacataaactcagcaacactaatttaatttacatttgtcgttaaaaatgtccctttgtttttattaagtttataattttaaagattcataataatttgaaggcagcaatggctactattactatggactctcctacagctgttcgaaaaggtagtccccttcaccctttgatttccttcaattttctattttttaatttcgaattacactaatctgattgcccattagggttttaaagaaagaaaaattaggtctttatttttttttaattgatatattggattttggagcagtggttgt

SEQ ID NO: 1129 - DNA, 3650 bp, Cannabis sativa
atgagctcatactaattccagattagcttctcactagtggccatgctagtaggaaccttggatatagactagaaagtatacttctcattattttattttttatcctattcggcttgtgtttaagtttctgcacgctaaattcaactccatgtcatgacaatacatgattcattttatcataacaatcacactcaacaaacacaggcaacccacctatagttttcctctataatcaaaagcactacttgtaaggattatgattcaacaagtctcctttttttaaatatttgaaccctaacaaatctaatcacttcacaattccattacactgacactctgcacaaaaaccaccatgcaactacaagttttatacacaatcatctttgatctctgaccatctagtagccagaaaccacctttcaaatccacaaacattgtaacacccttctacccaacttcattgatgtaaatttgactgaattttagttctattatgtctcaataacaattgaggacatcaaaaagaaacttttgagaaaaaactgcaacttctgttgtttattcaagttagtaaagtaccagtgagaattataaattaagtgtgaaatctagatggcaaaacagataaatattacctgagttgaaaacaaactgcatcgggaaattgcttcttcattccaccgcacaaattctgtcacaacagtgacagatatttgctggtgagaagacactgctgcagctcctcttgagcgcccaattgttccagttgagtcagatagctggctttcagcacgcaattctgccatctgaacaatggaattaacataatgcttttatctcagataaagctacatcagagttgaaactttcacgaggcaattaaacaaaccttcgcttgataaagttgtctaagtgaggcctgctcgtgttcaggatattcatccttgtgagcagaaaacagagattctgtgaggcctgcaccaaaaaacgagttttaataagctcccagaaggttattcaatcactgaaagaaaaatccaatcaatagcatacatgataaattacacctgagagcaaaagatgttgacaaaaaattaactaaaataaaataaccactcccatcaagtaagcaggtaattatatttcagggaggagctaaaaagcaggctcagaacaggtgtggtatataatggcatcatctattcattcttttacttgcaagttcatccacctagagtacgattcactgcaacatagctaaccaagtaactgcagaagttccttagaatactcatctagtaccccaatacacatcaagaaagcacggtgcttctcagactattcactaatctgttctatgagacatgacctctataatgccaagagcacccacaagcaaaatcagtatgataaccattcatttgctattagcaaaacatgcaaatgcaatttctaacaaagcgccttttgtttcataaaaatttctaagaatacatccacaaagagaataccttcaacatccaagtcaccacatcccacggcacgtagatctctagcaagttcttgagtcttttcgtaagccactgccagcattctaagatactgaagaatatcaagtaaaacaccaattgaattaagaagtatactgaggggaaatgaaagaaattcataacatctcaatattgtactcaccaaaagaagtccaccttcttccataggaggtagatttacaagagagggtttcactaatagtttgtccagaagggctgtaaccctctgctctaaaactcgctgcatgaaacattaaaatctacttataatcatgaagttgttgaccaatattgcagtagttcaaaaagccattctaataagagcaaatttactagatttacctggactaaaattgccatgacatcattaggagaagggaaaacagccataattgttgcagcctctttacgtacagtatctgcaagacaaataaatgtagcattaagatgtgtacgtgtttattacaaagattccaacctcttgaaagagattaatgaaagtctcaagacctgtgatttctttgtacaaagaagcaagcccacgagcaacattgctaggagtggcctgtgaagtatggtcaccaagaaccaatcttgtatctgcattcatgacttccacgttgataaacattggacgagttgccacataatgttgcatggcactagtacccctgttaaactgtataaaaaattaaaaagatgtgacaacagcaatggaaagagactcctgatatgctaaacaatatactttgaccaagaggttcaccagattctaagttaaatgttgatgcactaagtcactatcacagaaataaactaaatataagacaagtaaaaaattaatccatagttcctctttccattcccctcctaccccccagaagatatgaagctaacccaggaacaaaaagatgacctgaagggaggatttcagagaacatggattttttaaaaaaaatatgaaaggaactttgggaggttgaataaacaaaaaaaaaaaaagcatgaacctcagtaagtcagttacgcgaaaacaccacagataccaatcaagtagaagagaaaaacaatgcaataatcatttacgcgaagtttagagttactctgaaagtatcattcaagaaatgaagctttgtatataatcagtagaatactatacaaagaaataattgttttaaaaaaaaatacaaagaataggatcatgttaatctcaacgagaaaaaacatatatatgaatgctgaaaccagcaacatcatagtcgtagttagttgcaataaaaccaaaatggaaagtaaaaacattacaaaattcaggatagatagtgcttaaatttaatcttatcacaaattctttcatctggttcttctctttcttcaaaaattctgaaagtatcatttatagggaccaagaacaacagttacctgagataaaattttagcacattcagccatagtagataattcccttctttgcgatgcagcatcaaatcgagacagcaatctgttttccagttctacaaaatatatatatttatataataagataaaaccagctcaaaacatatgatgtagttactgaaaattcttctccacaaatattcattgctagggttccaaattactctagaaacaggaaaataaatgttttcttcttggtagcacgaaaaatgatctaaattatgtgcattatccccattagcaaatactaaattcgtaagtgtatgtgttatatatcctcctcttaattcaatcaattttattataacctaccagcaacatctcttacataaactttttatttttaaaaattgatgcagttgttcaaaaaaaaaaaagaaaaaaaaaattgatgcagctgcatagcaaaaacaaaatataatatatgtatgtatgtagcattaatgcatactaggttaccattgcaataatcctgaagattagcgactgcaacttccagtcctctgctagctgttgcattgcctgcaactgatggtacagttatgctttgccttccaatgtcttcctctgcaaatgaccctataccagcaaaaaccgtggattaaaagttgttcatatctcatatatatggaaaatagttga

SEQ ID NO: 1130 - DNA, 2265 bp, Cannabis sativa
tatatatataagatcgagagagatctagagatcactttgaagtaagtttcattacttcatttaatatacaatttatataggttttaaatcccaacgtacgaaatgattcaagaagcatgagttaggttgatatttctctacgtaaacggccttaccatttggactaaaatatcgctcttataaaattatgtaatatatacatgtatatatataatgatgatgatgatgatgatgatgatgatctttaatacccttgtgactataattattaccccacttagacaaacccttttaattacgccactcctccatatttatgttacacatttattataaattacaactttcatattagccacacaaaaattaaaaatcggggatgcatgtacatagaataagaaaataaatacatacttccagcccaaggaatattcatcattaatcatagggtgtgaaaatatttgtaagaaataaggatagtgaaagcaatgtgtatttgcattgtgcccaatttaaagataattcttaaatatattgagtgagtactgagtaagtggtgcttattagagccaaaatgtataagcttatcttagctcaaatctttgtcagtgacttttgggtggtccagaaaagccaaaaccaaattgaggaatatattattatcacttttgaaaaatcttgtgcgtgcccatttcaaacaccgttgattcccatatcactgtccaatattatgataaaatttatacgttttatatcaatttatatccttcttgcatttttataattatctttttccacgtatacattaatagggtgcccttaaaatagttgcccttataatatgtttcaatagtttatctttttttcattcataataatgatgtatatgtgttataattatttaggtctatttgtacaatttttttttattaaaaaaaataaataattttaataaaaataaagcgaataattatttatcattcgtataaaataaatagtcatgtgtatactaaaatatttgaatctactttataaattatttagaatttttttaaaaaaaaattacaataattttaaataactataattaaacaattataaaaataaattatactaaaaaacttatattagatttttaaatataagaagtgtataaaattattttttattttctaggtgtgcactacacacttaaaacataaatattacatataatatatatattcagccttcattaaaaacaaatatatctatctatatatataatttattcttgcaaacaacattacaaacacttataacatcttatcgtacaaactcagctattgtgaaatttatatttaaagaaaaaagaagaaaaaaatctattttcacttctatttaaattttatccccaatgggggagggaaaagaaaaagagaggataaaatgtgataaggaattttaccaagtgaattagagtatgcaaatgattggccaatagggagtgatgacttggagtggagtcaaaattgttgactcgtgaaacttacggacaacgagatctggcgtcggcattatggggaggccgctaaagctgttagccaaaatgaacacattccttccttggagtatcagattttgtctttatgcttacgtggcatctcaaggacttgccaccaaattaagggtccacgtggatgcttgccacgtgttcaatcagaagagagccgtgcgacgcttgtaggggaacaactgagttgtccgtaaactcccaacaaaagtgggcccttttgtaacagaacccttaacagattctattaattctgtttttctttttattatttatttatttatttaatttttacaaaaatggtttgttgtgtttctgctttggagattagtttcttcttttgtttagactactagagaagcattattcagtttctattaatggagcccaccttattaattcatggcctctagaaacctcttaaagcaatgatattaatttcttttcacatgtcttcatctcaattataaaaacataacttcttaatctatataacttaattaataatcccttgcttttgcaaaacttgttcgtttcgattattcgaatgagtttattaccaatatatatggtcccctttcatggctataccattcttgcaccttaagatgaaacattaattggctcgtctttcttctataattggacttcatatttttattacgtttagaaaatacaaagtaattttctaaaatttgttttacgtagctaat

SEQ ID NO: 1131 - DNA, 806 bp, Cannabis sativa
cagatcctagttttggaagggagtttgagttgctttttgatgcggaagtgattgattctgataacttagaggtgggtcgagtccctactagcatggaaataaaaaatgctgtctggagcttgcatcctttgaaaagtccaggaccggatgggttctcaggggtcttctatcgcacttattggaatacaatcgggggcgacatatgcgatatggtgcaagatttctttgtttcaggaaggtttgtcaaagaactcaatcatacttttatttgtcttataccaaaatgcgataacccctcctcttttgatcaatttcgtcctataagcttgtgtaacttcaggtataaggtcattgcaaggatccttacggatcggttaaagccgattttcgataagatcattagcccttttcagagtgcctttctaaaggggcagtagattgctgaatgttcggttttagcaacggaagtgatggataccatgaggaaaattaaaggaagaaaaggttttatgggaatcaagacggatatgcataaggcgtatgaccgaattgaatgggggtttcttgctgaggtgctcagggcaaatggtttcaacaatcatgtatgcaaactgattatgcaatgcgttacaagtgtttccttctctgttctggttaatggggctcctggaaatgtgttctctccaggccgtgggctcagacaaggtgatcccttgtcgccatatttattcatcttgtgtatggttctgtcgaagttgattcggaaagcggaagatcgtggggagcttactgttggaaattatttt

SEQ ID NO: 1132 - DNA, 1194 bp, Cannabis sativa
aaaaaaaaaaaaaactaaacaaagaccctgtctttcttcagtactgttccctctgcacactataaatctagtaaaaaaatcttaaattccctcttatctttttctctctctatttcttcttggaggaatatccagagagctatatagctaggtagctcgttaagcttaactttttacctttttgcacccctctcttctcgaaaagaaagaaagagaaaaaaaaatagttttatctcattgcaaaagcttgccccataattcacgccctcccacacgccaagctgaaaaagttccatcagaagtttcccaagctttctttctcctttatcaatcaatatatatagaagttataacaccccttttcatatcttcttcagttttgtgtagtttggtaattattcttttccctgaaaatggagacaactcatcatcatgtaagtgaaactcgatcttattatctcaaagttgtaaatgttccttggttttatttgttttgttcactactttgttcttttgtttaggattatattagaaagagcgggcaaataccaacatttggagactgggattacgcgaacgacttgccaataactcagtactttgagtgtgctagacaagctggtctaattaggtatagttcttcttctggtgatagtgatccagtacactctcgtacaccacatgacttgtacgccctcgttgaccattatccccagaagcccagttctcgcacagccactcaaactcaaactcaaactcaaactcaccaacctcgaaaggtacggttttgattttatgagacacagtgaaattattacaaacattttatatatcataaactaagattaaacttcaaataccaatcaatggtgaaaaattaaaattgatttacatattttaaagtgattgagattaatgatgagtgtgaatggaaaattttagggaagaggaactagagaaaagcgatacccacatgttaaggagcagaaaaagcagcagcaatctaaggtgtgtgacgtgactgatcagccacgaaagccatcttcaaaacctcacaaagctgccgaccatggccacctaaacgacgccgttccacgccgtccagctaagcttccaaaaccagttgatgaagatctatacaagatccctcctgaactccttcactcttctaagcgggtgggtcccttttctctt

SEQ ID NO: 1133 - DNA, 1084 bp, Cannabis sativa
atcctcaaaaaaatgtcactctgaggtatgctttctatcattctatgcatcgtgtagcaagaaaattgattttggcaaagataaaacttgtactatgctatctaatacaactgtcaacatattatctatttgaaatgaaatatgttttgcacaagtctatgtcttgaatatagttttataaactcaagttttgataactgtagcagcttttcctcaggcttgtaaacaatcctatctgcaataatgcaaccatacaaaacataggccagttttgtaaattggatgctgaacagaatgagatcgctgaagaacctaaagatccaaaaaaaagttgtgatgttcaagcatgcccactagatgatttctatgaatttgtcccatcatcttcagattgctattgtgcagcaccaatcagaattggatataggctaaagagcccaagtttttcttattttcgtccatacagtagtgaatttcaggtgtatctaactagtgctctcaagctgaaggtttctcaattgtcaattgattcatttttctgggaagaaggacctcgtctccagatgtatttgaaactttttcctttgttcaatgattctcaatcacatacattcaacaaaagtgagcttcatcgaattagagaacaatttacctcctggaattttcctcgtactgacttttttggaccatatgagcttctgaacttcactctcctgggaccttatgaagatggtatgtagtatagcagcatgtatattcattatagccttatgccttctatttgctcttaaaaatctaatggttcttcaattacacaaagtcaactgctaattatattctacttgttctttggttgaaaaataattgagaaattatcaaggttatttacgagatatattgcaaacttagctccaatttggtttatgcaacgcttattattttgtttatacattgtccagatgaatttgtgtgtatgaagttgaaagttgtaaaattataccacggactgaaacccaattgacaacttagaaggagaagaaaatgttatatctacaatgaagttattgtttctctatttattttt

SEQ ID NO: 1134 - DNA, 1803 bp, Cannabis sativa
acatatgtgcagatacaggtgtatggaccaaggtgacaacaataggtgatgggccatctgctagattttctgtggcaggtgattgcttggatccacagaagagaggtgttctcgtagttttgggtggttgcaataaaagtcttgaggcactggatgacatgttttacttatacacaggttagatataacgtaacatttagtttgtagcaattattggagcgtttcttgtatttgaaacactatgctgtcttactgactatattttcatggaataattacataagacgtcattttttgtgaaaaaattacatttttacgtttaaagaatttttttattttatttttcatttttacggttttccaaaaagtcaacatgaaaacaacaagaaaactacataaaagtaatatgaaaataatattaaaataacatcaaaacaataacgaaaaatcaataataaattaacaagagtacaacataaaaaagaccgtattttctgtaaataaaataaaataaaaaaacgtataaatgtttaaaattctgtgaaatcatatttttgtaatttttttgtttttttgtgtatttgagaaataatctctattttcattgtagggatcactagggaaagtgagttaagactagagaaattatctctgagaaagcaattaaagcttaagtgccaagaacaactcactcctattcaggacaatactcttgctagacttgaaggtggggttaataggtaccaaccctcgactgtgccaatttatggccaagcaggtgagtattgcatttcattttctgttaacaagttgtgcttggattactatttttttttttcacaatctgataagtcattatattagttggctttttctttcacaatctgatacatacaaatatacacatcgactgtgttgtctagtggatcagtttcaaacctacccattaaataagtgtctttgacatttttcctgatttaacacaaactttcttttaaattttaatgtgtttgcatttctaaactatttcttaacggagactgtttttaaaagcaactgaggctgtgtttgagagtatcttttgctatgcagtggtttatgtttgtggttcatcagaaattcctcatagagtcatagtgacagtagttatactcttgggatttctaggtggaggtttaattggtacctaacaatctaattctttcttctcaatacagctatacagaacttcagtttgatgcagcagagcaagaaaacctttcaagccaaggtgactgaaagaatatcagatggatatactattgaaacaatcattgatggaaagcctcttcggggaatcttattttccaatagaccagactatcaccacaaacctattccgacgcctagtaggtaagaatataggtatactgttgaaacaatcattgatagaaagaatgtctcttcattttgtaatcatgctttattttccctgataaatgttgtttaggttttgattgttttattaattattcctaaacaggaagcgggttgctgcagaaactggaggtgccatgtcaaatggtgattatagcagtaaaacaagttctggggtcctcaagcaggatgctgcagaaaacaaacaagttgttaatgttaatgaggaatcaacatctcatgtgccttgcagtgaaggggctatcattcctacagtaaaggaccaaacaccttgtgatacttctcagccaccacaggtccaatttttcttgtagtcagtctagtcttatatggaaatttattcaatggtttcttttgtttgtttct

SEQ ID NO: 1135 - DNA, 9142 bp, Cannabis sativa
cctctgctcaaagagttcttgtattagaaatagagcatttagatcattaccttgtcgtttggtgtaagaatgtgatatcctacttgtaagagtttttgacaagagtcatattattggatagcaaatttaagatgtatgcagttctaaatattactgttctaaaagaactcgcaaatatttagttgatgtcaagagtttatctaataactattcgttccatacaagctcctcgccaacctccaggtattctaatgacaaaattatttgtagagacattattttagcaaagtccatacattacattacattgtcaatatctccttttacaaaacgacaaatgaagagtaatgttgtttacaattctaccaaattcatcactttcaacctatgtaaaattctccaagctaaattgtgctaagtcattaactaatccatgcataatgaaactagtgttattcttgatttttggatcaataacctaactacaagatgctcaaagtaatctttcccaacttcttctatttttgtttctctttctctatttacaaaatatcttctcctatccacatccaaactaattcgttttgctcaaattagtaatactcggatagttttgagcaatacgtgaatcatctcttagatgtggtgacacataatagtaacttaaccataaaactagaataatattactttctatcttggataatttccatatgttgctctttaagtaaaatatttcttttccttagatttaattatgaaatcaaaagcccattaattgatttccttgccaatagcatattattgtaaagtgtaataatcaacctatcaattgtttctaaatttgaatgttcacgtaaattttgcttattattaaaggtgtgtttagcaaataaggatcaacaattattattggatagtgcttgcaggtgataggttgtggcctaacacatttttgatgctataacttcacttctattattaattatgatttcattttcctaagttcttaactcaaaacatactttttaaaaaacaatcccacctgttgtaattttgttccatgtgttatttacggaataaagaattaccggtcaaaaagtatttcaagttaacttggagttgatagaagtcattgagactcattataatagcatttatattctagactcattcttttttacttggcaatgctaccttaaatttatcatactcgataatattgaaataaactttcactctatcatcattgtaaatgagttgacctaaattcttcctaatcccattcatttctagtataggaaggacaaaattgtatacatttgaaattaactatccaacaataatataattcttgtcaaaagtctaaaggcaatatgattcttgtcaaaagtcttacctaagatattacattcttgcaccaagaggcaaggaatcatctaaatactccattcataacccctttcttaaattaagaacatattttttaattaaattgccttatactttttctagctttcttattttgggttctactttgtcacctaaaataattgaaagttcattactttcacagctacttcgaggctcacttttcaccttgctttacaaaatatcaattattatctcatttattaagttctctagctcatgggaagtttctttgagtttattaagtcattccttcacactttcatttcttatttgcatctcctgaacatcactagtaatagttttgactaatcataactcctaattatcttaaacatcttttggtccattttctttgcccgtataaaatctacaatcttttgagattatactctttcaccaattttttcaaacacatccaaaagaatatacccaataagcatgtgtctatcattatttatggagtcataggtttctcaaattaacaaaaaacaacaaaaatgtatattataactaaagtcggtagcttagcttcaattcaatcaaggttaaatgaaaatgacaccgagtattaattcgtaattgtaaaaccatacttaataaaatgagtaattgtacttaccatcaaagtttgggtgtgcttgatttcaatgaacttttcagagttagtgagctacgaattacggtaatgtttagacaattaaacgacaacgatttttggggttcacaagaaaacatgtaatgcaaaacatgtttatgagacaatatttttaggagaaatatagaatagaattaaaatatttaaactacattagcacattaaacagttctcataggaaaataagtgtggtttcatattgtgtttagcacaagaggatagacagatggtgtcttctttcctgaggagcaggcattaaacagatggtcatatttgcatcaaacaaatttttgtaaattatatcttgtggtgatgattcatgtcatattagttttgttaattgatctctaaaggaaaatatttgttagttttttgagtttctgtcctagcctatatatagagtcctatcccatttcatttactgaattttcccaagtctttagagggtgaatcgaagggatgtcaaagctttgtaatctaaaaagctaaggctcttgtaactcgaattggtatcactcttttgaagatttaatagaaaattctaagccattaatgtggctgacctcttctttggatcagccaacaaagctttttgttttttgtctgttgaaaccaagcatttctggtttgcatttcagttatattgtttttgttttgattttattcttcttgttgctttgctgttattgttttctgttcttgatttggtgtagacatttaaacctgaacatttaaatgtatgaaattaaattaactaacgaaatattcttaaatttgtaaaacatattttaacaataaccattcaacttgcaacaaaagcaaactgtacaaaattatatatgcatgcaaatcaatccaaaagtctactgtttagtgctgatatacatcaaattctacaaaactatacattttttgtatccatgaattatgattgacaataaaatagcactcctaagagaaaaatatatataaaataaataaataataataataataataaaaatagacaagacattactagtagagcttaaaaaaacaaaaaatcaagcctgactaataattagagttaagcagcatcttccttccattttagaacagagctctcaaattctcacaactgatcattgatgaacaccaaaaaaaattctgcgactattttatctgaatctaactgaagacatgcacttcattttctcctccagttgttttttgagaacaccgaaaagaatgctgatctcttggatggtcttctttcattagtttgattgcttaagcctttgttagcatcaagatcaactaatgcagggcattcgggctcagttgtaacatctcttagttgccggattagttccaatgcagggcattcgggctcagttgtaacatctcttagttgccggattagttccaatgcattcacccgaccccgatcgctcccattgatagaaatgttgacaagaggaaggattatctcctcttccatggccaactcgcaatattcaattcgttgagagcataaagagaggaggatatcaacagcatgctcttgctcctcagagctaccattttcgagaacttcagcaataaaagcaatgcatccgctagtctcggcaacagatgcccttgcttcttcagaagtgcagagatttttcattataactaaacacttttcaacaagagctttattggaaagcaaagaaaccagcttcgggatgcactcaaaagaagcaatgtgagaacaaacgtcatgatttgaggacaagttgtgcaaaacctttacagcgcgctcctgtaaatctcggttctgtgagtcaagagctcttataatggatgttagagcaccagaagccatgatctttgatctacaataagagtaggtggacaaaacttccatgatggtgaaaacttctccagctactgacgaatccaaaagtgatgttaagagatcaaatgcatcctcacgtagatacaatacttcatttctgcaatgggaagcaaaagagtcaattttaataaaaatcttaaaagccatgtatggaataagcatgcccacataatgaacagagaacaaaattacaaatttataaactttttaggaaaagaaactgttaagttaaacaaacaaattacctgtttttgctcacaaatgtcaacaataactgcaatccattcttcagagcatttacatcattagcatcatgtgcatccctcaaaaatgcaatgagtggttcaacaaaattctcatttgacaaagaataatacattttttcattgcacttcaattgccttttgacttcttcaacaaccttacatcgcggttcccaagaaagctccccgaggttggataaaaattccaactctggctcgttgtttttaggaggtgactgaaacttaccaaaaccatcatcgatctgagcagaactcaagccattagttgtcttattgcgtgaagaatccgaactgaaactattgtctacagatccaattgatatattgctgaaatccatttggagtcgaatgtcattcatggaactcccaaagctagcaatggaagtcgaagaaaactccaatgactgtggtgcttctggtactgtactagggtcggtaagcttgaccccattttgactacaccaccttgaaatcaattccttcatggcaacatttgaagtcattgaaaaatgcattaatttcgtgttagtttttggacaggtatcatgaccctcatcaaaccacttttggatccacatcctttcatatgattgtccagaagcaatgacaactggatcatacatcaatttggaagatatggggcacctaaattcctcagggagcacacctctcatcattatgttctcaacatcatgctgtctgtatctaatacgcggttccacttcagcaacaaagccattaccagaattttccaacaaaaacgagcttcgatgacaagcagaggcactttctgtttgatctgggatgaccaagtttccatacttcttgaatagatacaaaaagtatgttaatatcttcttcttagtggaatcagtctcagaaactttacgcagcaacttttgaattgatcttttctctattaggatatccttcggtgataaaatatggagccttgatgctgcgagttgaagagctctaatttcagaagtttccatggaatctgatgaagaagtacctctttggatcaactcccgtagaaccttcccagcctcttcttcacaatgatccagatcaaatgtttccaccgcaagattatcaaccatatgagaaatctgcaaatcgcgttaataaattagactcttaaatgtaggaagactgaaggctacgggaagaaaaaaaaatctaatacattaatgcaaattgtttcacaaaattaaaagtgcaaatattttctaggtgccgaagaaacaaaaaaagcaaaactagacaggcctcaaggtatgtgaattaacaaacctctgctgatagtaaaactggaaccatatcttgaatttgggataaactctgctcgattaacttcttcgttttgttacatcttgactgtatcacatcccccgttaatgcctgtaagtaatttaaagcaccattaaatattatactcaattctagctacaaaatcaacagctgaattcagaactttacagtgacattatcaaattaattttcttggcaatattacattgaattatggtaatcattattagacagttcaacaaaagtaaagcatgtctggggttcacaagttttaccaagaatcaaaatatttaaacgacagtagcagatcgaaacagttgtcactgagtcagcgaatcacattagaaaaataagtgtgtttcatatcttgtttagcacaagaggatagacagatcatgtcttctttactaagcagcagcattgatgaacatcaaagtgataattgcatcaaaatatattgtaaatactatgtcctctttgaacttgtttgaaacaattactgaaatttatatcattcaaaggaaagtcatcttagcaacatccaagtatacacaccagatagagtttactagattcgcgacaatagtccagaattgtcttggctttatcgatggattgacttaatgtgcacaaagcttgtattcctgttgagcaccgaggtcgtgcatcttctattttcggttttatattcaaaattctctcaactaatgccttgagctttaagcacattaaacgatgaacctgcaatcataaagtacaaaaccattacaatctagcattcaaatatagaaaggaaaacttaattttaaaatatttatttatatattcattgatccaaacacactcaagtttgagcttcctcatgaaaatttctcttaaaaacatctcattactgattagttttccatcccattatagaagcaccacagggttactctttatcttcttgaaaaaaatctataatagtaataatttccaaagctctatgaaaaggctagatttgattctctcgaaagaaatacaatttggtagtttgggaactcagtggctattctgtttagatttgaaccaaataattatgcccatcatttacataataatagtcaaagtaaggttgaatgtagttcaaagagtggactttcgtgatgtatatacatgtgaagagttgataaaaacagacattctggggctgcaataaaaccaaattcaagctgaaaacaagttgtgtgaaataatttaccttaaatgagcgagcattcgagactgctcccgcaagttcagcaacatcagttcccattcaaacgaggtttattttatacctgagcattcaaaaagctaagaggaaaaaacattcaatttcatgtctctaaaataatacccagtgatatgacaatataaaaaattatttatgacattgtatgaagacatccctttaaacataaatctgagaataaaccaaacaaagctgcgattaaagagaatcattgttcacttaaaaacactaatttagcaaatgacaaattgaaagttgaatgaactactgagtataaccgaaaaggcctcattcttgacatgaacaaatcagtagaaaagaaattgaattgacattaaaaaaaagaacagcaacacactgaaaaactaccaaccaataattttcagaattattgatatgaaaattttcaaagcttaaacacttaaattttcaaaattcatcataatagactaaatcatcatttacaaaatcctttaaaattagaacttggtaacagattcatggaccatttggctacagaacaccctttaagtgttaacttatcaaatcaaagctctcaataattaagcaaacataagatttacagaatcaagtctaaacttactaataactaacatgagagaaatgagacttacttatttggcagaaagcagaacaatgaccaaaaactcctccttgaatcctcaatctgatcaacaattgctaaaccaccacaactatatactgaatagtgaatacagccaaagccacaccccaattcccaaaacgtcaccaaataacggaaagaaacactatgattcagactaagtacgaaagtcaagttctcaaaaccacactcatcttcttttccccaaatttggtaaagtttcaaacagaggtcaaagtccttatgctatcttttcgtgtagccctaccgtaaataagcaaggtaaagagaaaacagtagttcagtaacttcaacccaaaacccaaattcataatcttcagaaaacccagtttgtttctcaaacccaataaactttcccaataccaaaaattctcaatccaaaaagaagagctttcgctacctttcaaggtatataaacataaacccactcgaaagtataaagcttatccaaaaagcacaaaacaattctcaaaagcagaacaacatcattgattgattctccggaaaaactgagccacaaagtcttcaactttaagaacaagaaagattaaataaatatctgaggaaaaaactagactaagtaagacacaaaatttatgagtgagaaatcgtcaacccgtttctggttttcatggtcttcctccaccataagagagagagagagagagacagagagacagagataataggagagagaaagtttgcgccaagataaatgctccattcatatctctatcttgactgtgacgctccctggctgtgacaactgtgatgattgaagtcagcttctgattggccaagttgtctgtgacggaaatgaaaggtgacagcactcactgattcccaatttatttatttatatttatatttttttaaaataataataataaaagacaacaaaggagctgacatttcaaagcgcagacttggttgaacaattaaatataattgtaaaaatgatgaattttatacattaaagaaagaacagagattttctggaacagttggtttttttggtccgaattttcttagtctttaaaaaaaaaattaaaattattgacatcgttaaaattaagaatttttatcatattttatttaattttattaattaaattttgatatctattaaattatgtctttcaaataaaaaaatttcaatctaataatttatatattttaaaaaaaaaatttaacggtcttaaaagtttaaaaaacataatttaatatatatcaaaattcaagtaacaaagtggtaattatttttttttattattattaacaaaaaaaaggatcaaatggttcatatcccttcctcactcttttagtatttttgacaattttaaagactacgtaccaataataaaacagggccacttaattacaaggcaacttagataattgcctaagacctcacaaaatttaaactctacattttaatggtaatatatattattattagagtattgttattaaatactaatagcacaacacttaatgatgacatcctacaattaattaattatattctctaaaatttattatttaaaattatataaaactcaatatttaattacccttaaaatattaaaatactatgccccatatgtcattttgcctttatcttgttattatt

SEQ ID NO: 1136 - DNA, 2483 bp, Cannabis sativa
taatataaatagaacattatgtatgaactgaatcttaatgctctttttccattttatttaaagaaaatatttttataattagtcttttgtttttgaaattacaaaattaaaaaatattttttgaaatcatgttttataatattatttttactttttaattttttaattaagaataaaaattttcaaaaaaatcactttctaatttttttcaaacaatttttttcttaattaatatttatttagactctgactccaacctaaattttagaaccaagtccagaccttggcccctaccccggactcggactcaactcccaatcccaatttcgaacccgaactcaacttaaataaaatcaataaatacaaaaataaaatttacttaacactttgtttttaaaattaaaaaacaaaaataaacaaaagtaattataggaggtatttttgtttttcaagattaaaattttaaaaaacaaaaattttacttttatttttataattaaaaaattcaaaataaaagtattaccaaatgccaccaaaacttttgtactttctctcttctctactgtaaaacctaacaacgaccactacttcattttttttttataaaattttcattaattaaacatgcatattagataggggcataccccatcttttctcacaaagaaaatctactacatatctacatattatttacaagtttcataaatgttatatcctttttagacaaattattctccttaaaaaactagcagtcttaatgctcatcttaattaaggtgtttacataagaagggggccaaacattttttcttaaaaacacacaaacttcgattataccatattccatacacagctccacccagtgttgcataatacaaatcatggacaacactcttaatccgatcttcaaactagtttggccaaagcagactacctagcaaccctcaatatgctccataactctcaaagaataagagcatgaaaagtatagatgatcatgggattcaagatcccattcacacacaaggcagaagggagagtcaatcttgacttgttttgcaatcggggctgccctaaggaatttcggggccttgggcgaaaagttaaaattggacctttttataaaatcataattccaaactgagcaagaatttaaaaaacatgttgtttacaccaagaatagcctaatgatgtggacatcaatgtttgacacatggcaagaaagatgacatcttgaagttgagtagtcccgaattataacaagtcgacctgggaggggtccctaactctgcgcccaagttgacttcgggaactccaaaatggaagttcagacttcaataacttcaatcactactacaaaacaagtctttagagttattttttttcagcataataataaataacagaccgcataggattgtaaaatttttagaagaaaattttacaccactaccataaataattgtacaaaataaatcttaactttatttgggcaacattttaaataattgtacaaataaatatcaattatataaagttactttttgtttttcaagttgtgattaacttacccagcaaaaaagttgtgattaactttttcttttttaggctttaccccaccttaaagggctatttaagaggagaaaataccaaaaaaaagccactttgtgtactaatttcctaaccacgcaaccacaaattgtgattaaatatttaattattctacaaaataaaatcttccattcccaccaaacattatctaaccaatccaaatcctataagaaatcacaatataatatataccaaaggagaaaccatatattaaaaaaattgttcacacaagtttttctcttctaatttatagggctgcacagtcaagagtggaacataagcataaaatataagaaccttgtcagcaattgaacaataaaaacgctattcaaaccaattcacttggcgtgcaaaagactccaaactgattattgtgtatttgaactattgtcccatgaatgttccaccaagatatatacaattgtgtgtatatatgtgtatatatatatgtacatactctaatacaaaacaactacaacccaatttccttgaagtgagtctagttcatttaactttttcatatctgctaaacaaaagctctttagtcacaagctatggcatctactgagaaagttgaccctgaacaaggaaaggaagctcctccatctcccaaaccaatctcagggccctcatcagctacttgtacagctgaagctacttgctttaaagttgatgtggctttaagggtcttgttgtttgcatcaacagtggctgctattgttgttcttgttactagcaagcaaactgttcgagctcctttaccactttcggccaagttcaatcactctccggcgttcatgtgagtttaatctgaagttttcactaactagattttgtcaagtgttttagtttttcacatgttatgtttga

SEQ ID NO: 1137 - DNA, 5431 bp, Cannabis sativa
taattcatatatttatattttctagcatagcgtggccatcttatgttgcattgctaagaaatccacactacgtttcgtgagaaaataactcacgagacaccatcgatcgtctacttcagacaagtccagatcgtcatcatcataaatcagcctacccatttcttcatcctccatcataagatcacataatccctcctccataataatcaagaacacaagaacacctcacacagaacacaaactcacaatagagaattagtcaacaatacaccatctcaaaagatatgacaatacattactctacattcactcaaattatctagttaattaataaaaaatataaaattcaactaattttactatcgatatctctaatattttgtaacatatatatttttaataaaaatataaattaatattaaattttggatctgtcttgtagttatattataataaaatacaatattaaaattaaggtaaatatttatctaagaaaaagccgatacaaatatataaaaagtttttatttatttatttgtagcaattcatttatttatctattgaaacatgtgattactaaaaccaagaaaatgttagcaacgtccacagtgagagaagaagaaaagatttaaagcaccacgtgtaacggtgtaattaaggataagcgacaacaacccacctaggcttctcctccctcttccccttactaattaaataaataaaaatgaataataatattaaactaaaaaaaccccaatttccactcaaatccccttggcccagcctagagtttcatccaatctcttcttctctcgctcctggcggtttttggtttttcggatccacttggttttttctcgatttgcacaaggtacatccttgtttcttattttgatatcagatgtgtattttcattatctaatctaacgcatttctgaaaaaaaaaaaattatctaatctaacgcccaatttggttcaatttcttttgaattttatgcaaagattatatctcttttgttaagatgtgagctttgatattgtcatgtcattttgttatttgattaagccattcgggacttttttttattatttttcgttcagttatgaaaagggtagaaatttgacgtgttttcttctggatttgggctcttttctttttacctaaaaaagatataatactaataatttgaaattgatttaattcattttaatttaatcatttggcgagtaattttgattggtaagaatttctaattttttctatacgggattttttatgaaattctcttttacatggagcttaatgctattttagatctgcgaagtaaacctacgaagtttcgattcgatttccttaagcgtcatgactcaatcgtacaccctctaaacgttagcgggatttaactttccaatgggcaccattgatgttcgaaaaaccgttgcttgaaattttttggactttttgttgtcaattttgggaagggaactttttatatgattgaagttgaatcagtttacggttttatatgcatgtcacattttgtattcaatctttttttagtttgttagtcaatatgtgcagataaaaccttctcttttattaatttatttccgttcaggtattagttaaagaaagacctaaggagttcgaaggactagagtaggattctatactcttaaagatttgtgagagtgagaaagaggatgagtggccgaaacactcattggtgctacagatgtagacaaccaattcgactgcgagggcgagatgccgtttgccccagctgtgattgtggatttattgaaaaacttgatgatattgtgccagccaatccagtcgatttgtttgatctggatagtgagggtgaccgtgatcggcgattccaactattggattctatctcaacgtttatgaggcaacggatggttgacagaagcgatagactagatctagttcctgaacataacccaggggttggtcctttgttaatctttggtggacagattccttttaggttgtccggaaacggtgggttcgaatctctttttagtgggactcctggcattggtgtaacacgtggtaatgttggcgattattttattggccctgggcttgaagaactacttgagcagctttcaactaatgaccgacgacgaggccctcccccagcagccagatcattaatagatgccatgccaactatcaagatatctagtaggcatcttcgttctgattcacactgtcctgtatgcaaagataaatttgagctgggatctgaagcgaggcaaatgccatgtgaccacttgtatcactcggactgcattataccatggttgagccagcacaactcttgccctgtttgccgccaagaactgccagctcaaggacttaataatgccaggagcgcaattaatcgaaacagcagcagcagcagcaacaccagtgaaagggaaaacattagaacaaataatggaaggagacatccattgtcatatttgtggccatttcgctctagttctagttctagctccaaccgtaacacgagagctagagctagctccccaactatgcgtgaaaataattactagatggggtatactggatggccatttgacgaagactaatttttcaggagcattaactgctcatcacaagtgatcagattttaggaccctgaagactacctgtttaatgttttaaatgcgaatgaaaattattggaatgcttttcatgtaaagtctacttctcttttgattgtatgtacttcgaataaaatgctttcgttatatgttctctctggcgtcttctttggtttttatttatatatccaaaaatgaggtctcttatttggaatgtaggaacgacaaatctgtaactcaaaaaatataaaaaatcgaagtagacgataatcaacctcatctttcgagatttgaagcaaaacacatttctcagaatagggaaaagcgtttgaacaagataataagccacactgacatagtgactcgtgttgcttcagcttatttatagtgtctgcctgctctttggcagccattaatctcatcatgcacatgctccaaaacaagactttcttttaaaaaaaaaacattgataactcatgtaaatgtgcgtacaggttagaaaagcaaaagcaccacaaaagcaaagttattatgttccatgggcaggaaaactagtcaaaactcagaaacgtcaggaataagtgatggcataagcatgcagttggatgacgggttggataagaagttttacgaccctcaccaaccacctccactgccagaccatccattcccgctttcagactgggttgaactctttttggggcccgaaccccacccccctgtggctccaccagcatcccttcctcttccactgctccattgtccattatcactgtcattggccccaccaccccaactatttccaccaccactgctccaaccatcatctccatctttggcagctgaatcccatttgggagcatcataaccagactcctgtctttcattgttggagctattccctctactgtcgtatgaacctcgcccacggccacgcccaccatatggcctaggcaccccacttgggtgtccacctccacctcgactaccaccatttctaaagtcattgcggtctgcaacacaaacatgagaaatgtaaatcatgaatctctaaaaccaagaaccctgtgacatttgcttacagacagaacatagaagcattttcagagactatctcaaacaggtatgcattagattacaatatcacaaacatgaacgtggaagctaatatctattaatttttgttaatatttttagcgttctccctgcctaaccttacaaaatttaggaaccaagaaactataataattgctatattagacccaaacctgtagaaacaaatcaaatatctgaccatttgggacctcttatgatcatttgagcaacctctcaaacggtgattaaactaagttaaaaagtatgaatcttttcaacttcacctgttcttgaacccggagtagaagaacgttccctgtcaaaagaatgacctctccgtccaccctcgtttgatgaaccaccccagccactgccaacagacgtccccgaagagcccccagctgcaggacttcgcatcggcaccatagcagcaactgatctaattgatggtgctgaatcatgctgaggatcatcgatatgccgctgaaaatatgctacaaggcgatcaatgtcctcaaacatcctttttctgaacttgaacccttttggatagagaccaatatactcatggtgtggatttgaacttcgtatgtaagtcagaatgaaagtgccaggatgttcatgggatatgccaaagcaataaactatcctcataggatgctctgctttctcaattttcaagagttcatcaacttctgcttttgcacctttcttaaacttacggtaacttagcattgtcttcagatgacccaccaaaggatcaacatatcgatccattacctattatgaagttataaagaaccacatgtcagatttcagataattaatgtcatacagtgaattttttattttttttaaaaaggccacttgtcttggactgacccccactctaatttattgaaaagcctcacttgtagcagacgagaaccggtggtaacaatgaaaaatagcacaagacataaaaaaaaaaaaaataaaactcaaaaacatgctacatcaaggtttcccactgtccacgtaagtcagatggtgaaatttttatccaaaaatgagttaggaaaaatccatgaacaccaccaactagccctaaggagcaataattatccaagtaataatttcgataagctccagaataaaataaccaattctaatgttagcttcctacggttttgtacacgagaaagaccaaaacaagttcaacagtcagtaagggtaatcagttacagaaaacaaaaattatattcaacaattttaagagcaatgaaacctaaattgaattattaactattaggttagactcaaagacttagaaggtccaacaattatatgaaatggcatgtataggaaactaacctcatccagatcttcaaaattgtcctccccaattttcaatgtctttcctatacggagtaagctggtgatgtccttgtgctccttgccaccttcaacaatgtctttgtgagcataaactccatcataaactttcaaagtcaatgttaagaatgaaggtccacgtgaactaggacggataacactttcaccaggatccttatcagacaaaaactgaaacaaaaagagatgaagagttgctcaatcaaccaagtctttacattgttcaaagtgcataataaatttataaaaacagccatacatttgccttcataattcctcccaatagtaaactaaggcttcttaa

SEQ ID NO: 1138 - DNA, 4126 bp, Cannabis sativa
ttatcgattaatctaatctaatagtgtattaattatttatgcacaagaaattatgtgcaatcaataaaagacaacttgattcttaatgccaaaatggatgagcgagagattcattaatgtatatggtattgtcttatatttttctttctctgccaagtcattctctaaataactcctaacagatgagttaaaataaaaaattatatattttatttttacatattttttactttaataaatagtgcttaactaaatatagagataattatttattgagctaaacatatatttttttttgtaattaaataaatacgatttacaagaaaaaaagaaactttgtgtgtttgtcccacaatgctcatgtgtgagtaatttttgatgtttatattacagttaatagttactaaaccttaatccaataataaagttttcataattggattgatattatgttagtgtgatttattaaaaaaaaaaatagctcaatatattttactattaattttttaacttttctatgtaatattttatgttttaattttagaaaagaaatgtaatatatcaaaaatataatatttaaatgatgtacagacaaaaaaaataaaaaaattagtgtatggtataatataaaagttcgcgataaaataaataaagtgaggtttgggtaatatatttgaaagaataaagtagagaaactattaagagtgcttaagtcttgtaaactgaatatgatttaatacacttaaaaagtcaagaatattattattgttatctcaaaattcgtactgataatgtggcactcagcaaggtgacatgtgactggcataattgaacttgggcaaagtatatctcctagttatttcgatagtctagaataaagttaaattgattatagtctgacccccacaacaacaatcatccaggcagagccgagatctcgtaaaatgtcgagtagacctagcgtgtcgaacaattataatgaccgactagaggcacgcattgagtgaagatcttccgcaaatcttttccttaactgtttccttaaatgtaactcaattaaatctctattttcgtagaatttgctaaccagactaaaataatcgtggaattttagatttaactccttcctcgattttttccctttaatatcgagaattttatataataactcatataatttagcaacttatgtaatctcacttatcctataaatagtgaatctatttcactattcaggggatcctttttggcatttgaaagagcaaacactctgtaaaaatatttgtacgctttacaaagttattgagaaactcacctgatcggaccttataatcttgataattcttcatagtaatacaactaaaagaggagtaggttattaccataatcagcggtcgaacctctataaatattgtgtcatttattgttctcattttattattaattactccacaaatattatcgctttaaagactccgggtcattggctaaaaatgaggttaatattttggtgctttcattgagagcctgaaatatcatcttgctctcgtcaatcttcaatctttgatccacacttgagaataaaaaaataatggttttgacaaggatatcctcatcgaatgaactgcgtaatccaatggcaacagaccctaatgtctaagcgcccactgacctaggggttgacaaccccaatgctcggttgcctcctcgaggcaacccacctatagggacaagaaaaagatacagtattatagggactaatactagagctactggaatcacaaccccactggccagcttcaaacctggtgttcacgaaactgggacgaccaacagttagtatattggagaaactagacatggcactggtcagccatctgaaggagagccctgagtagatttaggggacaataccaaattggagaacctaagagacgtgttaggaaaagtctaaattcataccaacacacttcaccataaccaagaggaaacacgtaccatctaaaccatgcattgtaaaaggaatggcatgagttccaagagtggatggaacgtcgggctcagtccatgcatgcataataggaagagataaattgccgctccagggaagttaccaacctgatcaggtgatttatccaatagactgggggaaaacacacgaggtccaactgcccagatgagacactaggagagggaaaggtccctacatcttgagtagaagaccagagtatgagttggaggaacaccctaccaattatgtaccttttagttccagaccccatgatcaaatcattggtcgtcctgtggatgatcaagtttttcttggtcactaccttgggagaaacaaccagacaaacttctaacccaaacccgaggcaaggagagaagaagtacctcctcgactagctagaggatctcagggatatgagaacttttatataattaggatggaagaatccaggttcacggtcagaactaatatgccaaccaacaacctatacaaggccattcaagatcctagagtggacagtcatacaccctagcaggaatgacgacgcagctgatagtaggccccgtaacgacaatcgaaggtgtgattaccatcaagacaaattgcctaatgatggtaatcaaagtaacaaccagaatgatgaagaccctcccaggccgacaaggtccaccagccaaaacctaaacagaagacttaagcctggaagtgacctctgaaacaacttaaaccagaggagagataatcgggatggacactttgccccccacccaattatcagttaataaatgtggaaaattatttcccataaaatagagacaattttgtgccctttgaggctccagaaggtcatcaggtgacacaagtcagtcaatagataggccaagtcgatccaggcatgcaagcctaattagattaacttaagggcttaatacaaagcttgaccgtccaaaactcactgatctggaactctatcggacaagaggtttgccattctctactcaaatcaattcccttgaccttccgaccaagtttaatatgccaacttggaagatttacacagggaaggaagatccattgtctcacatcaagtactttgagatagaaatggacctgcgaggagtaagaggtgatgttagctgtagagtattcctagcaacatttgcagagaccgctcaatattcgtacttcaagttgacacttgggaagctcaattcatggaacgcctttggctccgagttttacacataattctccttttcaaggcaacttcccgctcatctaaaagacctggtagaagtgaaacagataccaggagagcccctaaaatattacattagtcggttcatgaccgaagcaaccaaggtgaagtgactaatagaagaggaagactgacaacaatgctaggaggtattgagcctaaaggtgagttgtggaaggacatcaagaggctaactgtaggttcaatgggggaatttctagactgagaagatggattttataaagattgaagaagcagtcaggcaagtggacaatgtttaccagggtaaagttgacccaagtcacacacccacctcgattgtagcaaatatatccgccagcccatccaaaccttccaacctcagactagaaataacaataatggtggcaaaaggtccaatactgggaataaccaggggaacagaaagaaggggaaattcaacaattctgggattagtctttgatcaaatttctaagatcaaatctcaaaaaattttcctggtcgcatggagacatggtcgggattgatttatcaataatttcccacgccttaaacattgatcctaatgtctgaccagtctaacaaaaccgaagatttttagaaaaagaaagggcacaagaactaaaggagaagtagtaaagctccaaaacgacaagttcttcatagagccttctaccttttctaggtagccaacctagttttactaccgaagcccaataaaaagtggcatatatgcatcgattttaccgacctcaataagccatgtccaaaggatttttcctacttccaaggatcgaccatcttgtagatgctactgccggtcatgagaccctaagctttatggatgcctactcgag

SEQ ID NO: 1139 - DNA, 2076 bp, Cannabis sativa
atgctttagtgggcctgggatcttactcctctcttttgggaagtcaggcccagtccatctcgtggccatctaatgacctctggactttgggctttaaaactctgtcgggcttgggcacggtggataaatttttgcgtgagcccactatcttcaatcccatcttggacattgaagactgcagatcactggatcaggactttgggcctaaaaaacggaaagctcttgagggaattgttatacaaccaaaaatcgtttcatttgctgaaagtacgtctgaggttggaaagttaacagagctcctttgccctgctgagaattcgcctgcaattacgattccggggataggattagaggagaacccaaacgctggtattactgtcagtaccttctccccgggttcggcagagaagcctaacactgggcgtaagcgaggaagacgagctaacagtaaaaaggatgtaactcttgatgattcagcggatatcaacccaagtccaacccctaaacgaaggggaagaccccccaagaatgctttgggttgtggtcctagatctctttcgctgaagaaacaatcaacaaacgccgctaagaaacgtcaggggactatcttatcggcctgggagaagaaggtatttgatcttaaagttgatttaaataaccactttgtaatcgtggactgcaactcgaagcccagctcttcgtgtgtgatagaggaacttaagaatgatcaagtggagaaggaatgtattgacaagcatgtttttcgttttggggctgtggagtcttgcccagaaaagactccccaaccccaatgagggccatttcttggaactgtcgtggtctcgggaatgcagcgacagttcgacaactgaaggatctcatccggaagtcgaatcccgaaatgttagttctctctgaagttaggatgtctcaggaaaagttcaatggtttaatgtctaaaattcattttcatggtatttgttatgtgcctccggtgggtactgcgggaggacttgctttatgttggaagttaggagtggtgtgtaatattcaaagcgctgataaatataaaatcctagcttgtgttacttcggatcccccagacaagccttggttgtttatgggagtgtatggcccgcctgcttacacggataaagaaggcttctggagtgaggtaggtgacattgttagcaattgctcgatgccagttatgctcataggcgatcttaatggaacgctcttggataatgattgtctcaattactcgagggtcagcaactgtgcgcgatactcctttgatcttagaagagctgttcaacggtcgggtctcattgatttgggctatcaagggatcaaattcacttggtttaagaaaggctctacttcgtcgttaggtaccagccttaagagggccagattggatcgcgctcttgcttcggtggactggagactcgcttggcctaatgctatagtcagccatctcactgcggcttcttcggatcataagccaatcttattagatacaagtgggggaagacactgtactaagcctcaattcaaatatgaactaatgtgggagcgtgacccacgtgtcttttgggttgtaagcaaggcttggaagtccctacatcataacgatccgatggtcaatatgtatcgtaaaattaaagccactaaggatagtctgcagaaatggaataaaatgcattttaggaaactcaatactcaaatttcagaggcccgtgccactctctctgagatcgaaagtaagagttctgttgatgaggctatgcacacggaggcgagaatggcacttaatgaagctttggcaagagaagagattttttggcgccaaaaatcgagagtagcgtggttgaaggagggtgatcgggctacaaaattcttcatggcaagtacaatcacgagaagaagacgtaattatatccagacggttaaagatgaagaggggcagagttttgatgaaatgaaggatatttcttctatctttctggcaaaatttagcaaaatcttcaccaaggcgcagaataggactactcttgggacttttacatggaa

SEQ ID NO: 1140 - DNA, 2001 bp, Cannabis sativa
aggtattgtggtcgtaccgaacaatggaaagaacaacaaccaggaaaatacgattcgctatggcttatggttatgaagcgatgttgcatgtagagttagaacctctgtcctacaggagactaacctataatcaagaagctaatcatgccaaactggaaaatcacatgatgaaattgaagaaaaaagagcctcagcagacctaaagctagtagctcatcaccaaaaggtggctcggtaattcaacaagaaagtaagggtaaggaaattcattgtgggaaatatggtccttacaagagtgttcttgaacacaaaaggcaacgtggctggcatacttagacataattgggaacgaccatctcaagtaagtgaagtcacgaattatggagcatgcaaactgggtcggtatgacaaaaacacatttgagaaaatactagcagttagtgtacaaaatttgatgactcccttaaagtacacgatgctcgaacatctactcttaagtagatggcttctgagcagacctcgctcaaaggtttgggaaaaacaactaggactcaggtcagatgaccatctctaaagtatagaaaaaaataattattttatgttataattagctaaagatcacttagatcatgtaatagattttataattcaataaatgtaagttactgcggtaacaaaatcatttagaccaataaatgaataaagatattaattatcattctaattgtgtcaattatttttcatactatactaagttatgactttaccgttaaaaatgtgtacaaagggtctgctcaagccataaattcgaatagacaaaaatttaaattgtgcagtacaagtgaccaagagtcataagttagctcggtcacttggggtgcaactttacccgtactaagcatagataaataacaagctcgaaaaaacacaacaatttgaatgtgcaactactgaaacttaaggaaacacattcattttaaaagacaacaaagcacgataaaccctggattaaaggctacccgaccttaaaggctgcttggtcggccacattgtactaagaaaagcccatgggcaaactgaaataaaaaaatagaagatagaaaaaattcacacggttggagtccttggctctttgtatggcttgactttgtactcagtggctaggggatcaatgctttggttggtgagaccttcagagttggttccctcggattcttctgtggatttttgggcctaaaaaaaactaagatatgcctcatttttttattgaggtaattaaagtttgcatgtgggtttgccttccaaaactcatagaagacatctagggcgaccgtctccaagttatccacctccttttgaaggacctcccgcttcgccttctcagagttaagattgtgttccaaatcttatttctccttggttaagttagcaagaatagtatggagaccttccctctcatcttttaaggcattaggatccttggtcagagcctcaatgtaagcttcgaattgaatagtggacggtatatccttgatctcctgctacagttcctcaactcgcttgatggcagccaaaagttgcttattcacctcgcccagattcacactcttttcctcagcctccttcttggcatcgtccacctcccacttcaagttggtggtggttgttatagtctttaaggccgaagactttgcttgggagtaggtgtaggccatcttcatgatgagctgcacaaagaaaagttaaaatatacacaggcaaaagaataagataaaaaccaaaggaaaagtacttactcaagtagcctccttcagcaatctgcccatcagcagctccactgacatgtcttcccctctggaaaactgatcgtttacctcggggagcacccagacctggtagaactggagcatccccttaccgttctttgtttcagggttcaatacgacaaaagtgcttgaatgttgggatagtctagatccatccgtgccccccccccccccc

SEQ ID NO: 1141 - DNA, 1864 bp, Cannabis sativa
ctaaattcatctaattcgattcgagtgataatattatcacaacaatatttatataaatatttatggtagtatatatttgttgtgtgtggacataatgtatatatgataatatactataaattaattacattcttttatattgatcatctgaaatttaggttgagtcaaaacataacagaggcatcttcttcctcagctatggaagtaatttctccactgtcctgtccaatttccactttcttccagctacttccgaatgagatctcaccgtcatagattcctctggtgaccatcttcggattatcattattattactatgattcatttcttcttcttcttcttcttctatgtgatcagtcaccaccatcagctcgcatggagtggtagttgtcgtcgtcgtagtcgttgttgttgttgtttccgcttctgtgatttctgcagacctagaacgaatgtgtttgtacataatttgttcctcagaaacggacgcgtcagtcgtgtccgactgcaacgaaatcgacgaccgtcttggactggaagtggagctgttcttccaagcatttcttcttgcgttcttcagccacctccgcagacccttcgccacactctctgtgaaaactgctctcttcatgcctgagcccatctgttcaaaacacatcattttcagggatgaaaggttgtgaggtgatcagagcctcttatgccccaaaattttctaaaaaaacgaaactttaaataactaggataggaaatagtaaggtggggttttggtcatttgattaagacttgcctgagtaactagtgcatagagaggtaaggtgacataaccacaaagtaactgcacaataactcccatggaaattgtgattgtcaagtcttctgtttcgcgatgaaaacatgatttttgcccatactcgaactgttgttgttgccaatgggggatcatcagttattttaggatttcaaaatatttcatgaccaaacgtaaaatatatacctacccatgtccaagtgaagaatgctagctgaaacgagttctgcaatgatttttggcggcacttgttagattatattcctcctagataataaggtaacgatttttctcttcttctacaatctatgactatgatcattaatactaaacatcatactagacatacatggatatttcaacttcaagcaccattatattctgttttaaaaccatgaataataaagctttgcagtgctactactagcattatactatttcatcaaaatgaatcaaagaagagaaaaaggtgactaccacggctatgacattcgtgtttaccccattgttgtttgatgtatgaagagaaacaagcaagtaaagcatgtcaactatatttgctcactctgtgatctgaccaacatcacagtaaataatattggcttggttcagtagtttcatgactcatgagttaaatcattgaactctgcacaatcaaccaagaatatataaatacatgttattaagtacctggattaagatgaattggatgagatgaagaagccaatggggtcgaccaaaccagaaaagatcatcgtttggtttcacaatgaaacttccacgaatgacaggattttccttgtgagtctccacacacattttggttattatgacttgcagctttgctcccaccatcagagcaatcttcaatataaaatatttatactttatggtgagtaaggtgaataagacaattataagtatgttataaaacaaagtataaacagagtttggtgaagtttaaatcttacccctagaggaatgaaaggtaaccagtaatgattgtaaaacactgcaaacaagtcaagaagtcacacatattaccaatttaa

SEQ ID NO: 1142 - DNA, 6346 bp, Cannabis sativa
tatatggcatgtatcctactcctggtagaatgcctctgccccttgaaatggaagaggagcctgtttatgttaatgcaaagcagtatcatggtatattgagacgaagacagtcacgagcgaaggctgagcttgaaaagaaagcaataaaaggtagaaaggtaagagttacgaacttattgtattaaagttttcagtatctgtgtaattcttcatggtaacgaagatagtaggcggcttaattggctgacagctttggatttggtggttggctgcctcggttgttaccccgttcagagcctgccaagtcgaagataataattggaagaaataatgcaaccgaactagatactactttgttctgtgccaactagtcttgtcggcttggctgtagtgatgttatttgttgagggtcaaagcattcatatatttcactaaaaattagttatgacattagaatcttgataatgaaaggaagattcttttcaggattatacaagtatataacttttttagctgtattcacaattttctacagccatatcttcatgagtctcgacatcagcacgcgatgagaagggcaagaggctgtggaggccgctttctaaacactaaaaaggcagatgacaatgctgtgagttccacttcggaaaatggctcaaattctaatggaaaccaatcaacacaatcaacccgtgatcgaaatgtggattcttctagtatccagaagggcaggccgggatccatggttgaagatatggggaaaatgcagactcactccaatggaaacggcaaaagcaacaacaacggccatggcttgtcatcagcatatgatttacgattcactgatgaccaggaagttgattgcttgggccgggagaggaaaagcatgaggttgaatggctcctctcatggggcaatctccatcaaatgaaagatcctcaaggggatgtagttctcccccaacatcagtaaactggtatagtactataaaaccccacttcttaatatcgaacctatcgtcgtctatttttgatgctaaccaaatcgaactatggttttcaggtgatgctgaggggagacacagacaccccaattcagctcaaagggaaacctttcttgtgtgtgtgtctatatcaggcaattcattcttggctttggttacttcaaacaactttgtataactatgttaggtgaaatgaagaatctcaactctaaaacaaatccttaatcaagtttacattttgctcactaccccttttgtgaaattttagcagaaaaacaattagtataggaaatggtttgctaaatgagttgattagagaagttatgtgaatctttaatgtttcaaaagcttgtagacatttttatatacatatggaacaaagggtttgcttgtttctaattactttgttaaatgagtaatctttttctttatttattaatgagaaaacaatgatgtaaaaaaatgctcactttttttttctctctctaatgaaaatgacaaaagcaacagtcatggcttgacattaacatttgatttcatggagaatttgttctgtgtgatcatttttcttaagattcaccattaatagtgatattgcctatttttctattgggccataaatgggcctaaatgattcctcttttgggccctatacaactccaagtcattttattataaaccctcttaactcctataaattctaaaagattgaaaggaagaaagagaagggaagagaagaaccctagctatggaggatgcaagcctttttcttttctttttttggaaaaaattgtgaatagagttagtcccaatgatgaaaagtttagtaatcagaggattgttaaaaaggtatgctatgtttggaattgaaattccatgcctttggtgctccctttcactgtaaatataacagagaggttttgaggaaccattgctgttctttttcaatttcatggctaccttcccccatttccaaggctgatttctggcttaactgagggattttaatatttcttttttattgttttttaaatttgatgggtgggttttgattcttctgatgaaaaagatgagatttttggtatgaaattaggtcaaacctacttaacccataaatgtttaaaagttgtttattacaatggtgggatcttttttggtgtagaagtacattattaggtccagacatagaaattaggtgagaacattacataaggggatttaaagttcagagcttttccaattcaaacaaagtcaatcattcattattaattaaattatttagtccaaaaacatgggagcaagtgaaacaagatttaaagttcagagcttttttacttattcacacaaagtcaaaccattcatgatttttacatagcaattgaaaacccagatttaaagttcagagctttgcttgttcttgaagctgttcctgcaaaaatttatcaaaatcataattataacactaaccatttctttggtattgtttttgagattaaagatggcatggaatactgacctcagtgacaaacaaggcatggaatccatatggaactctactaggtaattcaacaacagccactggatcatttgacattgtttttgcatcaattacatgaactgttgattttctgcatagcaaatttaactttgtttatacagtgagagaccgaaatagttatatagtcaagatgttttcaacaatggaggcagtacccggagttttcatcgtgtacaaagaatatcaggtaaccatcatcttcctcttgtgatgaaactccattcaccttaggaacaaatactgcctcggaaccaaaccgattaggtcccatgtcgtataggccttgaacatttccaccaacttcaaggcttgttttactgttatctggttcggcctctagatcgaatttgactatgcctgttactctagggtggctgtctagtctagttccatacacataacgttgcttcctgatttcatatgcacacacaagaaaattttgttaagtggaagaacatcataaatagtgcaatgaagtatgtacttttggtatgagtttcgattccagttcaagctaggtgactttttcttatcaggccaaacaacttgtaaactttattatgaccgtctagcattggttgtctgtggattgcactcgaattgataacttccaccacatcaatgtggtactctattgcttagttatattccttcctttgttacctaattgtcgaattaggtagcaatagtttggatttgtatagtaaacttactagaaattagaaagtttcgaaaatgaaggaggtccatacctgccggtgtagctttcgttcaccctaggaaaatctacagctggtgctgagagttttctttgtgatgctagaccagtttccatgttaaatctcatctcatacctaaagtaataacattccactttagaaaaatctaaagagatcaagctttttgtaccattaaataggaatcaaaaccatcttacaattcatttgggatgctataaggctttttgtttatagttccattgagcatgtccaaatcgagattctcaattcgggaagtgattagaacaacttcgtcttcctcctcccacgcattagctaatgaaatttagttgtgaaacaatgtcgaaaactcatgccaatgacaaagactgattaatttggaactaagatttgtaccattgtggaaaatgttgcaattcggaagctcaaaccatttgattagaagctcgtcctttgcataccgtggaagcacaccaaatcgcgcttttttggtagtgtcaaatgagattataagcttgttttttgtaaccatttcctgacattgaacaataaacgaaataaactttctacatctaattcaaacctcaaatcttgtgagagcaaactatataccttcggactaaaaatgagaggaagatccatgaaaatagcatagttttcagtaatggcaaagtcatggatcatgatagggtttggtatagtaatcggtactggatcgtgcatgaaaccttccttcgaaataactcgataagtaatataaggcggagtttgcgagtaaccaaacgtaaacatctcacctacataatcaagacctttgcatcaaaaccgaaattcattatgttttgactccaaaacttttctatcttaccggtacatggatcaatttttggatgagcagtgaatggatgtgtcaatctcttgtcatagtcaagcatgcctagtgtttgtaaatctccatcttccaacactttaagtacatctgaaaatgaaacatggataataatagtttagtcatgcaagaagggctaatagtttagtcatgcaagaagggctaaaaattccattaccatagcaattcaaaatctataatgcttacaaggtttgtctccctcatgaagtgctagaagttttccatggtgatatacaagagctgtattagctgaaagaaaacaatgagaggatcctgttttgtaaattcgagacaaaatggtttcgatgatcaattttattacgaataaactagaattttacaaaattcatcaattgggtttgatcctactatgaggtgacattctatgaatggttagcgatttttctatactcattattaaagtaaaataagtaggatctgatattgaattgtatagtagagatacagcttataatggtactagtcatcatgagtgtcctttagtatttctcgtcaagttttgtcaattttcagcctaaattatggaatagtaagttgattagcctctctaatacattttctaattacataacaaaatataagttcataaagtatacctgttccaaatccatatgaaaggtctaatactttgaatttttgtctaagcatataaaggctgagcatgagtagtccaaatatccccttaagatctccaaactgaaaattacaactttaaaatacatatataattaacacacaaaaacattttaattaatattcttcaagttcataccttcaaaattttagcacctccaaaatattcttcttgtttaagacgcgaagtttttacaaaacgagaaacgtacgttgcttttccatctttaattctcacgccatgaaccatactgcaaattaaattatttcaaaatgtatttataactaaagaaaatgttggtgttttaaaaatttgaattgagattatatcatttaattggtgaaaaaaaattagtgagagagcataagatgacacacccatctccatcaaacctacacaaagagaaattaattaaagaacataagtaaaattatagttgaagtgatttcaatattatgataaaagatgtaattaaatgtaaagaatgtaaataaaatgaatgaaattattatgtaccaatgatatccagaaactggattaaacttgggattaggtcccactttaacaaattctccatttaaacattcctgcataacaaaaatgcacataaaaaattgtggattatggaacaatgagtaatatattaatcattcttaaagataataattattatgttttctacatataaaatttagttgagccaaaaaaaaaaatcatattatttcgatgaagccactctaaatttagactaatcaaccagaagagtgatttttaaacgattttattaaatcaaaaatcaactattatagaagaataaaaaaatcggtgagcatctatccaaatcttattaataaggttattttggtaattttaaacataatatgagttttatttttttaaaatttgttggtgttcgttcaattcaataaacatttagtgtcaattttatattttgtatcaaattataagaggaaattataattttataggcttttatattttttgttcaaaaatataacttttttttcccttttgaaaaaggttattttatggaaaaattgaagaaagcttaaatatatagaaaaatcaagtaaagataaccaactacccttatggtaaccagaggggtaaccaagtaccttatgttattttttttctatgttttttaattttcccataaaataactttttttttaaaaaaaaaaaccatatttttaaaaacttatactttaaaaaccataaaattaaaaattccccaatttaaatttagtttgcaaaagtgtggaatgaattgattaatttagatatattttttttttcatatttaattataattcactattttttttttcacatcatcaaaatcaataaatcactaattaaatattgggtaaatactattttggaccacgtgttttgttaaatgacaatatggaccctatgttttctaacattatacaaataagatcatgaactgatt

SEQ ID NO: 1143 - DNA, 1758 bp, Cannabis sativa
ttatagtatgattaaccataatacaaacctaagctcagtactctagtcgtattagtgttggtagaattaatcaatactattttatattgcctaacatattagatattgatatcttagtgctactctatgtacactcataccgctatctctaatatgctagctacatgaaaatataatatatgtatactatacatatgtatatgtgcatttgaatatttttcttacgtcaattcctgattcaagtgtgctggtaaacttgagtgaaaatttgctcgacgatcgaagggcctaagtcacattattggtaaactggtaagtatctcgctaaaaactttctatgattaaaattcataattttaggtttccctatcgaaaaataaggtaaaaatatcctagacatcctaaaaacacaaaaaccgagataccctcaggaatcctcaattgggtagccaaagtcacaaccgagtgcttagaattttggacactgccagaccaattgggtgctcagatttcgacaaagatcccaactcgaaccaatatgagttctaaacttctccaacatatattccaaatcaattcaaactctccaacacaatataacattgcattctaaacataaccaataacttagaacacaaaataatctaggaaatcaaatttcactattagagagttgaagctttgaactcacctatcaattcaattatagttgaatttctccctccttcaccatgaattctaaccccaaaataaaaaataacaaactttaactcaagaataaaccatcctatgctctaaatcacaaaaacctaatatttcttttctttaacaaattaaaagacaaaagctagttcatcataccttggatcattcttctctaagatctttgctagctaaatctttttcaaaactagttgaattcctttccaaacacttgaggaaaaaaaattaaaatttgactgttcttagggtctacggagggtcggcaaaggaaaaaacaaagagaagaggtatatttaatttttgatttctacttacatattttaagaattctacacaaaacaaaacttatcattaatagcaaagataaaattgctaaactaccatttactaaaataatttacatacttaaactcttaggaaaaaaaaaggttattctaaattagaccacataaaataatatttctaattatccataaaaatatttttggtacctctaaaatattaactatactattttgatatttctgctaatctatcgagttcctactattgccaatcataaatatattaaatacataacatatacatatgttacacatataattttataaaatctctataattgagtactaataacatattttctttttattttttaataataggcctttattttttaattacacacattatctttaaaaattactataatactaattaattactaattttcttatgtttagttatgtgttcattacaattgataggaaagaattgtaactataaagaaaaattacttatatcaatgcaacaattacattataatattgcaacaacacacatacaaccacaatattaagttaaaaaagaataccacctgccattaaaaatagaagatgacagatgcatcatgtcttacatgcagttaatctaaacaaatatataataataacactttgtgttgctgtagagttgtaaataattatttactttatttttaaatatattattttcatgttaaattttatttgttga

SEQ ID NO: 1144 - DNA, 1888 bp, Cannabis sativa
tagcaatgctatccattccgacccagaatagcatcttgaaccatgtggttcaattagattggttggaggcttataatgttgtcgagcactaagagcatctctaattattttaaaattttaaatattatattcaattagaagtattaaatcatagataataaataaaacataatttaaaaagtaaatgagtaccgtgacttttcttgaacaatttgtatgaggagtttatattgaaaagctaaagttgaacaacccaaagactcctactattagagtcgaaagagtgcttccataaaatgctaagtattttagaaggaaaatggttaattagtaagttgcatttttacccttattatgtgtatacataaataaataataaaaaaaaaagaggcgtatgattttttggtattggaaacttagatatgactaatcggctaaactattgtaacacattataaaatagataaggtcggtagcaatagcatatggctacatgaacacatggaagccttataagctaatacacatagacctcgtcccataaaattccaaaattggggacttaattccaaaaatcaagcatgtcactaatgaagacatttttatttttgttttcattctttattattggattaataatacaaattattagtatgaaagaaaaagaatttccaagctcacttcttaattattatacacactagtcccattcctttaggtcatgtctttatctcatatggtccaaatgttaaatatctatgctatgcggtagttgaaggttcatattcacttaatatcaaatattttattgtaagcaattttttctctcaaatggatgaaaaattggactatttattaattaatcaattaagtcatatttgaagaaaaatcagtttatattcgtggcttactcctttgttgtcattaataagattcttctcatattattatacttttaattaagccaactaatggcttcatttaattatagtgttgtctatataaccctaattattagaatttctgaatacaacagttttaataggtcattttctgtatcattaaaaaaaaaggtcattttttgtccttttcatgttgcatgttcttttattattataccgtgattatttcgtaaatacataaaaataataaaaaattataaaaataaaattttataaaatttaaaatatttttacgattttatgattttatttataggaaatacaattttttgatagtaattttatattgtactcttattaatttattattgattttttaattatttttttttattactatgtgatttttttttattattttagtggtgtaacaccatcaaaatatatatatatataaaataaatgtaaaaatgtaattatcgtttataaattcttttttgggattgatgtgtacaattttgtggattatacatgcttttatggttacacggacttaagcacattggcattctaggcccaaggtcttcttggcttaaagcccatttaaaaaggttgaccaaaaccaaagtcaagtagtcaaagtcaaagagtgagaatgagactcgtgcgaaaacgctgccgttttcaacaactccaccaacccacctaacgagaaggacaaaggccgaaacccatttctcaacccaatccatctctgacctgaattgattacctttctcggcaacaatgggtgtgacggcgaagatcgcaccgtcgatgctttcctcggactttgccaatttggcctcggaagccgaacgtatgctcaattgtggcgccgattggctccacatggacatcatggtacaatactctcctcggatgatcctaaatatgttttttttttgcctttttaatttcaagaatttattgcaatttccatgatt

SEQ ID NO: 1145 - DNA, 1697 bp, Cannabis sativa
tttttattagtgaatttttattattgtcttcttattttattttccgtgtggattgagttttaactttcacatttaaagaatatcaaatttggtacatctattgatgcaggcaacattaccctcgactcccaaaaactcatccactaagacaatgtggaaaggaatcaaaatcgcatacttgcaaatagccatgattttgtttcccatggcaatagctggattttgggcttatggagataaggtcagaacaataatttcaaaccttgaaatcctttcatcccattaaatttcgttgggtacattattaaattcacatatatacatattcaaatactgcatgtttctgaaaataatggcagataacattcaatggtggaatgataaaagcactatctcaattccatggacaagacctctccaagttcgttataggcctaatctacctcctaataataataaactgtttatgcactttccaagtctattccatgatcgttttcgacaatttggagtttaggtacacctccatcaagaaacaaccatgtacgaggctgatccgaacagtttttcgtctttgttttggagggcttgtgttctttatatctgtggcttttccattcttgggtagcttggcaccactgattgggggcctaacaatgcctttgacatattcttatccatgtttcatgtggatatcgatcaagaaacctcttcctaatcggccaatgtggttgttcaacatggtactcggttgcttgggactgattttgagtgtttttttagttgttgcggctatatataacttggtcgacaacggcctcaatgctaactttttcagaccttaatgtcacatttttatataccatgaagtttaactatgacaacgtgtgatacatcaagtgtgtcaagttggcaagtttgtatagattcgttgataaatgagagtgacaaacaagcttgttctttttggcaaaatatttattaatgttgtaaaaattggtgggcaagtaaataaatcgattataatatcgacaaagataaaaattaaaaattaattcacacaaataattacttacaagttccaacaaaaataaaatggaaggatgaaatcactaacaaaaaaaaatagcaacaattattaaattagcctaaaaatatatagttgatacaatgatacaaatgaacattaatataaattgagatttgtcgacaagaaatttaacatgtcataattattttttaagtatttttgttttgattttttaattaattaaaatattaatgtgtcaattaattttaaaaatatcaatttaaacgcaatttctctaagtcataaacaacatatttctatgtacaatcacatttaacgaatatgatattaatgcatcattcaagtaatttctctaaatttctttttttccaaaatcaaaattaactaattaataacttgttgtttatcgagatttctgaaaattaaattaaaaaagagtttaaaaaattaaatatgtaattaagtgatagagatgaagatttttatgtggttcaagtgttaataaactttagtccacgagtcaatatattagcctaaaagctttgaatgtattgcaatggggtcttataagtagaagaaccctagcttatggctatagtgatttttctctgagttttcccttgctttgcaaaaaaaaaaaaaaaaa

SEQ ID NO: 1146 - DNA, 2347 bp, Cannabis sativa
aatgacaaataattatttgttaaaaataaaagaaataattttttttttttttttgctttatgagattttgcagcatcagatttttaagataaataaattctcttgttctgcttggaaccagtaacaatgtcaaacccattggagagataccaaaagctcggtttcagagactcattcccgagaatgcatcgctacccaattatctgtaaagagcttagcctcattatcagaggcgcttactctaaattccccaaaaatttacaagccctaatcatccaagacaccctcaccgcttttcgtctccttcctgggtctgtctctctgtaatccctatatagtaattgattcaatttgaggattgcaaatttgccttaaattgtaggttaatttagtatagtttgcagtgatcttatatgtttttatttctagaatgcagacgcgtacggccgtttctgcagctcatcttctctttcagagcgccgaggcttctttaccaaagcagaagaagaatttggctgtgactgaatttaaacatgccatggtttctcataggaggcgctgtaaaacccgccaagaagaaaaaggtaacttttttattacaaaccttctttgattttttattaggaagataccccatttaatgtttttaatgattttgttcatattatgattgtagcagtaagaatcccattatttatttatttatgatttgaaactctagtctatacatagtttcaggttctgcccagctgccagaagatgttcttgttcatgtcttcagtttccttgatatgccatctttaattgctgtttctcaagtttgctggtaatttttagttctttcaaatttgtgcatattctttagtttatatgccatggtgaacaaaatttcgtttacacaaaaaataaatgatgtatttgtgtggttgtaatatgtggtttcaatttttggttggatttacttaatatactatcatgtgaattgcatagcaatagggtagaatatatttcgtggaacatcgttgtagggttcaagtgggaatgaaaacaaatccaagaagagccttgatttgaaagttagtgacttaacttttcgagatcgaatttaactcggttgctcgtttaggttgtggaatatggcagcaagtgatgaccagctttggcatgcccaatatgttacattttttgggaatgctcataataatagattggagattagtgggaaaaaaggattagatgttggagtcaagaaaaaggcttcattacagagagacatggttgctggatcaagcattcactggaaggaagcctttagaacaacatatagaggtaaggtaatgtcacatgcacaactgtgaacacagatcatacccacaaatttttggggtatgaaattcatttattgcagtagttcattctggtttttgctcattcgtctcgctatcacattgtgtttggggatttttacagttgctacatatatctgctttgatttcaggctcgttaacgaaattaacttctaataggggatattgtgggaactgtacaactatagtttggcttgaaaacatgaaatgttcaaatgaacattgtcgattatcatctgaaaatcaacgagtcaagcccgtgtcctcttaccaggttatgtatcagtttccatttattcttgttgttgatgaatatgatcaattaataaaactattgcttattcattcccaggttgttgagtacattttagatgattcaataacgatgttatcctcttcggatagcgacagtgatccagaggaagaagcttcggggtcaatgtgtaggttatgggcttatccaaaactcaggtatggcaagccaacaaccttcagcatagaagcaaatcagtactagattgtttctcagattaatatagcatgcttttttcctactgcaactttggtttgtatcagcaaaaacaacgtatcatttttagaaattgtgcaaaaatatatatatatgtatagattagtccttgactaagttgaaaaactaatatggagggttcaccttcaagatgctttatacaaacaacaaaatcaattacttccaacatcgtatttgtacaaaaacatctttgtattttgcaattactgtaattttttatttaactccgaaccctcgcatcagttttatttatttatcttttgaaatatatcatcaaaaaactctaccataaatagcattttaagaacatctccaatagaagacctaaaatttgtgctaaatttgacacaaaaaaataagtttgtgttatgtgtagctcactatttataattgtgttctaatgcacaagatgtaaaaaaaaaaaaaaaaa

SEQ ID NO: 1147 - DNA, 2992 bp, Cannabis sativa
aaaatcatagtgaataataaacacactaacattacatgattttaatgattattgttatctactttctgttcaatgttctgatgtaactttttccctagcaatacagcagagcatgacagagagattaacttccattttctatcaataaataacaaagtttatctagaaaaaccatacaaacacaatcaataatcaactaaaaaaaagaaagaaatacagcatagcataatgtcatgctcatagcctcatattacctaataaattttatgctttcgagttggaaagcaagcagtagtgtttcgtcttaagacaaatgcttccatatcgccgggcgatctctggatatcagaagagtgcgagatgctgaataatcgaaagacggtgaatacatatcatcagggccaacaatttctctaaccatttgagacttatcttcatcgcttgtatacggatcaagatcgttgtctgtacatgtatcgaatacaaacagccccaatccactaacagccatgacatgattcgagtttccccaaacttgagtgattgctgaataatggctatcggcattgcattcaggcaacgagtaagtgctgaatagcttttgcttacgcagcgaaaattgttgcacttctgaggtggactgccttttcacccctgaggttctcacgttcgagcaaccaagaaagacagaatccccacgtgagaaaaccgactgtacattcacaccgagctttggtatcttaagacctataccagatgggttgcgaaagtccataatgttaatggtgtcttgagtgcagaatacaccatcgtttccctcggcttctgatgaacttagcctgcatttaagatatctaactcttagaaaacatagtataacatgagcaaaggaagaaaccaaggatcaaaagaaaggggaaataagtatgtacctttgtcgaacacctccaccgagctcagcatcggtattattcacatgaaaagcagagatttttcgaccagataaagaaactgattgtaatgcttgagggctgatggagtttacatcccaaagagagatagtttcagattcagcaatggctacttttcctctatttctccactgcaaggggcttgaataatccattgttgacacaggctttgatacaccccattccatcatttcttctccatcacgaatgtcaaatattctcaccgctctctgagagctagaagttaaagcaataagagatccacaaggtctataccaccattgtcgagtttctggatccataggattggacaaggaatttctgtgtgaaatattgttcggtaagggaccaagcactgttcttgaaggtggtggtactctttcaaaataagaagcatgcacttctttggtgtagaaatcccatgagcaaaaacccgaatccaaagcattccccgcagatgcagccacaacataccttcccgaacatccatctgcactaggagctcgaattacccaacagtctctccatattccaggagatactccagcaggaggcttgtacaccgccttttcctaaaatttgttaataaatcattagccaataagataaaatactagacattttactataatgtatgttcatatcgataaaacttatacacaggttaagacaagtacctcattgttaacaatatcataaaaagtacacgaaccatcatcatgagcaaggagaaccgactcgccttcagacacaaaccagcctcctgttgatgttttgcagcctatttcattcacctggtaaatactattttcctcagtttcatcatcaaccatctgtctattctcctggtcttcaaattcatcaattgcttcatcggctgttagaagaagctcggcattttctttctgaatcattatgtccgaagaacatcccccagcttccaactctacaccatcagcttcttctgcatcataacattccataccagcattcatttcccttgttgtgattttcgttccctccttattcaaaaaagccaagaattctatcgctattgggttatcatcaatggaactcaatggcttatcaactgccttcgattcaacactttgagaatttgttgatgagggttttaatgatataacccgatttctgagcaatttatgatgtggaaacagtctagcttccaattcatcactgtttaaaccgttcaccgagcttttactgttgtccaccagatcaagctgatcgctcacaacagttttcaccttctgatcaccaatctcatttcctttcaaagtgcttaacttcgaaccagaatcaccagcaacacgacccatagctttctcaatccccgaaatcttgtcttgaatatccgaaagtatcacctttgactcatctggtttattcaaatccaacatctccttagtcctcttgatatcagaagcaattctcttaaccttcccttctaagaaagcaagcttctcatgtagcttactcggataactattacaatcccgaccatcaacaccagcttcacttacctttccctccttagcaacatccaaaacatttacagacttctcctccatctccttcttcccaaagctttcatctttagcaagcttcaaaggcaagtcatctatctccacctttactcgagctttctttgcgctctctttcttgatacaattcgccatagccttaccaacatcaactccattcctcaaatctaagcttatatcattcttcccatttccacacttttcactttccattgttttcccttcccaaaccccacgaaccttactcattttctctgaaatcacaccactaactttactatccctaaaaaccctaattccattcgagcccaattcgctacttttcgagcccaaatcaccaaatttcttcttctgcttcccacaatccgaaaccctagaaccttcaaaactttttccagtgctcgaaaaagccctatcggttctatccaccgaaaccctccgctcctttcggacatc

SEQ ID NO: 1148 - DNA, 4189 bp, Cannabis sativa
atatatatatagctttttggctgacgatgatcagtttaatcattctaggtatgtctaccacttgatctatatttgtagtcttctagttttcaattccttaattttgttcaagagagtaataactgaggattatgactgaaaaaggttttatctttgagaatgtaaacttgtttagaactgttgtaattcaatcatgatgcttgtggttctgtctttacatacattgacattgtttaggaaacccaactcagtagttatatgcactcattgtttagtcttatgttgctaacatgaacatcttgtgtttgttaaaatgtctacatgagcttgttgtgcttatctaactcagattttgtttatcctagtatttaatgagttaaagaaaactaaggtggtgttcggtttggaggaatgaaaatataggaataggaatgagaatgaaatggtttttctttcgattttaaaatgcaaccaaacaaaagaatggaatgaaaattgtttctttttcattccatttcatttcattacctctaaccgaacgtcacctaagtactttgcattacaatttgcctaattccacactccactcacctttttctttttgatcaaattttgtgtttagggtgtttaaacatgtctgcagagatagctaataactggttcttatcctcttcagatgacaagcctttgtaaaagaatcagcaaactttcatgaatctagtgagagttacctctgctctacagcacaggttctttcactcaaccttagcagcatcttcttcagttcaatggatctccccacttcagctttcaaaacctagtccccgaaaacaagaccctcctccaaccgattatgcaacttcttccatagatggtcggaggaaaagcaaatacatttctcacgaaactgcaatcgagttgatcatacgtgagaaggatccacaacgtgcattggagattttcaacactgtctcggaacagaatggtttcaatcataacaatgcaacctattcgactatacttcataagcttgccatgtcaaagaagttccaagcagttgatgcaattcttcgtcgaatgacttatgaaacttgcaaaattcatgagcctatattcctaactctcatgaagcaatattcaaagtcctcatcggatgagaaagtgctcgagatattctatgccattcgacctattgttcgggaaaggccttcagtcaaagccatcagtacttgtctcaacctcttagttgaagcaaaccgagttgatttggctcgacagcttctcattcattcgaggaaaaatctgaacttgaaaccgaatacttgcattttcaatatattagttaagcaccattgcaagaaaggggatattgactctgcatttgaggtaatgaaagaaatgaagatgagcaaaatttcttatcctaatttgattacatattcaactttgataaatggtctttgtgaaagtgggaaacttgaagatgcaatcaaactctttgaggaaatgatctcaaaggatcaaatccttcctgatgctttgacatacaatgttttgattaatggtttttcccgaaaaggtgacattgacaaggcgaagaagataatcgagttcatgaagagcaacggatgcaacccgaatatatttaactacacagctatgataaatggtttttgtaaggtgggaagatctgtagaagctgaagaagttttcgatgagatgaaaaatatcggtcttaaacccgataaaatttgctatacaactatgattaattgcttttgcagagttgggaagacagataaagctatggatttgcttaaagagatgaaagtgaataattgcaggcctgatgtagtgacctttaatgtgatacttggaggactttgtagagaagctaaatttgaggaatcactcgaaatgctcgaaaaacttccttatgaaggtatgtttttgaacaagggaagttatagaattgtgttgaatttcttatgtcaacagaatgatcttaaaagggcaactgatttgttggatttgatgcttggaagaggctttgttccacattatgcaacttcgaatgagttgcttcttcgcctttgtaacgggggaagggcagaagaggcagccgtggccttgctcggattggtggaattgggatttaaacccgaacctgattcatgggcttcattggttgaattggtttgtagggagagaaagattttgtctgcttttcaactacttgacaagttaatttactagttagtttttttctacatgaactggttttgttgcaagatttagattcatattgtcatatattaatttgttgtattattcagttaaaaaaaaaaagaggttcatttgaaaagagtgatatattctgtttcgagcctatatctttgcttttctatcaatttctaattctaatccttctctccgatctgagattatggtgtcggtatagactgaaattccgttatgatacaattctgaccggtagtagatatcaggactttacaaatttttaactaagtggttaaataaggtaatttccttaaaaacatattttttaagttacattttctatataacacaacaaagtaaacaaaaattgacaattttttttctaggattccaagccaaactccataagatcaggtacataaccaaatgatcttaacaatttggtcaatccaatcaatgcaccataaatttcatctctttgaggatgtctctcatcaaaagaataaaactcaattacactatcattcacctcaattaagctcaatcctggcaatttcttaaaaccagtatcccttatagcaactttcaatcttgacacatctttccatctaccaagatcaccataaatattcgaaagcataacataattggatgggtttcgaggttcgagttcaatgagtctctcaagagctatttcggctaactcaatgttcttgtaaatcttacaagctccaagcaatgcagaccaaatcacagcatctgcatcaataggcattgtcttcacaaaatcgatagctcggtctaattgaccggctcgagctagtaaatcaactacacaaccgtagtgttcgatctctgccctaatacaatactcatttgtcattgactcgaaatatgacaagccatcttcaaccaaccctagatgcgaacaagcgcaaagaatgcctatgaaggtaataccgtcgggtttttcacccgtgttcttcatctcacgaaacaattctaaggcatcatcacctcgaccgtggatcgccaaggcacatattatagaattccatgtgatcaaatctttcatttccatggctttgaaaacttcaattgaattttcaatcataccacattttgcatacatgtcaatcaaagcatttcctataaaaacattacctttgtatccaatacttcttgcatatacatctatccatttacctaaatcaagagcacctaatcttgaacatgaagataaaacagtcactaatgttgcatcatttggacacacatcaacctcaatcaacatccttttgaaacactttagaacatcaaaaaaccgcccttttcgagcataccctccaaccaaaatgttccaagagaaaacattcctacccgggatctcttcgaacaacaattcgcaagcttcaacatctccatttttcgcatagccattcaacattgtgttccaagacataacatctctactaggcatctcatcaaagagctttcgggcagcaaccatatcacccgattcaatataacccgaaacgacagtgttccacaacacaatatcgcgctctggcgccaaatcgaatagacaacgagcagaaactatatcaccacacaaaatgtagccattaatcattgatgtccaagcaacaacattcctttcaaacatttcaccaaacactttataagcatcaccaattgctccaccacctgaatacatctcaatcaaagtagtacccacataagaatttgatctaaaaccacacttaatcacatcacaatgaacctcttcaccttcaactatagcattaagtttcccacatgatttaataacataaggaaaagtaaagcaatttggtataacatccaaactcttcatcttaccaaacaagagtataacctctctatgcctttcgtttttaacataacatctcatcatcgaattccataa

SEQ ID NO: 1149 - DNA, 3956 bp, Cannabis sativa
gatggaaaaaataaccataaaaaaaattttaatatttatataaatttctcatcagaaaatactctataccaattcaagtgtgcaatgaataacattattggttagtcatatatcatagcaaagaaaaccccaaaaaaaggatttgtatatgcaatgcattatctactaagcaattgcttttcttccttctcaagtatgtccaaccatcttaaccccaagtcacaaccacctctggctgcaatctcaaactgttctttcgccatctctactcgatcatgagtcgaacaaatctcttcgtcttttctcgctcttttgtataaaaacgccttttgtgaccttaatttcgctatagattccggtatttcaacacctttgagaagaagagagccatatgctatagctgcaccagcatgtccctgcatatgtgtaccaactcatatgaatttgatgtgttaattagacaaagttcaaaactttctttccaatttcgaaactttaacagttcaatatgagcaacttcgaaatgggtccaagaacaaaacagaaaacattatgaaacaacatctgatttcatcatacattcaagtcatatgatttcatcatgcattcaatctcatcatcctaagaacattcaaatgaaattaacaagtcattttttttttaatggtaaccgatataggttagaaaaaaagctggaaggcaaagtgaagagatttcttctatccataaaagtttactgtctatcctaagggcatgctaaaccaatctatgggtgcaacgttaacgttgtaacttatataagaaagagatgctcccggaaagctagacaataaaacttagcaagtcatttaactgaaattcgagaagcaacttaccttttctgatgccttatgaaaacaccatagtgctgagtctacatctttgtttacacaatctcctgtcaaatatacagctcctaggaggtaaagggcacctggatgaaactaaacatagcaaagaaacatagtaagtttttcggtcattcatagaaagaaatcataaaatgttgtacattcgatcgtaaaatgcacctgatcagcagccttctccaggtaatagaaagcttgttgaaccgaactgacatacggattctatacaaaaaccaagagaacaaaacttgagctttgattcataagaagaacttaaggttaagggttcgtttggtacgctgtatttaacataatactatataaaaatatgatatataattaaattcaatataatacaatacaatataatacgacctaatataacgtaccaaacgagccctaaaagaatatatagaaaagaaaattaaagagctttgcctattttcttagtgtattcttatctttttaatcattcaataaaaattctcagattttcctattttgagtttccttcaattttcaatttctctctgttctcacatgtttattttgctattgatttgaggatctctacttcgggtctttcggcataaaaatcaatgaagacaaagagttgagcaatatttactgaaaccaaattgagctccgaagaagaggattgacaataacaagaaaatggaaaaatttacatagaatagtcggttgaattttatgagccgaaagatgcgcatttgcacaatgtaccggtttggtgcaactcatgttacagtaaccgcattcaaatagagaaaataaacaaaacatgtacacaacaaagggtaaaatctgctcaaacaaatggtttcttttctatgattattaattgctagagcaggaaactcgggttaccgaacaagcataaagtgaataaaagtgcttaagttgcactagagaagtatatgaacaaagaaacctaacctcaactctcaatttgcaacccaattcatattgagcatttttatcacccatgtttgcagcttctactaataatgcagcacccctgttgtgagagaagaaaacaaaaacagcaacaagatcaaaagcatatagagatttggagaaactaacatgaccccagatcgttacgcacccaaactagactaaagtgtcatctttttacccttctattgatagagagtcttcagatatttcttttccttctccaaagttgaatattgacacattaaaacagttacgatattgataagacccgacaaccacccgaacaagattaacctcaagaacagtaaaacagtagctatcacacaatattggccaagaaatagggagtcttattgaatgaaattgcaaaaggaaactatagcctctacaaggatggtgagccgaagctctctaagagatgctgagaaaatactcaattctcgcataccccaactattcccatactcacctacatatacttactaatttccttccaatcactaccccgctacatcatcaccatccacaaacatcagagaagtaagtttaaatgataagcgaaaaaaaaaactcgattatataagtctccttacactgctttacatgctccagggacatgatatttcatatgcaatcttgccaaccaatatctggcatgggtgtttgagttgtcagcctctagagccaactcaaaattttcctttgctgtctgtaaaattaaaacacaaggtaaagaaagaagctaaattaacaagcattcaatttcgagattggtttcgtaataaaagaaatggtgaactaaacaccagcctctccactaagcagaaacacatgatatcactcggagagtttctcgcattaacaaggtaatgtcgatgaattccacaaccaactattatcaccaatgccatattaaacacaagtaattaaaaggtagaatagatacagagattgaagatgtcaaatttagctaaaattataggagaaagaaaaacaattgttttcccaacctatctaaactatattgggagtacttatgaagtaaccgaattcaggaatttttaaaatcgaacgccatatttgaagctcaagaaaatgaatgaaatttaatctacaaaacaccaaatatgacaaaacctttagcaagtcaaatcaccaaattagccattcttttctaaaatttcagaacccaacaatattacaataaaatctccaagtgggtattcttcacaaaccaattataatcaaaataacaagtattatacaagaactatcatccttccaaatggatattcaccacagaccaatttttacaaaaacaataacaatagtgaaatcattacaataaaattggtagtagaatcataccctgaggagaggaataagacgtttatcttggaactcagcataatcaatgactctatctacttcctgcaaagcaccataccctttggctataaactccatggccttcttgttcctactatggacccatctcttttggttaaataaaagaaaaccaactgtagtatgctcttgttgagccttcataagaagttgccttatcatcttcttctatgcaaaatcacaatcatctaaggatgggaaatttctgaccaaagtagaagaacaagcatgaccctatcaaacagatgaagaagattaagctgagagatgttgtgtagtgaataacagaacacagcacaccatgtgtgataacttgatattgatacaatacaaggtggaaccaaatgtttttctttttcatatatgttaattctttcttctcacttaaatgactggcaccaaacatgccctatattatgcttgaccgccggtggcttattagttctctagttgaggttgctgttaggagacgtttggtatgaagtttaaacttgaatgggaatgtcaaactaaattaaattttaattaaaatgatggtaatgttaatcccctccaacacttgagtttcatattcccttcaagtctactccttccaattctactctctttaactcaaactcacataacaaacactacattaggtggcatttagttggaagg

SEQ ID NO: 1150 - DNA, 3112 bp, Cannabis sativa
tatatatatatttatgagtaacaattatattgctaatcatcccttttatgtttctaagtaggtagttataagaaataaaataaaaagttaatggctttctttcatgtataattgatgctattaattttcaataataataataataataatagttgtatatatatgaaatgaagaccgccgttaagttcacgtctcatgataatattattagtactacttactttttgcccttgtgccaaactcagcccatcaccctagcttatatctatacttttcacacacaataatcataattcacaattcacaacaaacataataagtaacagaacatcattaattaataatggtaaaaactcgatcttgtacgtggtcgatacaaaaccacgttaatttatactaatacaaccacacaatctactatgattacgcgcctactattaattaatagtttgatagagagatatattgaaaatgaaaattattattacactattttcttaattcatctaaattcattagtgtctttatttattttttgtttttcattaacactcaaataataataataataaaatatatgataacgctatatatggtacattctcaaaaagtaaataaataaatgtgcatcaatattcttcatcttctcttttcatgacacacatcttaagttagtctcgtagttgtttagaacattgcaaattttcacattattctcaataatttattaaatcagaaataaagtttaaataaattgtttcttcatataaatttatataaaatatattatatcaaaataaattattctgcaagaacccaatatacagtactgcaatatttttcttaaaatatattttttacgtgctgaatataatttaaaggatgcaccataatatgtctcaaaacatatttaattaatgatgtgtaaaatataatacttttcttattgggtgactaaatatttgttataattattacttctaagtagtaacatcaatgtcataattctccactattctcactctctacctttacttattactcaatcaaaatatcatgcattctctccaatctaaacctacattcccttacatacatttttaaaaaaaaaaaaaaaattattaaagatttttgttcataaatttagttgtcccaattcaaaaccatacaattatattatattttattataaatacacacatttttttccctatataatattaaaaccatcaaaacaactctctatctattctttcaacaatctctctctctaacattttctttgttgtgatgccttcaagagttttacaatggttaagccttgtaggaatcatatggttacaagccattaatggaaccaacaccaatttcccagcttactcttcccaactcaaacatgccttctccatgtcccaactccaactcaacaacctcgctttcgcctccgatgccggaaaactcttcggttggttttccggcattgcttccgtttaccttcccctttggcttgtccttctcataggctcagttctcggtttaatcggttacggtctccaatacctctccataactaaccaaatctcatctctttcttacatccaaatcttcattctcaccgtcttagccggtaacagcatatgctggctcaacactgtctcttacctcgtagcaattagaaacttcccccgccgttaccgtcaactcgccgttggtgtaacgacgagttatcaaggattaagtgccaagatttatactgacgtggcaagttctatattctcttttagtaacggtactactgagaaagcccaggcttaccttcttctcaactctgttttaccactgggagttaccgttataacggcgccgtttgccagagtaatgaaagtaggaacagtagccagggatggtggtggagacatgaacgttgggtttgttgtaatgtttgttataactataattactggtgtttatgctgtgattagtagtttggggttgattatgtcaagctctgctcttaaaagggttattggtacatgtgtttttctattggcaccgcttttgattcctttggctgagaaaattcgacaagtgtttgagaagtattatagcagtgtgattaatagggagaccagagtttaccattttactatagatgatgaaaatagtaataatgatgtggaaactgatcgattggatcgtgagggttccaaatctgaacgaggtagtcaagatgatcaaaatggtagagaaagagaagtagtaataatcaacggtcaggatgatcatgatgatgatgatgatggtgttggggctagagaggagattggagttaaaaagatgttattaaggattgatttctggttatattttttctgttatttttttagtgctacacttggtttagtgttcttaaacaacttgggtcaaatagctgaatctcgagggtccaataatacatcttctttagtttcattgtcttctgcctttggattctttggtcgactcatgccttcacttttagactatttcttctcaaggtcagtaaacaaattcatttatctatttattttgtgttagttgacaaaatgaatgtgctcaataaatttgagaatctacttttgttgaaattataaaacaaaaaattgatagctctgttttttttttttttttcatcagaaggagaaagtcatcagtggtttcaagtccagctttaattgctatcttagtagctccaatgggaggagctttcttattattactcaactcaacacacattgttttatacataagtacagctattataggagtttgtacaggagcaattacttcagtttcagtttctacaacttcagagctatttggtgctaaaaatttctcagtaaatcataatgttttggtagctaatatcccaattgggtcatttgtttttggctatttggctgctcttctctaccaccaacaaggaaatgggcgatcagatgggaaatgcataggaacaaaatgctatagagacagtttcctcatttggggttctctctgttttcttggcacgattttggctataattttatgtgttcgtacacgcaagttctactcccatacatcataatta

SEQ ID NO: 1151 - DNA, 4596 bp, Cannabis sativa
ttgttctttcttgtcccgcggagctcggtggctcggtcaatttaactctctgatatcatatgacaatcaataatccaacggcttcctcaacgccatgccaacctcagcttcaccaccgtcctccgcctccgcctccgactccctctctagcctcgccgtgttctccacgcgccgccattccgacctccttgctagactaacctcctccgacacccatgtacagctcaaggctctcagggagctcaagaaccgcatcatcgggaatcggaccaagaagctttttttcattaagctgggcttagttcctgctgtggctgatatcctcgcctccaaaaccggagccgttgtaccagacgatcgtaactccgatcttcttatccagtccgctgctgtcattggtagctttgcatgcggcttcgacgccggagtccatgccgttctcgatgctcaagtgttccctagcctcctcagactcttatctcattgtgatgagaaggtattttatatttatttatttatttgcgatctgttttctgtttggttgcttagaatttgatggaaaatgcatgaggttgaatgcgtaatgtataaaaattgatttatttgatgttttttgataagttgagatgataattcgaagtatttatcttgataaatagtgttggtttagttcaatttccatggtttcaatattgtagaattaatttaggtcattattcactgctgttgaatattgctgcaaatatttatttattaaaagaaaaattatgtgattttgatggccaaatgcaagtagacccaattagcctaattaggttatagttactcttatagattttattttatgtttgtgctgtaggttgtggatgccggggctcgttctttgcgaatgatatatcaatcgaagcttgctccaaaatatgattttattcaacaaaaaaatatggaatttcttctttcgttattgaatagtgagaatgaaaatgtaactgggcttggtgcaagcatcataatgcattcttgcaagacagtcgcagagcagaaggcattgtgtctagctggggttttaaagaaatttattcgtcttcttcagggttctctaagtcagagagatgctagtttggagtctttagctaaaattataaaaaacaatgttgaagctgtttctgagtttgtgggattggatagcggaagggctttgagtacggtgattgagttgacatcagataggtatccaaggacaagattactggcctcgttgtgcttgattgttataaggaacacttgtccttgccacctacaagatatagccatcaaaaccaagttggtgcatcttttacttgagcttcatgatgatcctggtcaagtcggagatgaagcctcttttgccttttctagcttaatagctggaagggaggatcttcaaaaacttgcatttgaggctaatgccattgataagctgtacaaccacttgcagaaaggtgcactgcatcctaagcgtgctgaaggcatattgttggcaatggctgatctatgctcaaaaatggatagctgcaggtttaagttcctaacactgaaggtttgtgtttacagttttacttggagatactaatttactagtgcattattctaccagcactatgctcaatcatcttttttagcaatgtcattgactacaaatcagatccttatttcttttgtttagttgcttgactttagtcttttgaaaacttttagttgtttgacttaatcggatgagattacctatgttcatgtgtacgattcctcttaacatttgggtatatatttttcataaacacaggcattgaaattggtaatagatgggctaactcaagatagttctgctgtacgtgctgcagcttgcatttgcttaaaaagtgtctctcgatcaatcaaggtgtgttatgggagtatcagtttgcttttcacagttgtctttgaaacatgctttggctaatagctgagaaattattgtgcagagtttgtgtgcaggagattttatggacgagacaattgtatttcccttggttcaacttttgcaggatccttgtacttctgtccaggtacaggtctagtgatatgatcattaattgtcatgtttttttacatgtgtagtcatatttgctctgctaaatttctttccttaatcagaataggcataatgtttaggttacccttgatttagttggaccaacatgcttgctggttattatggacactgctatcacctttaaaaatgagatctgatacattttgcattgatagctatgtaaagcccgacattgcagtcatatcatatggtaacttgtgctcgtgctcgttaatgtagattcagggatagatttagtttgaccttaagtttttttctttttatgtgagaatattgcactctcttcctgtaaggtaaagatagatctgaaaactgaatacatatggtaagttcttttctagcaaaggtcatttataatgataactatataaagggtttgaaattcattttacccattaagaattgaagtgttaaagataattgggcatggtaggttccttttaccatttacagttcctgtttccttaaagatttaaaaaagtattaaatagaaggctttcggtaaatgcttcccaggttgcagctctcagtgctgttggcaacatagtccttgattttaccaaacgtaggtccattttcatacgatgtggaggtgcaacacaactagttcagttatcaaaatctatggattcagccttgagattaaatgccttatgggccttgagaaacttaatgtttcttgcggataccacatgtaaggaaggcatatttggagaactcgaagcttcctcattggcaagccttgtttgtggtaatgaattttatttttcttcaatgaacactcgcattattgtatgtggaagttggatgtactcccaaagattgcttagtcaattgtgtttatctgcagattctgagcctgtagtccaagagcaagctcttgcacttgtccgaaatcttattgatggaagcgtgaactgtattgagtttgtatttgctgaagacggtattatcttacattctgttggaaggaaattgcagagtgttcctaaagttgaaattgcgatacaggtgaggatacttttgtagatgggtcatttagaacttgtatgttgaatgtactttatagggaaatgaagtgtaataatgtgaatgtgtgtgtgcattttgtcatagttacttatagggaaatgaagtgtaataatgtgaatgtgtgtgtattttgtcatagttacatattataattgagttatggaaacctttatttagggaatgtatttgctctgcaatgtcgcaagtgggaatgaatttcacaaggatgctgtaatgaaccaacttgttaaacaagcagacaacggaatgcaatcttttatgatcgaatttttgcagagcagcaacagtcaattacgtacagcttctgtctggaccataataaatctcacttttccatcagttcctggtgcatctggtcgtgtatcaaaactacgtaatgctggcatattgtcacaaataaagagcatggtcaatgatcctagtccagaagtaaaggttggttggtttatatatcaaattcttaattttgtcttccaattatatcctaaatcatcttttgcttgttacgcagcttcgcataagaacagcacttgggcaatttacgacttctggtgctgattcaacatgatgcctttcctgattcccatcttttggggacccaacgaagataaacataaaagaccattgttgcaacttggtgtatcatatgctctggttcttttagaatggagtttcagccttcctggctgtggctttccagtgcatggtatgcttcaatcaatgtttaaatgacatgtttatcatcacaagggcattgactaagctattcttagaacttcatttcacttctgacatgaaaaattctttttgtatattgtttaaagaaattatatcatatgtgattcagagttgccttagcagttagatgtcatttatagggtatttgttcatgtagtaaatttttgccctcgaccacgaacaaagagtgtaaacagaagcttttaaaacaaagctggctgtcaattttacttactcgcaattacgagattgtgtgaaagtgttttttatttttatgttcaatatggcaattgatgttgatgttagaattttcattgcgtaccatacaggccaccacaatgcccaacttccaccactgcggtggttgcctttagaagctagtatctttaaactaagcttcaagactagttatttgctcatcaaattatcatgtcttcctttagcaggctaaccacttttgcttttctttttcttcaatcaaagcagtcaggtcgcttatttcttcctgtgtagtaattatgaccacctcattatattttaatggtagcaagctttgtaacttcatttcttctattacaccatgattgcttcaattgcaatccagtgcttcaaagctaattgagtatttgcaattttttttttctttttcacttcaatgactttgcggtggtagt

SEQ ID NO: 1152 - DNA, 2195 bp, Cannabis sativa
caccatcaccctgaacccatttatatccaaaatactcttgacccagcccaatcatccaaatccccctctaaatggtttcattcggataagggagtggagtgttctggtgggaagaagaggaaggcagctggaagtgttgcacctgtgataattgctcaaggagagttaatccccatagccgacatcaagaggaaggttaatgaggatattgagaaactggcctttgccattggaagctctgagagttctggaaaaacaagaaaggggcattcgactaatgcaaagaagaattcttctagatcaagccagaggcaaaagaagaaagtccgcgcggaatcgggtaactctattcctttatcctttgataatgaaaatactgaaatctctgagttgggaaacatggtcattgagattaaactcgatcaaaattttcaagtgggcgaggaggcgacccttaccaagtccccccaatccccatgaggtctctttcttggaattgtcggggtctagggagacctgcgacaatccaagctcttggagtttgggtgaggaagtttaaaattgattgtgtttttcttatggaaactaggttggggtcggttcaaatggagaaggtggggaaggatcttaattttcaattcggggagtatatagccgctgaggggttagctgggggttctgtcttttttggaatctctctgctggtgttaaggcggttaaggtgtggaacatgggttttgaatgcttgatttttgaggaatctaagaatgctttatggatgatgtacgctatatgggcctccttatgatgagttgaagtctgagttttgggaggaagtggcaagggacataaacagcaacgataatgcttgggctgtgcttggggatcctaacctccttcataccagtgaagacaagtcaaggggtaggcgttttgccccgagggatgggcgtatcatgaatgaatttctttttgatgttggtggtgtggacattggtttcacgggatgtaagtttacatggcgtaacaagcgggagaatggagggctcatcagagaacgccttgattgtgctattgttaaccctgactggctatccctttttccccgtggtcaggttcgtaaccttcctatgatcgcttctgaccatggtcctcttatcttcgataccaatccttatactactaaaggaccttgtccctttcggtttaatgaagcttggttcaatgatgagtctagttttcgtgtgataggaaatgcttggaatggtgtgattctgggtgataaaaggcctgatctgttttctaaattgcagaacacccgtaaagccttacaaatttggaaaaaggaagtctttggcgactgtgacacgaagctgaaattgttggagacccaacttcaagctattcaatcaagtgatgttgaaagcaatactcctggggaagaaaagaagttagaaatggaaattttcgaattatggaaacgtaaggagagtatgttgaaacagagatctagagagctttggctgtttaagggagattgtaattcttcctttttccacgctgctttggtggttaggcgtcggagaaattatatccatgtcgttattgacgaaaacaatagcttgagagtctcagagaaagaaaaaggccttgtcttaaataattttttctctaagcttttcacggctgggaatgtctctgttctgaatgaccttgaaggattaatttctcattccgtttctgcccaggaaaactctatgctgctggctattccctcggtggaggaaattagggaacatgtctttcaaatgcaccctttgaaggctcctgggccggacgaattttcggggtgtttctatcgacgttgttgggatactgtgggaggagatgtcaccaaatatgtccaggaggttttccagaatggggttcttaatggagacattaatcacacctttttgtgtttgattcctaagggggataatccgaagaccgtggataggtttagacctattgctttgtgcaattttgtctacaagatcattagtcggattatctctcaaaggttgaaggttgtgatggatcgtcttgtgtcccctaaccaatcagcctttatcccggggaggtggattgctgaagcctctattttaactcaagaaattgtgcacacgattaacaagaaaagtggaaaaggtggc

SEQ ID NO: 1153 - DNA, 1545 bp, Cannabis sativa
aaatacaatttaattcaatccacaaaagtgtttattggatcggttatttttgattgattatattttaatattaatgtaaaaaatattatttttcatataactagcaacaaaataaaataaattatattattattttatttctccaataataaattaaaataaataaaataacaactttaaagaaaaaaaaattatgtgtataaagaaatattttatttggttttacctgtagaaaaataattatatataagaatgtaatatacatgtgatgtattatgttttgaaatataattatactataagtattggacttttgaattattattttctttacattaaaatattatttgtatatataattttttagtttttttttatatatatgcgtggattcgattgaatcggttacttttacatgtcaatcaatatccaatccgcacaagtgcagattttgaattttcaaattcaatcgaatccgcacaactacagatattcacactttacgaattggattagattagattaaatcgtacagattgaatttaatcagctattttatgaacacccatgtctctttttgccaaacaagagattcaatctctccttccatcactctcccttcacccctccatctatctctctctcttgccaatatagttttagtatataaaatttgaaggtaaataaggaagttattctttcaaaacaaaataactaagttataaaaatagctaaatttatattataaatatggagggagacattctttctccaaattttaaaaatttaattattctaattttgtaaaaattgtaaaaaaaagacaaaatagaatattgtaattttactaattaaatttatcttctttattccaacctcacacaccaaacaacacaaaacatatagcaactatgctttctatctctcctactctacatcctctccatcctacgtaccaaatatagcctaaaaccactgaaatatctgtccctttcttttatctttgagaaatattacatcacccgagaagaatagtattagattgctacacaattgtcactttgtataaataaaatttttgggaacctataacgcaaatgatgcatgcttatttattcatttatacatacatatatacaatatatatgttatcttttgtcctataataatactacatctaacaaataaaataagtcataattctttagttgaatatatatatttttttcaaatattacaagttatttcatatagactgacctaagtgataaaatcaagaatttttatacaattttttattggacccaaccctcgtgtctagctttgccaaaacatgtacaagtatttctcaaaaccttcaaactcatggttgatctgacactactttactcttacctgcacaatagagcactcgtgagtcaagatccaacaaaataaaaaataatacagtatgagcgcaattataataaatacatttcatacattacacttctgtgtatataactatgccacaacactatttattacattatttcatatataata

SEQ ID NO: 1154 - DNA, 1241 bp, Cannabis sativa
aatatatataatataagatgaatgatgatatgctttatcgatcaattaacatgataatatttttctaaaatggagacaaagaaaaatctctcaagtgctaaaaacctttccattcagttcctcccagtgcacccaacactttgtttcttttaccaataccaatattcactctcacaattttattattattgttatcactttccatggccacaaactctttgattaatttcttgagtgtgtagataattattctacaaacattacgtatttgcctcgtttccatacaacactaatactagaaaataaatcacaaataaatatgactctagctaggaaaaaatgctttttgaaaactatacattctaattgcaaacccaagaatttatgattcaacagattataagggggaaaaaatgtcaattgggtatgtctaattctctcaaacttgtttgcggcactatccattcatatcatatcatatattcttagaaaaacaaattgaaagtgagataccaaaagccacgaatcaaattccaaaccttccaacaagtccagagaaacacaaattaaagacttaaatagtctaatgtcgtatcaataacaaaggaaaaaaataaacccttgtctgtcaatatatatccaaccaaaaactttattttctaacaagcactctatcaaacagtttataggcatcattcttaagcaaatatataacaaatactacttctttcaacctagaaattataccgtactaataaaaaaattcagaaacaaacttcaataactaaagaatcaaaacagtaattggggtaaagagtgaagaaaataacggacaaaaaaatggagaagaagaaaatcaaacctttgctggtattgatggcagagttgaactcgggggagttggaaagctgagtttgacttgttgggaaactgatataccattataggaaggaaaaataaaactgaagaagaagaagacttgatgaaaggaataacaaattctcaatgaccaaaacgcacactcactcaatacctgaagaaggctccgtttggggtgtcggcgccgtttggggtgtcggcgccgtttgggggtaaaacgaagagagggagatggggagagggacgacggggtgtcatcgctgtttgggcatcagcaccgtttggggtaaaatggagagagggaagacgagagagaggcgtagggtttggggtatcggggggttggggattctaatgagaaa

SEQ ID NO: 1155 - DNA, 925 bp, Cannabis sativa
aataattccatgatattgacaaaaaattcaagcttaaacatgtcaacaatgctacaaaaaatatatacaagcatcatggaaattgtattcaaattcaatgatcattttactaattcacaaaaaattcaagctcatctatatagtcaacaaccataacaaataaatacaagaatcataaaaattgatttcttcatttcatttcaactgaggaaggaaaactgagtgaacctttaacctaatgagaagctcaagcaccacagttgatcatatcaaagtgagtattatcataagattaaaaaggaatgggctgtctatcaggccatgattctatcttttcaaagtacttgacaggtataacaccatctattccttcactcaagatcaccttgttgtctgagatgtagagcttcatgccctcttcctcaaaatcaagataaacaatcagagatcaatcacaatataatcaacttaaatattcatcattcaccattgacttacctttcaaagctttcttcacatcaagatagatcaagacttctacatttcgcctgatacctacaatcgaaatcatgttggtgattatagcacaatcatgttttttgccttgtgctctaataaataactgtctcatgtgagctaatagactgtcactgtaacaccttcaaagttctaaaatgtcagaatttgctgtccttagtgtgcatgtagaataaacagtggccttaggaagcatttaagggggtcaaccagaagaaagtttagatttggtatacacaaatggaaatgtgacaaatgtcaaatgtatattaccactaatgacttcgccttctgttggcaagccacgcgagaagtgaatgtgtaatcttttcatgcgtttgagacccgactgtaaaatggattccaaattcttcctgtaagttccatg

SEQ ID NO: 1156 - DNA, 992 bp, Cannabis sativa
agaatcccacacgaagcataggaactcaaaaaaatcccaatttacatataataatgacacaaacacttatacattaaaacatagtttgatcaactttataatagataatatattagctctaaaagaatatatatatatatatatatattttaattttttgtaatagtctataaaatgtgttgtattatttatcttttatttttgcccaaaagttagtggagcttggaaccacaaggtgcaaaatatatgcttaagtggtcccaatccacatgctttcctaaaaataaggagaagatgaaatattgttttgccttatctcaattttgagattcaaaaagtttgtaggtaaaaaagaaaattatcttttacctttgaaagcaattggtttactaacaaaaaaaaaaaaaaacatgatttttgcataagaaaacattgagataaagaagaaaaggaaagaaagcaataggttttagtaaaaaataaaaaaaatcttcattgattcctcacaacaagaaggaatatgcttacatacatatgattctcattgcaaaaatgacaatgcaatttgctatcaagaaaatatacatatattcttttataatttgatgtttatatatatgtgtatatatataatgcttagtagggaatgtacttggtaaatgttcctattgaagggctggttttatgtgatagttgcaatatggtaaattgggtaagcaaaagagaataatagtccttcattggttggtgtggagtgaggaaccacattctttggaaataatagaatcatgcatttggggatttgttttggtatctaattaattgtcaaggttctttaagacaataaaatacaagaaggaatttctaagaataaggtggtggagcatcttcaatttactagtgtagttgttgttgttgttgttttgattgaaattgctttgtttttccaattttatgaattcatacacttaaactatgcatatggaaccatt

SEQ ID NO: 1157 - DNA, 1189 bp, Cannabis sativa
ttgggttgttttaattaattgaaacgatgtcgttttgtgttgtggtgcaggtgagtgaagagctaaaatcattggtgaaaatagcttggcccataataatgacaaccttgctaatctactcacgttcgattgtttcaatgctcttcttgggccgacttgggaaaactgaactggctggtggatcattagcattgggctttggaaacataactggtaactcaattcttcgtgggctttcaactggaatggacccaatttgttgccaggcctatggggccaaaagattttcagtactcagccatgctttccaaaaaactttctgccttcttttactcgtttccatcccaatttcggccctttggctcaacatggagcccatttgcatctggttgggccaagacccagctaccattcgagttgccaaaatttatatggccttttcaggtgaaaataattacatttatatacacaaatttttttattttaagttgaagaatacccatattatctgaacttttcagaaaaatatcacttttaagttcatccttttaaataaatgataaaagcacctaatttttaattaatactaactttttttcttttttcacattctacaaaatacatttttgaaatttatcaaaaaaacaaaatatatttgaaatattaagagaaaaaaaaattattatagtaaaaacattaaaatatatatgtagaaataaaaaaaacaagataaaaacattattgtaacaaaataatgtaaaatagaaaatgtacatattaagtgaaaattttaaaattaatgtatgttggatatttttttattttaagtaacatttctcttatccatttattaatcaattttgttttttcttttacttgtatttattatgtttaatttttttttttttcactttctagttccagagcttctggcccaagcccatctccaccctttgagaatcttcctcagaacacaaggcctaactttcccactcacagtggctgccacgtgttcagcaatccttcacttacccataaattactttctagtctttcatctaaaattgggtgtggctggggtggccttggctcttgcttggaacacagtgaatttgaatttgggcctattgatatacattttgttctctaataagcccttaaagccatggactgggcttacaattttctc

SEQ ID NO: 1158 - DNA, 918 bp, Cannabis sativa
aaacgacatcctagaaagaatgcataattgaaaacgacaaaaccatacaaaattgtagaaacacaaacgacaaaacaaaacaaaaaagaaaccgacgacgttaaagaggagggagggaggggattgaagtagtagtatagtagagacctgtacatgtacacagatttgggggccaagagatgaaggcgatagtgataaccactcccggaggcccagaagtactcaaacttcaagacgttgaagaccccgagctcaacgccgatgaggtccttgtcaagatcgaagccacagcgctcaaccgagccgatacccttcaaagaaagggccagtaccctccaccaaagggtaccagtccttatctgggacttgaatgttctggaaccgttgaagccgtaggaaaagacgtttcccgctggaaagttggcgatcaggttctttaccacaattaatatcatttcttctcctaaattaaagctgaaactaagacaatttatgaaaaaaaaaaatcatggtttacaggtttgttgtctccttagtggaggtgggtatgctgagaaggtggctgtgcctgctggacaagttcttccattgccgcctggtgtttccttgaaggatgctactgcttttcctgaagtggcttgcactgtttggtccactgttttcatgaccagtcgcctcactgctggggaatcacttttggtaaacttttcttctttcatttgattccttgttgtttagtatatggtaggatggtccaacagctcaactgtgatttgggatggcactgtttttatatcaaactaataattaataggagattatttattttggtattgaaacatctaaatctgtgtgtttgcaagaatgattggatgtgattttattgatttcaactattatgttccgcatggttacaat

SEQ ID NO: 1159 - DNA, 1738 bp, Cannabis sativa
attggggtcagtaccatcctgatgtgagtaagagccctggagctgaggagaagttcaaggagataagtgctgcttatgaggtaattcttgttccttttttaatgttggtttgtaaatttattcatcaatatgagtttggaggtgtatgaaagcagctactttattgagaaattattgtgcttgtggttaaactgtttggtggcgtttggttggaggaaatgaaatggaaagaaaataaattttatttcatttcttgattggaattggatgcatttcaaagtattggatttagagtatcattctaatgggatggtctttccaccatttcggtggaatgactattccaatttaaaatggaaggaaagaccactccaacacaagatgagaaaaaatttaataattttttatttatttatttttttgtgcattttattttatattccattctcattccttccaaccaaacgcctcagttctaattaaccgtatgagcattatggaaacacaaaatatattcaaggcactaatttcacaacaaatgtcttactattgggcattgtatctccttgaaccatcttgatccaatcggtccaaaacaccataaacacacaagatcaaagtaaaatgcaaaagaaaaacccatggagagcaaactcttaccactaatatcatacatccctcattattttcatccatgatctacatataatagggtgatatcagttaataaaaccgaccatcccattatggtcctaaatttctaattgcataataggcattatactatgcatatagttatccttatatattaataatgacattgtgtgagcgataattatgtcagtctatataaatattctaacataaactgttgtttttccttctctttccgttcatgttgtaatcaagcagttttgtaggttctatcagatgacgagaaaaggtctatgtatgatcgctttggcgaggaaggtttacaaggagtgtcagatggttcatccggttcatcaggggtatgattatatgattaagtttaaccaatttcaactgcctaatagttaaacaaccctcctgatcattttctaaattactatattcattatagatactaacttagctatctctattcgttttttatgtatcataattcaaagtttttatttttcggtgggcagaggagctggtaattttgagtacttgctaatgttttacatccaattttgtaggtggatccttttgatgttttcgatacattttttggaggatcagaagggttttttgcaggcatgggcgaagaaggaggtttcaattttaattcgagaagcaagaagaatcagggtcttgacattcggtaattttcttacggtcactattcactagggtaatcacccttctcctttcattcgccgacacacatatatacatataaatataagcatatttttttaagcttttccttgtttctgtatgaatggtggtttgtcttttgcagacatgacctgcatttgagcttcgaggaatccatttttggcggacggcgagaaattgaaatttcttgctttgaggcatgcaatggttgtgatggaacaggagcgaaatctagtgatgacataaaatcttgtagcacttgtggaggaagaggaggagtgattaaaactcaaaaaacaccgtttggaataatgtcgcaggtaattttgacacacttgacatgtttttagaacatcgaagataataaaat

SEQ ID NO: 1160 - DNA, 2057 bp, Cannabis sativa
aaataaatggaaaacttgaaagttcacaacagtttaggatacaatctgagcaacacaagttgtaagaactgcaagcagggacaagaaggatcccagggcattgagctgaagatcagtcactgtagcaatcccaacgcccataagaaggattataagtgaaaactggatggtcctactgttaacgtcgaaagaaatatcagtaaccagtccagataaataattcatattcatcgtgtgtctaaaccttatgcaaactgtcctagccagtgaaaatgaatttaaacaggcatgatataatattcaaaaatttagggacagaaatagaaatggacattttattgctgatagctacacataatcaaaactgaaaatccattaaataaataaacataagatgcatcaaaaatatggcaaataaatcatgctgaaaaacaaaaaaatgataaatataagttcagtgaattggaaatagaaattctatggctgatagctctttacatagtcaaaactgaaaatcaattaatctgtctgagaggagagaaacaaatcagaacattagagagcttgagatttattaaggaccaaatatcatgccaaaatattcatcaaaagcatcctaagaaagaatgcatgagaagagctttaagccatgaacattagaagaaaaatgtctaattcaaatcaagggatgaattcctaaactctccacatatgtagaccacattctatctacccataatactataagtaatagtccctacaccaaggttcagatgctaagggaaggttagtattgattaactcatcaatacaaattttaaatttttcatataaccaacgagcaagcagaaacacatcaatagtattacaccaataggttgaagtgtgattcactgacctgaattgcttcctaaagaatatggtctctaaaaaaacagtgcaggggatgattgccaattttgtcatctgaaatgaaaaagttagaggtaaaagttgttcaaaaacttgaaattcaaaatatatacagtgtattcaaaataccttagcccaaaatctcagaaacaataaaatagaagggggaagaaaaaatatcagcctaattatagatacatggagttcaatctatttttgagaactcccgaaaaacaaaatgtagaaacattgtcataccattagagaaagataataaaccaccacaacaaaaaggatatctttagcaatgaaataaaagcatttacaggaaacgaggaagaaaggaaaaaaaaatgctttatttggtctagtaaattgtcctactattcataatcaaaatgtacattctacccaaaaaaaaggttcacctgatagaaaccaacagagttgaaacccaagctaagattcagaagtccaatggagattccatttagtacaccaaatcccatgacagctcttgcatcaaaaggcttatgttcaaacagtttcatccatagtgctacgtgaagcgagcaaaatgtgaccaaaagatgccagcttgtcaaagttgtagctgttcattaaaattctgaattagaacaatttatttcttttatctttctataagagaaatgtctaggcttgagcacctgaacacacactcacctccctaataacttgagctaacctaaagtgaaaagttgggatatctatcaagtccaaaaaagtaaaagttatatgataattactagaagaacaatggtactcccagtgataagtgatggcaatgaaattgactaacactatccacaccatgattgtggaggtagacatctatatttttgggggagtgaagatattacataaaagatcatttttattgtccatgacgattccttataataatatttcaaatgcagttaacagtacatcataaagattatattgttcatctcacgggaatttaaaatttatagatgattttacatttgaaattacatcatttccaaataatgaagatgataaacaagcacgttcaacatggatgactatgaagatttttcttttcaaatacataatggatcaagaggacgatttacttgtac

SEQ ID NO: 1161 - DNA, 2777 bp, Cannabis sativa
tgcctaaattccattgaccttttttattgttattattacttgtctctcaagagggtttgtcccgttatatggcaactctttttttcttaattttatcacataattaaggcatgaaaacccaagttttagttcaacaactatgtttcttgttgctgaaaaaaattgttattttcttattattattatattaattagctaaactaagattataacaaatatgtggttatagatataatttagtggttccacacttcttttcacaaagaagaggtctcaagttccaatttcccttcctcaagtcaaaaacaaaaaagattgtaagaagtctatggccaatgaatttattataaatatgatataaaaatttgttataccaacctatttggtttaaaactttttgtacttatgttgtttcaacttttcaccgaagagaaagaaatagagaaataagctttgaaaaataaatggctgtctagtgtgtctaagccagccttatagtaccccaaaacacagcaataaagagatggagattcgaacaatctgagccacataatatgaaatatttccttaccaaacaatcaaatttgaactcctttagcagaggtagatcatatttcattagagaaacatattttagtgatgaaaaaactcccagacatcattatccatgacaagggttggatcaaatttaagtccacaagtaaattatgttgttggttaggattggttgagagtgcccttcacaagggtttgtctttaattttgttgagaacaagtacaaagggcaaagctgtttttaacagatgtttcgtcactgttctcagaaccaaaaatgaacactgttacaataataggttaccccacttgagctctcagtatgacgatgatgaatgatgtagctttctattcttagagaccgtccttaaccccaccacgtgaatttcagctacatttgaaaataagttatgtcacaacaatcaacttgatcttactctcaccatccttgttatcaaaattcattccttaatcaatatgaaaaatcacaatttacttaatttattgctataacttgtaaaaaaaaaaaaaattgtgtcatatatcaatgtgatattgaagtttaatcattaatgtatctatacttctctctcgcaacggtttttatcgcaacattgaattgaaccaacttacaagttacaacttaaaaagtcaaattaagatttttttttttcaaaatatctttgaagggaaataaattcccttcacatgtcgatgatggtcgttgttttcaacaaatgcttggataaaacttggatgacatcttgaaagctgcagcgtcttcaatgacttgctccggctttgatcgcttcttggcctctttcaagtcggtgttgcaaccccacacccgaattgcaagccttcgacacttgggagatgactgttgcaaatacgttttgtaccagttgataacatcactcttctggatatttccaagttcatctgcttccttcttcgataagtcgaagatgtatctggaaatcaacaacaattaaattggaatgagcattagaattagataggaaagggaagtgtaatgtgattgatgtcactatcggttagcacacttttcattcttagacagcacacgttatacattgaagcactaaatttaacacaatctacgactgactatttagatccaaatgttatcaggattcagtggatcaaatcaggtggacactgtcatgtaggacccaagctttaaatcatatcaattatgaaaagtttaaacaccacggagaaagcatctaagcaatggtgttcctatccacttaattctacacaaatttgctcgttacgcctcaaaaagcaaatagatgattacacctactgcggaacattcctttcattgcagaatagatgggataacatgctaatctttatttcttaataacaaaatagacagatcaattatacagaaagaaaacgcaccttttatcgacaatctgattccacagacgattggtttcgtacgaaagagatggatctttctccaatagctttgcccttaaaccatctttgtaattctcgaaggaatttttgtcgagtccttcctgcaacatttacactttttcagtaacaaaagattcttctttatgcagcagtaaagatgttttttaggaacttagctacaaaaccttgtaacatgtgaatcaaaatatgaatattgagttcagattaatctgcataaaagtatatagattttcataagcaaaaaaatgttcaaaaaagaattaagatgtcagtgtagtatttttccatatgatatccgagggctatattaatattgtattagtcgtagaatctaatactacagacccacacattgcaatttgcaaaaattaagcttacgcctttatcaaatttccggggcagggtctagataaaaacactggttactgataacacactacctcacgatagaatattgctaagcatgtgatcaactcaagtgcccgaaagattgattgaaaagatgggcaaaagaataacaaagaaagttaatataagtcataaacttgaatactcaccaacaattcttccagaccattgatgaagttctcaattctctcttccaaataaaccgggttatactcagctgattgaacacagaaacaaaatccaaaaacacggtatgttatccgagggctacattctacgacataaccaagctgttcctttgtcctacaacaagaatacacaatcagatttgatcatgt

SEQ ID NO: 1162 - DNA, 4809 bp, Cannabis sativa
tttttttttttttttgaaataggtccaaagctcaatttgagtgtagcccattactcttttacaaaaatatgattgtacaaaatttaaaatatttttacaatttttatagttttattttaaaaaaaaaatatatagtattttaatgcatttttatgttatactatacttttgttaatttatagtagttgattttttgttatttgtaagttttttgatgttgtttgaattttatatttctattataatttttttttattattttcgtgttattttataaaatatagtaaaaatataaaaaaatctttaaatgtaattgaagatactgattgtgtgctttctcaacaaagaaggaaaccatggaacacttgttctttcagttttcttttagccaaatgtgtcttcaccagatgaagagttggttcggctggcaatcatcctctatttctttagagaaggtgacaaaatgaatagaaagagcgaagatgtctcgattcaaaaagaaggtcagctctagcttctctgttgtacaatatatggagagctagaaatggaagaatttggtaagaagaaaatgtaaatatagaagttacaatacatagagcaaagaatgatgtaaaaactagaatattgagcatatggcctaagaaagttagtccaaaagatatcgagtggtataattgtttgtaatagcatacagctgctgatttatcaaaaaagaaaaattaaaattttacaaaaaaaaataatattttatgtaattatccaaagaataataataaataaataaacaacctaacaagaatgagctaacaagaatgagatcgcaaacgattgaagtatgtgaaatgaatgagatctctacgagataatataacagcattattccacacattgttcgaataaaaaacttaaattatcatctttacaagtcctgtataagatggcctaattaaatcgtaaactaacgggcaatgatgcataatctttattctttaatcgatatatttgccatcaacaagaataataataatgttttcataattaagtttcaaacattgtaacagcctacctaagcgtactcttgagcattcaacccagaattaaggtcccatgcatgcgctatacccctaagacaacctcacttgaagattctctctctctctctctctatagactcaattttaagaactacaaaaatcaatcaatattcatctattgtgtaaaaaaaacatgtgtgtactgtttggcgatgtagagaagaagaatattcaacaactataataataatcaaacaacaatatagcaacgaaagaaattaaaaacttcatacagtagtgattcacaacaacatttcctattacaactggctatattacacaaacacaggacattaattcctaaaagatacaacagtagtaccaatatagtcaagttcaaattggtacaaaaacccttcacaaaaaaaaaaaaaaagaaaagacatgacttttaagtccttataaacggtcatgatgtttccaattcaccctagaattatacttggcattaattaattaattaattaataaccaagctccagccagggagagaatgaaaacataaacccatatctagctactaataatatatattctcaaaaaacaaatccagctgataaaatcaaactgatcatgagtactattagtatactaatctagctgctagtagtagtactagtccaacatgaacattattactatacatatattatataccaaagttgaacttaataaccttctccaggcagtggtgattgtgtggacctattaatggggtgtctaggcctggcttccactgttcttccaaggttaaatgctcgaccagaataggttcctccatcacgggctggaacaaacataactggaaggtattcaacgatgttacagtagaaattcttagacttgaaggcctccctcaacgcatcaagcccctgagattaataataattagtacttaaatcttttagtttcagatatatatatatatacaactcttgtcgtacaaattaagtaccaacctggattttggccagtgtgacttcacaaaccttgttgcagtcatatgaagttgaccagctaaacttgtggaaagattcgaaaaaactccatgctccctcaggcgaagtgaaattcacaaacccataacctaaattagtatttgtcttgctgttccagtatttgctacattgttaataaattaaaaactcaatctttgcataaccaccgagtaaaattagtaaaacaaaatattaatttatatatatattacttgaaatccatgggcaaatacaaaaagttgtatttggaatcactgcatgttttacagtgatcgtccaagactttaatcagatcacttctcctgtaagaaaaatgattgttaaataggtcggtgcatgtctatataaactcggtcattaacaggtattaattcaagagatcaaactaagaaaggaaaaaagttgtgatcacctgaaacgattcggaatatttctaatcataaccgtggtatggtcagacctttgaagctcatcaatgttatcaggaaacggtatggtgtagttcggagtcttgtcatccgagccaccgggtttcatcaccgtcgtcgtcggcggcggcgacaaaggatgatcctttctcatccaaacggacctccgagaccgacgacgtctacaactagggctacggattcgatcatcattttccggcggattttgaaaacgatggaggttactggtagcgtcgacagcgaagactttgtcttgttccggcggtggctgaagaggtgggcagagatagagaggaaacatgggttgataaaagggatgaaaaacacgacagggaatgtagaagtagttggggatgagtttttgcgtagctgtgaaaaatggagtagcgtatggattcaagggcctcgccattggtggtgagaatgagaagaaatgaaaaagagaagaaatccaaagaaataggattagcttaagagcgagtcggcaatacagtactatataaaattttatgattattattttttattttgaagaaggtggtagagtagagtagagcagagtagagtagagtagattagattagattgattttatggggtatataaaaagatgggtaataataataataatgaggtgttggatttggcggctttggtgatgatctctgattctcttttgcactgggactcagacactcccactccattcttttactgatcaagatcacatatacatcaaaggtacagatatttattaattattattattttttttttaaacaggtagggatatttatttattatttgctttttacgatgtgcaaatagagcaagaggattgctatggtcaattttttgttacaatatattaatcaatcttcacgtttgaaaacacacgttagaatattttttttttcaatttttttttcacggcggtgttcgttatgcttacaatattatctctgtaaatttttgaatagtttacggtgtcgaaaatatatttgaagttttttgaacatacttagtaaattggaatatcaagaactctgttttcggtactgtaaattattcggaattttttaaaaatttacagagatgataatgtaactataacgaataccgctatgaaaaaaaatatttcggcatacgatttcagacatagaagttgactaaaaggttgtaataagaagctataattagcactctgcatggatcaaatggtatgtttcaaggtgaacatgaaatgcataaatttaggattaaaggttgcttaatgagctacatgtttaaaaaaattaaaagaagataaagtcacgattaaagaccgcctgatcggtcattggatcattggtttgaaagtaaagggctttaaggccatacaagaactatataaaaaattactttaaatgcataagaccagggtcatgcagaaaagtgaaaaattcaagcgcgaaaaaacaataaaactaaagttcttttttttgtattgtcaggtgcagatgagtcttggatagcaaactcaatagtaggagtgtcgtgggtaaaattagtagcctgggaagccccctcaatggcctgctacgtgaaaccctggccggaatgggtctccaccaaaggctggcctacatgtatctccacaaaagtgttggttggcctccctatcttggccaacctgtacatcatctgacgtctggccaagctggtcggcagacgcccttagagtactctctttggctaccctagcctcatacagctccttggctcaagcaatcatgccctcgcagtcaggagactcaacataagaaaagtcacccacagaattatggaggtaacactcataaaaaaggtctccacggccaattcgcagtactcgactactaggtcatcctgaccctacaaggctgcatccaggagcagagccaggataagaagtttggggggtcaaactatataataaagaaatttacaaaatacacttaaaaacatattttttttaatattttttacggtcctttttttattaacattcttacaaattttttattttaggatttttttttctagaaaaaatgttattttcacgttattttcccatgacagtttcatccaaataatattgttctgaaacaataaaaaaaaaacaacactctgtatagttgtaaaaaaataacgtcaaaacaacattttttaaagcaacaggaaaataatactctacaattttgtaaaaataatccataaaagatccataaaaatgtaaaaaaaaaa

SEQ ID NO: 1163 - DNA, 2890 bp, Cannabis sativa
cattcttttagatctttacaaggttggttttcattacaaaaaaaagctctttgatttacacattaattcatattctaaaaattgggtttatcttcaattgtcttcctttatttaaatttacaatctttttttggagcagagatgtggaagattggatgatcaaattgcacttttgagacacaagttgtacttaattcaacaaggtttagctttcaatgggaaaagaactaagacagctagatctcaaggaaagaaatttcaagtctctgtggagcaagaggctactagattacttgtaagtaaaaaaatcaaatttctcattagttttagaaccgaaaggtttatttttttgaccattctaaaaattatatgggattcgatacttaatcactaatacttattagttttagtacggaaatgtttattgtttaagcattaccattggacactagtttagatatacattctaaaattgtacgagtttcgatacttaatacttaatttttcattagttttagtaccaaaatgtttattgtttgaacattactgttaggcacgactttttagcactaatcttattgttgtgacactttgtgttatgtttgttttcttcaggggaatttaggatgggcattgatgcaacaaaacaactacattgaagcagaagatgcttacagaagagcattagcaatttcaccagacaacaacaaaatgtgcaaccttggtatttgcttaatgaaacaaggccgaataacggaggcaaaagagaatctccgccgtgttaaacccgccatggcagatggtccaagaggcacagattcccatctcaaagcctatgaaagagcacaacaaatgctcaaagatcttgaatcagaaatgttgaacaaaggaggtgatagagtcgaacaaagtcgccttttcgatgctttccttggctcatcatcaatttggcaacctcaaccttgcaaagatcacatcacttttccaacaacaacaacaacagattcaatcaaaacactctcacaagacgatttcgcagacgaaaatgccaattctaacatattagcaatgccaaaaacaacaacaaaacaacagcaacaacaacaacttcatccaagtattttgaactcactgaacattgctgcacaaccatattactcaactaaattcacaagagagccactttgttcttcaacttctcatcaatttcctgagacccttaagagaacaagatcaggaaatgcagctaccaattcaatgggaatcataacaacaacaacatgtgagaacacaaaaccagtttctgttgcagctgttgttttatcagagaataacaagactagaaaactgtctaacaactcagtttcatcagctcagaagatgaataatgatatgttatcctcattgcctgataacaaggactttgaagatgcaattcttgcagctgttttaggtgacccaacaacaacaagtgacaatcatcataataataataataataataatggtaaagtcattgaaaagaggcttaaggtgtttcaagacattactctctcactcagtccaagggcctaaaaaaaagagagaaaatttcttcttgttagttattattattattttttctaatttaatttaatttagtttctaaggctaaaatagttttttaggatgggagatatatcttgttctcctttgattttcaattctgaatttgttctactttgagagaaagagagagagattaattggtatttgttattcattccactaaggggggaaagcttcttcttctttatctctatttttattcatctcagaataataaaataacattaatctttttttattattttcttttcttttctttacattttatttatttacatgtcaagagttttacaattcattcttacaaaaaaactatcaaacaaaaataaattacattttaaatattataaactaaaaataaaaaattatgaggaattattttattggaaaaaaattaataaataaatttgtaaaaaaatataaaaattaaattaaattaagtaagtaagtgtgagaaacaaaattttaaaaaataatattaagactgatttttaaaaattattttaagtgtaaaattatttttatttaaggaagtttaaaaattatcaaacaacaaaaaaaaaatcttcaatttatttccataaacataaccattaacttagttatacgctgcaaatacgcaaattaaatattattaccgtcaaaatttttaaattaaatatttatctgcaaccaaaaattaaatctagttatacgccgcaaattactcaattttttttatatattagcttacacactttagttataatattactatagttataataaaaattatgttttttttcaaaacactctaaataatttaaaatgtaaaaataaagtttaaatacgtaattgtacgtaaataattagttaaaattacttgtcacagagaatgtgtgttaaatttatatgtaatttatgtgtacaaacaaatatcatatattcatgaaaataaagaaacaaattgaaaatataaaagtataatctttattctttttatttacacttattacaatacaatttacatgtttaagcacaaattatacatagtactacaaatgaaaagattttgttggtattttttaatgggtaatatggtattgtcccttatggagtagagtggcaattaaggcaacaccaattgaaacaactaaggcaactccaattgtttttacattaattccaccactttgtttgaatcccaactctgatagcttcttatgtgatgcagcatagtcttcaaagaatgcatcctcattctgccacaaattgttaactagtttacaaaaacaataatata

SEQ ID NO: 1164 - DNA, 1037 bp, Cannabis sativa
aatttttgatgcaaccttttaattttcacatgatttcatgcttcaaaaattagaaggtggatgcaacttttgtggaaaaattttctattctttacatttcattacacttcgattctcttggcacacatttgagtgaggtgtcgtttgtttgtctcaattaactgaacatgtgtgcataagtgacacatttatgttggtctaattaatttatattattttaaaaaataattaaaaatttaaattaaacaattgatttattaaataggactaataacaaaaaacctaatttctctcttcccttcttcttcgacaaccttggttagcagttgtactcacaggctcagatttggacggtggggttcaagtcaaaccttcttggtcaatccagattttagctactccactcttgaccgctgctgccaatattgctcttcatttgctaacagttcatctagtatcagttctgcagataacacctggtttgaatgttcataacctggtgcatctaaattatgcagcaaggtgactttattttgattttgtttgatgtcttgctttaaattcccaaatttccttttgtgccattgttgtaaattgtttgcataacgatctaaacacattgcaagggtggatgaaggattagcatcattatcaacctgccaactagaaaaaatgatatcagtgcattcaacctcatttaaccatagtctttcaaaacggaatcaagatcttctcttttcaaccgctgctgactaagtattaacaagaacattgactaaaagggctctatgatctgaactataataatcaagatgtgtgacagtgggcaacaaacaccaatcaaacctctcttataaagaagttgaatttttttcctatatttttgcccaagtgtagtcatccccaaccaaaggtaactcattcaaaaaacattgacgaatccgtatagtttaatgtgataacttttagagagtattgctagtcaattacaagacgacacatctaaaaagtgttagcaccactagtgcccaataaca

SEQ ID NO: 1165 - DNA, 2951 bp, Cannabis sativa
cactgctaatgaactaatgcggctcaatggtacaactaagtccaaggtagcaaccccccttgctgagtctatggcaggagccataacaattagagccttcgaagaggaggaacgcttcttcgtcaagagcctaaaactcattgacataaatgctagtccatattttcatagttttgcagcaaatgaatggttaatcgaacggttggagatactcagtgcaaccattcttgcttctgcagcattattcatggtcctcctcccccctgacaccttcagctcgggtattttttttcttttcttcaaaaaatttacatttgacactgacccttttctttgcatatattttgaaacaagtttgtgttactgcaggatttattgggatggcactttcttatggcctctcaatgaacaccacacttgtagtttgtgttcagaaccaatgcactattgccaattacattgtttcagtagaaaggctaaaccagtacatgtacataccgagtgaagcacctgaagtgatcgatgaaaatcgccccccaacaacctggcctgatgtgggaaaagtagagatacatgatttacaggtaagttcaactttgatttaatgtctacaaaaagatggttctgtgtactaataatattgatatgaaccaaatgaaaaaacagattagatatagagccaataccccacttgttcttcgtgggataagttgcatatttgaaggagggcacaagattggcatagttggccgaactggtagtggaaagagtaccttgatcggagctttatttcggttggtggaaccaactgggggaaagattatagttgatggggttgacatcacaacaattggactacatgatcttaggtcacgttttggtgtaatacctcaagatcctacactcttcaatggaactgttagattcaatctggatcccttatctcaacattcagacaatgaaatatgggaggtagctatatagtatatactacagtacaacttgttatttcactagttgaagaacaagggattttgacataataagtgttcttggctatttggctgttaatctttttcctttgtttggttttcaaggttctaaagtgtcaacttaaagaagctgttcaagagaagaaaggaggcttggactcgttaggtaatggctctattgagtggagtaagagaaggcagttgagtttttcttgtgatcaatcacaaataacaatgtgttgttttgttgttcagttgtggatgatggatcgaattggagcatgggacagagacaattgttctgtttgggacgagctctattgagaagaagtcgaatactggtgctcgatgaagcaactgcatccatagacaatgcaaccgacacgattctgcagagaacaattagaattgaatttgcagattgcaccgtaatcactgtagctcaccgaattccaactgttatggattgcaccatggttcttgccatgagtgatggtaaatttcattgctttgatgttcatattagaaaaaaaaaatactatttatctttgaaatacccatttgaaaacaaatattttgacctttaatttcaggacaaatagtggaatatgatgagccaacgaagttgatgaagaaagaaggttcactttttggaaagttggtcaatgaatactggtctcatttgcagtctgctgagtcgcactgataatataataaaatcagctctattgtgctgaagcctaaatttcgtacggagattatgtaataataattagttattattgtttatgttctgacagtcagttggtatattttcatttctagtaacgtgttgttccctcttttcagattaagaaagctacaatggctgcctattttatatgtgtattcattagcaaccaaaattggacaacaaagaaacataaatacaaatacaatagcatttcaaaaatggtaaaaaccaatatactaacactaaacaaattcatttcatcccaaaaattatagcaaagtcaaaaccttacaatggaaaaaaaaaaaaatactctcaactcaagtatgactaagtctaaggtcctccaagcacagcattctcaatatcttctctgctcagtgcataactgaatcttctttccatatctttttcgaggtttccaggtccagtctttaaatacctgcattacatacatcactaacctaagttacatgctcaacacatcataagcaagaataagaaaacttgatttttgttcattttttaaacatgagaagaaaaccacacaagtacaatcattcttcaattgtgttcatctaaacttggttgaaaaatgcacacaatttacaattttcaagttcaatgcagtattgaaaaatgaccatatttgaatttttaatcacactaaaaacaattagtacccccaaatcaacacgacccataccaaaaacagcaagaaaatgagaacccaaatgcaacaataagattacaaatcaattaaccaaccaaccttatatagagatcagttacatcaagcgagagttgggcatgccattcatgcttctccaccagccaaacagccctgtcttctgtgctctgatgaaaccctaaacttctcaaccaggcctcaatgcaagggaggctatgagaatacaagggcttcttcttttccgggagtttcttcaaccactcgtcatccggggaagaggactcctccttctctttctcatcttcctcttcagcctcggaagacttggaagaacaacttgggatatggaaccggaaatggagtttccccggagaagagcgagataacgattgggaacaagaagggaaattccgcaaaagggaaggatacaaactagaaaaatgagaagaaattgaacaaggagaggatgtggaattggataatgagaagattactgaggctgtgaatttagagaaagaaatggcagacatgtttg

SEQ ID NO: 1166 - DNA, 4359 bp, Cannabis sativa
aaaaagtgctttattgaagtattttaggagtaagagtgctaaaaataatatggaacaaaattaaaataaaatactatatattttttttatgacgtgtaaacttttattatcagataatattattggagatgctgtattactacacacgaaaatcaggcaaaagtcgcgccttttttttcatttatttattatttattttttaaagtattaaaggggacacgaatatcaaagactgcttagctaaagattacatctgacaatctgactaggacgtccgctctttctcaccgtccgatctaagcaaaagcgacaagagcccgtcaacaccgtcaacgtctcactctcctactctcacgcgtgttagctacgcgcaccgtcctcttctttgctaattcacttccttctgtcactccttcccactcagtcagatcccaactacaccaaattctctctctctctctctcctctttctctttctaactttacttttccttcatttcactttttctcgactaccaaacactattctctctttctatctctctctcttacgagactctgttctcatcatctctaaaaacctctggtaattttctggttctggctgcaagtgtgagtcgtggagagatcggagattgccgcattaaggtattgtatgcattatgtatatgtatatatatgatcagtattctcacatgctgtgccgattgttcatgcaagattgtgtctagtttaatatatatgttgtttgatggcattgtcactgattgaagaattttttttcgtaatcgatgatgatgatcggcattagctgaaaatacagagtgtgaagcagtgatttttttttttttgtgcagattttctggttaggttagtgttgaagcttcgtgtaacaatggatacgaacaaggcatggctttggagaaagaaatcgatagagaagaatagtgttgcgattgataaacctttgaaagggaacgaagatgaggtaacttaatatatcttttacttctattttatttgattttagaataaagtaaaaggcgtgcatatttacgtaataatactctctattggttgagttcagattcttcttgcgctattttggtgttggattggttttctgtttttggacttacgtacattattatatagctgataatatataaatgattgactaatattacaattatatgcatgacttgttttttttgttgattccaagttcaatttcgttttcatttgggtaagaatgtatagatacaatgcagttaatggtaatatgatcacgtttgaataatatgacataataaggaaatgaaattcataaaaagatggtaattaattagcaagaggaatattaaattggaactgagtctgattttttctaccgagattgaggtggcttaatgcattaaaatgatttgcttatattgtcttttcttataatttttcggaggtgaaacgataatctgattcttattagcacagtgcaaaaattagagcctaattaatggttccttctggtttctaactgttttcctaagtaatctgttgcttcatttaagaattttgattggtcttaattaaggttgctcaaaattttgattggagctttattatattggttaaggggacgagttctaatattcattgtttctcaatttgttttagatacaggctcttctggatgagaaagtggaacttgagaagaacttgaaaactttaaatgataaactttcatctgctctctcagaatgcaactctaaagatgaacttgtagagaaacatgcaaaagtggccctagaagctatgaagggtaaattttgattcactattaaccctttcaacagtcttctgttttggctcttttgggaatttccaaagattatgtcttgatgtactgtttttcttgcaaatgtttgtgtaggctgggagaatgcagaagaaggtgcggcgtctctgaagttacaactggatgaagctttgcagcagagagttgctagagaagaaaggttaagtcatttagatgcagccctcaaggaatgtatgcagcagctgagatttgttcgggatgagcaacagcaaagaattcatgatgctgtgatgcagacttcaagggaattcgagaagacgcagaaggttttagaggagaagttagcagaaacaaacaaaaggcttgccatggtagctgctgagaatgctcatcgtggcaagactcttgtgctgaaggaaaaattgatagaggaattgagtagacagttgagtcaggtggaagcagatttcagctcactaatgaatagattagaatccactgaaaaagataatgctgcctacaaatatgagattagagtgctggagaaagagcttgagatccgtaatgaggagagggaattcaatcgtcgaactgctgacgcatcacacaggcagcatttggagagcgtgaagaaaattgcgaagttggaatctgagtgtcagaggctgcgtctcctggttaggaagcgactgcctggccctgctgccgtgttgaaaatgagaaatgaagttgaattgctgggaagggattatactgaaacgagaagaaactccatgggaaacagctccttagatacacacagcaaaaggattatcctacttactgagcagttatgtgctatggaagaagaaaacaaagctcttcgagatgtgctcattaaaaagacaaacgaactccaatcctcaaaaaacatgtcccctcataaagcttcccaactttcacaagccgagtcacagattgaagagtctttgaaaggttcaacgttaacagagccaagaagaaatagttttgcttcacacgagctctcccttgcatcaatgtccgaggttgacagtgatgataaggctagctgtgctgaatcatgggcttctgctttaatttcagaattggaacacttccgaaatgaaaaacagaaaggatctctatcaaaaagtgttggagcctcagacataaatttgatggatgactttgttgaaatggaaaaactagctgtagattctgtcaacaaaccagctggtgagaattcctcagaagtagggggcagtcaaatagttccagtttctgatagtgaatctggattcagtgactcaaatcaagaaattaagcactctttcaatggggtccctgtttggcttcaagatgccttagaactggtattggagcaaaaccgtgcgacaggaagaaacttcgaagatataattgaggatattaaattagctttggcgcatagcacacgtccaaagcctggtgaacttgctcttgcaagggaaggctcaaatgaatttgatgaatctaatctctctgatgcaaaaaaatcactagaaatggattcatctagtggaaggactgatgtgaacatctcacaagataagaacaatcaacagctccagccagatatgagtaaattcatctgcaagatgattgagcttgttgaagggatcggtataccatctgagttgaagaattctgagtcacctacaggctacatggtccgtgtcctccagtggaaatcttctgaactcagtgatgttctacagcaatacttgcatgcttgttatgatctattgaatggaaaggctgatgttggaaaattcgttgaagcattaacttcgtctctggagtggataataaatcactgcttttctcttcaagatgtttcaagcatgagggatgccattataaagcaatgtgattgggatgaatcaaggagtgaaagcgaagcagaagccgggtgtatcggtcactttgcagaagcagaccgagcacacattccgagacaacaacagttgttacattcaaatgaagaaagcataatattgaagaatgaaaagaaagaattggaagggagacttcagtcagctaccgatatgagagaaaacctaacgaagcaacttcaggaatctcgaaaggttattgaaagcctacaagcagaattgcaagctttcaaaaaatcaaaggagatgattgaggatcaaattgaaaatcagaagatgatgaatgaagatctcgacacacagttgaatgcggccagaggagaactaatcgaagctcaccaaaactttatgactctagaggttgagcttgataacaaaaaccactcttttgaagaattgcagactacatgtgttgagttacaacttcaactcgaaaggtaccaattaatacaagatacacactattcttagaaattcattgagtttgttttatctgacatgtgttattcatcagtctgaagaaggaaacctcagacgacaccaactttaacgaggaacaaaagcaacttagaagtgtaagtgttgttcaaatctctagcttaatcaagg

SEQ ID NO: 1167 - DNA, 1137 bp, Cannabis sativa
atatgtttacctgtataacacactattcattttctttgttcacgtaaaaatgaacaacatacaatcccttccttcttcattgtcttcttattcccgacaaacagatttctttgctcatttactagttcagtttcaatgttgccaaccaaaagtagcatccacgcgccgagaaccaccgcataaaaaaaatagaatttgtacatatatttatactagataaatgttacgtgtcaagccacgtatgcttaattttattttaggttatattttcttatattttatattaaacaatatttaatttagattaataatagttaaagcataatagtaatttgaaaaaaaaaattaagtaatatattgtctaaagttttaagaaataaaaattaaattcaaaatgttagtaaaatatattaaaaacaataatagtgaatttaaaattgtaaacaaaataatgtgtaaaatggacaatttttttttttcataaaaaaatctagttcttaagttttgatgatttcaataaaacaacatacaaagtttgcaaaattaaaagaaaacattgtagttttgaaattaaagaaaaataattcttaaataatttttttaatgtaaagttatcaattaatttcttttaatttataaatgaaattactaaatttatttattataaaattaaaattgtatatttgtaataatcaataatataaaattaaagttatttcaaaattactaaaaattatttacaattttgtacagtcaaaattgataagagttgcctcaagtttttaaaaggatctctaacaatcattatgggagaatacaaacatggtttgtactatcttgttggagaaattgttactggtgttgccacaccagccacctgttctaagaatggagctaacaagaacaatttgactgatcaaaccagactttggcattaaaagcttgggcatgtgaatgacagaggactcattaaacttgagaagcaagggattctgaaagataaactgtttgggaaactagattttggtgaagaatgtgtattgaggaaaacttgtaggctaaaaatcccaactagcatgcacacatcaaaataacccttgggttacattcactctgacctatgggaccattaagagt

SEQ ID NO: 1168 - DNA, 1182 bp, Cannabis sativa
tggggttcagccaaatgttgctacttttggtatgctcatgaagctataccagaaaagttggagtgttgaggaggcagagtttacattttccctaatgagaaattcgggaattgtatgtccgtctgcatactcatcattaatcacaatttatactcgtttgaacttgtatgaaaaagctgaagaggttattggttttatgagagaagataaattgatgcctaatttggataattggttggtaatgcttaatgcttatagtcaacaaggaaagttagaggatgctgaactggttttggtctcaatgcaaaaggctggctttccccctaacattgttgcctacaacacattgataactgggtatggtagagcatcgaaaatggatgctgctcaacggctattcgtgtacataaagaaaattggattagagcctgatgaaacaacttaccgttcaatgatcgagggttggggtcgggtagacaactataaggaggctatatggtactatcagaagcttaaagagtttggattcaagcctaactcatctaacctttacacactaataaacttgcaagcgaaatatgggaaagaagaagatgctgtaagaactcttgatgatatgatgaagattggatgccagtattcctcaatcattggtattcttctgcaggcatatgagagagctgggagaatagataaagtgcctttacttttgaaaggtcctttttatcaacatgttcttgttaatcagacttcttgctccattcttgtcatggcttatgtgaaacaaaatttggtggaggaagctatcaatgtgttgagggacaaagtttggaaggacccaagttttgaagataacttgtatcatttgttaatatgctcttgtaaggagttgggtcattttgataatgctgttaaaatatacagtcatatgcctaaaaatgaggacaagccaaatatgcatatcacatgcacaatgattgatatttatagtgtcatgggcttattttctgaagctgagaagctttatttgaagttgaaatcttcagaaattgaattggacactattggctttactatagtcctaaggatgtatgtaaaagctggttctttgactgatgcttgttctgttctagatgaaattgacaaacagaaggattttaatcctgatatccatctaacccg

SEQ ID NO: 1169 - DNA, 1207 bp, Cannabis sativa
tatatttatatgttggtatgaaataaaatcttataattattgaaaaagttgcactttcatgcattattaaaatcttataaaaatattttcttttaaaaacaattacaaatatcaattaaattaaattgtcctgcaaaatgatttagttattataatatgtacatcagtacattggcgcttatatttgttggatttcatgtctatcatgaatatattatatatttatatagatggatataataattttattaaggaaataaaatgtaggcaattgatttgattaaaagttggccataatatttttcatggcgttatcactttatgagaatataagcctactctactgcaattgtctttaattagaatataagcctaaatatatacttttctttagaatagaaatctcattagacctcacttttatctcatttccatatcttaaatagaatatgtaggccctttatcctttgatggaaaattcatgttttccaataaaatattttttgcttcattaggaaaagatcatgcatagcctccctatccaatgcaaaatcaccccctatatttagtaatcttaaaaaaaaaaatacaaattttctattactttttagaataaattgcacaatatatatatgcatatgatgaaattaaagattcacctttagtcaaaaaaaataataaaaatgaggaaagtaatctcattaatgtaacgacatgtgtcacctataagtaaataaataaataaaagaaaaatgtacttattttctttttgtatttttggttaccctttgtgttatagttcttacaattgtaataattattacattcattttgggatgagattttagatagtagataaggtacaagggatccttattggtcaaaacatatagcgtaaatggatactcttactatgcgtacttgtccttcatagcaaaaaagaaaaaagaaaacattgtacttgtttttatatataaccatttctatgtccttcaagggaaatatatacattttataataaaaacaaaaaccaacatgaattattataaaaaaaagaagtcaaaattagagaaagagtagtccaaaattattgggacctccatttgtgagagatattgtatatataataattttgttatagtagatgtgtggattatctagttagagaggcaaacaatttaacaaattaaggtttattaattattgt

SEQ ID NO: 1170 - DNA, 2023 bp, Cannabis sativa
tacaccatgtttatgtattaggtggcctaactataaaagagaaaaaacaactaaatattctttgcaattttacaaagccgctatcttgcatatatagtagattgattaagcttaaccaaatcttttgtcaaaaaacaaacttaaccaaaatcatcacctaatgaaagaaaagaaaacaaaatatataatcctattgaatgaggttaattaaggcaagttagtaattgatcagtaaataacaaagttgagcaagatatattataacatcaaaattaaaagccatgcatggttccaccattcattccaacaaattaaactaacactgctgactaaattacacacgagttggccaactcctcgacagacaaaccactaaccaccaaaaagaaacttccaaagtaaaacaacatgcccaaaacaagaaaaattaaggtacccttttttgcctaatacaatttgacaacaatagtatatgtccctatggttaagaattcaatcacctaacatgtagagacttgaagaattagccaacgaccccccaaatcttgctatatatgaggtaatactaattactgtcagttcagtgaaattgaaaatgaagggagtagtagtaataatgagaatggtagctctagttgggaccgttgttttctcattccatatgattgataataagtatagcatggcattagcagcaacaccagttacatttgtgtttggtgactccttgactgaagtgggaaacaacaattttttgcagtactctcttgccaaatccaactatccttggtatggagttgattatcctggtggccaacctactggcaggttcactaatggcagaactattggtgatataatatgtatatatataaaatccatctctctaatacttattaactatcttatatatacattattttactattaatatatcttaatttcaattgatcatttatcttatttaacagcaataatgcacgtgtctatactttaatttatttttactatttgattttttgataaaaaaaaaaaaataattatttgtagctgagaagcttgggatttcatcaccgccgccatatctttccctgtcaccaaacgacgatgctgttcttaagggagtcaattatgcttcgggtggagctggaatattgaacgacacaggcttatactttgtactaattaaactaactttatcacattacatttattaattacttaataataatgaaacaaagataatggttatttatctgtttttattattatgtatagatccagagattaacgttcgatgaccaaatacaatacttccaaaaaacaagagatgttatgaggtccaaaataggagtagagaatgcaacaaagctgtgtaacgaggccttgtacttcatcggaatcggtacctaatttctgctctgtaaacgtttttgtttctcgctcgcactctctctttcaataaaaaattaatggttctgttgtgttttttcttgtgaaggcagcaatgactatgtcaacaattatttacaaccttttttggccgatggtcagcaatacactcatgacgaattcgtgcaactattaacctccactttggacaaacaacttagggtaaacagagacatgattgggtatttaattattttaattttcatcaaaatttatataaatgtgtgtgtgtaaacagagactgtacggactagatgctagaaaaatagtactacatggtcttggtccacttgggtgcattccttcgcaaagggttaagtcaaaaaaagggcaatgtttaaagcgagtgaatgaatgggtactcgaattcaactccaaagttaaaagcctcattacctctctcaattcacgtctcccaaaggcagcctttatgtttgctgatacatatccagatgttcttgacttgatctccaatcccactgcctatggtaactactacttcatccatctttatttatttatttatttttatgtataataaactttaacaattaattaatcagaatattat

SEQ ID NO: 1171 - DNA, 1452 bp, Cannabis sativa
gactggaaatataagttaaggttcaactagggagacagaaactaaagaacttgatagttcaccggttacttagtattcgggataccaagttaagcagggtgacagacacccttgctcaagcacattatattctctacctaaagagaaccgtagaacagtgttaacttgttatagttcttcatttacaagtaagaaagagagattgggtctttgaaaaaacgaaagaaaaattcagcctcagttaaaggcgagctaaaaatgatgttcatgaacaagtagtttaagctcaggttcaaagctctattcgtttctaatttatacaatgaataatttgtgaaaacaaacaattactaaacaaaatggtttctatgttcactcaaaaatcactcttaaatccagaagaaatgctagcttgacattgttgttaacttgggaatattataacatcagtgtgatattagattcatacagagaaaagtcctattgagatcttaagtctgtcaaagtaaacagattcaacagcataaaaagcataattatttttaagcaaagaaattccataaaacattatgttacacaaactgacacttatagctaatctctttatcaaaccactgctaacttacagagtctcaactctctcaaccagactactttgtgtggcgcaacatcatgcaccggcggctgttgaggctgaggctcgtttgttttgccagtagttttaggctgcggttgaagatttagttttgagaagatacatacaaaatggaagttgagacgatagatatgcagaaaaaatggctgcaatcatttcttatttcctaatctgaggaagtggtgatacaccagggagctggtggggagaagcttgagcactactttgactggataagctcctcacgggtgttcctttcctcggttggaatgttacttgcattttattgccattcttggcatttggcatggaccttgaccgtgcagcttgcatagattggaaataataggaagaactggccatgtccttgagttttggcaaaggttttagggcctcaacaacttcactcatcaagggtctagctttcgggtcacggctaaggcagtgagcagcaatctcaatagctttttgtgcacctttgattgaaaaatgaccttcaaaacgagggtccatcaacctatagaatcttctcttgtctccgaaaagtggccttgcccattgcacaagattgtgttccccgtttggcctatttttatccatggacctcctgccggttaacatttctagcaagactacaccgaaactgtagacatcatttttggatgtcaaatgtcctgcacaaaaaagaaaaaaaacccaactgagaatagttgttaaatcaagtaattaaagatacactaatgatatgattctacaagacttcctagaatcagaaacataaatacataagagctgat

SEQ ID NO: 1172 - DNA, 1286 bp, Cannabis sativa
cttcataattaattagtattgtgggacaacatagattactccacatatcttgttttaagattaaacatatatcagagtcacatccttgtatatgcagataatgatctgtggttcaagattagtaagcataaaaaatagtaaccatcttaattaaagtagaatattgtgaaacatatcatcaattaattttaagtgaaaacctcataattctcatcaactaattatcacattataaggcatacaataatactttaatttctacgtcgattgataaattgttttgttacctgcatataaatgccaagatatataaactggtgtttaatatatataaataaaaattttgcatcaacaacttttcacgtttttaaaatactcactaaactattttatatctcacaattggcacaataaatgctgatgtggccgagtattatatatatatatgtaaatatatatatgtgtgctccttaattaattaactatatatgttattgtacctgtaaatgtttaaaccctagctaggacgagaataggtgaagcactttccatatatatatttgtatatattaataacataataattgattgtaatatagatatatgtgtataatgcagaccagtatcaggtggatcaatgaatccagctcgaacagtagggccagcacttgctagtaagtactacaaaggtatttgggtgtatatggtggcaccattcatagggacacttcttggttcctttacttataaaatgattagggttagtgacaggcctgctcatgcaatgacaccaaccttttcattcaaatttccacgaagaaagagcagcacccacttggacagaagagactctcacgcttccgtttaatatttatatgtatatgtttaatattgcttgcttctccctgcattgtaagccttaataaatttacatattataaataaaattgtaatcttcttttgtgtgttttataccccttttccaatatttacaaatgtataaaatcaacaactctatgcttaacaagattataattatgcttatcaatatataaggagtactataataaaaattaaataatgttactaactcttgcaaaaatacatctaaaatgaagagaagaacacaattcaaagcaacaagtaaataacaaaaggttgcacaattatagggatgtgaaagtaatctcaacaccaaaaccacaagcgacaagtaggggaattattatcaaacttgctaaaaatcttacaccttcgtctaaaaataattattttcctcatcacag

SEQ ID NO: 1173 - DNA, 1684 bp, Cannabis sativa
gcatgcaagtatgtgccttagtgttttgaaggctaataattcaaagggtctccatgtttcaccgatttttattcattgaagaatccttctcgcctagctttatctgaaattggattcattacgctaactattagtattgtagatttaacattattgtaatgttgttgacataatagtgatctcatgtttgcttctcatacttctcaggggcttgctgcatatttcaaacataagccagaaacaaatcacgacagtcagtgagttactcgccgttggtgaaaaggttaaagttatggtggtgaagtcaatgtttccagacaaaatatctctcaggtacattatcgagttcgcaagattaactttttatttatgaatacaactactgaattagtttttcacacacatgataattctcatacttgtttcttagtatccaagaaaagttcatcactttgattaagcataaaccgaagtgtctgattttctttgccaatctgatctgatcttaattgggttgtatgatttattttgttcgttgcagtaccgctgagctcgagagtgaacctggcctctttataacaaacaaagaggtacatattatatagtttattttctcgtaaagattgaaacttttttcggtttgttccctctgtttttgatcattcacaaagctaaattctatatttcttgttccgaacagagggtgttttctgaggctgcaatgatggcaaagaagtacagagaaaaactacctccttatatagctgcaggtgaattcgaaccacttacaaatgacactttatttttcgaaaatgaagagaagatgtatgcaaattggaactggttcaaatttgaaagggattgagattgaattagcactcaaggttgacactttttcacattgtgaacataaagaagaagaaaaagaaaaatgggatagtcgtcttttagatcgaattatccaagcgtataaattagtttgttcacttgaaaattacaggcagaaaccatgagaatccaagaaaaccacagcctagaattttgattatcttatcttactgaaaaatgtgtagtgataattttgtttgttagctaatttagataggttggttttaaaaaaagattttgttcgatgcttgtgttgcggtggaccgacgagttcttctggtgaatggaaaaccaaaatcatgtagcataattaatccttgaatttgaattagtaacatctgattacacattgttaaattttgtaacaaagttttgataattttgccctttcaatttgtaatatattgaacttgtcatacattagcttgcatatgattgctatttttctttggaattaaataataatttattttcattattaatttgttaattcccagaaaatttaaggtatgtgattttatgtgttttgaatttagcagtcaaagtttgagtatttttcagtaaagcttcatttttaaaaaaaaaatgaaaaaagaaaattacttgtgatgtgagcaaataaaatagaaagaaaataattaaaaacaggaccagctttggtttgattccttttaactgaagtacttcattgtgagataattaaggagagctttacccaaaatcaatcatataggtaaaagtgtctttgaaaaataaaatacgttttgaaattgactttataacaaaaaaaaaaaaa

SEQ ID NO: 1174 - DNA, 1980 bp, Cannabis sativa
ccatcacattatctactttgatattcttcaatttattctcaataagagcaccaacccttattttattcagcttcataagactaaggatatcatcctgcttatcccttttattcattcccttgacattccaactaagtatgttggtgcaatctatcacctccctcaaaagataggttacctttttcaacatctttaccctgttcctgtagaactttgaatgtgttttgaacattagcttgttcaatcactccaagtgttcttttcacctttgaattgcctactctttttggggtcttccatccttcaatacactcacgttctggagtagcaatcctagtctcttcactggttttagcttcctcagagacatccttccttttttcaccaatcgggtcttcagccacagtgacaccaaaattctattcccttattttttccacaccagcaggcttctctttctctttaattctcttctcttgttgctgatttttcttggcccaaacctttgaaccagttttcttgcactccgccatgttatggccatatcctttgcagttgttacacttgatggaaagccactcgcactcaacaaactactcctgaacttgacccttttcattttcaaaatgaattataaacggagggtcatctgtaatgtccatttcaaccagcaccctagcaaacctaatcatagacctctcctttgtgactttatcaaccataattggttttccaattgtactaaccaaagaactcaaaaatttaattccccaatattgaagatctaaattaggtaatcgaatccagagaggaacagaatgaactagcctcactgtatcgagatcctgtgtccatggtcttactatcgtcagtttcttgtcaaattgcacagtccctaactctagaacaaggtcccgagttgcctcatccttgaatttcactatagttagtccctggttcatcctaaccacccgctcaatgccaaggtatccccatatacgtttcacgaattcctcaaacaaagaaaatggaggattggccccgcatcaccatacacacaacaattgagttccattcctgagcttgttcagagacctcctccagatccagattagcaactttgaaaccaacttgaacaactggttatgcataatggaagtttgctgcaacattaattctctacccttcattaagcttcgcccagtgtttttgagcagaagattggaagtcgacctcatcagcccagttctccatcaaacccctgattggaacttcgtcctcctcagtcttcgaattctcattcaaatccagacccaaatcagcaaggtccagtgaattcgaattgcctaatttcttcactttttcctcttcctcaatctcctgtgtctacacgactattccaagcccataatcttcatccagatgctgctcctggatttttggaggctcttccaattgagatctcgtagttggctttagagtaaccttcttctacctcatggagagagaatagtacctacgcacgccgtcctactccttaatctgtaattatttttcgaaggtaatatatttgtgttaatattaattataattttttatttcagctttttttttttcttcaacttactctaaaaatatatgttaagtattatatttttgtcatggtgtttattataggtacactataatttttattaatttttaaaagcttctaaatagtttgtaatatcgaaaatatgtttgaattttttgacatatggtagaagtagcaactatattttccatatggtaaactattcagaatattcttaaaaaatgataaaaataatgtagtaattataacgaattgtgatgaaataaaattaaaaaatgatgttctagcatgtattttaggatgctaaagttaaaataagaggttgatggtaacacttttctaagtgttattataaagatttaattatctttttattttttaataga

SEQ ID NO: 1175 - DNA, 2165 bp, Cannabis sativa
tattaccatttgtcaaaacaaaatcattttacaaagttagattccaaataaaaattcaacgaacataaatttcaacaggcatgaaatccgaaccgtccaatacaatacatcgtgccttttgatccaacggcgctgctactccaagctcggacagtcgacatgccttttagtttttatgtaatcaaatggtggtggtggtggttaaaactcattaaaaaaaacagcatttgaaaaaaataaaaaataaaaactcaaaacaaaagggtgggtacaacattgaagggcatttttgtaaaatatcgtagaatattaacgaatccccgcatcacgtcagagccgtagttcaaaacatgggattggggcaaaagcgtcaatcgagtgaccggctgaaaataattaagtgagttggaaattgggcgggcggatcagggaaaaatggatattcgaatatccaaaaggaataattcaaaattctctgcttcagtttaccatcacctgctggagagtagggacccaccgcctccaatttggagtacggagaagctgacgtgacagcatcaacggctgatcttcattcacttgatcgactaatctcagttgaacacgtggcatctccatgcttgaggtctgcatgtccatatctagtcccaggaaaagacaatctatgggcatttttgagaaagaaccaggaagtttcatggtttctggcttttattgatgatttaattctcttggggcctataaacctctctcccaactcttttataccttcttgtttctttgcattcattcattccttcatataaacccaaagccacttgtttttaatatatatttgtttgtttgatgaattattttttcatttttaaatgtgtggtaacaactttcatacaggttttaattctcacaagaaacagacctttgtttttccttttctttttgtgaagagttgtaatctttctatcccattcattattattattattagaaatagtgcttggtggtatatggtatggatagttcaaaatatgtccctttctagttttgaaaatgatttagtaagctagtatatctatacatgtagtaaaagtagtctttttctttttccttatcctttattgtacatgcttattctcattcccactgacatgattatttatttgtacaaaccaaaacatcaccatctcccatgcatccatatgggggattattagagattaagttaaattgccaaaatacaccagtattttccatactcttgttgtgattatgagtacttgctttggaccttttagagcatttgtcagtatgtagtattaatagcaaatgtaacagatttcctaaaaagataaaaaggcgcagttcttctattgtctattttttacagccaggtcccacaaaatatgccaagttggatttctctttttcttatgttcaatgaattttaggacaagaagtcacacctgcccaccaaaattgataatttgtaaaacatgttacatatattatgagttttccactacccactggaatggtgctacaacttgactgaattcttccagtaaaaaaagaaaaagttgactgaattctcatttcattgatacagactaaggatccaaatagatgaataatgtaatcatgaatagatgaaatttttattggtttttgaatgtgacacaaaattttgtacaaaaatgtacagagagctaaataaaacaaacacacaacactctatcccccacccaacaaccttttgttttgtccccctttcactgaaaatctccctctatagcataaagtaaaatcaaggagaaggctaaaaaaaatcctctccatgtacgtaaataacaaattatacttttctttttcttgcatttgacaagaaatcaatcacacaaaaacatacatatttacaattgctcatgtataaacaaatcattgttggctacatcatacctcttcaattggagaagaagaagatctcgttgtgggtgatcccccttgcgatctagcttcttgaatcttctcagtcacctcactcacaacaagcctagtaagaaacaatcctgcaatcagggctgcccccatcagcattgtaaaaactaagctccaactcctagtagaaatgtagccagttagcaagggcccaattgcagccccaaccg

SEQ ID NO: 1176 - DNA, 3922 bp, Cannabis sativa
gtggctgtcgttaggctcactagccatggcagaggtactatgttccaaggcagccatgaaaaatgggctgttgtaaagattcaaactgttttcagagggtacttggtaagtggtcttagctgaaagttaaaaactttcaaacaatatgtataatttctttcttttttttatgtttggattgaaagaaatgatactaattaattttgtttgggtatttgaatattcaggctagaaaagctctgagagctttgaaaggactagtgaaactacaggcactagtaagagggtatttagtaaggaagcaagccactgcaactctccatggtatgcaagctttaataagagctcaagccacggttcgatcccaaaaaactcgtggcttcatattcaacaatgaaaccattagtaggtttgataacagagcacgaaaatccatggtaagtttctttcttaatggaattctctcaatacagttttcttattttgggtcttttgcatttacattatcttttgttttcggtttaagtccaatttgcaggagagatttgatgatagtaaaagtgatcacatagctcccattcatagccggaggctctctgcttctttagacacaagtttcaccaccattgatgagagtcccaagattgtggaagttgatacaggaaggcctaaatccaggtctcgtagaacaaacacctcagtctccgatttcggagatgacccttcttgccaagcgctctcttctccactcccatgtagaattcccactcgaatttcaatacccgattgtcggaattgccaggagtccgagtggggattcacaggcgacgaatgccggttctccaccgctcaatccacgcctcggtttctcaactcagcagcatctaatgctccaacaactccggccaagagtgtatgcgctgataactacttcaggggatatggaaattatccaaactacatggctaacacaaagtcttttaaggccaaactgaggtcctatagtgccccgaaacaaagaccagaaccagggccgaagaagaggctttcccttaatgaattgatggagtcaaggaatagcctaagtggggttagaatgcaaaggtcatgttctcaagttcaagacgccattagtttcaaaaatactgtaatggggaaacttgataggtgctcagatgttgggagagagacagagaggacctatttgcagagaagatagtgatttagttgtttttggttaataaatatagataaggaaatttatggtaacaaaagaagctagctttgcaagcttaaatcctatagttcagttggttaagtgtttgaaatcacaagaatattgaagaatgtgtgtagattcaaagttagatagtaatgtataattaaattgtcctttgtatctgattattgtgtttttttttttttcttaagtttttaatgatggaatttacacatacatattccgaaccccaaaaagaaaaaaaggaaaaaaaaaatcattttttggtgtcaaggcattgcaattgtataataatattgaaatttgaatcttttggcttttacagtgtctactctagacacatgcttacaagattcacaagcatctttttatttttttaatgtgttgtagaatttctttggtaattaatgaagggatataattggatatgatgcattgatcattggagaaagatgacaagacaattgtataaagtatttaatgttacacaaacaaatatttctttcccccacatgtgttgcacaatttcaatagcttgatgtaatgtttttcactctcttttctttggagagacatttcaaaaatttataaaagattttggtgtagttttcaaactttgtatgaagggaacaaagacaaaagttaaaaaaatataatagaaagaagacaaagttgaattatttgattttgaaatcgcccacttctacatattcttcttgtaacacttggtcatttaagctgaagttgtgaccccacttttatgttttaaactacatattcttctcctatctttgtctataccctctactctctggctactctattttggagccacttgatcagtaacttcataattaatccaacctgttatataaaattgaggataaaattttacctggaaaaaaaaaaaaaaaaaaaacagatgggttacataaatattacagcacaaccctatagattttaattatttttactgaaaaaatatatatatttctaggtcaatcatatgagaaatcattggtgttattaatggtgggaattaatatagatatccatgctgattaattaaataattttttcaagtttttccaatatccgaggatagacaataagctaataatgattagcttttgatttgacacaatatgatttaattttttttttctttttatattgggagacaaaaacaattctttttttgtattgagcagtgctcccaatattgcctaatgtgtgccacctttagaaaagtgaataagagtgagcttttatggggcagtcatgcacttttgttgtattcattttttagggagcctttggaataaagttgctatttaaatttgtttttattttttctttaaggaaaaggaaaaaagggtactgaaaatttgatcttattcattgtgactcaacaatttattctacttagaaacaaaatagcttagttaattttgaaatttatatcattttggatgcaatcatgttatggatatgaagtacattttattatttttgctattagaatatgaatgccagtttttattttatttgtgtgtatatacaaatatgaaagagagttgtttatgctattttgtatgatttttagtagtacttgacataaaaatttccaacaatgactaaagtttctataatgaacatgtttacaagacatacttcagaagcaaatttggaaaaactgacaagtaggagctcattgacagagaaattattttgttgatattaaataaaacaaaataaattaaatgtgggttggtgtgattaaatatggatcagtggcccagaggtaaaagctaactcaaatatcaaatgataacatggtgatgatgcatgtcatattttgaagtattcaattttgggaaaaataaaaactataaaatcatcattcttgaatcttattaaaagattacccttaaaaagagtttttcttaaaagaaaaatttataacaaaaataaatacacattgtaagcatgggtccaattgtgaaggtttatattctaagtccaattcagcatgggtttggcccaatagtctaagtccaatgatttttcttttatacaactttgatacaagttctttacaatgtgatattgtggacgtggtcacaaaggtgattcaccttaacaaatattattttattttatttcaaatttaagaaaattacaactttttattttgaattatttttttattatatttatcaaaataaaatatatgaaattcaattttaaattatataatataacacatgccaataataataataataaaccgtttttatactacattattcaaaactaggaaacaggccgcgctttgcgtgcggctatttataaatattttaaattatacttataaatattaattgaataataaaatcatatcaaataatttcaaacatattattatatatttatgtataattttaaaattatatttattaaaaaaataataaaactctatcaccgtaactcacttggtcactattacatttaatgttgatgtcatcaaagtatctcacttgtagttattattaatatcattcctagtaggtttggtctatacataatattaattaaacaataatcggtaagtactcacctttatacataaatgaatcatttttttacaaattaatcaagtgaatcattaccatatttcac

SEQ ID NO: 1177 - DNA, 1068 bp, Cannabis sativa
tatgtgcatatatacattaataacaaacttgattggaacttcatcaacaatgtgctgcaccaaatcgggttcactaggccttttacggattggatcaacctgtgcatctcagtggctgaaattaagcttctcttgaatggctcgacagtggggactctcaacccggaaaggggtctaaggcaaggtgaccccttgtcccctgcactttatataatggccgctgaatctctatcccgtcttctgatagataaggagaagcaaggtctcctcaaaggattcaaattgtcaagaaatggagaatcgattactcatctaatgtttgcagatgatatcattctattcggggaagcttcaattcgcgaggcaagagctttcttagactgcttgaactactattgcagctgctccggacaatcaatcaatttttcgaagtcttcggtggtcttttcaagaggggtagctagtagaaaggctcaaaccattgctcagttccttggcatgaaaaagatgagtagaagcgcaacttatctgggacttcccctcttccgatctaccaagcgaacagaggacacgaagcatatcattgataaggtgttaaagagggttcaaggctgcaaagtaaggcttctgtctagtgctgggaaaacttgtcttatcaagtcagttggctcaagcatcgcaaactatgtcgcctcttccgatgtaatccccatgactacggcgaataaaattgacaaactcttgcgaaacttctggtggggagatactgatctgaaacgaaagcttcatttggttgcttgggatcgcctttgtaagcccaaaagcgatggaggattgggtttccgcacaacagaaaccatgaacaaagcattcttgatgaagtgggcttggaagttattaacaagtgacgattgtctttggcggcggggcatgtctgagaaatacatgaagaaccaaaatttccttgaattggaagttaaggcgtcggactcaattctgtggaaagcaattcttcaaatgaggaatgatttacaaagaggaatctgtcggaagattggagatggcaat

SEQ ID NO: 1178 - DNA, 637 bp, Cannabis sativa
tttctttgcttagtcacttgtgtttcatattgacactgatttggcttgtaataacagatctataacggctaagaacttcctaacagccgttcggagctacatggagaagcacgaagaggcttcgccagtaagtgaaatggttacatgcaaaaaagatcagacaatcaaagaactaattttgttgctagacgccaagaagattcatcgagtatacgttgttgatgatgacggaaacataggaggtgtaattacactcagagatatcatctcaaggctagttcatgaaccacgaggctacttcggtgatttcttcgatggtgttctacccctgccccagaacagcagggtttaagaggaagcaaatcatttccctgatgattaatttttctttttcttttttttttggttttgcttttgacctgtgcttgttttgttaggtgaatattgagtatggcttgagtatggtcatcattgtaacatagaagggcccctgtaattaagccatccatgttcaatatggttctttttaaaatgtttgtatgttaagctatatttataataagaggaacattcttccatcttcatttatgctatattatatataaaagtattcaccttgttctgtgtcatttaactt

SEQ ID NO: 1179 - DNA, 2061 bp, Cannabis sativa
ggtttaatttcattccatatttttgaataatggagaaaacttcctctagatctttgctatggctcatggaagtcttcaaatttaccagcatatcgtcgactgagacctccatattcttccccaagacgtctttaaacattttgttgagtatacgttgatatgtggctccggtgttcttcaatctgaaaggcataaccatgtaacaatggatgcctttgtcaatttggaactagtgtgttcttgatcagctacatgcatcttaatctaattgtagctggagtatgcatccatgaagcttaaaagttcatatcctgaagtggcatcaaccatctgatctacttgctaaagttggaaacaatattttgggcaagctttgtttagatctgtgaagtctaggcatattttccatgttccattaggctttaggacccatactggtttgataagccaaaatggatataaagcttcccaaagatgatctatattggtcagcttgtctacttctgtcttcattgcttttgcacgaactggatctaatggtattctgttcaaacggactggttccccatgggatttgtgtttagagcatgagaaattaaatgagggttgattccagtcatgtcaaaatggctccatgctaacacattacttttttctcttactataaagatgattttctctttaacagtcggaggtagattctttcccactttattaaatttggtgggatcttcattgttgatgcatacctcttctatttcctccatagcttcaattattctttccacaccaacacgcgggtcttacgcatcttcgtctcggactaccctcaatgttggctgagtggatgttccaagttcatctaggttttcttctcagaccattaagacagttttggtcgagatattgtaatagctcctgacactttttctggttacccttgattgttccaatgcttccggtatcactcaggaactttgggcacaagtgacggattaatgcaacaactccaaaatcaactaaagcaggtcgccctaggatgacattgtaggctattgggcaatccactaccacaaaagtgcactatttaaaggctgagaccgtattgcttccaaaaataactctatttagtgaacctgaagttgtattttttccattagcataagtacatctccattgaagccttcgagctgaactggacaagatgttaggttttgtttccaccaaacttatggctttaaaagcttctttgaagagaatgttgactgagctttcgttatctatgagaactctagacaccctcttatttgcaatttgagtttctttcaccagtggattgttatgtggaaagtgcgcatgcttagcatcatcttctacgaatgttattaggagaaacatcatctgaggatgttgcacaggtgactgtacaacattacatgtgtcatcctattccagctcattcaagtatctcttttgtgcatttttgttacttctggcaatgtgtgggcctccaaatatggttgccacgtggccatctatattggtggagcaactctagatgggtatggatttttaggtccaggagcaacagcagatcttgacgttggggcattatgtaccccctaaggggcctgtattttagaagcttgctgaagacctattccatgaggaggatttatggttttgggctgtcaaggaataaaaagttattcgtgtgctactacttgtccaggatagataactggtgtcctcacttaattggataaattgacattccaaactaatcctttaatttagtctctcaagtaatcacattcatttgttgtatgcccaatatcaccgtgatattcacaccttttgcttgggtgcctttatttattttcctcctttgtacataggcaaatgtattttgtaatgaaccatattaaaagtggccttgtatacattttcatgagtatcaatcaggctagtgtactcggagtatcttggttcaaaagtttttcctttctccgcagatttgattcggcttggtgctttagaacttcttttgctccaagaata

SEQ ID NO: 1180 - DNA, 1707 bp, Cannabis sativa
tatataaattgcaatgtttccctatgtttgcacgtgaatgctactaaagtgtgttgtgcaaacaaaggtagtctatgtcccaattgacgtgtgaattttggggtactcttctggctaagtccacctacttgataaagattggaattttactgaattttcgtgctaaccagcctaataagttggactttgggttcatattcttgactcgaatttttaaatacattagtttaagctcgcacccactgatttttgcctttgtgttttggcttttatttgcaacttgtaggatttggtggaattcttgtgatgggaggagccagctgtataaccaaagatattaaaaaattgattttgatccagtgcagatatagttttttttggaacttgagctgacccaagtcatttgtgtgatgtatagaatagtggtacaacttggaattttcagatttgctgcgtacagattcttttctcctttgttcatttgttgggttctttcatttattcttagttaagaaataccacccatatacaaggtcatatgtcatcttctggtaaagtggtaattgaagtattggtacggtagaataatctgctttttatattacgttttggtgtgagacagtactcatcgtaaaatgagaagtcaataaggtaatcactagctgttttactaaatacccttttcatggaagtcagtgaaattaggtgttcgaactcaaacaaagtcaactgatttctcatatattatagaaccaaaattaggtgatacacacttcctcggatgaagctttattataataagcacacacaaatacaccaaaaacccaactccttaaatttgcttagaacttcttaccttctgtgattgccttctacattttctttctacttaaaagtcacagggttccagaagctgttatttgttgctgatactaaagatgagggctttctctacaaagctctttatgatatttattctctctggcctatatcttgctacttctgcattcaacccttatggtaatgatctttggccttggtattttatttcatgcttttgtatttagtttcttttgatattgttcatttattatcatcttttgttattgacatgaaggtaatgagaagagctcattccatgttctcacccggatagacaagtttaggatgatactggcaaaaatggaagcttatgacaactcgatggtgcactccaggagtcttgggtcacgccgcatattgccaccaccgccacctaccaaaaataggcagtcagctatgcgtgctccggctccacctcctctagttgcttattaaatgtctaaaatgaaagtttaagaatgatctttgtccaaggtttcatgtaagtgcgttcttcttcaaatgccaatatgtaaaaagcatcttgtggaaaaagactagttgactagttcagttttctaattgagtagcccaactgaatgtctatttgtcagactggagttctgtgtatgaaaaaacgtaataaataaaatctgaaggacaagactctcttagcttctcactaactcaaaactgtgcgtgtcaaatatatagagtattttttttctttggaaagatgcctttttaggaattagctaggaaagcagcctttttcagaagataatgctgtttttggtatgaagaaagcatctagacaagtttttaccaactatatttattttctga

SEQ ID NO: 1181 - DNA, 1869 bp, Cannabis sativa
aaaagaaaaagaaaagagagatttggctgtatataatgtggcaataccttcaaaagaagattaaggattgtgtcacatgccaaaaaaattcgactagaatcctcaatcatgcaacaatttggtccaatcagttttatgaggcaatcaatagcctgcaagtagagtaaacacaaacccaagaacaaaatgtgtcaaaacaactggaaaacatattgagaccgctataatttacagatattaaaagaatccagatctacttattatgcttcacaactaaatatgtaatggatcaggattaaacttgtcaggagtggacgatgacaaaaatcatgcacctatgcataacaataattgaaattaagagtatctctcatgcacacttacagctttgtgtcctccagatgaaacaacagttttgcatccttcgacattcattgttagttgacacagcaacggaagcaaaaagcatatcgagtagaaagggctgtgatataagattaattcaaaccaaggtcatacatcatgtacaaaactccccctgagaattggggaaattattatttttccatcacacaaacagaatatcattatgaacctgggctcctcagcaccttcaatggagagcatatactccaataattctccaaccttctctttgcacgcgagaggtgtttccgcgagataactgaaacaaacacactatcctttaagttctttctttatctctaaactcttcatttatataaacaaaaaagacaatgtgcatacactagaatcactatctcaccctctatttttgttacataaagggagagcacgtgccagacaatgtatccgctaattatctttctcatgtaaaatgaatatttcataagggtaatttctaaggcaatggaaaaaatatcctataaaactcattgtcaactaaaagaaacttcaagaactcactatagctcaatggtaaacacagctcaaaagaatgcatagcacgacactattaataacgagcattattagcattgtaatggcatatgaatgtattattttagaaaccatcttaagaaaataagtgctgtgaaggtaaggtgttttaaactattacttgctaaactattttaatagaaacaatgtcaaatgctagctcatcatttcactctcccaccaacaaaagacaagcctacctcccaataacacggactgaagcaagaagatcatctcctttcctttggccatgctcctgaagaatcacttggtcaataaatataaatatatgtgtatttacataatctttaatacaccactttactacctttgcatctcgtaagtattcaaaaactataccaactgtttcattcagtccggcgatcactttcatgagagcgctatcagcaataaggtcccctgaaaatgataaatattatcaaccaaataaccagcttaaacatacttcagaaatacgggtcctctcaaacaagttatgctttttgttacttcatgaaacctataaatgacactcgtataattgcaaagcatgtcataccttcattttcacccaagctagatattaatttaataaccttttctaccaaggaaaaggaaacagcaacattttgttgcttcagacgaactgtctcatcaagtgatgaagaagactttgatgcttcatacttcaaataagccagctcattcagaagaaccgcaacttcaacccgtgattgctctagaacaagcaacaaacacctgacacaagcatataagtatataaaccaagcaaacatatgcttaaatctacatcaaaacatgtcaaaatcacaggcaacaaccagctatagcatctctcatcttacctatcggcaggcagaggatcct

SEQ ID NO: 1182 - DNA, 1929 bp, Cannabis sativa
attgtttaactaatgatatttttcagttctccaaaaaggatttcgaaaaatacttttctatctgtatcaactttttgttgtcagtttggttcaacataacaaatgcattcattatttcaaaactcaacaggtatgagaagtgcatcagatacgagtctcggaaggttcgagcagaaaacaggataaggattaaagggcgttttgctaagatagatcgtgctggtatgtaattttgttcaatagtacagttagtctataaattgttgattatatctaggtgtctcttattgtaacataaatcgaacttgtttttgattgatatatagcctgttaagtattggaatgaaaaaatcaattgacttgactgtattacaagctatcttactctatattgaaatttgcaaacttcagatgccttgttttattttgggattttttttgttattttcaattttatcaaagatcttttgggatgtatagaaggagaacactacaagtagaccccaaaatatgtactaatagaaatttcacactcaccagtcaagtatcaaatcaacaggaaaaatttgtccgacagtatatattatgccgtgcttaagttcaaaatactaacttccaccatcttaaactatttaagctcttgtaatgattgatttattgaattcaatatagagaagaaggcatagtttatttatattatttattttgatgtatcactttttaagcaggacaagtaggaccctgaagaaagaaagagacgtctatcttcataatatatctcttgtcagtcgtcacacaatttacaatactcttttaattttcatttcaccacttgcaaacaactactaatgtcattctcctaagtgacactcttctgctatctgagcctcaaaggtgaacgatggttcatctgctgaaatgctgcaatgatagagatgtaaatagactttgtcaatgccaagcaaaagtacttgtaatctctgttttcaccaaaatcataaacataaactgaaaaccgattgtaggtatgctttgaagtttcggtacatctggtcgtgtgaaacagagctacccctctccaacactcccaatcccagaagtcccatatgatagtcactattgtccctccaaagttaaccatccctttctgaaacacagattatgaattgtcagtccgatcttcaaagttgattttcaatatgttcacataataacttgcatcagtaccatagacaagctttgtcatttaaaatcctggtaagaatggtttgtctgccccgaacttgagtgaagtactgggagttgaaagttgaccgttggtttgatcctgcaactccgatgattgttgccatcaaattgtttggccttgttccttgcattttttttttgtgccaagtccatgtagagtcttcctgtatgtaagctttaagtaatatgaatgtatgaagggctgatgttacttgttagaaattctgacttgtatcatgaagacatgtctcgaactttggcgttgacatgaaaattgttggacttgattgagcgtgaagcaaggaagcttgctcgagcgcaggctagttgaatccattttaggtttcttttgaaagatgtgtggttgatgagaaacattggtgaatctggagcattgtagtggataagtttgagggttaggccattagcttttcaagttatacctgcaattaaggaccgtgaaagataaaatgttgagagagcgtaatggtgttttggtcataacagacttggcttaatattgctagacagagtttaaccaaagtttctggtttaaaactctcttatttgccaaaagatctgccatggaataattacaccaacagaaattatattacttttttgtattggtacgacatacccttattttatgcacgcattttttttttttaaatatgaata

SEQ ID NO: 1183 - DNA, 1435 bp, Cannabis sativa
tataagatcttctatttgtattgaactcttaaatcattgttagagaatagtactagtttactttccagttttcttagcttgtccctaatcatgtttatagtaccacctataaggcttctcgtgaattagcaatgcatgcactcagggtggataatgaaccagaattttcttctatcattcttaatgtactcaagtttgattattttcaatgaagtgatcattgttcaaaaacaaccttaacagtcaaagcaatctaaaatttgatagcaggattgaagttgtccttgacattgaagtaaaagggaattgaaagaaagaaagaaggaaatacccataatatgcagcaacaggtctgcctttctcagcaccaatttcccatggtacaattgggcctctaatgatcatgtcagcatccaaaatcacaacccaatcaacattttctgcatctttactatgttttagccagtgtactactccagctggtttgttaattgcagggtacctgaaaacccatacatatgtaaaaaaaacaacattaaaggcattgaaccttaattaaacccaaatttggaactaattgattgattaattatgacactcccaaaaacacaaaaaccaaacagaaacaattgattaccaatcaccagttttggggtgtttgctcatagaagggacctcaaaagtaggagccaaatccattcctttgtaattcttcttctcctggtccgtacagctgaggagacgggtaagtgggccgggttgacccgatttcttgaagctatgaacaagcccaactgtttgccagtcaaagtagttctggcactccaccgagaacagtgtgtggattctccatggagcttcctgcttcgtctcctcaacactctcagccccatgaaagagacccaccaccgccaccaccatcaaaaccaataatttagccatgattggtcaaaatcaaggccagaattcaaatgggttttgtctcatagatctaaagtttacagctttattgaccaaaacaaccaaaaaagagaatagattgtgaaagagagagagctttgtttaagtcaaaatctgagttttttcgatacatgatcttataatatagaatttaattgtggatagtgggagaaaaatgcaataattaaataaacaaaaattacatctttctcttctgaattttataaatttttttactgaagatctctctgctccttttattgttttcgattaattgtatggaatctcccaaaaccaaaatgtaattgtataatgtgtttttgtgttgagctgacattttttctttttaatttattctatggctatggatcttatgaacgcgcttttttgcagcaattgaaacacacgcactcttttggacttgttaggcaggctgacttttgatgagctttgagagtttgactatattaattaa

SEQ ID NO: 1184 - DNA, 994 bp, Cannabis sativa
ttaggttatgtttggttggaaaaaaaaataataaaaaaaaaaaaaaaaaaaacaaaaaaacagaatgagaatagaaatagaatattcataaatagaaaataaaaatcaattctatttcattacatttaacaaaatgcactcttgatgtctcacgatgaaatccctaaatccccaaggatagttgagttcgaaaaaacacgtttgacccaaagagtgaaaatgatatgtgtgcacaaattacaaactgtacactaaattatttttacacacaacaacatgatatgttttaagatgtgacctattacgtcaaaaacgcgtctaatgtgaataattttgtgtggttgcttgatgtgaccgtgccagacgatagtgtaaaatgtaaatcactttaatggaacttttacctattgtaaatggaactatgtacaacaaagctggttgaccatgcccatccatcaagttcaaagccacatatgttatgaggagccctgcagcacagtatttcaaaggatcagtaatatatggtgaatgataagattgttactatttgatggtttatatgtttctgtatttcatacctaaaccatatgcagtcattgcccacacgaaataaccagctttaagcttcttgttcgccaaccaatcatacctataaaagtcgcacgagtcagcaaactttagacccatcagttgtaattacccgtttattagaaacgtttatagagaagaggtttatgtgagatagggtaaaccatctacatcagaatgcagatttcagcaaaatccaaacatacagattgtaccttagtgaaaatgctaccaccaatccaggcaggataatatcaccaaacccaatgatgctgtagccaccccaaggatcaaacattcttgggatttttagtagcatcggaataccatcctctccactcctatcaccacgagctacctgcacagaaacagaatattaagattctagcctctcctggtacaatag

SEQ ID NO: 1185 - DNA, 1074 bp, Cannabis sativa
ctactatcacaattgcaataattttaagttatttttttgtttcaattaataaaaaagtaattgtattaactttcaaaacaattagatttttaattatgttatcatgataatttcaatttattagttttttgtaaggataagattcttttcattgattctaataaaaaagtaattacaatttgtactaataagttatattttttttttcaatttatcagttttttttttgtactaatcatttttaatttgtactaataagttatatttcactcatgttatattcaaataattgatactccaaatataacatttattttctacacacattagttattatctgaacaaggaaaatgcatgtgaaattagtaaattactacattcttaaattttgtttacaataaaaaaataagcaaagtggttttttttcataatttttattaatttgagggatcatattgaaaataactagtaggctgggatggaccatgctatttattaatcaattataaatgttgttgggcacaacacaacatgtagaggtggagaaaagacagttttggtggaccattgaagaaggtctcaaagtctcaaactattgtggacacaaaaagtgaagggctaagaataagaatcatgcaactaaagatcaagagaggcatatgcacaacttgctaataatgggctcgatcgaaattagcgatcggtgtcatcctctccatccattctacttccccatcaaatccctatcgatagattttttcaaataaatccctttgatggaatgtgaacaaagaaaaaaagttgatatgttctaattgtttcggggtttagagtggactcccttattcggttttttgtttttcggttgatttattctagccgtagcttagtaattagaaatttatttttctgatttattagtaaaaggtaattaccactatgttacaattaaaaaaaaaaatactctttcataatgagccaataggccttgtaaaattgaaccttgagttgagatatgccctctacttgaagtttttgatctctcataatttttttcaccaccacatcttcttt

SEQ ID NO: 1186 - DNA, 1303 bp, Cannabis sativa
aatagtaaatagcaaagataaaatgtatgtgtgtgtatgtatatagaaatattataccttaacagttttgtacaaggttgtgaaaggcacactccatttgaagagggttaagaaatgtattatgatgttcagatatccatgttgggaggtggcaacctccaaaaattccatgaattgtaatcctcctgcaataattggaatctaagtcattcccatgacacaaaaaatagtttggtgtatacaaaacagcagaatcgaataggactgaacctgctcggaggaactcgtggatggaaacatgccgttaacaagagcatgaatggatttgtatgatttcgtgtcaactcgccggttaacagcaacctctccctatgaaaaaagattacaacattagaaagagtgtttgatattctgaaattagagatatctatagaccttttgtgttattacctttggattgataatgaagattttccctagtggaattccaaccttaaggtagctaacttcatctgtatctctatttccgaaaccagcatagaatggactgcaatcggcgggaaacaatgatttgatttcctgggaaaaaatcagaaaaaccaagttaatacaaagatatatgagactttcacatatgactccttaaaactctggatttttcgggtcctaaaaggaaaatttgatgactccctcgaagcgctgtttacaaaaccgagaacttaatcaacatggaatgacggccaaacattcaaaactcagactcgctaccgataaaagaagtgcatacaaataactaaataagaaattataggtctaaatagaagccaaacctccaagcatgaaatcttgaattcatgaggagcccttctaataactgagcgaaaaaacgaaagaaaatgagattaaaatagagagttcattaaaatgcttcaattcaatctgaccttaaataatcttaaagatgacaatacaaagaaaataatcttatataccttctcggtaaagcgaggggaaaagtccatcaggcgaaatcaccacaggtccctctggtaaagcttttccatcctgtattaaaggaaataggatcaataatgaagaaaacatatatggtgtttgaattttcatactcattagttcttaatatgtcacctgcttaagattgacaagaaattgtctagttaaatacgcctgcgaaattgctcgggcgcttagaaaaagcaactgatacccattttcctgaaatacagaacaacaaatattagtctttcggtcttcaatagcgaatttcaacatgtggagccat

SEQ ID NO: 1187 - DNA, 2408 bp, Cannabis sativa
aaagtatttacgtggcgagttactcatattaaaaaatgcataataatttagtaattatattcaaaatattgggtgagtgtgtaaatttccctacaatttgcagttcctttgtcaaaaagttagacagaagatttttgttctagaaagatactctaatataaacaaagaagcactaacaaagaagttaaattaaaaatacttaaataatgaaacaatatatattcttttatacagatatttttcaaaacaatacatttgatagaagataaagataataatataaattagaagtcaataataattgaaataattaaatttgtttgctaaaataataataataataataataataataataaataataatgggtacagtttgccccataaataggtgccacaccacctcaaaaaacatgtcacaaaagataatgacatcttccatagtgtgtagtgatgatgatggaaaataggataagaaaatgacccaaactcttattattattattattattataccaaattcatatatataaaatacttgtattcaaagaaagagggttgttgggtatcattggtgtttgattctcgagaaaattttgttcattcatgtacacctgtctaataatgtatagaaaaattacaaaagagtctctttcacacttgcaaattatttcaaatcataatttttttctttttaggatgagaactatactattcaataacccatcacacacgtcaatcttagacaccatcacaacaacaactaatgtacccaagcaagaaaaatcaaatcaaatttctgttataaaaaatagggattatggggattaagacaaaactatcttgattgtaatttaaaaattttgtcccctatttttttatcttttataaattaggtaatatactagtcgttagttttatgattgatggatattgttttttttttttttttttttttttaattatttcatttttatcaataattggcaattgcttctactcttttcttgccttggcaaatggggcactcattttagttttcactcattttatggggttggagtataccctatagttagggtacactcttgctcatcgggaattgtatagtaccctacgtgatcggaaagatatttcaagatcgataaaatatctataagtaggggtgataattcagatcaaacataataatataattcgaaaataacatagatgaagtgactcaaattaagacgaaaaatttaataaaactactctaaaaataaagtaaatatttttgtgtgaaaaagatagctattaaataaaattaaatcaaattagttattatcttagtccattataattacattgacatgagtaacaccaattgtcaaggcatatccaatcaccatggctctattattgttttagagacactaaaaatttataatccaacttaaatatctttaaaagtagaaatatataaaaattttcctatttttcttcttcttaaaaaagtcaataaattaaactagtcatacatatataatcaccttccatgtgattaaagttgaattaaaatgattagtactaataatagaataaaaaaaaataacaatccttaaaactacatcattagttaaaacatcacttttatcacatggcatagacaatttgaagagtttcacaatgacaaaaatgacaagtaaataacattttattttttacctaatgattaaaattaaaattattgtaaatattagtgtaatttgcgacataaatacttaaatataattctcacttataaataaatacttgagttcaatttttacggtaataatacttaaattataattgtaagtatcaaacagttaagtgttcagtaaattgtcccgtgacaattcctaattaatttaagtcattaatttgatactaatattatattaataataacttaacatttaacggttgtttttataaaattctaaaaatataatttaactattattataaacaaaaattaaccttaattatttatttacagtgggttaaattactttatttatatcataaattactttaaacattaaaatggaaatcattacccatttattttctcttttttttgtgttaattatatattttccaagactaaccaaattaagaattaaacaagttcaaagacaaaacactaaatattatacaaaaatcaaagacaatagataaaaacaaaaaacacataagaagacaccaaatgaaaatttcttcaaatatttaataacataacaataatattttaattatgtaattttaaatctgtaattaatcttaatcacaacaacaattaatcaaactgaagcttgtgaaaccttgttaacaaccaccttacccggttcctgacccaacgacccaccgggtctcgtgtcggc

SEQ ID NO: 1188 - DNA, 1555 bp, Cannabis sativa
cttgaacctttagaatgataatgacactcaaccctacctgattcataagctttaaagtaaaagatatgccaaattttgtaggtatcatggagataccacgcttcttccaccgattttgactattaaattgatcaacttctttgcgagcttctgaaaagagacaagataacttgagctcattccagacctgggacaaagtactgtgttcaatcttttggccgtaatgtaaaactgatccttcgccttgaaaattaatttcctagaaaaatattgaagttagaaaatcaatgatgcaggaaaaccacaacagagattgtagtgctaacgaatttcctaggcaaagaaactctagtctgaaactactacataacttactctaatttcctctggacttcttttgagctctgcagcgattctttgaatccaattctcggttataatcattccctgaggaccaccaaatcctctaaaggcagtgttactagtgatattagtgaaacacactcttcccataatccttacatttggtatctcataaacattatcagagtgaaacatagcacgctcaagcacggcaagagacaagtctaatgagtttccagcattattatagatttgaagatccaaagccagcactttcccatcagttgtgaatccaacctgagccaccaaagtaaatttccacaatcattccaatagataagaagtaaacagctcaaggaaatgtaaaagcaaaccataataagcaaaatattcatagaaagaccatgctttgaacaagatgaaaataaatgaattatgaatcgatagtgagaacatgaatgaaccttgtatttcccaagaaagctatgccgttgcccagataccatcatgtctatatcgcgatctagtgttattttaactggacgattcaatagatatgcagggattgcagctgcagcagcaatgaaagcagatcttgtctccttcccaccaaaaccaccaccgatacgctttgttttacaaactacttttgacattggaatgccaagaacatgggaaacatatttctgatgcttttgtggggcctgcacagtgataattgataattacaatctgaatattcaatttcaactgagcctaaggaaaactagctcaatttacatacaagttgattcagattgctaatcatatcagttaataaatgggatatcacatacttgtgttgatgaaaccatatgaacttcattaccgccatctattgtccaaactacactactattcggctccaagtaaaagtgttcctgtcctccaacatgaacatccccctctataaccttatcgcatttccctgattggaaacatagatcaacatcccctttcttcatccacttctctgtattaggatggaaacttttagcattgatggcatcttcaatcgataaaattgctggaagctctgcatactcaacatgaacctttcttgccgctaactttgcattttcatgcgtatcagcaacaacaactcctataggctgtatttaaataaacaaagcctcttattagcatcagtgag

SEQ ID NO: 1189 - DNA, 3613 bp, Cannabis sativa
caaacagtatatatagtgtaacacgaacaatacattgatatatatatacccatcacgttttaatagtacattgatttttaacactaaagtctatggcatttttaaaaacaaaattttatttgggctaaaaataattcattcgaactaagaccaataaaaactgaaaccgaccgcaacatacccgacaaacctgacccgaaacccgctaaactcgaccacccgaaaatcaggttcgattacacattttaaacacccgaaatccgaaagcccgaacccgaccatccgaaaacccgaaaatctgacccgtgtgcagccctattataagctaaagagaatggatcaatccatagtacctagagcctaaagtgttgaccatctccggaaatgctaccaatagttaggagatcagtattttatttcatctttactctgtaagttaacctgtggcggacaaagtatatgtattatcctacataaatttaagctaagtgatccaaaaagtcattttttacttcacttaggggggtattaaggcataaaatacgcgcagacaggccagacataagaaaagtaaaatagatataaactcatggtataagttgtctaaaatataaatagtaaaagccttggagtcgggctataatagtgtctcccctaataaaaaatacaaaaaataaaatattgtcttgaggggggaggaaataagtgaaatataaaaagataaaaaaaaaaagaaaagaagaaaagagaaagaaagaggggttcaattagtcaatcggctcgtggaggtaaacggggaccgctgcacttggccaggatagcttccagcttcttgttcttttctcaaaattgagccacgactgcctcaagatcaggaaagaagtggagatgaggttcaaacttattagatttccagcacatgaacaccccgtcttcgaagcgcttctcgcagtgcttgcacgtgactggagcaagtaaagcctccctcacagccttggtagcctccttttaagtttgctcccagaattcacgaagctccttgagttcaatagtcatatttgcagttgtctccaagtcagtccggtgtaattctttaagggacttgagtttcacagaaagttcctgggtttcctcccgagcgtctccgaggtccttcttgtcgaaggcaatgacatcgtctttggccttaagtgcctcttggtggtttcgcttcatcagggtcctctctgccagggtatcgttgcgaagagcctccattttgtcctccgactcttggagcttcttcataaccccttccatgccacccaactctaacacggtgaacccttggttgaccaaagtcttagagagccgatcggcctccacatcaatctggcaacaaagaaaaatacagttggaacttctaaaaatatacaaaggagaggcatggaaagctgacaattatcgcagtcaacgcaacactcatgtcttggatctggtagacgaggttggagcaagcacaggccgcatacctcttcctgggaagctgggtcaaatcggtagcgaagtgacttatcatctctaaggcaaacggtgccatattaggacccaagatgcgcttgaactagtcggtcatgggatctaagttcagatcctatacctctctggtatacccgcctcagaaaggcccatcttgagcttccctcaaccacttctttagggcctcagcttcagcgtcacccttggacaattcctccactgcataattatgcttggcaatgcggagctgaaccctttcctcatcggggtgggcaggggtcagaaggatgcctagaggggcaagatactcgtcaatctcagagggaatccctgaatcaacactaggaccagggtagcaaccctcttcagcttcttaaaagattctggcttagtagtgatgctcttatgcttccagtcgagtggaggaaccacctcttcttcctcttcatcaatcaaaaccacctcctggttcccaatattttcattggcaggtccccccagagtcacactcatcgagggtgctctggcatgtctgactcggggctgtgagtccgggcaagggcggctagaagatcctccatgggttttgctattcaaaataagcagaacgatagaataacatcaaagaattacaaatgcaagtatagtgcagcgagactaatcctaccctggcgatctaattctgccctagcaagttcataaattaataagttggtgttgtcatctcctaaaaagctatctacagggagaaaccaactcgaggttaagtaggaggaatggtccaaaaggatcggtacaggaggaccagagcccatccgagatcgacccaagaaatgacttaaattggagaaataaaagcttttggtgttatcaccccactgggaatggggcatccaaaatttatacaatctcttatcaaattccactagccttaagttagcgtagtcttggacagaaggaacgaagtgaatattcaaaggagacttataagctccagaggtacttgcaccaggggctccgaagttcgggatcgagaacgaaaatttggtctgaactggagtcttctctttccctatctcctcacgggtaaccctcttcaaggcagcctggaggcgaatgtacgcgagctcctgctctctcttgtatctgtaattgttatacttgtcttcatcgaatgaaatgatatcctccctaagcgccttctcactctcgggattctgggtgttgggacaaaggacctcagacaagttgaaatcatcgacagattcactctccagaatcaacttggctctcctgcagttgaccgtcgttactaggtcacccacattaagtcttccttcttgtagctggcaaacacctgcgcgtgattcaagaagagttgggtgggggcaatacgatgcatggggggatcctgacctagtccgtagatctaaacactcaaaggccttgaacccaaaagagaagaaaaacctatggcggtattccttgacattcttctaaaaattaaaaggtatcggcgtctcattggttggatgggcttgtagtttataaaaaccatatttaaacttatccccctttttgaggattgaaagtagttcgtaaaaatataaaatttcagcggggctgggtgcagcccagcccctggctatataaaaataaaaaggcctgataacaggcggtaagcttggggaatcaattggtatggtgagagtccaacaaagacaagaatattgatgaagtcgtcttggaggggtagcatggccctggacataaggtgagtttgactccaggccctgaagccattatagttatggtttggtgtctcctcgtcccttgggagacggtggttcactccagaactggacggcttactccaagtacggtgataatcttctccaattgatgggggcaggtcaacaccgaatagagtttgtcagcctcccaaccattggaaaggcacgcaaacttcttgtaaatgatcgagcccttcataacctcctccaaggtgggcaacttctttggcccattctaagaagattttactccggtggctacgggggtggacatagcgccatcctgttggaatttattttac

SEQ ID NO: 1190 - DNA, 3279 bp, Cannabis sativa
gtagtgaacttcctctggatttgtgtaaaaaaccaaaatgttgtattgattttctcatctctgcaacttttcatgcattattattatgttggaactttcaaaatgcttaaattctgcaatctttgtgtgttctcttttggctcattttgtgaagcaagctttggaaattcttttcgttacttcttttcttttatttttggttttattatttagtttggtgtgtactaaatgagtactgtcatagttaatttagtcattattggttaccagtgccaaattcagctaagagtatagcacacttggtgtaattttcactttttccaatgcattaaaagaaacttgatttgggaattattttgtaaagaagccaaaccccttttattgtttcttcaacaaaagtctccaacaggaaccaatgcttagtttagaaggtagtttttttttctaaaatgggtcatagttgatggagagaaatggagccataaagctatttcaatgactattttactccttttaagaaaaataaataaataaatggtagggagatgaattcctcaaattataatgtaggctaatactaatatagtgtgatgtgtgatcctgatatatcaacaaaccattcaccatactatctttccatcaatctaattaatacgctagtaaatagaaggaaccttatgttttgagattaattcatcagatagaattaatgtggtgaaaaaaacagagagaaataaatatatatcaattatattgtaaaaaaataaaatacgaaagaaattcccattggataccatagagactctagctatcaatggtcttttttttaatctcttcttgtcattcatgagttttgagtgttcataaagcttaaagacactcctcagatatttcaggattattttcaaagggaaactaaaataaaaatcaagagttgcaataatcaaataacccaagcaagtatttaccaccaacatctgtaattacttttattatatagtgaacaagattgaaacgtgtgtacaattcacaacaatgtgatattaagaaataactgtgaaaacaatacaacaagcaagctatatacaaagagagaaagcaatagtacacgttatactgataaaagaacaaatacaaagatagataactgtgtataaacataacttacagtatataataagctaggaagatattcaaaacatccaagacaggtcttgcctgaaagaaatggatcttgcagctcccaccatacccctctcagaaatttgaggacaatcttcgacagctaaaagttccagtttgtaagagccaagtagtggcttcaacccatcattggttacacctaaacatttgaataggcgcaagattcgtaatcgggaaaactggctcacaagatgcagcccttcatcagtaatctcttggcatctgacaagctctaatttttcaagatactgagccaagcaaagagcttgcataccaatatcgttgaaggaatagacttggtcaagggaaagttccttcactggacacttttgaatcagagaaacaatcccacataaggtaaatgaggaaaatgaagggaactctccatcagaaaaagatatcttgatggattcaagcattggacagttctgagccagagcttttagactttcatcacttagtcttaaagggttgttcagatatacaggaaaggagaaatcagaaggaattcgaagagatatgctgcggaggttttttgatttttgagccaagcttactatgtcacagtctcttaccccaacacacatgtccaagtgaatcttctctaagtttttgcattttcctaaaacacaagcaagccctctgcctgcgcttataatgcaattaaccaagctgagctctaacatattgtcacaaggcacacattgcttttgccatctatcaacagctaaacggtcataaactttcatatatctgtaattagcatccacctcgaattgcaaacgtttaatttttcgccaactctggccaagtttaatcaaatctccttctccaatagccctacaattcttgattgtgagatcttcgagtgtttcaagcttgccaagatactcaagccattcaacactactgacattcaagcatcggataagatggagaatggtcaagtttttgcagccaacaacaagagataatataccacaaccggtaattctaggtgtgaaattcaatttcaaggctgaaagtttggagcaagaagacaagtaagagagaccctcatcagtgataacagtacagtagctcaaggcgaggtcactaagagaagggcagtaattagatagaatgaacagcccttggttatccaactgttttccaagtttggacatccaaccagaataggttatctccactcttgttaggttaggaaatctattacagagtgaagttaaagcttcattgggtggatctaatccacaaccaaccctaaggaattgcctctgttcattatccagattgtggaaatgcttacaagacaaagacacagagtttctatcagctgttcttttaattctattcaaaatctcccaaactaatgggtctggcagaccctccatcaatagtagaagcctctacttttgctcttattgaaaacaaattagctaatatagcatcaacctgaatttaaaatgacaatttcatgatgagaaaaggtaaattaattcaataagtttggttacgctaattactgattgatacataaacccaacactacaaacatcagttatcaatgaacatagaaaaacttggctatgtgtctgaactctgaaatggaaattactgaattgaattgcacgaacaaagaatcgtacaaaatcaaaacttgatccagccacaataaataaataaaaaaacccaatcaatttttcaaaatttaaacatgaattatatttgtttcagataattaaaaataacacatgtattataattgaaaattaaacgaaataaaacaattacaggaagaagaaaaaaaattggtaagaaaatctataatccaagtgccgtacctgtggattggaaatgatgaatcttaggataatcaatcaatctgtgctccggttaatattttctatggtcacttcgtaaatttctttctttttttcttggaagaaactgccttcgctctttcgatttccctttcttcgtttgtcaatggaaaattttattcatttttcattatttaatacaaaattgcctagaaacgacacattttctgaaaacgacaacgtttccaaaaaa

SEQ ID NO: 1191 - DNA, 835 bp, Cannabis sativa
tctctctcatctattaataagaatggtaatgatgatcaatggtggaatctttattaatttaataacaaaatgttagatagctaatctgtagttttctcatttttgagctgtgagattaaattaataataagattattaattattaataatgtgagatcgatctatagtaagtggtgggacacgtggtgcttgcccctccatcacatagcacattcagatatttatttatttattaaatatggtttataaattttggtgataacattaattattaattatatattctgcctttttattaataagacagtattatatggactatgaagtctaacatggttgtctctgtccctacatgcacactttgtggcacgggctaaaaaaaaaacttacaatatatccagaaacaagaactattctctttatcctcccaaaaaaataacataaataataaatattataattaattaaacaaaggaaaaaataataacatgaaaacaagaaacgaaaaagcgtgttgatttatattcattgtatccttgtttttatattctgttcttgagaaatcgagatcttcgagtggtgttatatgctcaggttttattatatatatagattaaaatataaatggatcaaaattatttctgatacaagcactttgagatgggctacgtttggtctgatcttgtcctgtgtgcctagattctaataggtatgtttattaccaactagtataagagacaacgaggcactctttttgtataattataatagaaattaatgtcaccacctttgtcaaaatcaaataattaaagctatacttatatttctttaatat

SEQ ID NO: 1192 - DNA, 3174 bp, Cannabis sativa
tgatgggattattcaataacaagttttatatatttaagttaagtctcttgacaaaaatgacatatttttttgaagttattttctaatttatagtctagtttgcaatactcttgacaactggtagaatttttatactgaggtcattttgaaaagagtaatcaaaatttagtcaaaattcaaaatgactttaaaaaatatattattttactaattatttttataattattataaaaaccattaccaaccaaggttcaattcttataaattaattgtgatacaacgcatagagtcattgagagagaaagagggttgtttttttcgtggaaagttgacaaaaaagtaaagcaaatcaaacttgataaccaaaattgaaaaaaaaaaaaaaatcaattacaataatttttttcttaaaatgaaaacatgtgcaattacaagttaataaagaaaaaattgcaattggcattttttaataataattccattccatttccatatatgatattgtctataaaaataaatatagagaaaaacggaaagtaatcataaatgacaaattctcatcaattcatttatttattttttagaagaaaaaaaaaaagtgttaaacttgggccataaaaagaaaaagacagttcaaaagggcttgacaaagtgacacatagaaaagaacagtgagaattagaaagggtaaaacagtaaaatcaagtgtaataataattaataacgcaagaggattcggttcaagattcttgggccataaaaacacaaaaaacccaaaaataaacaaattgaaaggagtacgttggaattggaatcttatcacgtgttagactggaatccattaccatatttaattcaatttagaatccaaacttggagtccgccccaaccccatcgcctataaaagggtccactctcattcgatttagggcaccaccataattacactttaataagaaagccaaagaaaactcagccacacgcccaattccaacacaaaaaaccaaatacaaaaatgggcgggtgggctattgcggtgcacggtggtgctggtgtcgaccctaatctcccactcgaatgccaacaccaagccaaacaactcctcactcgatgtcttaatcttgggatcgacgctcttcgttctaatctctctgccattgatgttgttgaactcgttgtacgtaattctcaccctttttatttttaattacactaaattattaccataactggatattaatatattttttttaacaggtgagagagttggaaactgatccgttttttaattctgggcgtggatcggccttgacggagaatggaacggtggaaatggaagctagcataatggatgggcctaaaagacgatgcggtgccgtttcgggtttaactaccgttaaaaaccccgtttcactcgctcgtctcgttatggagaaatctcctcattcctatattggtttctccggtgccgaagcctttgcccgccaacaggtgtgttttgtttttttttttggagaataatcacttcacaggtgtcctttttctaaatatatataaataattaacagtatctagttcattcgtgtggctctctttcaaagtcacgtgtatatatatatatatatatatataaacccttttcatcgtaaactgactcacacgtattatgaataataactccaagtttgacagtgtcataattttttttactagggagttgaggtggtggacaatgaatacttcatcacaaaagaaaatgtaggaatgctcaagttggcaaaagaagccaaaaccattttggtacgtggattctctttctgattttgtgtattattattattattattattaaagtataggatggtatgggccaagctattgggactaacttttctctttttgtcctttgttttgggggctctacttgtacagtttgattatagaatcccagccacaggattggacaagtgtagcgctggtgttgacagcccgatcgtgatgaatgggctgccaataagcgtgtacgcacccgagacagtcgggtgcgtggtggtggacagtgatggtaggtgtgcggccgctacttcaacaggtgggctcatgaacaaaatgaccggtcgtataggtgactcgccactgattggtgctgggacctacgcttgtgacctttgtggggtctcttgtactggtgaaggagaggctattatacgtggcacgttggctcgtgaggtgggtgctgtgatggagtacaagggcttgggcctccaagaggctgtggactttgttataaagcatcggctcgatgaagggcaggctgggctcatagctgtgtctaataggggagaagtggcttgtgggtttaatactactgggatgtttagggcttgtgctactgaggatgggtttatggaagttggcatttgggaacagtagggctaattattgtgtcaggtttatattattaggtgggctacatatattgggagttaataagattgtattttctttccaactatgggttggtttggtggtgggttaacatattatgtcatgtaaaaatgttgacttttattatcaagatttgaattttttttttttttaatactaaaaaagtgttattattatctctattttatattgcataactcaagagcattgctattagcatcagtgttgcttagcaccttcttgacatgtcgtcttgcaattggttagcgatattcctcattaaattatatgaaatacttaagtgcatcaataacgatattgacaagtaagagggtgctagataattggtgcatttaacatttctcataactcaatggtgctttcctatgctaaaatcaaaagttttaactaatcatttaatgtgtgtgtattggctagctatgaaattctcattctgagctactcttaccactcagtggtactagactaaaaattggctaagtcttgttctttgattcgataggcacattttgtaaaaaaaatataaatatgtgctctcgaaaagaaaagacaaaagacagttttgataataaaaagaatcagaaatataaatatggcaaaatgaagaaattagaaaaacaatagctttacaataatccaaagccatttataatgcccaacacgccaaacatgaaaaaattaatcaattcaaaattcatttcttt

SEQ ID NO: 1193 - DNA, 1152 bp, Cannabis sativa
aagtgtcaattttgatatagtaatgaaattctattttgcctatggttggctgtgttaacctcattggtggtgtgttcttaatacagtttttcccatatgactagtcattgtttgtttagggagtatacattttaatgtttattattagcaaatagtcaaattttgaattgctttgtgactgagaaaaagattgtgtagatgttatagaaaatccctgtaattgtttttgtaatgagataaagatcaaatgatacatttgtaaaattatcttgtgaataatttctccattaatagaaagtaagaatgtcatagcctattatgactaaatttgtattacattgctccacagatattgatgttatgtattttttttataatatagtttttagatgggcagtcattcataattattaggaaacattcttacatgttctttatgcacatgaatattctccttcatatgaattgtaattttttttttgaaattataaactatagtttctgcatattttgtaaggttgacacgaatagacttgattataaaatttaataaataaaatatgaatattcttacaatgttttttaattatgaaatatatgaatatttttttactttattttctttacttttgtacaaaagaaataatttagttccaattttatttatttaagcaatgagagtatcttcaattatgttctctaaacacttctcaactaaaatagagagtggaacttacaaaatgagttctaaattctaatcatacaaaaagacataattttttataatagataatggatatgaatctctttaaatgtagagatctttttattttttgttaaatttttttaatattattttaatcaaaaatattattatttctctattattttataaaattaatttatatttgataaattttgattataaaataatattaaaataattaaatattaactatagtagagattatgattggaacaacaacaataaaattggctctctattttaatttttttgttattttagttaaaaaaaaataaagaatactattagagataggaactttaagtttcaacaaagtaaattgataatttaacatcaaagaggcttaggaattgagtctaatttagagtgaaattttgatatctaac

SEQ ID NO: 1194 - DNA, 2800 bp, Cannabis sativa
ggtaaattagatcacattgccaaaattgagacaaaaacaagattaaagatcaaatttttcaacatgggttctgatgaaattacaattaccgctgagttttagggctagccgtagccgaaacaccttctccggtaccatggtcagctctgtcctcaactcctttggtgtacccattaagcttgggcgagggaagagggcaatcagaatcccgagaaggattagaaccagccaccaacgatccctctttccggcgacaaacaggggaaatctccggcaacggaaggggttgaggaagggccgaagcagaggaagaacgagtgggtatcctatcatgactactagcagatttatgaagaccccattgggaatcagaccatttggattgtccagaaccagaaacaacatcacggtcgcttaaaggtcgaaactttctgtgacgagagctctttattcttgacccgaatcgccatacccgacgatcccctgttgcagaagaagatgtcttgttcccagagtcaacggatccgggtcgggtcggagaagctctgagagaggaagaagaagaagaagaagaaaaagatatggtgggtaaccaacgcatagctgaaaagcatttgggggtgattaattctaacgtagtttcaacaaaagggttatagaagattatgaaaagaaaccaccatggcaatggcaatgacaatggaggaagttggttgttgttgtttctggttcttctggttatggttatgggttcttttgagaaagagaaagaaagcagaagccgagtggctatggaagacgcggtttgcaacgtactcccaaaccaaacgggaaagaaagattaattgtctcaattttgagaggtcaatcgagattttatattacaaaagaaacaaaaaccaagtcaagaccttttgcatgtgtaagacattataataattaattttgttttgtactaaattttctgtttattatttaatgaagtttattttatgttgcgtacgtaagcaataataacaattaactagtttgttgtagtttaccgccaaaatagaaactatatttggtttgatctaaactgtcataactatctcttctccaatggaacaaacaaaatatcatatgatgtcacttttgtacgagaacaaatttatgttattaccatttgattttgttaatcctaattaggttgttgtgattgtaaatttttaataataataacgtcaaatgtacccacttggcataaatatgggttttcgggtgtaatatatattttttaataaattttgtttaatcgattagaaattaaaaggcaaaaaagaaaattttcaattaagataacaaaaaaacaaaattgttactgaataatttaagtggcggatttagtaatatttttgttttaaatttttaatcttaaaaataaaagtaaaatttttttaaaaattttatttttgaaaaataaaaatatattttataaaaccacttttatttttcaagtttaaaaataaaagtctattctataaatttcatttaaatttgttgattttattaagttaggtacgggagcgggattagggtccatgtttgggtctaggtccaggtttcaaggtcaaagttaaagtagaagtccaaaatattactttaaaaaaaattaaaagcaactttttttgttttacagttttatataacattattttagaaaatatttttatttttttaattttaaaaacaaaaactaattaaaatagtattaccaaacgcacccttaaatattattattattattattattattattataaaattcactttgttttaacattataaaataaataccaaatttgaaacatatatatgttctcatcaagaatgcaattaattgaatctacttaagcaaaaaaaaaaagttgaatctcaaataaattaatgatagagacacttgcataatttttatacaattgtatgtgtattaaattctagtaatgtgaattaataatttaaattatataattgaaacaacaaattaagacaaatgtaccattgaaaataattgttatgacaacttagtgtgaaaacaataaaacatgcacgcaagtaattccaacaagtccaaacaaatttaatgtgcaatctttttcatatataagttaaatttgctgaaatatactttgtaaactatcttacaaactaatttgtttcaaacttgcatataaatatataaagctaatttaaaatgaacaattaaaatttgtcctccattataaaaaattctacctaaattataaaaaaaaattaaataaatatctagatttactttaattaatttagtgcactttaaaagtctacaaaaaaataaattcatattagcatactaataataatttataacaataaatacgtattcttaaaatttatattttgcatgtttaatattaataaattaaattttgaatagtttaaaagttattatataaactcttcattgcatttatacctttgtccaaggaaaaataaaccaattgttttaataaaagaaattagcaaaatgtaagtaaaatgacgtatttgaaacgatatatataatttaaaagaattttgtgaaaaataaataaataaataaataataaaaggcaaaattttacaaaagtcatatttttttaaataaaaaatcctatttattctttaaaataaatttataaaaaaattgcgtaaaattaataatgtttttataaaataacattttccctaaaagtattttttttttctctttatgtaattttcttgcccaaatttagtaaga

SEQ ID NO: 1195 - DNA, 1874 bp, Cannabis sativa
catctcctcctcctggtgcgacagctacaccaacagccggagcgagagcagcggggcttacgcccagcttgtcctggagaaagtcgaccaggattctggcctctgctagcgtgaggctggagatctcatccccgagcttctcaattttctccggggccgcaacgcaggcgaccgggcggagttgagtggcgcggtgtgtggtggtagcggtgagggtagggttttgggggttgaacgggaatttaaggactgcgggtctggaggagatgtgcgtaggattagagaaggcatttggcgtaggagaagatggagagcggagcgtaagagctgagagagtagtggccatttctctgagcttgttctctacacgaagaagaagaagaagataggataaggggatagaggaattaggagggtgtaagtgggaagagtgtagaaaatgtatatagctactgagttttctacttgttgacggaattacccctcatccatttctacaaaaacgatcttggtggaggtcataaaggtatttaaaatcctgcaaattgatttattgggcctcatctaatggtccggaaaaaagaaaaaaaaagaagaagcaaaacatatgaaaggggcattccgagaatcgaactcgggacctctcgcacccaaagcgagaatcataccactagaccaaatgcccgctttggacttctatttacttaattaatatatagtaaagttaatttattttgctggtgatgatcacaaatagagaatctgaaatattttcactatattgtgattgaaatgtttatatttagtgttcatagaaaattgtcgattattgattttaggtttactatgcatgatgtaattgagaaaatgtgaacatgctcaaatctcctcaccattgaattcagattttatagatcacattagttgaagaaaaaaaaaagtatagatgacatattttctctacatacgtggtagtcagatacatttgtgtattcattcatatattgagttctctgcctgaatagaattttatcaaaatattaactcaaagagtatttcaaattcaaactcctttaagtcctattcatgcagcaacatgggtgacgagctaacgcatgaagaaaccccaatgccttgcaggattaatagcatcaacaccttttcttaccaccttctgtgcctcctcctcccataccaatatgcaaacgcagctactgaagcagccacaagaacacccgctgttgcgtgccaaggatagagtgttttttgaagagcgaaatcaggttgaggaattgcagcgacagttggctctggtggtttttgactaattgccaatgcaaagcccagacctcgcctctccaactccgctatatcttcaattactggcttcagcctggtggccttggctatagtttcatactcctctttggttccaccttcaagaaaagatcctacaagatgacccttgtggacccagtaagctccaaaggtgcttccagagaaatccccgaagtggattacttctccagcattgtctccataaaactgccaggacaaggcgaagactcttgagtagaagaatggtaggtagtcatattcacccgctttgactggttccattattacagccacagcatgtcttgcagattttcttgctgagtcaacgtgttcaagtctacggatttcgccaaatagtttgactggaaatgctgcaacatctcccactgcgtagactgagctgttgcttgactgcaactttccgttcactttgattccacccttctccaatgttagttgaccttcgaacaggcttgtgttaggacggattcctatccccaccacaaccatatcagcaggcaggtgagttccatctt

SEQ ID NO: 1196 - DNA, 1571 bp, Cannabis sativa
tttttttttttttttgttttatgtgaggcagtttgaaagaattcccttctgcttttacagctactgtaaaagagttggatgctttgatggcactagatgatgcacaactgaaagcctgcctggaatcctatcagcatatggattttgttaaaacaggcccctttagagcccttcaagttgtttcagtattcctttatactctgcaatgtttaataaaaaccccacaaataaaagatttcgaatgtatggatgatgaacagaaaaatttggtaagacaattggcattgacggctacattcattttcatgggacggtttattgacagatgtttaacggcaagtacattaaattcttgccctcttttacctgctgtgcttgttttcatcgagtggttggcattcatgcttgatgaagtggaatgttgtgtggttgatgagaaaagctgtaatgccatgtcctacctgtttgcttcgtttgttaatcttcttaggagatttgacgtcattagaaataaaggagattattcagatagtagtcctctgtgggaagactatgaactgaggggctttgcacctgttgcttctgtacatgaatcattacatttctcatctcaaatagagcatataaataattttgaagatgtgactgaagcccgtgctcatcgaatcatcaatgctgctataagaatttcaaagagatcaaatgattctcggaaatggataatctatgaccagttgagtgggaaattcagtggtgctcatgaggttgagttgaatgacattccatacagaagagatttggaggaggcagagtacactagttctgatcataaaacagaactttctaacgagtgttccttggaagaatctcagaaacagatggaactggaaaatttaagagcaagcagaagttctattactgttgaagaggaagaagttattctcttcaaacctcttactagatacaattcagcaccacttagttgtaactcgagcaatccaacctctccgaaagaaatagagggttcaagtgtatcttcggatgactgcttacgtcgtgctacatcactccttatagcacaaaaccaggcccaaggtagttctttatctgagccggctgacgttagtaactttggccagaagtcatttaaacatcaaggtcatattttcaaggacacaggattgcagccattcccagatcccccaatctctgctgggcctccttcactcaatgcttgggttcttgacagtgggagttcaaacaaaagtaaagacaaatcatataatggtgctaagaaacatgtactgagtcctatagaggaagttgcttctgaatcattatgtggtctctccatgaccgaaaatgatgattctatcaaaactcatccattttcaaccacccattactctccctcaccttatgcagctccagtaccttctgctcctcttcttccagctgatgcagcttgggttaaagacgctcaatctagtgttggtagcagcaaaacctctgagagcctcaacataacagaaaccttgttcaatacatcacacacgagcagcagctatcct

SEQ ID NO: 1197 - DNA, 2536 bp, Cannabis sativa
atgaacctgataaatcccaagaactttagctaagcaagtttggttccccacttcaaaggaagccttcatgtacttgaagtaatcctcagcaaacttcataaacgattcaaattcaattttcctgatttcttttataatcaacctgtcatcaagagttttcgcgaaaaaagcgttgctcttcccacccttagcatcccagtgcttgcagcggctaagagaagtaatatagtcaacctcagattgacaacacaagtttctgagatcacgaaactggttggcgtagggacatacaactgtatatcgactctttccaagtgatttttcaaaaccgagatgaaccaccggattgacagttccaggaggtacaagtgactccagcaaattcaatccatcaaaactcgagaagcgagactcatctagtgaaacacttggtgttaagtggactgaatcagaatcagtggaagtgtttgaagaccaacgtgaggaagtaattgaagaaaaatgaggaagactgtacgaactctcgagagatttcatactaacatcaccctctttcaacaatgccaatgcacaagcgattatactagagagttcgccctcgtaatctgaaacaatatctgtcccaagaggaatgtgcagtcttcgtccttcttcagatatcagttgatatgcttcgggtatattttccctagtatagctactgacagattcgaatttctgaaagtatagtctttgaaggtccctcatttctaaaccaattatctcagcaaatggtgaccagaaccatccctttgaattttctgagtgatgcaaaagtgaagtctctgaaacatttttcttcagtaaattcaaatcagctacagaatcataactgctaacatttgggaaatttgtttttgatctcttcacttgtaggcgatcagaatctggttcgttatctgcctcagaatcctcagaatgatagttgtcaggtatcacaacagaatcttctctggacaattctttcgggcttaactcaccctcaatggggatatcaatactttcatgaacaagagacacttcacctggatcgctagatctagattcgtcaaaaggaccttcaatcggaatttcattggttgaagagtcatctacatctgcagaggcatctaacttcaaatttagttcacctccttcgatagtcatctcagtatccaccttcacttctggtgcaacaccgttgctctcttgtccttgaatttttttcccatcgacactagaattagcaatgacgacgatatcacgagagagtagggaattcatgcgcctatcccaaatgcaggatgataccagaagttcccacagtaatcgattcaaactgagaagtctatgagcagtctggtctgaattcccattctttgagaaaattttctgaatattttcctgtttaaattacatattaagtgtaagtcttacagaatacccgaaaaaagtagttctagcatacacggaatttaaggaaaagaactaaagaaattaacatgagtttagtttctattaacaaaataaataaccttaaaaaactaaacaaactgcacaacaaatcatgggaaaccaaagctcctcaagaaaaacacgattccaatgtatgaaagcgtttacgactaaatgcaacattatagtcatgccaaatccaaacttttcacaaaagttccctgaacatatttaggtgctgacctcaaattctgatctttcctgctttaacatatcctcaatatcggagaattcttttatagaaccttggagatccaaagacaagccctcaaattgggatttgagttcctttaatgagtttgaaacctctgtaaacagcaatatccctttcgtatacacctttaagaaattaaaagatcaacttaatgaatagaggaaaaattaaaagcatcataacaaacaaagatagaaataaaatgaaatttacattctcaatttcatccctaagaacatcttgcttaattgtatggctgagctgcaacttctgaggtggcacagccacggtataaatggcaactggagaatacctaaataatgcaaccatgggacctaacctgtgacatgttgaacttatttgataaggtcactatctaaaacagaaaccaattgaaagcacaaatgaatgatgaagaatttaaatattttttttttaggaaactaattatgaatcacatacaattctggtgctaatatctgaaacagtaaactatttgctaatacaattctaatttgttcaataaatacaatcccaagctgtccaataatatatgccaaagttcacagagaatacatacccgaagaagtagataaagtccctatgaaatgaatggccacagctagataatctatgggatgaggagtgttgtgaaaacccgagctccaaaaactttccaagtgacaatttactagcagcagtggagatcaaaactcttttcgtagatttagttactccatctccatgtttgcacttgccacaacgactccacatccaaatttttccttc

SEQ ID NO: 1198 - DNA, 3601 bp, Cannabis sativa
ggggcagctgccccaatcggcatccgagtagccatataaggtgaaaaaaggtgttggtttgatgagaaggccctctgtaagtgtgccttttagatatcgtaatagtcgtttagtggcttcccagtgagttgtagttggtgcatgaagaaactgacttaatttgttaatgatatatgcaacatcgggcctggtcagagtgagatattgtaaagcgccaatggtgcttctgtagagatgaatgtctgggaaaggatctccaacagtgagcgagagcttgtgagcagaactggttggatttgcacatggtttgacaccatcaagatgaagtttgactaagagatccgtgatatactttgattgagagaggtacatgcctactgagttgcgtacaatttcaacacccaagaaataatgaagagagccaagatttttgagagagaaatgagtgctgagatctctgatgagttgttgttttagttcagtatttggggaggtaatgagcagatcatcaacatagaccaaaagcaacacaagtttggaacctgaaccatagataaagagggaggtgtctgactttgattgaatgaatccccaatgttgtaaggtcactttgagtttgtcattccatgcacgaggggcctgctttaggccataaagagccttatttaacttgcaaacatgattggggtaagaagcatcaacaaaactagctggttgttgcatatagaccaattcatttaatgtgccatggaggaatgcattgcttacatcgagttgagtgacatcccaacctttggacacagctatagtgaggactgtccgaaccgttgcaggctttaccacaggactgaaagtgtcctcaaaatcaataccaggagtttggagaaaaccctttgcaactaaacgagatttgaatcgatccacagaaccatctgcattgagttttatcctatgcacccatttattggtaagaacttgcatatctggtgtataagggacaagtgtccatgtattttgtcgtttgagcgcaatatattcatcattcattgaggcattccatcgagggtcagcaagagcttctttgactgttcttggttcagatggaagcaatctagatggaagttggtgtttggtggccatgtatgattttggtttgaagatgcccctttgagatcgagtagtcatggcatgggtgcgaataggaggtgcagtttctgaagtggcagctgtggtggagcctgtactatggtgggaactgctgggagttgcagaaggatttgtagaggaaaaagcaggacatgtggtttgtggttgatggttgagagatgtgctttcatcactgggaagtagagatatggctgagtcattattttctggatgagcagtgggaaaaacagtggtgaagttgtgactaggcagctgatatgagggagttgtagatgcagagtcgggtgttattgtggttgttgtttgattggtaggaaaaatgaattgttgttcattgaaggttacatcccttgcaatgtatcttcttcctgtagaattttcacaaataaagcctttgtgatttggggaatatcccagaaatctgcaagcttcagatcgaaaactgagtttgtgggagttgtatggtcgaagatggggataacatatgcatccaaagatcttgagagacttatactcgggtgatttgtggaataagcattgataggggttgtcatttccaagaactcttgtaggcattctgttgatagtgtagactccacattgaaaggcatgccaccaatacgacatatcaagattagcttgagctaggagtgtaagaccggtttctgtaatgtggcgatgttttctctcggcacgaccattttgttcatgtgaatgtggacatggatgctgaaagtgaataccctgatcctgcaaaaatttagcaaacactctatactctcctccccagtcagattgaacagatttaatagatagggaaaattggttttcaactagttttttgaattgcaaaaacacatcataagcctgagatctaagtgtaagagggaatatccatgtgaacctgctaaaatcatctataaaatgaatatagtacctaaaaccatctaaggatggagtttgagatggcccccacacatcggtatgaattagttctaatggtttagtggctctagtgtatgacagagggaaaggttgtttgtggcttttgcccttttgacatgcatcacaaaattgtagatctttcaaggaggtagggagagataggttggataaaatttgttttaatgtgtttggtgcagggtggcctaattttttatgccatagattaacatcacaaccagcagtagttaataatgcttgagattcaaattcagaagaaatggaatctttattgatgatttgattgttacaatttgttggtgagctaatgctcatagtattgagtttacaatcagatttacaaacattattaatactgctagaagtagcttccactggcagagttgatttcgaaatggtggctagttgacattgaatggcagcttgtgaaagctttgagttgttttcctcaagcacatacagaccactcttaagtttccctcgaaccagtaccttccccgtgtacttgtccttcacaaagcagcaatttttatgaaactcaagaaatacattgttatcatgggtgagtttagatacactaaccaaatttttggtaatagcagggacatttaaaatagactttaatttcagagatggagaggagttagagtgaatgaattttttgccaatatgagagatataaagttgcttaccatctccaactgctagtgtctcagatccttgatagggtgtagcactgtctagatgctccatgccaagagaaacatggtttgtggccccagtatccacataccatcttgtatcatcaccaaaatcagggactgatgtagttgtgtagacttgagggtcattaatttcaggtgattcttgttcagcaatataggctttaggagagtgaaaaatgttctttggtgtaacgaaattcttatcaaacctataatgacagatcgaggcagtgtgcccaatctttaagcagacttgacagatcggtcttgagttggaatttggatatcttggcggaaaatttgtttgatttcttgctgcttcattcgaattcagtcgcccttgctgatatggagttctgaaattgttattcctgttgttgttgtacccgtttcttgaatttccaacagcaagattagcagccattttgttgttgatatcagaaactgagtggtgcctttcgagtcgacattcatgggccattaacagtgcttgtatttcttcaagactctttgattcattgctggaagtgattccagaaactactgaatcatactcaggtccaagaccattgagtagttgcaactcaatgtcttgatcattaacaacacatccagcaatagcaagattatcacagatagattttattttatcaacataatcagatattgacatgttacctttctggatgtttgttaattggccctttaattgcagcagccttgcctttgattggcctgagaatttt

SEQ ID NO: 1199 - DNA, 2258 bp, Cannabis sativa
  modified_base (297)..(308): a, c, t, g, unknown or other
cgtatgccatttgtcttttatattttttactcttgaaaataatagtaataagaaaaagaaaactaaataaattcacaataaaactcaaagtattaatcttgtttttggttcttttactaatttgtttcattttttaaaattataaatgtttgttttgtcttgtgtaacatacacaaccaattatctattaatctatttaggctaattaggatttttgtcccttgaactttaacatgtaccaaatcatgctccctgaacttttaaggtcattgaatgccccctgaactattgagattnnnnnnnnnnnngacttttgtctaattttattcaaagttcagggggtatgatttggtacgtgtcaaaatttaaggggcaaaaatcttaattagccatctatttatataatgttggaatataaataactaagattgatactttttttatgcaggggccgactggtttgtctaccgaaacaaatatggtgttaggtgaggtggatttatttgtagatattaaaattcatactgattattgaaaaatggggatggggttgtgacatctagtcctaatggtcatgtcttcttctttagtgtatttctgaatgtagggtctttcaaagtattagccttgtttttggttcttttcctaatttgtttcattttttaaaattataaatgtttgttttgtcttgtgtaacatacacaaccaattatctatcaatctatttatataatgctggaatataaataactaagattgatatttttttcgcacaagggccgactggtttgtctaccgaaacaaatacggtgttaggtgaggtgaatttatttgtagatattagaattcatattgatgattgaaaaatggggatggggttgtgacatctagtcctaatggtcatgtcttcttctttagtgcatttctgaatgtagggtcttttgagcctcacgtggtgaaggccaaggctttgctccacagtctctcactttgcctgtaattgtgatatacgtctgaaactgtttgctcagatcacttgtgtttggtccttatgattaatagtcaagatattcatttcaatgagtttgatattatacttaatgatattgttcatatttagaattctcttagtagtattttttatctcattgtaaaaggtctaaaaaccttacggctcattcattagttaagtggactcttaatttagacgaatcacgtattcaatggtcgtgcctccctataaatttagttgtttaattttcaaggctcctttatacttgacccatttttggcttgtgccttggaattatttcgttttgaaaaaaaaaaattaacaaaaaattagaaaactagattaaataaaaataacgataaaagcaaaatgtgtgttacaataacatcaaatgactctgtggcccaatggataaggcgctggtctacggaaccagagattctgggttcgatccccagcagagtcgattccctttagttttcgtatttttttcattttattttattatttttcataaaaatttagtaagaaaaaaagaacctacgtgtcataatattatatttatcacaactatatattaatatcatttttccttcttttctttctcttttagcctaaaagcacaagcactgtgattactagaagagctaacatcatgattgaatacaaggttgatttacaagtgtcactatattactatacacttcaaaaccaataaatatataaatgagattggacacaagttttgcctagcacttttagacggatcatctggcaattgattaacgatactttttaaaaaactattacattgaattatatgagactcgatacttaattgcattaataacgatattaatatataggagagtgttagatacttctggacactagtatcttttagtatttttgatatataaataatgatcattattattgggtaccagtagtatctagtacttttaaacatgtcgtcttgttattgagtatcagtgttgtctagcactttttagacgtatcgtcttgcaattgattaacgacactctaaaagctattacattgaattatataggactcgatacttaattgcacaaatagcgatattaatacataagaaagtgctagacaacactggacactcgtattttttagtatttctgatatataaataataagcattgctattggataccagtagtgtctagtcactataaacatgttttcttgcgattggctagcgatactc

SEQ ID NO: 1200 - DNA, 2565 bp, Cannabis sativa
tgtaagtttcccaattttttttttaatttttaaggattgttttaggttgttagtatatatattttgttttacattatatttttattttttttatggtatatttttcttaagatccatttcaactcaagacttaataattgtttttgtttgatatacagttgacattatctgggttgttaaacttcatagatggattatggtcaagttgtggagatgaaaggatcataatattcaccacaaaccacaaagaaaagcttgaaccagctctgttgagacctggtcgaatggacgtacatattcacatgggctattgtacgtacgaggcattcaagcaattggccacaaattacttggaaatctctggtgaccatcacaaccacaaacacctctattctgaaattaaagctttactcgaacaagtacaagtcactccagcccaagttgcagaggaattcttgaaacatgaagatgctgattctgctctagatcgattactcagtcttcttagacgaatcaaaaataatgtggaaactggtcatcttgatcaactagatcatcactactctgaggctttatatgaataattaattaattgcatgattatgtatgtgattaagtaattgagtgattgtaacgctttttttttttttttttccgaaagaccagaatggaatatttttatttagccaattaggtttaattttgtggtttaaagtttgatctaataatttagggatatagggcactatatgatgcccaacactatcttggtattggttagtgcatgttaagtattaaatttcaattatattgtattttatgttaaaattggaatacaatactaaatggggtaattggtaaattttacaaaataagattcaaaaatggtatttatcttaatacactaataatattagttagtgtgtcaaatcaaatagtgttcgatacaattgtcatttagaaagataactctaatcaagattggctcttttcctctagccaactgaataggagccccaagagtttcaaaaataatattatttatataaaattaagaaaaataccttttttatattcaaatataaattatgtttgtttaacatgtcttaggactctaatgtctcagggccatatatgaccctaatcaaaatacattttagctaggtatatgagaagttgcttactgctagctacaccaaatttaagtctattttgctaaagagcattgtcagtgaatattagtagtgtttaacttaggagtaatattctataattaattagtgatattttttagcagtcaatatattaattatgtagacctaatacttaattagattaatagtaacaccatacttaataaacaactaatataaatgtatatgacacgtcgcaggtgacaaaatctttggtatatcaaaccattttcctatttaaggggtaattgtatggtgataattattgtcacctgtctaaactttactaactttactatattgttaaagaattaaggtagcgtttggttggaatgaaatagaatggaaagaaaataatcttcatttcgttcctttgtttggttgtatattaaagtgttagaatgtcatttcaattaaataatattttcactattttggtagaataactatttcattttaaaatgaaagaaaagactattctaaagaaaaaaattaataatttttttactaatttttttttatgtattttaaattttattctattcaatttctatttttatttatattctcattcttatttttatatttttatttttttcaactaaaagtaatctaagtgtttatttttaagaaaaaaaagcttactattatatgcactccacgtggtctttttgccgacacttctaacaaagtggcgtatgagaagatgccacgtagtgaacaggtttgtttagtttatgcacatgttatctcaatagtctgatttccacgtcactttgatgtaaataaagtcccatcactaactcttgtagcagcgttattggtggcattcttatagatcacattttagaattggatgacattaatagtgatatgataagggatattttctttttatttaagcgtttatatattacaacatattttatctgagattcgaactcaggaccttcaacactcacacacctatctatggccacttaagctagcctcaagtagttaatatgataagggatattagacactactaacatttttttagtaattcttctaaccctatatatttaaattcctatattggccatgcatgttttcttcttctttattgatgttattatatatacgagtccacttttaatggatattacttattcatgggttatgaaaatttaaattttatgtttaatttttctatctaattaaaaaaatctcttatttttacattatatgaattaagattgttctattagctaaaataaaaaatcgtaaaaaaaagtttttcggtaaaaaaaaaagttaaatttaacttaacatttttcttatataaaatatattttaaatataatataaaaagtaatatattttgatattt

SEQ ID NO: 1201 - DNA, 1180 bp, Cannabis sativa
tttatgcctttaaagctctcttgcattttgaaaaattcatgctatatctagcattttccccactaagctcattttctttaatccgatcttcagactgtacaggcacagcaacgagttgagagagatgctgcccttgcacagttagagcaaagccgaattgttcttgcaatgagactggctgaacaccatggaaagaagtacaaagttattgaagaagctcttgctttcgtgggagatgtccaagaagctaatcaatttgtctctcccgaaaaacattatggttctccattcagtccatccggtgagaagttggaaagccatgaaagaaagagatctaacctcttgtataacttcttcatttcaagttttaatttagtgaagaaaacccttaaattggagtgtttcggtggtattttgggaaacacagcgctggttgcaattagcatgattgcattgctgcaaatgcaacaagtagcacacagggaagacaatcagaagcatgaagatattctcccccgaagggtaagaaaagcatcccgaatccaagcttcctcgtcacacgatagtttgagcaacttggatgtgctattggctaggggttaaagtgattgtagtacctgctttagtcaaatatatcatgacaatagccaagaccaaccataaagaagaagaaaaagttttgtacgttgcatttatattttttaacacgagagttaaaaagagcaattgatgcatcattcgagaatgcttatcaagccttatatttttcttttattagtgtttctttaggttttccttatacaggaaaaagagtcttgttgcttgttttcttgaagtatacagattattaacctcttttcctcactcgaagcttaatctgtatataacaagggctgattgatcctatctgtttgtgaattgatctacattccttatcaattttacactagtgtgatattatttatttttttttttttttttttgttacactagtgtgatattattaaccttgcttcaaccttataatatgggtaaacatatggaaattttcatttttatggttcttttggttaaagttatagaaaaagttgtttcttatggtaacagttttaaaaaacatatcttatgggaaaaagaaaaaaatagttttccactcattttgaaaaaaaaaataaaaaaa

SEQ ID NO: 1202 - DNA, 4397 bp, Cannabis sativa
aaatgagatcacggacgaagtgtaagtcgatctcaatatgtttggaccgtgcatgaaaaactgggtttgcagcgaggctagcagctccttgattatcaacccatataatgggagcagatggcaagggaatgtgaagttctgtcaagacagaggtaatccatttcacttcagcagcacagttcgccaaggctcggaattcactttccgtgctagaacgagcaacaacagactgtttcttagcagaccatgatacgagattgccaccatagaagacggcatatccaccagtggaacgacggtcatcagggcagctagcccaatcggcgtcagagtaagcctgtaaacagagtcgaacggcaggtttgatgagaagtccttgattgatggatcctttgagatatcgaaataggcgtttgcatgcttcccagtgaactgtggtgggagcatgaataaactggcttaatttgttgacaatgaaagcagtgtctggccgagttagagtgaggtactgcagtgccccgagtgtgctgcgatataggtgctggtctgaaaatggttcgccattagtgagagaaagttgcagagcagtatttgtgggagatggactcggcttggcaccatccatatgaagcctagtgaggagttcggatatatattttgtctgggaaagatgcaaaccagatgatgttctgtgagcctcaacgcctaagaaataatgtagagcaccaagatgtttgaccgagaactcaatgttgagatcatgtataagcttggtgatgaggttatgattaggacctgtcacaagtatgtcatcgacatatactaagaggtagactagattagagcccgagccatgaacaaagagtgaactatctgacttggaggcagagaaccctttgcgattgagagtctgtttgagcttttcattccaggcacgcggtgcctgcttgaggccataaagagccttgtgaagaaggcacacatgagttggtttttgtgggatcaataaagccgggggctgttgcatataaacagtttcattgagtgtcccattgagaaacgcattagaaacatcaagttgttgaattggccattggaaagagacagcaagagtgagtagcagcctgactgtagttggtttaactacaggactaaatgtctcggtgtagtcaatacccggtgtttgagagtatccctttgcaacaagtcttgatttaagtcgattaagggaaccatctgcattgattttaatcttgtgaacccacttgtttccaacaatggtcatatgaggttgatatgggactaaagtccatgttttgtttcgaacaagggcatgcatttcatgatccattgacttgtgccattttgggtcagcaagagcctgctttagggaagtaggggctgtaggtaataatgactcgggtaaagggtgatgggtggagagataggctttgggtttgtgaactccacttttagatcgtgtttgcattgggtgagtgtttgagatgggtgcagactgtagagagggggctgtaggggatgttgtgggattgtttattgggtcgggaatgggagattgttgtggctcagtgtttatgggagtggattcaggagatgttgcagcagaaatagtagctgagggagcaacagctgccagttgagagggagaaccattatctggtgttgcagtggctgctgcatcatgatgaaactcaacaggatgggcaccagaggcattattctcagcacaaccagaagttgggttagaaactaatggagaagtattaaatgtaacagtaggaaatgagtgaaaggagtgagacgatacctgatctgttgtggcagtggcaagagcagggtaatcatcctcattaaaaataacattgcgtgcaatgtaaactctaccatctttgttctcacataagtaccctttatgttgcaggctgtatcccaaaaatatacacttggtggatctcagattcaacttatttggcagatatggtcgaagatgagggtaacaagcacacccaaagcatttgagaaatgtgtaatcgggtgtcttgtgaaagagacactcatagggagatatgttgccaatcacaggtgttggaagtctgttgatggtaaaaactatcgtattaaaagcatgccaccagtattctagagacaaaccagattgagcaatgagagtgagccccgtttcagcgatatgacgatgttttctctcagctcgaccattttgttcatggtcatgagggcaagggtgctgaaattgaataccatgttgagcaagaaaggaagcaaaagacctatactcacctccccaatcggattggactgccttgataggaagttgaaattgtttttcaactaaggttttgaattgaaggaatgtagtgtaggctgcagattttatagttaaaggaaaaatccaagtaaacctactaaaatcatcaatgaagtgtatataatatctatatccatctttagacacaatatgtgaagggccagtatggatgagttctagaggttgtgaagctctagaagtggataaagggtaaggcagtttgtgactttttcctttttggcaagcttcacagaagctaagacctttgcgagaccctgagatattgagttgggatagaacttttttaagggtgttaaatgcagggtgtccaagtttagaatgccatttatttatgtccatagttttggtcacattaaaagcaacagtagaactagtactaggaattgaagaatcaaaggagacatttttattaactttgtctggttgtttacaagtaatggaggcagtagaaactgccttattggtacagacattgggtacagaatttatatctgaagtaatagcagaactagtactagtttgtttagaagctaaatgacattcaagatgaacccgagattgaaggaaagtgtgatgagagagtgtgtacagaccatctttctcccttcctttaagcagaactgtccctgtgagtttgtccttaacaaaacaataagaagagtgaaattcaagaaatactttgttatctttggtgagtttggaaatactaataagattcttggtgatgttagggacttttaaaatagagttaagttctaaatcaggggatgaactatatgtaggtaataaagaatgaccaagatgagtaataggtaatctcttaccattgcccacagctaaggtttcggagccagagtatgggatttcggtatcaaagtgttccattccttgagcaacatggtttgtggcaccagtgtcagcataccagtcatgatcaacaccaaaatctgggactgtagtggaagaatgagcttgtggttgttctgtatcgtcgagctcagtaagaaaggctttggactcattaattcttggtgtgacaaaatctttgtcaaacttgtaatgacagacagctgcggtatgacccattttatgatagacttgacataaaagtctggtattggagaacccaggtctgctatattgtcgattggggggtcgataattgttggagtagttcgaaccacgcccagggaagccattcgatcttggagggccatgattgtaggaccgaggattggatacagtgaggttggcagccatttttgtggaaagatccccaatattgtaatgacgttccagtcgactttcgtgagtaagcagcagcgattgaattgattcaaaggagagattgtcgacaagacttgtaacatggaccacgacgggatcaaattcggggccaagaccgttcaccaagtgcattatgagatcattctcatctaagggatgacccgcagttgataaagaatcaggaagaaatttgattttatcataatagtcagatatagaaaggttgcctttggtgatggtggacaattgggatttaatctgaagaacacgagccttggactgactagcatatcgttgttcgagggctttccaaactgagttgcaagaattgtgctgggctatggatccaagaacggtctcaaacatagacgaacggagccagctgagaagaagttgatcttttcttctccatgtgatgaattcggggttatcagcccttggaaaccagtttcgcaggaggggcaactccagtaagtagaatatcgtcaaggccatggccgatgacggtggggataacctgcgatttccaagcaagaaagttggttcgatccaactttaccgtgagagatgaattgagggaattctgaaacggattccattgagatgaaggggcagaagcagacgctgcaggagctgtagtggtggtggtagcagaaggattttcaagaacaccaggatccatggaagacaactattgccaatggctatctgataccataaagaagctatctatacaaaacta

SEQ ID NO: 1203 - DNA, 3033 bp, Cannabis sativa
  modified_base (1740)..(1741): a, c, t, g, unknown or other
attgacgtgagaaactggttctcaagctatgtgtatgaatctccaattttggatactgctgatggtttcaaagattctcttgctaaggagactgaatgtgaaaacaatgagtttatgtctgaagagagtaaaagaaataactatagagagttcaggagaaataaaagtagtgatgatgctgaaatttcaaatgggcttggcgactatgacaacaaaacatgtgaatattacaaacatggaaaacagtcttctgacaaggttcttactgctcttatttttttggtccctttgttgatggcttttgtttctatttttgaaatgattaaaagctatagttattgtgagttgggttctgagaatttgtaccataatgaataagattaaaactatttcattgttcctcactagtcactactatcatgtttgcaaattacagaatgattcaaggagtggagacagtcaaaccttggcaagtgacagaggtgtgtgcattgacactgtccttacaaaatgcttaaaaggcaaagcactacaaaaccaggaaattagtccagctaaagatgttgagttaccaaatttggatcaagaagatcacaaaggcaaacaaaacttatctaaagtcattagtattgcggcgcatacaagaaaaaaagttggagaatcttctgaagagttggcacatacaatggagaatgttaaggattcaaaaacaaatggtcacttggaagtagaagctagctttctatcacctaagagtggtaatccgaagacagatgagcttatggtttttgcagcatcaattgaaaaatcaactcatggatgtgaaaacgacggagaagaaacttcaaaagatggttttgtaacaacaagaaaaggtagatttaacaaagaaaatgaagaaaatctatttgaattgccaaagaagaagaaaagagggacagattcattagctggtggaagaagttctgttgtagaagtacaaagaaaggctttagttgaaagaacaaactttactctctctggggtacctgaggctactggaaaatggcaatgcccccagaaaagaaagccaaatcatgggccaccattgaaacagcttcgccttgagagatgggtccataggctgtgagagttcccaactttgactactgtaaagtcttgcattaggacactcttaggctgatgatcatgtcataacgtaaccccagttggtccttgtgttaggttaggtgtaccaaaaggccaaattaaactacaaataacacctattttctaagtttcatttgtaaaatcaaatgtattgtattaggagcattgctaatgatgtctaaacactactatgaggtgacacttgttagtaaaatttcataaagtttattatatattttaattacttataacaataatgatatgaatatattgggtagtgatggtgtcttttaacatttttttattgtattgtatttgtatcttcaagatttttttattgcaataggatatttatatgattaaaacaaaaataatttagtcatattaaatataaatttgattaagattataagaggatggttttgtattagtttgtcaaatacaattttcacaaagcagaagggctgtgaactagtacttaaacaaacaagcggggaggataataaataaagtgatattatgcattataataagtattttgttccagtattacaaaagaattaaacgattttattattattattattattnntattattattattattttgaaggaaagaacttttacaattatacaattaaataataaaaattgaaaaataaaaaaacaagaaattgaatttgaaaaaatatattactgttgtatatttaatatctgtatttagaagaaacagaaaatcatggaggtggtatagtttcaaaaagtttccaaaaataaataaaaaattatcatcaatttgtagataatgtttttaataataaattaaaagttatgtatatatataacaaatttgattatatttttttagtcacacaaattactacatttagcatataatttttttgcttaacacatttagtatataattaagtctgattttttattatttacttcccattattgcctttacagggaagaattaagaatatgtgaatggatgtcttctgtaaaacttccctatatggtctacgaatttggaaaattatctgtcagataaattttttggtaggtatgcaaataagaaaaatattcaatgggtatgtttttggtaggtataaattttctatgtaaaattttttcttaaaaaaataataataaaatatccaatgtataatctgcaaataagatgagtatttaatataattatttttggtaagtattgtctggttaatttttattagtaatttcacataaaaatattatttttgttatgtggtttcttgcctaaaaaattatatagtttttaatttaaacttctaattttgggcaatggtttatttcttatttcaattaaaagattatcaccactatcatatgagatatgagatatgattcagatgaagatgaagataatgttagaattggcctacaacaaattaattggcacctatatagatcattactcattagtgattaatgagatgaacaaaaaatttcttatcatttgattttttatttgaagatcatcaatttgaaataaaaatttctaactagtatttgttgtattttttataaagttcgattcttattcttctccatttaaataataacaataacaatttttaattagtacgattgtattataaaataatataaaatatataagaagaaaagaagaagaagatgaagagagaaagagaagttgaatgagaatttctcaattatttattccaatcttaaacaactttataacttagggatattttggtcaaagttatctaccccgaataatccaaccgctcccaatacaattctataactcattttattagtgtcatgatatcttaaccaccaattgatctccatgggtgtcgaacctaaaa

SEQ ID NO: 1204 - DNA, 2851 bp, Cannabis sativa
aattgcacataaacaagggtcccaaagaaccataatatctaaaatgctattttcagaaattaccagcccctggacatctagtattgtagttgaagaatctatatgtcttttagctgcaacagaacaagcaggaaatctctctctaaaagctttttcaaaaccttggacatgatatttcaaaaaccggtctacagtggtgacactcattaacttgctcggttcaattttgccgagtctttcaatataaacaggtcgtccccccttgtctataccatggtaaccatgaggatagaagcgctgaacttcttcatattcttcgtatacaaagtcctacaggtaaaagcattgtattagcactaaaacatagaaatattacacaataagcagatcaccacagcagaggtaagtcccaaatcctaaccaagattacatacaagcaaaggtcattttactaaaactaaaaattacaacatattaaacaacaaggttatgattacaacaacaataaatggctagtcccaatgaagagtacaagcattagctaacacttgaaataatacttttgcattttacctttacaatagaatctactccgtactcttctctccagttaagcatgtccacccacatattgacagttttgtcaatgtcaaacttccttgccttcaaaaatctgcacaaggatcgccgatataattgtatacaatcaaaaagttagtgagtgtcagagacctcaaaactaaagaaaaaaagttccagcgctggaacagtgaattaatacaaaagtgcatgggtaaggatcagatacatgggcatcctctgcaaaagcgtattgtttggctatgtcaagggtcatgttagtggatgctcctatgcaacctaagtcaagccaaaaacataatcgaaaatttatttcttgaaatcttctttatttgcaggaatttgcgcctttactgctatcatataaaagtattgtggtactcaaagaatcaagatcaacagtgtaagttaggtcactatccactctcaaagaagaattcttatgctctttcagttatagggctacaaatcttaatgatgttgaaatttaacagaaagcaaacatcttcactagaaaaatctacaattcgttgtttctgctttatagtgtcatcactctcaagtactcctatgcatccgcagtttcacaaatttgaaacgaacaccatctttatctgtcgatcattagtgcgtttataaatttcttttggcaaaagtacaatagcaatcctacctcagcattgtgtggtaatcatcaaatcgtgatgggagcaggtcctttgtaagcaaagtctcacgaaacacattcacagcttcttcttcctccgaatctctaacatcttcaatcgaaattgaagcgtatcgacaatttgcaacctttttaccgcgctttctaagggtctgagtcaatttcatggaagcattcatggtctttttcttaagagatctgccacgcaacctcctcctctcatcttcagatgtttcaatttcaaaagtcctagacttctcatcttcttgagcaaaaactacttctcctgattaaaatccaaacaatcaaatcaataacatatattcaaacacatgaaaaagtcaaaatcaaagctcaattttgttagttgaagctttcatatagacatacctggcattgtatcaaatgtggattaatatcaggatcgcttattacatctgagaaaggaaaaagaaaagtaaaacaatcgtgaaaaacacaattaacaccaaacgaaaaatccagcgattgattatgtaacaagatccagaatattctcaattcaatactaaacaaaaaacgacgaaaacctcaccaagattgtaatcaaatcgagtacaattgaatacgacaaaaatccggcaccacgactggtttgaaacaaatcttgaattatcaaaacccgatcatcatcaatccgaaccaaattatgttgaaccaaccacattcgcagaatgaagccaaaaataaatccagattcagagaattggatccaataataataaaaaaaaaatcagtgaaagaggaaaatgaagagtatagcaataagagaataaagcgagaatcgcataagcttctgactagaacggcattgattctctctcctcgtttctcaacaaactcctgctaagaaatgatgagagagaaactgagaagaagagagaataaataataaatcatttatatatgaaatgaaatgaaactgatagtgaagaagaagaagaagaagaggacacgtcgttatcaaaagcgttacaaaagagctaagagacgagacgagagaacgtagcgtgcaacggcaggtttttagctccgtcacctgttggactctgcagcttcaatctccttttctactccttttgtttttcttattttttatttataaatatttgacgtcgctgttaattaacggacaacgtttgtaaattaggtgatgtagggtacacagctacacgctacgcgcagccattaccgcaaaaataaggtcattttactgggtaaattaataagggttttcgcggtgtaggtggtactaattgtaccatttttttaaactaagctccatattcaaattttataatttctcaaattgcaactgtattgtaagatcttaaaactataaaaaagtatactgctaaaatatgatgtagtggtagtttaaatagtttatactattattattattattattaaatattataataaaaatttaaaaattattctaataaatttaaacaatacaaataaaaaaatattattaaagttataatattgaattatctcttaaacaactaatgtaatata

SEQ ID NO: 1205 - DNA, 1696 bp, Cannabis sativa
tttataaattagcaacttttatccaacaaaaaaatgttacaacaatgaccataaacaaagtcctgtttagacccaaaaaatttaataataatgtctcaaattataaatattgatgtggactattaaattctttgtgcagacctgaaatagttagaaaggaactgtcaagagctgttaagatgagatgagcatccatctggcagtttaaattttccagctttttgtcgccacgaggtgagatagaaataagtgcatgcatacataataagttgagaaactcaaatttttctcaagaaagaaaaaaaaaacactgaagttaatgcagctaaccaccaacttatccccaaaccgtgaatcacgggtattgaatggtggggaaggatcttaataataaaaagttagacaaatttgtcatgacaaaatatatgtgaaggaaaagagtttacttgtttttgtttgtaatatgtgtttttctttaagaaatgaatatagttcaaaactcaattcaaactatacttaatactaaacttaactatattttctctgctcagaagagaaaaagttgctatattaggccaaaaaacatctgtatgaaacattgttctactaatctctttacttagttagaaagaaacaagtattaggtacttttttgtttgagtcaagtcaaaaatgaaaattaagacttgcaacaatgactactgaaaacgtactaagaaacacaattaaaacattgccatagaaatttcaatttccactgtccatatccggaaggaggaaagaaagaaaaccatatgtacaagaaaaggcacattcaaccaaaaaccacctgaaagtgcaactgtgttttctgacaatttaacaaggaccaaataatcttaaacatttctaagaataacaaacccaaaacaataacataaatacaaaacgtatatacgaatcaaaaaggtcgagtcttttaaagaaagaacaagttttgagatatgggttttgattctttgtttgggtcaaatgagtatataataaaagaaaaaaaaaacatgaaaagagaaaccaagaagcaataccagcaacgtcttggccgtcataaagtccccggtgaacagttccgaaagttccacgagcgattacactcttgatgatgagtttagcagggtcaatctcccattcttgtctggtagatgagacagtagaccttgcttgttcttcttcttcctcttcttttttcttgttcttttccatagtccatgctctactcagatgcctttgaagttgctcatccaagcttttcagatctatctgatccgctctcacatacccaccaccacctccacctccactttcacttttctccttcattttccaattccctttctaagaaaaaaaacaatcaaaccccagttgagaaaaacacccaagtcacctaaaacaagcgccaagcttgaattttgggttctgggttttacagtacaaagctttgtgaaaacacacacacacactctctctctctatttcaatgactctcttcttttggttcctctgatagtggctcaaaacgaaggcgatgactaataatataatggtgtccccaacgcagtagtagtactgcgtttcccccttcacaatcgtccatgtgggcacatggattttgcctgaacacgacgtgtgtttctgacccactttggtctctctctct

SEQ ID NO: 1206 - DNA, 1239 bp, Cannabis sativa
gtgggaagcacagacactttccgtcttccttgacgtgtgccactttcatgagttgatcgtatcaggacaattgaaccctagggtccatctttccctcgtacagatccatctagggcattcgaaacctttccaacagaccaacatctaaaatcctttagacgcagggttccggatcttcatcttcgagttagatctaattttgctttgcttctttagtaatttttttgttactttcctttaggtcgcaattacatttctagctttttaatgtgatatcctggaaggtttggtccccgcatctgatcgttaatgttgtttctcaaatcacccccacgaggcctaatcttttctccttggaccttttctctccgcatgttcaagttatccttgaggtcaacttagaagtaaccatcttcctttacatattgtttgggtgaccttgccctgggatttggttagcccttccattctagagatttggattttcgcgtacaggtcttggtgggcgatttttcttctaggggcttttagctacgactttctctttatttctaggttgtaagagtctgaccccaggttggttgaaccttctttcagcagttggaacgtcatcattaatacaaacccccactccaggaccttggtttgtgggaggaaccttcgagttaaggcctctttccactattgaggcttgcatctataagagggtctcctagatttggtgggtggctccttcttgcctttccattttagcttccttgttcaagactatttgccttaactatacgacctcagggtcttccttataatctttgccatattctcctctatcatcttcgtcattgtcatcttaaccatcctcatcgagagggttttcatcatggagttcctttggatggtgaacattttgaggatgtctacctcccacaaatgacgcttcatcgtctcccgcagcagttgcctgaacattctccaaaggaggccagtttaggccatcagccatgggggcttctacgttattatgagcggcttggttgcctagttttccagtattcgttcgcgtggttaccatgtttgtagatgacaaatatggtagaaactttcttcaactctcaatgaaagtaccaaaacgtttatcgagatttttaaaaaccgaaaataagattaagttgaagaaaaaagattaagcaatgaataagataagattttttacgtggtcggggtattcatgagccttag

SEQ ID NO: 1207 - DNA, 1436 bp, Cannabis sativa
ctcctctaagcataaaattttcttttttaaatgaatcataacaatcaattccattccacaacaccttcaagtcatcaatcaaaggtgctaaatagatatctatatcatttccaggttgtttggggcctgaaatcaccaaagataacattgtgaatcttctcttcatacacaaccaaggaggaagattgtaaatacatagaatcacaggccaacagctatgagatgagctcatattactgaatggattgatgccatcagctgaaagaccaagtcgaagatttctaggatcatctctaatttgaggccataattcgtcaacttttttccaagctggggaatcagctggatggcgcattttttcatcttttatccttccatcctcgtgccatcgcaaacttttggcatgttcagggtttcgaaacaagtgcttaaacctgggtattggcggtatgtaccataatacttttgctggaatccctttcttacaatctttgtcattcttattttttttccatctagatgttttacatacaggacactcaattgcactctcaaattgatttcgatataaaacacaatcatttggacaagcatggatcttcttatactccattcccaatgtgcacaatgttttttttgcttcatacaacgaggacggcatttcattttctgttggtaaaatttctttaagcaaagtcaataactttgtgaaacttgtgtcactccaaccactaccagctttcacgttgtatagtttgactagaacaactaattttgacaaaggtgatcccgggtatattggtttctctgcatcatttaagaactttacaaattcttcaggcttatcaatgaaacgttcatctacatctctcaccatctctgtaggttcatcaaattcttgatcaaattgctctccttcattgtggacattcttagtagactctgttacttctccgtgccaaatccacttgacatatgtttggtccattccattaaaaaatagatgattctttatatcctttatatctaatctttttaaatttgaacattttttacagggacaatgcactttgctaggatcggttgtattttgtaaggctgagttaataaaactctcaactccctcatcatactcttttgaaagtctatcctttgttatccaactcttatccattttctaggaaaaatttgatgaataactatattagtaacctaaacatgttaaagtcaatataatcaaactatatacccacgcacaacacaatgtataaatttcaaaatacaaatacaaaattctagataaaattatacaatatttcctctatgataatgaccaaataatctgttaataacaagccaaataattcaaacaacacataatacgtttcttccttatatctccacagcacacaaataaatttctcagaacctacttc

SEQ ID NO: 1208 - DNA, 1925 bp, Cannabis sativa
taatatattctactttccttgtaccccttgaaaagaatttatgaatgaatctaaaaaagagacgcgcataggaagaaacgaagataaactattgtcgtaaataaactttttgctataatattaagatcacttcccatcccatgtaaatgttattcttctttagttctttgaatacctggcctcccttccctttattcctattcccctataccatataacccatataactttttcaatcaaggcctacagtagagatgcctatatatttatttaatttggtgttccacactgtacgctaccaaagctctctatagattgtaaaaatggcaagaaattttggccctcttatctgcctagtggtcatggtcatggatgtcgttgctgggatacttgggattgaggctgaagttgctcaaaacaaggtactctcatcttagaactatttgaacacaactacgtacgtactttgtcaagtaatggattccctactaatttgttgtttattatttgatcaattgcaggtgaaacatttgaggttgtgggtttttgagtgtagagatccgagctatgaagcttacaagctaggcatagctgcagtggtacttctgacgatggctcatgttattgctaacttgattggtggttgtgtttgcatctggtccagagcagagtacgagaaagcaaacgcaaacaaacaattggctgttggctctctcattctttcttggtacgtatgtctgttttcttttgttctctcagtttttttgtgtaaactttgtattctgaataatacatgtatttaccatttatataatgaaaacaggattgtattagctgctgggttttcgttgctgatggtagggacattagcaaactcaaggtcaagaaaatcgtgtggaattgcacatcatcggttcctatccataggcgggattctatgtttcattcatgggatcttcatcattgcatattatatttcagccaaagctgcagatagagaagaacataaaaatcgacaaggacaccagcccggaggccctgcttaattaactttttatctacttctttactttttattattagtattattatttttctttctttcttttgtttcaaattatttggatgactcgatatatatatatctgcataatgtaagatgaaacattttgctcatgcacgcttaggggatattactactgtatttttctctggctctctttttctttcttttttttcttttccaacgctctttctctcattttctttatctcttctcttaaactttaaaaataatttctgatcacgttgttactcggataagcctaaacaaagtccattgtgatctactcttcaatgtgaatatttcaagatatgagaaacatatatatttttcactatttctaaacaaaaaatatatttaattacagtaattaattactattttataattttttaaaaatcttagtcaatattcattttaaaattttgttagttgaattatattatattatactataactaattagcttttaaaataataaaaaagtataaaaaaaatcggtatataaaaatggtagtttggtatattagatgacaacgcattaattttcaaaatattttttaaagttaactaaatgtatttaaattataatgtttcaaattataatttaaaaataactaattagtttctaagatgtatacaaataaatttttaaagagtaaccaaaatatattttaaattatatgatataaaaataaaaaaaaaaattatataaaagtaactaattagtttcttattaatactattaataatcaaaaaattactttataagaaacaaaaaaccaaaaaacgttaaaaatgtcaaatttaactaatataaaaaaaaatgtttctattaattttattcgacgagcaaatattg

SEQ ID NO: 1209 - DNA, 1664 bp, Cannabis sativa
taattaacacaaaatcatatatacataatcattctttcattctgtaatgaaagctggaactttcgaaatggttcatggtgatagtgtttgtggggttttcgatataatccaacaccaacaccatgaatattacttaaacccttctaattatcataatcataataaccccataaacaaccaactctcagattgggttgaccaaatcaccaaacaaatcatcgacaacaacgacccacctcacattatcaacccatcaaattttccggcgaactactcagtttccggtgataacttccgaccaagaaaaatcccaagaacagaatcatcatccaataatgattataataatcaagaacagagcttgacccaaatgatgacacttctcttagaatgcgccgttgcaatctccgttgacaatctcggcgaggctcaccggatgattttggaacttacccatataagttctccttacgcgccgtcgtctgctgagcgcgtggtggcttatttcgctaaagctatggctagtagagttgtcaattcttggttggggaatgtgctctcttctccttttcctatgccattgataaattataaatctttacatgaagcttttcaagggtttaataatgtttccccttttgttaagtttgctcatttcacttctaatcaagctatacttgaatcgttccatcgtcgagatcgcgtccacgtcatcgatctcgatatcatgcagggtcttcagtggcctgctctgtttcatatcttggccacacgtgttgagggtccaccttcgcacgtgcggattactggagttgggtcttcgcctgaactcctatctcaaacgggtcaacacctctcgagtttcgccaaacggcttggtattaactcgtttgagtttaacccggttgtgagaaaccctaaaactgggttgttaaatgttggggtttcgacgtttcgggtcaggagaggtgagaccctagccgtgcattggctccgacattgtctttatgactccactggacccgattggagaacaatcgggcttgttgaggaacttaggccgaggatcttcactttggtggagcaggatattgcccaatcagggtcatttttggatcggtttgtcgggtcgctccaatactattcaaccatgtttgattcaatcggagcttatttggaccctgatgacccgacccgacatgtggtagagcattgtttgtttcatagggagattaataacatgttggctatcagtgggcccggtcgaagtggggaggagaagctaagggattggaggagtgagttagttaaaaggagtggtggtggcggcagtggtggtagcagcgttggtttaggacaggtggcaatgagcgggaattgtatggctcaagctcaattgatattaaatatgtttagtaacggtaatggtaatagtaatagtaatggatatactttaattcaagggcatgacgggacacttagacttggttggaaagatacttgtttgtatactgcttctgcatggacttcttgtacaactaatgcttctactaattttaattattgataatttgagttttatatacttataactaatagatgtttagtttgatctttttaatgttaccaaatttcatgtttctttttatttaatcactctaaat

SEQ ID NO: 1210 - DNA, 850 bp, Cannabis sativa
gagagagagagagagagagcccatagagttgatttgttaaatcttttagagagaagtaaagaatcatattgaaaagatatgtgttagtgatcccataaaaatgaattatagatggctttaaaaataccaagaatagaaaaagaaaagaaagtaggcaatatatataagagcccaacatgcagggactaacaacctacacttctcaattgtcatggttcatgcatattttattattgtccccataataaataataaatgaataataaacaaataactaataataatagcccaagttaaatggccttaaatgacaaccccatcaacattcacatggccttgttcccctttcgttacttgggtcatgaattattatagccaaaactaacaataatttcgtcctcagtgcgttctatatatgtgtatatatagggccctataaatatatatatcatatgcaaaataaaaagtaaaaataattacaggaagaatcttcgggagggattataaaaaagaatgaaataaaaatgaatagcatatttcataaaaatatataaatgaacaaaacacaccagagccatgacagagagcaaaggggtacgacattaagaaaaaaacaagacagagaagaaaaagaaaataagaaacaagggaaattattcagcttgagagagtattggtaataaacaagccagacaatagctgaagtttaatacttcatgtccaatattattattacaaatatatatatataaatttatattatgaagatctttaaaatctatataccatcaaatagtacagacacatcccacacaacaccctgctccaatatttgtccttgctcaacttc

SEQ ID NO: 1211 - DNA, 1692 bp, Cannabis sativa
gatttcgttgcaaatatccctactttttaggtctcttaaatgtaaaattcttgttgacattttgtatgaataaatgatttcattgacagagaaatgcaagcaagtggttttgaagggccaattccttcaaacctttttgtcttgaataacttaacacaattgtgagtaacaagagtagctaagctagttcatctcaaaatctttgtgtgctttttcataattcatgtgttgagatatttcaatttcaatttgtagaaggattagtgacttaaacggcggcgtttcagagtttccaaacttgaggaacatgaaaagcatggagagattgtgagacatcttgatgttttagcatgaaatctattttttatgatacgaaaccgtgacaatcgaaatatgttgagattgcaggatgttgagaagctgtaatataagaggaagaattccagactacttatctaacttgacagagctaaaaactctgtaattcttctttttccatcaatatttttgtgttgtataattcttattgatttgatggaatataatgtatacagcatagataactttgtacttaaaccgaaaaacaagcttcttctaggtagccctcatgtttcctttgaacaagtatttctttttctttctttctcttatgttgcagagatcttagctttaataggttggaaggcaccattccaaaccttgaagatctactgcacttggccggaatgtaagtaatgtatgttagataatcgtaaaacaacaggatacaactaagttttcgtctctagatctctaaaacagaatgtatttatagagttaaggaggggacatagcaacaaaaccctagttggtggactgagcttcctcatcaaagaattcagttaactagaaaaactcacacttctaactattgatgactaactatatgggctaaaatgacaaagagctattcatcaacccatattttgacaaaacatttaaaacaatttctaggtcatgttatggttggaggtaatgaaatggaatgaaaattatttttattccattcatttgtttgattgcatttccaatagaataatttttctatcattttggtggactgactattccattttgaaatggaaggaatgaccattctaatgtaagatgagaaaaataacttttttactaatttttttttatgcatttcaaatttaatttcattactattcttatgttttcatttatttcaataactatccgaatgtttcggatcagcaatgatccgtcgtcggatcggatcactgacccgacccgaatgaatggatctttttgccatgcctagttggactcaaattgtgtttgtagaaaatacaagtgaaaaagtaacattttttctattgttaatgttattacattttcctactaaacagatatctgacaagcaaccagctcattggacctattccatattggatcgaaatgagagataatcgctagtatgttttccatccaatcctatcagaaattattatttttcttgttttgatctcttttcatatttgttatcatcattatttttcttgtaaattacaagattttctatgattagaagtgaactttgtgaaatgtttatgctgctaattaatctaatcaagaagatatgactttgaaagtcaccaaaacataatcatggacaacattattgtcagc

SEQ ID NO: 1212 - DNA, 1721 bp, Cannabis sativa
agatccaccttctccattgccttattccattaccactacaatttgaagcaatctctcttttttagtcaattaatgtattgttaattgtaatgattatctgactaaagatggtttggtatttttagaaaataactatagtaactagttggtgaaactatcttctgcctagtatacttcaagatacaaagatggcagtccactataaaagcatagaattggccacatcgattatcattacaatatgtaggcttttatgagtatttttattgtgcattaatggtatcaatcacattcaacacgtgttatcttgcaattagttagtaatattttttaaaatttattacgtaaagttatatgagattcgatacttaattacactaataaaaataaaaatcactaatactaatattacaaatgtgttgtggcatttctcaaagaatatgatcaattgactattccaataacactagtagacaaatttcacttaccccaaggtctttccaagaaggtcaagaagaaaaaatctcatatcactcatgctatggtacacttacaatcccactaaccaaaaatctcataaactatattatagcaaaatggccatgggcatcctaatcatatatgatttgtttcttagatagaagcccatcaagtacaataatggctagtgtggcaaaccagcacacttcccaagcatagttctttcttcctttcatcatcatttagtctaaatctataaattcaacgaaaaaatcaacaaaagaaatataatgaaactaggaacatagagtgttatctaatatctattgcatgctatgtataaataaaaattatcaatgcaatcaaaattctcatcaagaaaaatagtaaattgagagtgagttatataattagtatttttaaacttaaattttaacatatactaaattttaccttttaaatttttaaagtcattaaaattctctctaaattattaagatcgttaaatttaaagatttttgtttaattttaagtacaagtcaaagtttgacagacatgatattaaatgaaattagataaaaaaaagaaacttatatccaataatcttaatagttcggagaaaatttttagcaggatgaaaaaaatttcatcaatgacatgagaagaaggagcaatgccatgtcatgtggtgtgtgtggtcccactctgaacaatgtcacagactaaagagataagaaggtaaccaaccaaaacattcattcatttcttcttcttcttcttcctcaaaccattttatgtatacatacagttccatattcatattgataattgtaataatataaaactaaaacagtgcatttggttttggacgatggctacgcttccacgtgtccccttagtgatatcaataaggagtagtaaatgcagattggtggcagaatcttctacccacttctcttatctcactctctcttcttcttcttcttctcactcaagaaaccgcaaatctctctccctttcagctgcaatggctgattcttcttcttcttcttctaccgtccttgttactggagctggtggcagaactggtaattttctttttctctgtttgtttgctgagaaaattggaattaaaaacgaagattgtgaattttcatcttgttcaattttgtgatagttgaatgtagtgtatctaatctatgtatgattatgatcttagtgaaattgagaagtaataacat

SEQ ID NO: 1213 - DNA, 1984 bp, Cannabis sativa
agcggccaaattccggtgttccaccgtaatgtgaagctcttggttgtgttatgtgtcactgccggaatttgcaggtcaagatcttgtatggtcgaaactcaaaatctcacttcttaatttacattacgcattgttttatgcaattaggaattgttctttcttctatctagttaataattgaaagatcagttacactaaaagtagttatggagttgatttttttagtagttcagcatataaattttgaatttgagtcattagccatctctatgaatttatggtctgacatagctgctgacactatgctctgtttattcgaaccccagcggtctacgaggttgcttttttggcatagcaaatatgatactcgtgagtttctgtctcttggtctgattaaatttgtgaatagtagattattctcttatgatttaacataaatgtaaaattacttcaaagatcaaatacaattcttatgattagtctgttggcatggcttattatgaaagttcatatgataagttactttttcgttttctaattaagttgagcttctatgtcatctgtaggttaagagaatgagggaaacattatattcagctcttcttcgtcaggttctaaaatattccaaattcaagtttcttgtctataagctatttatgtttagatttgttattcattttcttatttatttgattagtatctctattgtaggatatatccttttttgactctgaaacagtcggtgatttgacaagtaggcttggagcagattgtcagcaagtatcacgggtcattggatatgatctcaatttgatctttcgcaatgttcttcaggtttctatccttcttccaatttatatcttttttgtttgtatttagtttgagatgcatattattaatttcgattatactctgttagggtgcaggtgcgatgatctacttactaatcttgtcatggcctcttggtttatgtacattggtgatatgttgtactttggcagccgttatgttactttatggccggtgagatatgtttttcttatattttttgagttgtggttatgagaatgaggctggggaagaaattgaacttacattttgaaggggggaaaaaagccccattgcgtgcacacttgtgtagcaattctttcccaatttattaaatgctcttctatttattttttaagtgaattatgtttctttcaacaagtagggatttttgagtctttcgaaattaactacgcccttttttgtaggtaccagaagaaggcagcgaaattgactcaggaatatactgcttctgctaatgaggtatgactgtggcatgtttgattaatggttattgttaaatattattgcacgcttgagcacctctttgagactcaaaaacacctcttttcattttttgttgcaggttgctcaagaaacaatttctttgatgagaactgttcgtgtttatgggacagagaaagaagaacttggaaggtaataaatactataataatctcgcccttttgttgatttgcttttgtcagtgtactttgtatgagacagtgtgtgccagaatgtagcttaaacaagatgttacaagtattttaaggaggtcctcatagatatactgtttatatatgcatatagatatgataagtggcttgggaggttggctgatataagctttcggcaaagtgctgcatatggcatttggaacttgagcttcaacactctttatcattcaactcaggtatagactatttattgtatctcaaaactagtaagattgctttttgttttcaaaattctcctcaagattattagcaatgtatattatagtgtaatttggatatgctaacagtttccaagttaaatagtcaattaaagttgagtgcatcaatgattccatacgttcctacatttttaagagccattggatattaggtactatgctgctatcaattaatggatagcacttttatatacttttttt

SEQ ID NO: 1214 - DNA, 2758 bp, Cannabis sativa
ttcttttctttttttagttgtaacagattgagttgaggctctcttctccattatattattcattcattttttcattcattctttaataaaatactttctttgtttctcaatatggtatcagagcaggatagataagctttcctgtctgatcctgcccttccagtcagttgtgttttcttctccacggagctttgtctttctcgatcaccttctctgactgaacttctctctttgttctgtccattgagttcctgcaatggctacatatgatgatcaaaccagagtcccagccaccattgccgatcttggtaatccctctgctcaaaccaatcaaggcctttaaatcgcatcaataaagaacccactgaaagatcctgtgagttcgtactttctttaccatggagataatccagaaaatgcattggtgtcacagcctctcacaggataagccaattacgtcccttggagcagaacaatgcagctcgcgatctttgtaaaaaataagattggtttcctagacggttcaattcctaaaccctctattgatcaaaatctttataatgtctggtattgaaataataacattgttatttctgggatctcaaactctatttcaaaggaaattttatcaagtattcttttatgttgaatgtgcttcggctatttgcaacgatttaagagtttgattttaccaaaaaatggttctcatatataaaatataagaaaagatcttatgaacttttagaaagaaaatcaaaccataagcatgtattttactaaactcaaaactatatgggaggaactaaccaattacaggccctcgtgtacatgtaatggatgtacatgtggaggagttaagaaactccaagattactaccacatggaatacattatgtcttttttaatgggactctcagattcttattctcaagttcgaggaagcattctactcatggatcatttactagaagtacattgggtgtttcaccttattactcaagaagaacataaaaaaggtactgtttctaattctaacaatcctaaccctgctatggcttttccttttttaggtgacaaaaggacaaaccaaaaaaatgacaatcaagttcccaagtctcattctacaagaaggaacaggccattttgtactcattgcaatattcttagacacataatcgaaaaatgttacaaaatttatggctatcctcttgagttcaataagcaaagtaaatctaaagatgctggtgcaaatctggtttccgaatagcgatgaaagcaatacagtccctacagaaaatcatgttcttcttccccaactatcaactactcaataccaacaattgctgaatttacttgccttgcaacaaactggtatgaatgccaccgatcctagtacctcaacaggtaacacatgtatcatcttgttgcataattccaaacttcctttacataattcttggattattgacaccggagcaacaagacacatatgctctaatgtcaattttttttcaatgtattatgtaggatacctttaactaaactcatacatcctaacaatgattgtttaatggtcaatcaaagtggaatagttagtttagataatgatatttttctgaccaatgtcctctatgctcctactttcaagtacaacatcgtatccgtcagctactttactaatagtgcacctatcactgtgcattttacttctaatagcttcactatgcaagacaatgtcagtaggatgacgattggaataggtagtactgtcaatgatctttacatcctcgatactgcactaaagtccactcaaatcttctcagttttagctgaaacttggcattctcgacttggccatttgtctcacaagcgactggatttacactaggatattttagactgtaacccttctattttacagaaaaataaaccctgttatatttgtcctattgctaaacaaaaaaagtgaccctttcaaagtaataacaaatttgctgataaaatttttgatatcatttattgtgatgttttgggaacatatcatattgtttcacacacgaatcacaagtattttctcactttggttaatgatcattttagattcacatgtgtatacttaatgcaacacaaatctaatgtcacttttattatccctcaatcttgtcatatgtgcaaactcagtttaattacatttttgaaacttttagatctcataatactccagaacttgtgtttaaagaacttttctataaacatggcattatgcacgatttcacttgtgtcgagacacttgagcaaaatgttgttgctaagagaaagcatcaacacttacttaatgttgctcgagctttgtattttcaagctaagataccaataaaattttggaccgaatgcatcttggctgctacttatttgataaataggattcccactcccttattaaagaacaaaacaccttatgaattattattcagaaaatagcctgaatatcaccatcttcgttcttttgggtgccttgttttgcttccacttcgtcaggacataggactaaattctcaccaagagctcgcacctgtgttttcatgggagatccccaagaaattaaaggctacaaactttacgatataaataacaatcagttctttgtttcatgcaatgttgtgtttcatgaaaatatattttcttttcaaaaattgaatattgatgatggtagcatagaccctttcactcaagtggttcttccccattctatgatcac

SEQ ID NO: 1215 - DNA, 4225 bp, Cannabis sativa
tcaaaaatcagaagaacaaaactaccctataatgatatttttctttacaaatccaatgcttctacaagacctacttggctagtcaagacagacaacaccaaataggtgcctctatgggtgcctcatcattcaacgttcatctgaaagtagattcatcaatatatcagcttgctgaggccatcgcagatagcgcaagctcttctaggagctccttctgctccatggccgaacatgcctgcaagaagcaaattcatcaactcactcacaagcaactttataaattcatttttatcgttatattcaaatttgaaagatctacaagaagaacgaaaaaaaaaggcatgccagtcgacaagaataccgatgaaaaactatacctgaactgaattctctatatcgccatcaagaaaagaggtgagctcaaagttcatcttcaaccggtggtcagtaactctattgtcctggttgatgtgaataaagtaaaaaaagtgtaaacgagagagcgagggacagaatgaaatgcttcttatttgttaagctcaagtggacaaaagatttccgtttacagtaccttataattgtacgtccgtatcttttctgaacgagcaccggtaccaacctgcaatttttaaggatatactcgatggtaatgtggtccaggcttagcatcgacaaatacagcaaggaaatatgaaatcaaaatatacatagaaactaataacaaaatactagtgtatacatcatcagtaatgccgaacaaattacaatcatagaaatcaactagaaatcttaaagttgcaagagcatcgggagaattagtacctgcattttgcgttgattccttagcttttcctgctgctccctcagttttatttcatatctgtagcaacatcattggtcatcttaagtgaaccaaaacagctaaaaaaacctttatgggtcacattcattgctcaacagtagaaactagagatgttatataataaccaaaacatttaataagcagcaagcaaagttgtggagtatgtttaagttgtttctcgtaagtctactatttatgaatattcctttgcagcatattcaattcaaaaccataaccatcagattaaatgaatggtgatttgatcaatgaaccaggccaaaaaagcacatcttgataaatcattagcatttagaaggactaactgtattattagctcagaaaattctcacaattttgctcgtagcaattgaagagcacgagtcttgttcttaagctgactcctttcttcagtacaaaatatacgaattccggttggtttgtgaataagatccacagctgtctcaaccttgttcacattttgtcctgcatgagatgcacaaagtaagattcttaaataagagacaagtaaaaaagagaaaccaacttacctggggaacaaataaatctcaaaaaatcaatttattacctccagcaccgcctgatcttgcagttgttagttcaatatcctttgggtcaattaccacctcgacttcatcaacctatatcacacataacattaaaacaaaaagactaagtaattgttcaaagagagagtacacatatagcatttgtagtctcatcaacgaaatatagatctttgcaattttatcaaagataaatgtgaaaaatatcaaggcacttgttacaaaacacttgaacaacattaacagatggataaccgtacagatccaaatgtgtcatgtattaaaaggaaatagatgtctcaagcaataaagacattggatatttatttgattaaatatactctacctcgggcattattgcaactgtcgctgtggatgtgtgtacacgaccttgtgtctctgtttgtggtacacgttgaacccgatgaacaccagattcatattttaatttgctgtaaacacgttttcctttgacttccatcacataagttttgaagcctcctttttcagcctgaggaaaaataaatacaaacaaagatagggaataagatataaatttctcttcactaattataaataatatagagtcaaaagagcatattcaagaagactcacatcagagcatgaaactggagcaaacttcaaagaattccgctcgcagtacctttgatacatacgaacctagaattcacaccaaaaaaaaaaacaaaacatcaggaaaataatttatagattatagatgccatttcataatatttgttaaaaataacaaaagcattcaatctatatccatctattctgtaagctaaaccaactatcctggataaatcttttggggaaaaggggaaaggggaaaagaaatccagtaatcactttctgagctttagtttcaaccttggggtccagtataagaaagagtatatttcctaagacacctatctagaaaactggaatgacaaaacaaacatgtacctacaagatcacccgcccaaattccagcctcatcaccaccagtaccagccctcactgaagaaaatgaagtataaatttcaatgaaacagaaacaatcaaccattattagcaactaagctcaatgactgcgaggtgataaaacagctaacaacatcaatctaagaaataacttggagtgtcatgttgtttacacaattgccaaagataaaccataagtattagatttgaaatatggcctaaatggaccgaaggagatagaatttaaggccaacttctaaagtagtatatcagaatcaaacttatacatgttcagcagtgcaaattttctagctagatacacgataacacaacaatagaatcattaaaaagggccaccttactttaacttgtaatacattacaaccaaagcatgtagacaatatgctacagaaaatataaaatgtacatactacagctcagagaacattatgcaacaaaagagatataaatacatcacaattacatattctagatgcatcaaacaaacaagcagatgtacaaaatagtcactttccatcttacggaagaatttgattctcgtttcatgatattaccaaatcatttgaataaattcttcagaaaaacagtggcattaccttcaagcaatatatttctttcatctagaggatcacttggcagaagtagcatctagcaatataacatcaaacatggtcattagagcaaggcagcacagaagacaactgaaaattatagattttaaattgccaattgactcaaactttggactaaaaaagagcatttttgcagcgaacaatcccaaacaaaatggttgaccaattttttaaagccacaattttatttctgatataattatgtgaaaataccttaagattgtcttcgagttcttttatttgactggacaaagaatcaatttcggaagctatcatctgcgccatatcctcatcagtcccttcttcttttgctagagctgacaacatacctttggcttcttctaactctttttcgcattccttgaatctcctaaaggttgacacaacctgtttcatcaaaaccaactcaatatcccatataaaaaaccataaactatagaaggtgcagcctccacttgaaacctggtataggaaagaacaaaacaaactataatacctcatcaagctctgaaacagattgtgctagcttttggtattcactgggatttgagactacatctgggtcagccaacttgacctgaaattcaaaaacgtatcatgaaactaacatctaaaagtgtcagcctcgctaaagaacatacataaagaaatttgggctcacaaccaattggcaatgggaggagtagcctattcatcttatatgttacaaattatatctacacataagtaatgtgggactaactctaatagagccagctagaaccactcaaaccctgctctatgattacttgaaaacactaagaaactaaattcctttaaaagtttttttagagattttggttatatttccctcggctatgattactgatcgaaaaagaaaatcacacacacataattttcttctaagtaaccaatttgattcgtcagaagcaaaattaagtttcatgttcaagcagcaaaacactagaaaaaacgctaccgcataaaagtatatcaatatataaccatttacaattcaaatcaatcaaaatcataccgataattccttccacgtattctcagccgactccagcttcgtaattaaataaggctcctgtaattcatcatcaacaacatgagaaatacgtcccaacact

SEQ ID NO: 1216 - DNA, 2907 bp, Cannabis sativa
aaaaaaaaaaaaaagttacaaaccttctctttccatcattatatgatggtttgggcactttcttttttctttccttcaatttaatactaatcatttattaaaatgtgacatgttaataaaaagtagaatacaatgcttattcttttcaaagtgagaacaaactttaatcccttttataacacttaatttgttaaatttcattaccaacattattgatttgatattctaccattttttagaataaaagtcatgactagtatctaattagttttaggaacatatctctgcacaatgtcagtctatttggacccaaaaaaacaaaaacaaaatagacaaaagacaaaatatgaagaaataatgttgtgaaaaccatctacaaaaacaaaattacttaaattctcaatatatcaacaaaaacaattcaatttttttgttctcattaaaagacacattatatctaaattttttgtccaatgctacttatgacataaaaaagttcttataaggagattaagctttttctcaattggaataaaaatattacttgttagcataaaaagttagaaaaattatacatattcagagaaattttatttccccatgtcatagattataacaaaagtaataaatgaatccataaaaagaaactaatttttagattcttacttcctcatctcccaagaaacaatatttatatatcttatacatatattataagagttttttgagactttgagagagagtgcactgatgataatattaatcacagagctaatcattttagaattatactacccatcatcatacaccagagacctaaactaagtaccttttttttcctaaatctactcacaaaagaaattgtttttttatttaaatattttgcagactaataataataaatgttttccaacaacagaatgattccaacttttcactgtggtttttaaataatgaaaaatacaagatacacacacaacacaatctccaagttctgctctgtcatccattcaaaaaatcaaaccctcctttttactatgcaaagccaagcactcctgacattttaacagtctcaaccataacaatttttattttatttttctcctaaactaaacctaaaccttcttgttgttgtcttttcaataatatatatatatatatatattttcaattcttttctttctctcacagttttcaaaaactctcttttcctttttctctctatgacccagaagacagtccactcttcatcaaccagggccacaacagccaaggggtccatagagacaaagctctgctagttaatcaaaatcccacctttgtttctttgcatttgtagaaaaagaagaaaaaaaaaaacacagaaagaagaaagtagtgtagtagttgtagtagtcatcaatggagttttcaatttcatacctcatcatcttgctctctattcttctctctttactctcccaaacttgtcaatccacaaaaatacttgttgatggagtttctgagtggaaggaccccactgttcatgtgggagattctgttagtaagtgttcacaaaaaccctaaactaaactaaactattcatatctttgttttttctttaaactttgaattataacaactaataataacacaactcttcttttttttctcagttttcaagcacaaatatcactacaagctctacattttccagaatgaaaaagccttcaatctctgtaatttcactcaagccacacttctaagcaaacccaatgccacttcttacatggtaactctttctttctttcagacaaaataacaaacaccttatatgcattatttaacttatcttaattacttcaataaatgacctcaaactatggattcccaacatgggtttttctcataaattcataaattcaaatacccataatctaattttctgatttctaacataaaaatttaaattttatcttaccctaaaaatatacagtggtacccatctcgctctggtttcttctacttcactttcaacaatggctctctcagtagtacctgccaaggctccaaaaagctcgccgtgaaagtaacttcttcaccgaaaagatctgccatttccccgaaacttcctccgatgaaggctccggcaccaagctcaggtggagtagtgtcatcatctccgacttatccgtggccgtttcgccccaaagaagctgcctctccggcgccgggaccttacgcaacatctccggcggttattccgtcgttagtgccggacaaaggaggcggtattccgtttattaacagtaatccggcggttcctctgcccaccggagaagttgactctgctactattcgacctttacccatgtccagccatggaggccaggtaacaaaatatatatatatatatttaaatattaataattattttcctaatttaaaaatataataaaaatctcaacttttcttttgctatttacttgatgaataataatttaataattatatagtaattaattaattttaactatataatgtaaacacatttttttaaaatataatgattaatattgaatgcaaactattgtatgtaatattagtgtgtataatgtactaatttattatcaagtttttaggtgattaatattatgtgcatttttcaatcatgaatgtagtgaagtttattcattgtatatagtgttgttatgatgaaatatatttgtacatatatgaatgaatatggagtttttgattgggttattgatgaaattttgggtttacatatttgtatattttgcaggtgatgatggggtgttttggagtacaaatggctatgttatgtatggttcttttattgctgtaaaaaagggttttctttttctttttgtgtaatattttatttgaatgagagagagagagaga

SEQ ID NO: 1217 - DNA, 3740 bp, Cannabis sativa
tgtaaatccagctgcagaagccaacgtaagcagcattaatagtagttgtattcaaattgtgacttgtgagagtaagagaaagagaaaaagtattataatcatataatgacacccttttgttggatgagtacgagcagatatttggggatccagatgctgcagatatcgtattcaccagcggagcagatgtgttggttgtagggataaatgttactcaccaagtcgttctcacaggttttactactacttgaatgttgttgataattgtttctgttatttgatttgattctgtttcttctgtcaaattgtacctagatgcggatcgagatgtgttggcaagttcaaatgggaagtttgctgagtacttgtgtaaaattttagatgtctacttctcgtatcatcaggatgcctataacacaggaggtgtgtcgtgtggagtgtggtgttgtttactagactaacaaatggcctaagactttaaagtcactaaactaagctttgaatgttgttggtttaggtgtttaccttcacgacccgacagcccttcttgcagccgtatatcctgatctggtcacttacacggagggtgttgtgagagtccagaccaatggcatcacaagagggctcactgtattgtataacaaacagaaaaggtttggtgaagtaacagattggtcggataagccaacagtgaaggtggccgtgacagttgatgctccggctgttgtcaaacttgtgatggaacgtctcatagactcctcctagtctactcctcgtatcatatatcaatgatcatccatccctttcttttcatatttctgtggaccagccttgtttgccatttaataataattctcaatgccttttgagctcattattccttaatattatatctacataaacaaaaagaatataagcccctactctacagtaaaaaaggttctctgcaaatttaaaacaaaaacttcctccaagagattagtcataattcctcatgagaattagattctgatttgtgagtagagaatcctttagatttgtttgtgctttcacttttttattttttttgtcaatagagcaaatctgataatatagtaattttggtggaactggaaatggtcaaatcacggctattaactggctactggtatggtatcctttccctttatttcattggtcacttttgctctcttaaagttgtaaagccaactttacagagtgagctttaattttcttcaaatcaagtgatcaattttggtaattttggaattggcgctgatttgttccccatgatatatgatcaattttggtgtttgtgtttagtttagtggttaatgaatataggagttgtaggaacagaacatgtgatgtgaattgatgaagtttaattttataaaacaaatgggtgtgtgtgtgtgtgtgtgtgtgaagatttaaggtttttgagagtaaagaatttgggtaacttgtgaacgactccattccaaaatggtcgacaaagcctgattttgtagtcccattctaataataatgatcaccctcggacaagtttgagtgttgttaactatgtactctcactttttttaagaaagaataacaaaaaagcagggaagggactaataagaagcttagaatcatatacaacaacgtggtacatacataccctaccaaagacaccaactttatcaaaacacatagttaatgttaatacataacatatgcatgcaaatatgcaatgcagtaccaatacaatatttctaagctttgcagtggccatcgccatgaagaaaacagattattctgtctctctcttttttatactaaatatataccaaatttaagtgtatatatatatatatgtacaatagagaagtcataattgtagaggagcatcggaaaagacttgtatttaaaagaaagtgcattgaggacatggtgttaccgcagctctgtgttctcaatcccaggtcttcgtctccttctctaacattcaaacgaaatggtagtcgcagaagaagtccgctaaagcttccatcaagcgtgttggtatccaattcatcatatcccatttggccacttctttcagcttcttctgatcaggtcttaacttttctcttttctcctctgatataatgaatagatatagttaagcattacattactaatactatatatgtgcgtgtgtatgtgtatcagagtcagagtcaaactcagagcgttgcagccatcatatttggggatggatcagaatcacaatcacaatcacgtctgtatccattgacgatgagaagatcagagggcgccctgccaatggcagcaaattataggctcatcgacgcagtagtgagcaactgtataaacagcaacataaagaagatatttgctctgacacaattcaactctacttctctgaactcacacctttcgaaggcttattcgggagtagtaggatgtgaagggattgtccaagtgattgcagcacatcagagctctcaccaccatcatcacaatggatcatggtttgaaggaagtgctgatgcggttagaaaatgcctttggatactagaagagtattatcatccactcaccgagtttctggtgcttccaggccaccatctctaccgaatggactaccaacacctcctccacttccaccgcaactctaaggctgacattactattgcagcatcaactaattccatttccactcctcaccaccaccacccaccaccatttggcattctccaattggattttcaacaccaagttcaatctattcgattcaactcatcgcccattattctcccttttgcttcttcatcttcaccatcatcagtaagtctccctccaaagtccaatccatattactctatcttctttttttttttctttttattgaccgatgaaaaatgaaaaattgactttgaagtaggtgaatagaaaattgaatggtaattttagtagttgtggtgaattgcgaagcatgggaatctatgtgatgaagaaagaggcaatgaaaaagcttctagaagagcagtttccagaggcaaaggacttggcaagggaagtcattgcaggagcagtagcagcaaatgggatcaaggttcaagggtatccgtttgatggacggtgggaggagatgaggagcattggagaattctacaaggcaaacatagagagcatagaggaggagaagatgggatacaagtgagtactaatgactactactattgtattgagtttgttattatcattgttttgtattgtaattgataatttgatactaactaagtgggttgggtagtttctgtgacagaggagttccagtgtatacaatgcctcattgcctgcccccaactcttataagtgaagctgttattacaaacagccttgttggggatggctgcatcatcggtgtaagcaaagcaactactcttgttttcctatatagcagatatgtacactccaattaactctattcctatggctaattgattgattgattgattcgaatcaagaatagagatgcagtagtatcaaaggttcggtgattgggatgatgaccagaattggagatggtgttgtcattgaggattctgtcattattggctctgatgtgtatccggtgagggaagggagtctctcttaatttgcctcaattctcattcactttgtatcttttatattcatatgattgattagtgaaaattacatacaggaccaacaagaagaagaagaag

SEQ ID NO: 1218 - DNA, 1649 bp, Cannabis sativa
ttatatttatctgctttatgtaattatgtttcacttttgtcaagcaacgtgaaagtgtatttaccttttgttttgggatttacgttagaaaataatgttactaagtactcactcaaccaaaagtaggcatttttgcaatttgttctttttgaccaatcttctccatgttagtttggctgatgttcaagtactaaatcagccaaactatgtaaagtgttttatagctgttttttgtatgcattatcacatggatagcatcagtgtttgagggatttctaagtgggagatggggaatacgttgttgctgtgttattgccattaattgggaaaagaaaagaagtcacaaatattcaatgggaacttgggttttaggatctataaatatgagtgtcttgttgatcatgtaatgttaattttgtaaatagctttgttgatgtttgaaactgcattgatttgcagaagaaatggttttgctgcttgcgtgcggaatcatgaggaggtacctactttatgaaagatttaagaggaattttgttttatattttatgctccgtgccaatattatatatataatatatatattccagaagactggagctgtgttcaaagctatgattggtcctgctggaatcagtttgttgtgattttaagctttgttggtgatgtggacacagaagatgaagatgaagaaaaagaagatgataatatcagcgcaatgttgtatttatgttgttgtgtatttggtgggaatattaaatattgtggtgtagcttctttcctttttgtcccagcttgattgatgagttgatgatactattatttcacattgatttctgcgtgtattttgattttttcttgtgtgtaaaactaatgcatttcagttcattttactaaaacgaaaatccaccaaggatagttcattttactaatactcttattctttggacacactctctctgtctctcctttcctcctatttttctgtgttgaaaggtgttgatggtgaaaattcgtcaattaaattgtagttaaaaaatcaaaacttagatgtaagacctagaactaagatgaagatctcaaactataacaaattaaagaaaaaatataaaatagctatggagaaagataaaagtgtatatttttatacgatgatttttcaacatcttctcatctcttaaaatgaggtatttatacgctctaatggcttgagttacactcatggttcataagggagaagtttgccttatgtgactgcaagttctaggaggtggtcttatgccttgtactattattgggtgtcaagtggttgtagagtacctattgtcgggacgttaggggttgcaaacgacgtgcctccacttgtaccctctcgccatcaggttacgctgaaagtgtgatcatactctatctcgtaccttttcacatgcatgcattatcctctaattcctctcttaacgatcttttctctaacactaaagcaagttttgccctcatacttctccttcttgcctaactctccctctctctcccactcgcaacttcccctctctttcaccctctcccactcgcagctctccctctctctcaccctcttccactcgcaactccccctctctctccctctcccacttgcaactccccctctctcc

SEQ ID NO: 1219 - DNA, 1410 bp, Cannabis sativa
tagaataaataaatagggggacaaaggatccccttggcgcaggcctctctgaggatgacatttctttaggggacatccattcaataaaactgaataagaggcactacttacacaggacataatcaacttgcaaacatgactatcgaagccattttccaccaagactctatgaatgaaattccactccattttgtcataggctttatgaatatcaagtttgatagccattaaaccacctttacctctattactccgaatcttgtggacaagctcttgagttaggatagaagattccgcaatccacctcccaggaatgaaggccgattgaagaggagtaatcagttcgtccataaaaggtctgagtctattagcaatgatctttgtaaccactttatatatgaagttgcaaagactaataggcctgaactgatcaattctctctggacaatcacctttgggaattaagcagacaaaattatgattgaaggtcggtaccatctccccagtctgaaaaatatttcggaccgcctccactaaactttcccccacaataggccaatagtgtcgaaaaaagcaacccgaaaagccgtcaggccccggagcctttagaggatgaaggccaaacaccatttcttttatttcctcagaggacggaattgccataatagcagagtttgcttggtgatctaccttatctggaaataattgcccaaaatcctgaggaatgtttgaatttgacgaagaaaacagctcagtaaagtaaccattgataatcttggcaatcgatcttctatcttcatgcattctcccctgttgatcacaaagaccccaaatctgatttctacgtcttctcaccgatgcggaaacatgaaagaatctagagttcctatcccccaacttcagccacatttctctcgatttttgtctccacatatcttcttttagcctccacgcctccaccaatttcttctgtatttctgcctcttccttcatcaaagaatccgagatcggttggttttgtatcagtaacagattattctccatttgcttgattgaaatttcaatatccccaatgttcttcttcttccaagcttgaagagcttgcctagtttcccaaattagcattgaatcttcgtttcggatccctgtccatatcagaccaagcctcttccaccgtagtcttacaagagtccacagaagtccacgcctcaaagaaacggaacggaataaaccttttactagcaaacatatgcaagtccaggaggattggggcgtgatccgaaagagttataggaaaattcagaaccccagcatcttgaaataaagagacccaatccaaggatcctattgctctatccaatctttctcggataagaccaccattgaacctcttattatgccaaagaccac

SEQ ID NO: 1220 - DNA, 2361 bp, Cannabis sativa
gtggttaaatatttaaaaaagacaatgaaaggaccaaattgcaaataagtagtaaaattgagggagtaaagtgaaattttataaattaatcggtttgattagaacagtagtatccatagtagtcaccttcatctccaattcaatttcaatattgaaaccctagaatttcaatttcaattccaattccaattcaaacccaaatcacctcaaacttcaacaatcatagtagtcgtacatacatacatacatacatacaatgttaaatctcaggtaaaattcttcaattccctatatttgtatttgtttctatatctctctctcatttgttttcgttttcattttatttcacttgtatctgagatatcgttatattgtattgaattgaatctgaaagttttcatttttcctaagcgctgttcagaaaaatcttatttttaattacttttgtccagatctttcaaatcaatttgattagtttacaacagtgttggaatttacagtagataataatagtactactagtgttagaattttaatggaattgatcatttcttttcttctgtgtttgttttaattatgatgtttcttcttgtttcggggctaaggaatgagagtccgacaggggcagccctgataattaagtaataattttttttaaaagaaattggttatttaggatttttactctccgaactttcacatgtaccaaatcatgactcttgtactttttaaagcgtaaaaaattctcctaaatgaaagtttaagaagcacgatttggtagatatcaaaggtcggagggcatgatttagtacatagacaatagtcgtattagtaaaattgaacgaaatttaacagaaatccttaaattcaacaatctcagtagtttggaagaattttaacagcctgaaaaattagaaggtatgatttagtacatgtcagttttgggtaaaaatcctatatagcctaaaaaattaggccggccaatttttggagttgattcttaatctgcttttatgacttggaataatctttcctttaatcctcagactcctagtattggatatttgagctaattgtgtgcttatataaaatatggctacaaaattcatatatatagaaggttaaattgtttgtttcttgaatgatgcatattggccaagttaatatgttgaatgagtaattcagcttggttagtatgagcacaatggtgtaagtaacattgtctctacttgcagcaggttcctttgtttttcttgagatggttcctactatatttctgatacaaagtgcttcgaaatgcaattagctataaatgatagtcataatgaagagatttcagaacgtgagcccatcttaggccaatctgagagcttgcacagatcggtaggatcatcctcttcgtcctcctgtgaaatcataactgttgaaggggatcatgctatcgccgatgaagatgggataaatgttcgagttgaagagaactgtcaactggtgaatgctgatctaccacagtgccgtatatgccttgattccggaggtctttcagttcctatttgttcggtatctgtttgtatttttcttttagttactgacattgtcaccatttagaatgagaattttgtgtgttgtgaatttttgtgcaattcccaacccccaacaccacactgaaccgaaataataacaaacttaaaacaaacaaaatattatgtttgtaaataaatcttaaaggccatatgcattatgtctttcaggggaagacttgattgctccttgtcactgcaaaggtacccagaaatatgtccatagatcatgtcttgacaattggaggtccacaaaggtgagtagtagcagttgttttatgattttcttgtgacaactaagtttattattgtacatgcagtagagtgaataattgtgtttaaactattctagtgaaatgaaatatcttttgatgaagcttgacagtgaaacctatttctttctttcctcaggagggttttgcctttgctcattgtaccgaatgcagggcaatgttcttgttacgtgcaaatgttcctgcagatcgctggtggttgagattaaaattccaatttcttgttgctagagatcatgcattcattttcattattgttcaactggtatgatcacagtcgcagactatataatgcgaattgacctttcaaactttgctcatcgcctgattcaagattgcttttgtgcttgtgtttcaacagattgtggcattcttaggagtgctggtttataacttttatggggaagaacttagggagatgtttggttatgaagaacacccatatggattttatacaatggccggtatgcacgcccttgaccctcttc

SEQ ID NO: 1221 - DNA, 2656 bp, Cannabis sativa
tttttttttatcaaatttgagtaatttggattttggtaccaagaactgttgactttttttatcaatagtttctttactttttttttttaaaaaaaaataataattaagatgaaaaatgctagttattcagatgttagtcaactttgaatgaatagttctgtgtacatgtttgaaattgggtgttgaatttgaatttgctgcatatgtttctaaaaatgttggctttctaacagaaggagtaagtgtgttttggtactaaagatttatgtgaaaaactttacatttgacttgtttgacaaaaattgctttgtcatttaaagatattgtatttgggaaacaaacagaaagaatgggatatagatgtttaatttttgattggacgttcttttgatatgatttttctatttctttccttgatgaagtaagaatttggatctcaaaatgccggccagtcggcttttttctagaatcaatacttgggagctaaaatcacagattgaaagcaaagttgggcgttcaaaagcagaagtgtactttagtcttttgcaaaaatacttgagccttaagatcagcaaagttgagtttcacagactttgcattagtacaatagggagagacaatctgattcttcataatcaactcatcaaatcaattttaaaaaatgcaagtctttcaaggacacctccaccaaaagtaagcaaagaagctggttctttcagtgttaaagctgcaaatgttagccaaagaaatggccttcagtcactgtgcaatggatttccccaatcacctcgaaaggggaggacccccagttaccgggatcgcaagttcagggaccgtctaagtcctcttgggccaaatgggaagagccataacattacatgtgaagatgtaactgctagaactcaagaacacgaaagtgcaactgacttgtttcttttgggtggcgaacccccttgctctgttgaagatggagaagaggttgatcaggctgctggaagcccgggcatccatagcaggagtcctcttacagctcctcttggcatcccaagaaatgctaagaagacacagaaactactcctgaatgtatcaccatccacagcttcctttgatacttgtcttaactgtggccagctacctgacacaaattttcttaggaagaggctggagcaaaagttggaggctgaaggattaaagattacagaagattgtgtcatcatgatgaataatagccttgatgtttatttgaagagattgataaagccgtatttagaactggctggttcaaggtctggaaataaacatgtaaacaatggacataatcaagcactgccagatatgagatttgtaaaggcacctacccaagccagttcagcatccatgatagatttccgggttgtaatggaaatgaaccctttgcttctcggagaagattggcctacgaagcttgagaagatttgtttgcatgaatcagcgtacaaaactgggagcagataagtgattgcttcagattcttttgctgagtatagacttctactcaagtgaacatgattcatatacaaatagcaaaaccattctaacagttatcttgacattgcaactttgctgagcatttcaagtacataattagaataaaggcatggagattttcgaaacaatattgtatataggattttaaagctgattcaaccctggggtgagtgacatggtgaggtataaacgtaaggaaactgcagtataattatagcaaataggtcaatcttagccttaaaaaagtctttttagcttgtttcctcatttatattttcttatttgttaataaatcttgtgttttgaatttcccaggtgatggtttttcagttattcttccacgaaatttgattctttgttacataaactaattaaatcttgtcatttatacttttatttagaatgatgaattagtcaccgttgatgtcagtgactactgtatttggtatctacacactacaatattgggcttcactgcagtatatatttctgagtataagacaagaaagaaggaatttttttcttttgcagtaactttacttatgtgattcaaatgaacaatctttaggaatcttgtattactatttagtgtacaagagtagttgatagtactactactgatatgtctggtaaagttttctgctcttttagatatgttcctcaacgaatttgtaaaagcctctttttctctttatgggtatattctatgtagtgtaacaacttccttgatatgttgacctttcccacttgggtttacagtgtaaaaaaaagctaaaaactagctgagtgaataaaactttctgtttctggtaaacacaaacagttgcttaatttaagctctagagtctttaattttcttgttggatataagtttttttcttatttttgggatgtaaacagagcgaactaggcaggttgttacgggtactggaatccacccgaattttctctcctgcccattaggggttcttgagttaaattgatttcttgtttgaaatatagacattgatgtaacaatcaagtatattgtcttgttatgtaatttgcctttagtttcctcaaattgttttgtttgttttgctaggcttgaaaaattctcctgaagtggaattcgttttcattgccttat

SEQ ID NO: 1222 - DNA, 2713 bp, Cannabis sativa
actacagcttgaggggggctattataagattaccctcatttacatatctgttaaccaattcttggtcttgatctgttttttcagctgagttagttattcccaactaactcaagtcactctataaaaggtccctctcttgtatttgtaaagttagttcagaagataataaaattattacagagtattttactctgttctgcttctcctcttcatctgtttttcactcatagctgctattattgtttgcaaaatattttcccgaatgcgtgttagggtgattaagaagtttggaagggcaactcaacttccatctcccctaaaaaccttatttttgtagtgacaatatggcttcgtaaattcttttaattttagtgatcaataccaaattttacacttgctagtgcaactttctatttattacaaaggtgttgtaatagtattgttcacattttagctaataaacctcttagagatttgtaggagcttttcttcttctttgtttttttcatggtttatttccatttgcttggaagactttgtaaggggccgtatagttgtttggttcttaataaagttcctcttaaaaaaaattagaaacaaataaaaattaagaagagtaagagttagacaatgaacaaataagggaatgacttgaaactacgtgggaaaagatacagggaagtgggaatgaggatttatttatacataaacattcttcattcaaaatttgaagatattcttcatggcgccgccggattacatgttttggtccttttatatttccgaacatatatataatatgaacgtaaaaaggtcggccccataacttgatcctatcagaaatcaccacgtgtatctcagattccaagaaaggacaagaacgaagaatgggataattggcagtgaggcctagagagagaccgagagggtgaggaatacgtaaggcttgaggggaacgataacacgaatcatattgtattatatggtatggactttaaaagaaagtaaagaaatccttaaagtgagataaagaatttttttttttaaaataaaataaaattatatagaaggtatgggtgaccgccactaatcactttctgctttttttttttcatttctctctcctcctttttgtcctcatattaacaaaacccttgaagcaaacaaacctctcagaataataataacactccaagatttcacgatttggttctctttctctctctagctccctctccctctccctcgctccgtctgtctcttgtgttttgtttctattagcggtacgtcttgaattctgtcctttctagtagtaaagacctaggtactactctgaattacatgcacgtatatattgtatatgtatatgtaggccactgtatgattcagtcatatatatataaatacacattaaaatttgctttcttcaaacgagaagagacatttgctatttcttctaaaagcgttcttcttctttcttcgtgattatatggtaagctagtagggttttgaataccaatatacttatatatatttcactgatgcttttgtaatccttatattacctcaggtgactaacgtgaaagaggagtgtggaaataaatactatataacataaattagcagggtaagtagagggaaagaaatggcaccggtttcgttgccccctggttttcgattccatccaaccgatgaggaactagtagcttattacctgaagagaaagatcaacggccgtaagatcgatttagagatcatccctgaagttgatctgtacaagtgcgaaccttgggatttaccaggtaatgattatttatatataattaaacattacgttttataataagtatgcacgcatactaacttacataatttagcataaattttgtttcggaaagtttgggagtgatctcatctccaatagattgatttgatcacttttattttcatcaggaaataagcgagattatgttagttgaatttagtaaatattagtcaaacgttttctcgatccatatttttcaagttaaattagaaatttggaaacaatctataattaataacttttttttattcttttgacaaaaacaataactaatactttaatatttatatgttagagtatttttcttgcgaattcatatgtttgtgccttgattttgtttttctttcttccgttaagtgagcacgtaacatatatcggggctagaaaaccttttagaagaaatcattattgataaaaatgcgtcttccggatgaaataattgctgcttttttttttatcctccaatcaattattgaccgatttggatagtaatcaactcaagtgacttgatcgaatacccagtactttaccagtcaaatatgttacacttttaattatattagtatttgaggttatggacaaagggaagtactttaggtcgcaccaagatatggtccctcgatctttatcaacagatcgatcaagctataggttctgttgtgaacatgaagacttcataggggaagagacccgagtcaaaaaagcactccacggaaagaaaagaatggcattctcttcaagaaatatatgcaagatttcccaagcaatcctttacgtctttttaaaatataccttttttaattattttatttttcttgttgccttgttagggttttacttctaacgaacgacaagaataactacgacaaattaagccaaaaaataaaa

SEQ ID NO: 1223 - DNA, 3626 bp, Cannabis sativa
aataatatacttgatcaatgatttcttttttcgatttagcgtcttcgagaggccactagggtttctacttttgatgaaaattttacaaattttttctataaaattgttcgatcgacaatataataatattcattattaataattaatggtcgttaatgtttgagtaatattagagatatgaagttcatttataatcataccaataaaatcttgcgcgtacatcaatcgtatgacaatttttttagccacgtatacagaataaaaacgatgtaacatgtaacaggtacgtactctctctccatatatataaattggtttttggaaattaactattttcagtgatcagctagtgtatattatagtacatttttcaaaacaatattaatattgaattaatatatctataaaaatacatcacaactcaacctaatttgctagaatgtctcaacatgtttttaccaatattggatatttatatataatctttattcttaatcactagcttgtagttttctagagcagtagtagccaaaacttcttatacgtaatcactctcaaaggatcaaaccatacactaacaaaccatatatttagctcctcataataacaaattacaattataattctcacggccataataaaaaatcatcaatcgatctctaaatattaaccatcaccatatccgtacccatatatagaatcaaatatatatatcaaagataaaaccattgatcggacggtccaaaactggtggggtaaattaatagtaagtaatataaataaagaataagaaggattatatataaatatagtaatattattataaggtcacaacagaagggcacgtggtgggcgattcccttgctagttatttaaactactggcgactttcctgtaataccgttgagttccaacctcctctcaagccacagcctgtacatagctgtccaatcccttctccccatgtgaccccacactgcacaaaccccatagatatagatagatgtatagatatagtttatatctattaattattattcatattaactactattatttattattgggatctgtaaatgatcaatgttcttgtcgttccccattctcgtttctttgttccatttccctaactctctctctatactaatttctcttcttcctagctttcactatatatctatatcttttccttattataacaccctttctcaccagttttctaatctttgtcattgcttcttcttcttcgtcttcttctcgaaactataagctactacacaaaaatacatatacattacatttttctgggaagaccatcgatcgtgctgtaaatttcttattatagcttcgggtttctgtctattatagtaataatggcacagttaccacctaaaattccaaacatgacattacccaattggcccgacgtcgtttcacacgggaagctttcatcattagctacgaataatattcataataataataataacccatcatgggttgatgaattcctcgatttctctacagccaggcgaggttcccacaggagatcggtaagtgattccatcactttcctcgaagcgccaatgctggacgagtgccgcggcggcggaggagccggctccgtagttgcgccgccgcaaggaggagcgacgcttcctgggagcggtggtcacggagagttcgatagatttgatgacgaacagtttatgtcgatgttcaacgacgaaatggcttcgatggcggttgccgggcccaacgtgtcgtcttcgaacccttctacaccatccgatcataacagcatcaacgacgagaaggaaatgcaggtggatcggagtagtagtaagcaacagcagcacgttaagaatgagtcggaagaagtggatagccaatgcaactccgattcaaaccccaaccccaatgggacaacgacaacaaacgctgcaaacgacagaataattgatcccaaaagggtcaagaggtactctatactctatactaccaattattattacatttttttaattaatcatttaacttagttatttataatataaattaaatgatcttttttattaattataataatcttctttttctttttttttgcattactagaatcttggcgaacagacaatctgcacagagatcacgggtcagaaagctacagtacatctcagagcttgaacgcagtgttacttccttgcaagtatgtttaattaagtattattatcatgaccattaataattataattttaattatataaaattaacatcatatatattaacttgcgagcaaaattatacttttgttccgttcaaacatgttattaatttgtcgatcgagatttgagtgtatattcataatttgcatgataatgtaggctgaagtttcagtgctttcaccgcgagttgcgtttttggatcatcaacgcttgcttcttaatgttgacaacagtgctcttaagcaaagaatcgcggctttggctcaggataagattttcaaagatggttagtactgcttattataattccttaattaattataattaatttttaattaggattcatggtcatcactatcttattaattattcatttattcgatattgatctatacatgaaactaataataatttagctggtatttggtgaaaagttttattgatcttctgaattatttagttcaattttatatcattttttgctgaagtagtttatctccacatgaatcgatcatatagaattgcttctcatcaaattaaatttagttgaatatatgttagcatgaatcatttcatagatgcattgctctgtcttcgttagtgtattggttatgattagagatagagaaatattaacaataagaatttttgtttattggttatgactaataagagagagaaaaatatcaagtgactcaaacctcaaccaacccaaatgattaatctagctacccaatgaaatttaataaattttgggaccatattacactatctcccttgtcttttactgatgttgataccacaaagtttttagcttcaaaaacttcattttttctttatctaccaacattcaatgcactaaaggtcttataaggtcaatcacatggtagctcaagagtgtgaaactgaaaaaagagaaaggtttcatgtgagatcagctcttcttgtactctctatttatatatgtatgtgactacacactgttccttaattaatgaaaaatataaccattttgaagtggcatgggaaccccattacagcactactctgcaaaccaaataaatttctataaatggtatctaaactgtaacaaattaagctagctaggtatgtacatcgatggatcgatcttgttaagctttgtacataatttacaatacttttattattggaagctaggaatcaaaagaaagttgataattgatgggatacaaatgaatttaaacatgtcatacaaacatgtgtgtgcccatatgtgtccttgtttggacagtgtcacgtctgagacatgtgcacttatgaaaatgtgggttgtcacaatttttatatgttataaatatttatataatatatatgatgtcacatgtgttaattatatatagtatacaatatattttttt

SEQ ID NO: 1224 - DNA, 1720 bp, Cannabis sativa
aaaaaaaaaaaaaacttgaaagtttgttttaaaattaggaagagtaaacttaaacttgaatcataatataacatcatctagacattagaattagagatcacaatgcatggacaaagcaagagcagggcataaaggaggtaaattaccagcagaccataaagatcacagtaataatagaattcaggtctttctgccaatccaccaccccaacaacggatcatgttaaaattcatgtctgcatggaacttgatatctgtactgtagcgcttttttgaaagccgaagtaatccatccgacaatatccaattacctccacgtatgaaaataggctgcccattgaccttgaacagcctacataccaaaaaacattcagttatacaaatgctaaagaacttctgttctacaccaacagtgttggttatgaatacattgaaagtaccgaaatcataagatagctagaacacaccttccgcctgtagctttatcaatatggctctcaattttgcggaacccaaatagctgacgccatgaatcagactctccatatccttttacttcaattgtaataacaacattgtacagggattgttttcccataccattgggccaccataaattaggcttgtaaaaaaagagctgccaattgcactaattagcacttgaacagaaatttgaaagccagatttataaattctttaaccaaaaaacacaagataaaccaaaatcacagcaactttttattctgagactatcttacaactaaataagatgcagcacaccaggttattactgacctggggaaatgtatactgcacccgtgatcccgcggggattgacaaatgtcgcgtctgtagatgctctaccaaacacatgttaccttcaagctctgttgtcacttggatatttaaagagcactctgcaacccaggcacttctatttaccaactcagttgtagtatgtaaatatactctcttgtaattgtcatgaaatgttgaaaccaagtgaggatcaactattttcactggctgcataaaatgatggtaagtttattattaaaatgttaaagttgatagcataatcatgataatactggcataaaggaccaagaaagaatatcatgaacgatatgtgcatgtgcaagaagaagaagaaaatctaatttgcatgccatgtgatcacaactcacccctgtaacataaaaagaaacctcatcccatatgcccgtgttcctatccctgtagtaatgaccaaaaggaaagcattatatattcatctcttcattatctccatgctgatagggcagaagtacaaatgagaacactgatggacaagcatttatccctttcagttagcaatcttacaacaaaactgagataacaatgcagagacatttgccatatttcacaagatgaaaaagatatgacaattgacaataacattagaagttaaaaaaatgatcttcaattgtagtagatagtcaccttattggagctatccagtcccaaccttccacatattgtgtagcaacatcttttccgatctaacatgaaattaaataaaaaaaattattcgtttgcacattaattaacaataaaattcataaaaacaccatccaacttgacctagacacaatatcttagagaatttctgaaaaaagtttattgagtaatataagataatattttcagggaagaaaaataataagaccaatataaagtaa

SEQ ID NO: 1225 - DNA, 1507 bp, Cannabis sativa
ttttttttttttttataataattagcctctaaaaaataattttttttaatggagggtataaatatggtatatatgtattttttagtctataaaattaaattctaattgtgatgtataatatgattcaaatttaaaaaatactaaaaattgtactaaatttaacacaaaatataataataaatatcactattttatttattcttttaccacacactttttatacttttatttatatattcataaaaagttaatgttaaaagtatataattatacttgaaagggtcaaattagtttctggaataagttgaaaacaattagaagacatgtaagccactgtgagaataagggattgttattaggtactaatggtacttagtactttttataggtagcatcttacaatttattagcaatatttttttaaaattattttcttaaattatatttaacgtacccggtacttaccggcataacaatgaaaaaagtgttagacactagtggtatattttagcaattctcgcaagaatattcctgtttacaaattaagatatctaatctcattaatttatgttattttaaacgaggattaatgactaggctaggctagtttgcctgattaatttgatcatgctgtgttggacttggacgcaaagtagtgttctgtttctcttacttacagcttggtcgagattctatcatacgtggcaaacaaaagaccccattccaacaaccctttgtttctttcttacctaatcttttaataatttttcttcactatataaagagtacaaacgcttattaattcttatattatatacattgcaacactttgaatataataaccttcaaatatggccaccaatatctccatacttctcttcaattccatatttgttctcataatttctcttgccgttgtccaccatgctgaatctcatgaccaaatggtataaatatatatacatatattagattaatctttatcttatacttctttgttcattaatttgttatatattaattggactaataataacaactaattaataaaaatataaattgtactgtgacaggtgataacaaccaccgttttgagctcaacgtctgatgagtccaatcttcaaagtcctttgccacaaaaaataggtaactagtaactaccatttactaattattcaaaatatttatttctttataacattcatatatgctgccaaacctaatctatcaattaaaaagaaattataatataaaaagaagatagagatagaattgatgaacaaataatattggagtaattattacatacagattgtgatggagcttgtgatgcaaggtgtgaaaagtcatctaggccaaggctgtgcaagagggcatgtggcacgtgctgtgctcgctgtgattgtgtgccacctggcacttccggtaactatgatgcctgcccctgctatgccaacatgaccacccacggcggtcgccacaaatgcccttgatttatatatatata

SEQ ID NO: 1226 - DNA, 4440 bp, Cannabis sativa
accacccctcaagcgagagggtgaggcaagaaccccaagcttgtcgatgagaaattgaaatctggagtgagacagtcctttagttaaacagtctgcaacttgatcgtgggaagagatgtaccgtatatcaagtttcttctctagaactttgtccctgacaaagtgaacatccagttcgatgtgcttcgttcgagcatgatatacggggttagctgcgagtgcactagcactcatattatcgcaccagatcactgggacaacagggagtttaaatttcatttcattgagtagttcttgcaaccatgttaactctgctgtcaagtgtgctagagccctatattcagattccgtgcttgaccgtgccacaaccgtttgtttctttgaggaccaagaaatgagtgagtctcccaggaacacacaatagccagcaatagaccttcgatcatcggggcaacatgcccaatctgcgtctgaaaaacccgtgagcgccaacctgtcatttggtgcaatatgcaagccgtggtgaattgttccttttaagtatcttaaaactcttttagttgcactccaatgaacatctgttggacacttaagaaactgactaagtttgttgatggcaaaggatatgtctggacgagtgtgactaaggtattgaagagcacctatcacacttctataaagggaaggttctgccattgtttttccatcatgctgtgagagttgtttgttggcaaccataggagtaggactaggctttgtatttatcatgttgaccttttgtaacaattcagcaatatacttgctttgagataaataaattccagtaacatctctaaagacctcaatacccaagaagtaatgtagagcacctagatccttgagagaaaatactttgtttagttgagtgacaaacaattgcaattcctttgagcagctccctgtaacgattatatcgtcaacgtatatgaggaccatgagaacatatttcggatgcttcaacatgaacagagacgaatcagccttggagttcttaaagttccattttaacaaggttgttttgagccgatcgtaccaggcccttggcgcttgctttaacccgtatattgacttctgtaacttgcagacatggtgtggttgagatggatcctcaaatccttgtggttgttgcatataaacatcctcatcaagtgtgccattgagaaaggcattgttgatgtcaagttgtcggatttcccaattgtaagcaacggcaattgtgagaacaacacggacagtagaagctttaatgaccgggctaaaggtctctccaaaatccacaccaggtctttgatggaaacctttagcaactaagcgagctttgtagcgttgaaaggaactatcagcattatatttttccttgagaacccatttgttaccaactacattgtacgagtcacaagggggaactaagatccaagtgttgttgcgctttaaggctgaaatttcgtctctcatagcgccattccacccctcatgttgaagggcatcttgaactgaaaggggctcatgagtggcaagattgaaggatgactggccagcaaatactctcggtttgaagattccagccttcccacgagtaatcatgggatgtgtaggagctgcaggacgtgattcttgatcagataccggtgcaggagcttcatcacaacttgaggaggagtgtgaagggactggtgtggcacctgcagggctgtcaagatgaatgctagcagtgccattatcatggtaagagccagaaataggtgaaccaagatctgaaggagaagtagatggtacctgatcatgttgtgcagggccttgagccgatggtactgcaggaaacgaagatgaagatgaggagaaagggagattgagccacgagtgaggtgtgacaagagtgacctgctgttctggagagtaattattgaagaaacctgtgtgacatgggaattctttctcattaaaaataacatgccgagatatataaattctgccatgtgaagtgagacatttgtatcccttgtaaaactcactatagcctagattcacacacttaatcgagtgaaattggaacttgtgagattgatattttctaaggcatggaaaacaggctgtaccgaaggtttttagaaacttgtaatcaggtttcttgttgaacaaaatggagtaaggtgagttatggttgagaatagatgctggcagcctattaatgagatatacagcagtgatgaaggcatcggaccaatattttaatggcatggcagcttgtgcaaggagcgtaagacccatctcaactatgtgacgatgtttacgctcagctcgtccattctgttcagatgtgtgggggcatgagtgttcaaaaataatgccactgctgtgaattaaatcagtgaaggcttggaactcaccaccccagtcagttctaagccttttaattttcctatcaaactgtgtctctaccatggttttgaacctagtgaaggcctctagggcatcacctttattttttaaaggatatagccatgtgtacctactatggtcatctaagaagtgaatgtagtacttgaaattggtgtgagaagcgatgggtgcaggtccccacagatcagtatgtataacatctaagacaccattagctctagagttggattttgaaaaaggaagtgcgtgggattttccatattgacaagcatcacaaaaactaggtttctcattgataggaacttttacatttgacatttttagaacttgattcaatacatttacagaaggatgtcctaaacgtctatgccaaatgtcttttagggaatcggaaaaggcttgaactggttgtgaggagtttgctgtagcagcggcagtgaaggatgagggttgacagtgtgattttgtggagatggaggaggtgtttagttggtagagtccatctttaattgtcccttgcagtaccaccttccctgtgggctgttccttcacacaacaagaatcagagaaaaattccattgagacattattgtcagacgttagcttagaaacgctaatgagattttttgaaatggttggcacatgcagcatattatgtaaaagtaaaggtttattatcaccagattgaataaaaccagtaccaacatgtgagattggaagcttacttccatctcctataatgatttgctccttacccccatattcaactttattttgaaccttgttgggatctgccgtgaggtgattgctggcaccactatccgcataccaactttcatcgttcagtatttcgggtgtggccacaagagctgtgtgttgtttgtcttgattcccctcagtatttggttgatgtcccatatagttttcatcatatctgttgtaacagatagcagctgagtggccatatttgccacaaacttgacatgtgggtttagacccacctcctctaccgcctcgacctcttcctcctctgtaacttccacctcttgtgttgctagagctttggtgttgattgccacgatactgctggtttgtgttgaatcttcgtggtccagcagagtgattttgattgttcgaaccagagggcttttgagcaaagttagctgtagggctattgatttgtttgctgctgttagaaagagcattgagtctctcaagtctcccatcaaaaccaagcaagatgttctgtagctgctgccatgtagtgtgttctcgggcttctatttgtacaactattgacaaatattctgcatccaaaccagacaaaacattagaaattaaatgtttctcagggtaaggttcacctgccaatgccaaagagtctgcccaaatacgcttctgcttcagataatctgtcattgtttgtgttcctttacgagcagtttgaatccttgttctgagatcatccatgttggctcttgagtgtgctccataaagctcttcaagggcactccatagttcagcagcactttgacatcccatgacttcggctgcgatggcttcagtcatggatccatagatccaccccattaggagttgatcgtggacaagccaagcttcatagtcggggttcgattccatggtaggttgggaattctcatctgtgtcaacaccagtagcaggaatagtagggcgaaattctggaggaggtagccgagtgccattgatgtatccttccaagcgatggcctcggataatggtagtgaccattgttttccacagaggaaagttatttcggtcgagttttagagagaagggttggctcaacgtattgctaaaggggttagtaatcggagctgacatgggtaaggattgtgctacagccattgttgaggcttgcgcagaggtttgggactgtgtttgtggagtctggtcatgaggggttgccatggcgatagcctttaagctctgataccaagaaaagtttctatataaactttg

SEQ ID NO: 1227 - DNA, 4016 bp, Cannabis sativa
tggtattaggatcttttcttgtaatccagactccagttatttgaatgatttggtatactttgattgggttctgacgatattaggctttaattcaaagattttgtttttttcttttattactggaaagagtgccgtaccttttatgaagaatatcttgatttcatcacccccttttggatgagccagttttatcagttgacccttcttgttgtgattcttcttaacctttttcaataatttgtgatcaaaccgatttcaatttcgtttattagatgacaacacacaattgtacaacaccataatctgttgctcaaagctgaagtcatgctactccatttgagaatttattcaacagaaagataaatatctaacatacagaataattattcttacaaatgatgtgactgagggcatgaagaaaaagaaaatacagtataaaacaaaattgctgaggaagtagatgatccaagatgtatatcgttttttctaaataaattagttctatgcttctactgcctgttgagccttgggtgatttctcctttcttttagctcccttcttaggcaattcaaccccattttctccttccgtaaggttttcaatccttgcaaacactggtttaggttggcccattacctgacccttctttagtccaccccacttggtctcactctgcattcaaaactaagttgttagttcaaaagaggagctgcatcttaggaaagaagacacaaacttatccagagagagagagagagagacccaggttgcagcatcaaactgattcttcgagaacccgagctgtgcatatattctccagcataaacccggggagataggtgataatgcaattgctataatcctcatggtttccaatattatcacaaggtcctgctccaaaagtcaaaagcataaatatattgaaacatcggtcatttattaattctatacagacatgcttgacaaccttaactcactatatctcattgatgcacttcagtcatttaaagatgagaaacagctttcatatcaagacataaattttcctgtacgtgcacatgggcacacagacataaatctttctagtttattgaatactgttttctaccgcaaatggaagcaaataattagtaataaactgacactatcatactaataatccaggccaacaaaagtcacaaggtaaatatgtaaaaccttggcagcatcttcagcagcagcacccccttgcttgaaaagagaccatggtgctcgttcgtccatgtaagagtttccagcattaccgatctcaagcacagcctcacaggctgatgaaagagagagattttcataatttactcgagctttttcaacctgaataaacattcaaaatggaaaatcttatgacacaaggcttatggttatctatcacctacaaaatgatctgcttaccatactttttatgtcactaaccaagcaccgaacaatacagtaaaactgaattcagagaggtttctgattagtaaaagttgatgtacctacaactacaagataagaatgactcatggactcctagctacttggaagacacatatcatgataagttcattcaattttaccaatttttctacagcatccttgaacttagttccttcagctgcagtacttgaatccgtaaccaaggttgattggcagttcttcttcagaagccctagagtacgattaagaagatttcctgcaaagagtaagctgctttaatatccgaacaattataacctaaggcaaccccaaaatatccaccagattatagaataccaatggtattagcaagatgtgcattcacaatgttgatgaagcgttcctctgaatagtcaccatcacttccgaattcgacctccctcaggaaaaagtatctcactgcatcagagccaaatttgctaaccaactcatttggttcaattgtatttcctaaagacttccccatcttcataccatcctatattacaaataaaaagggttgctgcataaagtgaaatcacatgaatgagacaaaatttaagacgagacttcttaacttccacagctactttcaatttaacttcaaaggaattatccttgcacctacaatcataaattccataaataccagaatatattatatgcagcaattaccacgtatcatctttattcccagaaaccaaatgctaggtctgtgacataactctaatagctctcttagggaaacttagatactaagttattttcacaagaaaactacaagttacacactaaaagttgtacctttgtcaagaatccatggccaaacaccatcttaggaaggtctagtcctgcagacattagcatagccggccagtaaactgcatggaagcgtaaaatatcctgtagacaaattaccaattactattgtagaaagtaagttctgtacaaaaaattgataaataaaattagtcgccactacttttgaaagtacaggaatcaacaactgcacatgagaacaacacaccactaccaataacataaagcacatgaagatggaaaaagaagggaaaaaaatatattataaacatcacttctggtatattgttacgccacctataatagcctaatcaaggagttttcttgtataaatatggatttgtggtaattttttcagggaggggaataaattgtaaattgagtattgatactcagagagtgattccagcgactcgaacttttggaaatctgtgattgaaattctttaactgattcaagaaaaattcttcctctctcttcttttctttgcttctctgtggaatttttggtgtaacaaagtggtatcaaagcagtacatctgggagacaccatggaactcaagaaatcaccaagaacagtcggaggagacaatggaaatagagattacgttgacacaaaaattgaagcggtcagaaatgagatgcgatagttctatgaggagattacagcaatgtttgggaaaataatagagaaacaagctgaacagagtgggtcaactaagaacaaggagccccactctaatccaccaatttctctaactcttgaaaaatctggaaaactcgtgcaccagtcgaaaatgggagtttccctggcaccgttagtggagacgactggttcttcgtttgatcactactgggaattatgccttcaccgattggagcttcccaccttgatggttcaaaccccgtcagctgggtagtacgggctgaaaaatatttgaagaccatgttgactcaatttcaaacatttcaccttgaggacaaggtgaaagtgcacccgagggtattgttacaccacctattatagcctaatcaaggaggtaataagtgttttaataattagtggtgaggtggtagtcaaagctgatgtggtagccaaagaaagaaggaactcttagttttcttattgtataaatagggatttatggtcattttttcaggggggaataaattgtaaattgagtattcatactcagagagtgatccaagcgactcgaactgcaggaattctgtgattgaaattctttaaatgattcaataaaaaatcttcttcttctttgcttctctatggaatttctggtgtgtaacaacatatatactatgtcttcctcttgttcaaataatttaaaagcaaatatacattaaatagaacaataaatattatatataactctcaattaaccatccacaaaccagaaatgtaataactaataaattaataatgacactttggatctcagaatgtacacaataaatctcaaaggaaaaaataaaaattgctccctatcatttaaatatcaggtaaattatatgtcaagagtcccaagatgaagatcataaagacaaattcttgacaagaatacctgaggaaagcatcatactaaaaacagataaacatcaactgaaaaatataattaattgaagatataatgaactatttcagcaaacataatgccatgttagtaccatcctgaatgaatatatatacatacacacatatat

SEQ ID NO: 1228 - DNA, 5748 bp, Cannabis sativa
tcatggaaaagaaaggggtgtgagatgcatttcagctgaagaagaagcaggggagaaagccacagctgaagatggaatagctcaagccaagcgagagagagggaagccacgttggatgaaggactatgtcttgaagatggtttgttaggcataaaagttgtaaccgtttagtgttttgcttttttctttcttgttgctgctcatataaaagagaacaatgtaaacaattgcttatgcttgatgaattagcaaattgctattggagatttgccttgtctcgaagaaggctttttactaacacgggtgctttcattgcttcttcctcactatgaagaacgaggaactagcagcgttgatgcaggaattgcattccaaattggatgctcgtttggatgcgaaatttgagcagttcaaaggtgatcacgcgtcggagctgcaatcgatgctggaacagcgaattgctcaatcggaggactggatgacgaaacacgtggctgaggcggaggagcgtttagctcaggtatcgctgcaacctccgaatggtggcacaggggacaccagttctatccgagatcatcaccgaacgagggagcctcgacccacttctccgatgattggcagtgaagtccataatgttctcaagactctccgagtcaaaattcccagattcgatggtacagatgtggataattagatttatgaaattaacaagtttttttatattcatcaggtggagcattccattcggttggcagtggtgtctttccacttagatggcgcacctttggcttggtttcagtggatggaaaaggctggtggattcattgattggcattcattccttcgggcacttcgactgcgctttggggcttcgatttacgaagatccattgggtcggcttgcgaagctcactcaaacgggtactgtaactcaatttcgtgctgaatttgaggaactaatgacaagggtcactggtgtttcggatcacatgtttctgaccttctttgtgtgggggctgaaaattgaaatttgccgagagctattgatgtcgactcctacagatttggctgatgctatggccaaagcacaattgtatgaagaccgaaatgaagatttgttcactcgttctcgtaatggaactccacggccaggatgggtcccgaaatcaagtcccatgagtcccgtaacacctccaagatcaggtacagcagtttcttctgctcctctttcacattctacagcagcaacttcacataaaataggtgttactcctttacctgttaaacgtttaactccggctgaaatgcgggacaaaagggagcgtggtatttgctttacttgtgatgagaaatatagctttggtcataaatgtaaaaacagagtaacggtgctttgcgttacggaggatgatgatgttgatgatgagttacagccaaccgaaggggggaatctcaggttttagaggataattcagtggatgaagtcagcctgaatgcgttgtccaattcctctaatccgcagatttttcgaattatggtcaaccatggagcagagcaattagaagtgctcatcgatacgggaagtaacaacaatttcattcaagagtctctagctacccaactaaaattacttcaggaagacaccaagtgttttaaggtgtatatgggtaatggcaattatttactatgttccaagatttgtaaacaagtggagttgatcttgcaaggccacactttcattgttgatttgtatatccttcccatatatggtttggatgtagtgttgggaatgcaatggctgcaaatgttgggtctgtgtgttcatgatcataaagcgttgactatgagttcacttggcaaggtagcgtggttaaacttgcgggatctcaggataccgctcctcatcaactctcttactcgcaatttactacgctgttgcgagagatggacaaataagagggttgtttcgacaaactgcggttatggaggagcatggggttgatgctttgattccctcatcgcacaaacaacctataccggtggaaggccagcaagttttacaagagtttgtggacgtttttgaagagccaaagcagctacctccttatagggaagtcgatcatcgtatttttttgcaaccaggatcggcttcggtgaacgtgcgaccgtatagatacccctattttcagaaagatgtcatggagcagatggttagtgaaatgaggcaaatggggatttgtcggcctagtattcatgtattcatcgcccgtcttgttagtaaaaaagaaagatggtacatggcgtttttgtgtggattaccgtgcattgaacaacatcatgatcaaagaccgatttcctattcctactattgacgagttgttggatgagttaggcaatgcagtggtattttcaaagttggatgtaagggccggttatcatcagattcggatgcatcccaccgacattcacaaaatagcttttcgaactcatgacggacactacgagttcttggttatgacattcggtctcaccaatgccccctctacttttcaggcagccatgaagaaggtatttcggcctctacttcgagtttgtgtcattgttttttttttatatatgatattttggtgtacagctccaccaaagaagcacatgtggatcatcttcgacaagttctccaactacttcgccaacacaaattctttgtcaaagaatccaaatgtcaattttttcaacactctgttgattatttgggccatcttgtctctgcctaaggagtgcaagcagaccccactaaaattgaagccatgcttaattggccccaaccaaagaacttgaagcagttgcggggttttcttggtttaacagggtactaccgggggtttgtagctcactatgccactattgcagctcctcttacagaactactcaaacgagacaattttaattggtctccacaagcagcccacgcatttgaagaactaaagggcgccatgacaagaactcccgtgctacggttaccggacttttcaaaggaatttgtggtggaaacagacgcttctaatgtggggattggcggggtacttatgcaagaaggacacccacttgcctactttagtaagaaattgggcccaaggtttgtgggagcttccacttatatacgggaaatgcgagctattgttgaagcggtttctaaatggcgccaatacttattgggacgccatttcattattcgcactgatcataagagtttgcgtgaactcttgacacaagtcatccaaactcccgaacagcaacactttgtccgtaagttgctaggatttcatttcaccattgagtacaaggcaggtacattaaattcagcagcggatgctctctccaggcagtctgaaagctccttttctgttcttcaaatggccatgagttcagcttcttttgattttttggaggagttgaaacaagaaaacattacttgtccggatctccgactcattcatgaacagctacaaaggggggaactgatgaattctccttattcacaagctgacgggttgctttactatcatcgtcggctagtcatcagtgaacactctaatctcaaacaacagcttctcactgaatttcattcctccccagtgggcggccacgcaggtgttgatagaaccttgatgcgcattagtgccaatttcttctgggttgggttacgggcggatgttcgcaagtttgtctcggcttgtaccatttgccagaccattaaatattcacctacagccccatatggattattacaacctttggagatgccagaacgggtttgggaggatttatctatggatttcattgtcggtttgcctaattctaatggagccaccaacatcctcgtggtcattgatcgcttcactaaatacgctcactttggagctttaccaattcattatacagcaaccaaggtcgcagaccttttttctcacatggtgattcggctccatagcatgcctcggaccattgtttcagaccgtgaccctgtgtttacaagtgccttttggaaaaaattgttcgagttaatgggtaccacattaaaaatgagttcagcctatcacccccaaacggatggccaaacggaggtcacaaactgctacttagaacaatatttacgtgcattctctgccgagtaccccaagaaatggagcaagtttctctcatgggttgaatatcactacaatactacttatcactccgccatcggcatgacaccatttcaagcagtctatggtcgtaccccacctaccattccagcttacactagaggcaccaccactattcaagcggttgaggatgatcttctcactcgagatcaaatattgcagcagctgaaacataatttgcagcaggcacgccaccgtatgtgccaacaagccaacaaaaaacggcgtgacatcgaattcaaaataggtgatttggttttggtgaagttgcaaccataccgacaaaccacagtcgctcataggctgaataccaagctctgccgctgttactttggccccttcaaagtcatttcaagggccggaccagtcgcgtacacactgcaacttcctcaagacagtcgaatccatcccacatttcatgtatccttgctcaaaccgtatgttggatcttcaccaccacaatgctaccctcttcctaagttctctgttgccaacaaacctgtgatgacttcgttggcaatattagccactcgggtacagcaagtcagcaatcttcccaagcagtaagtgctagttcaatggtccatgagcaccccggaagatgcgacttgggaagacttcgaatcttttgtgcagatgtacgggctgcataaccttgcggacaaggttactttcgagggagggagtagtgttagcacggcctaagtgctaggcccaattgaattggaccccaaaatgatacaaaaagggctatccaagtgggagagggaaatcattcagctggctgatacaagtcatggaaaagaaaggggtgtgagctgcatttcagttgaagaagaagtaggggagaaagccacagccgaagatggaatagcttgagccaagcgagagagagggaagccacgttggatgaaggactatgtcttgaagatggtttgttaggcataaaagctgtaaccgtttattgttttgcttttttctttcttgttgctgctcatataaaagagaacaatgtaaaggattgtttatgcttgatgaattagcaaattgctattggagatttgccttgtctcgaaaacagctttttactaacaattaatttgcaaacggaacagaagataatggttttaccatcaaaaataataataaaaaaaattaacttaaaaaaataaacacataacggttttgctattacctgtacaatatactatatgcttgagattttatttatttattaatattgggattgaatcagtcatgagaaaactagctaaaacgtgtcaaaagaactatgccgctacatccacgtgttggacactttgcagaagcagctctgcatgactactactactgcatgcaaattacaccgttcaatgcaccgtttctcatatcttactaataccccaaattgtccaattctccctttaaaagaaaaaacaacataaatccgaggacataaaagtaatacactaccaaagaaaattccacaccaagaagaatttcaaggaaggagtagcttagccagccgcgcggccgagaaaaaa

SEQ ID NO: 1229 - DNA, 5915 bp, Cannabis sativa
aaaaaaaaaaaaagagaaaaaattcaaaacttggattttatattgtatttaaaactgatatttcaaaaatatcattcttttaaaaattatttatttctctattgaatttccaatattaatcaggttgattagctgataatgtgtgtgttgtatttagctatataatcaataaagaaaattaatattaatttttttagaaaatatgcaagattttatgtctctcttacttattctttttttaaaattatatatttatgtttgttataaatagaataattaattaaaggggattgtttttgttaaaatgataattattgaatgcacataattccaatggtttaatatttttaattctaatgatatgaatattaaaaatagagcaacatgaacacaaatgattatcatgtttgcaatcatttatatcaaatataatatacatttatatatatgctgtaaagtgaaataaaataaaataaaataattaaaaacatatattcatgacctttatacagttatactgaccccaattatataaatatatatatgacttattcctcaattattattataatatacaaaataatatatatatactcttaaaatcacatggtgctttattaatttataataatctgctgtataatttcactaatttgttttattgactgattaattaaatttttttataggacaagactgatacattttattgaatggatcaagtctgttctgttattaactagtattttagtttaattttgtatattttataaacaaattttatatgcatataggtttgacaattgttgacaaatatttataattataattattaactaataactacaatgcaccataataaaataagtattataggttacacttgatatcagctcaagttgggtgtatctaattgtaattatataaattaagcctataattaatcagatttctaaagcataaaatccctttattcatattcatacatgttctctaatttttttttaatttcaaatgtgtgataaacttccataaaaaaaataaaataataataataataattattattatgtgataaacaataggataccatatatgtgggccatctatgattgtaatatacttttgttcggacattttttatttttggtatatcaaacaattataaagtatttttgttatatgatggtatatattataattattttaagtattttgtcaatttaaaaaaaataatgaataattagtttcgtgtgtagttattttattttatacgcgtaataaattattttaaattttattttcgaaatcgtaatttttttttaaaaacaagcattatgtctattacaattacaatatacaacgtaatataaaaaaaaaaaattaaaatacagaaaataaaaaacacccatacgataagaacaaaagtatattattttaagacattaaagtcttatatctctttcatagagatgtattgtaattttatcccaataattctatatagttgttacttgttaccactctagaatccaaacctaagaactcactataattattaatgttgttactctttagtagaatcaatatgtaaaaaagaaaaatgtccacctatattttttttttcttttttgattgaatgtccacctctaatttttgaaaagtaatttcccaattttattttatctttttcattgattttgtttttggtatgaaaattatgaaaagaaataaaaactaaataaatttgaatattatcttttatataggtgaaaatcaaagacatttcatagttcaatgttgttggaactaaattgcttgaaaaataaaaaataaataaataaaaatatgttggaactaaataactatctaatatttatgaccaaattatttttatgttacaaagtgaattggaaaagatataacttgtattttctattacctaatgttactacaaatggcactactaaggggtaggggttaatttttgcactgtaaaaagctcaacaatagtgagaagaactaagtaacattatcgttacatgtcgaatttcaagagctaaaagagctcaaaactttatgcccgccatgccattttcactcccgtgccacctcaaactctcttcaagctcctgaacctgaggatttaaatgttagatagagaactcgggaaaaaaatatatatagttgagaatactgaaagcgcaatcagaataccggtggggaatcgataagaacctgccggtttgttcttccacatccactcctgagcatgctgctgatgcccctgaaatcacacacattaagaattaatttgtggtatcgaattctaaacactaaaaaaaccgaaaaaggaatgaaagatttgggggctctttttacctgcatgttttgatgacccatcattcccgaagcctgatactggaatattacgtttaatggtcagtaatcggtaataatgacaattctattaaatctcttatgctacttaaaaaacaaaagagaaaaagaactgacagtcgaagataaagaaggccgtggcagctgctgttgaggctgcatttggaactgtgtttgatgctgtatctgcggtgtttgtgaaatttgttgggaagtttgaagttgaggaagtgactgggaatgaggctgcacagctaatggcttttgctgctgctgctgttgctgttgctcgaacaatatcagctcctcgggtttctcccactaaaggtttagtaacaaagaaaaagaaaaacaagtcaagccacataacctggtaataagaagcccactaaccgatgctagtttctcaccttgctttcaccagtgacactactgtaatagtatttgtatccatctggagaggtgtgctctgtccaggaacattttacagggttcgtcggaggaataggagtagcagcagatgtggatgaaggcacatctacagatattgtagctggaaccatgctggtcgctgcctgcggaacattcccaggccactggaaccacaagaaacacagaacatttggcagaatgtaaataagttggtattgaattgaaccaaagatcagagtactaacaacccgtgaaagcgaagaaagtaagaaaatgaaacgtcattgtataaagctattactagataaacacaaggctcattaatttacctgctgctgctgctgctgcttgatatcctgagtagtctgctgcaagatcgaaccttgatttggtggttgcatcagctgttgcagctgagagactacctgccgagaagactgaaagcttgcttgaagagcttgcttttgttgtgacatcatctgagctaaatgcgaagaagaagattgttgaagaggttgaggaagttgttgttgttgttgctgtacagtgccggggttggcactctgctggatctgaggttgaggaatagattgcagaccatttgaaccgtgcaactgctgggatggcagtggttgactcatgggcatttgaacagaagaataaggtgcacgtggctgaccaacgtgctgctgctgcagtgatgcaacggtggtttgtgcttgtgaataaggagctggcatctgcgaatggagttgaaaggaaggaggcaattgctgaggtgattgaagaggtttttgtgatggagatatttgttgactaactggagctacttgtggcatagactggttaaaattctgcaagaaaaaataaagcattgtcaagtaattattaagccatcgttaaacaatgactgaaacatttgagttacagatatccactgtaccaccatggataattagtaaattggagtttcttatcagaagtatatatgttaattttactggtttactattttgtatcttagaatttagaagagaaataaatgaaatccaaaagaattacaatttgagaaatctctcttagaaaaaataaattaaatgaagtataatttctttattcctaaatccatgaacatgccgcactgtgaaaaaaacgagtattagcagaaagtgaagttacaaatagcaccatatgattcttaccgtcacaggcaaagccatgtcagcagaccttggatgcacctggcctccaaagccataattattagcattagatgatggacccatgtttgtgggactcattgggtcccaagcatttcgatccctcatagggtcaccgaaatttggtactggtctgttaaagtgagtatgtaagcaaacaaaaaagaataaataatggtaagctcggctgaaaaagttaaaggcagacaaatacctgggccccggaccttgaaatcgaggccctgaacctgggcctccaaatgcaggaaccctaataagtgtaaaagaattagacatacagaaattacttggcaacatgcagaagaagtatcaatttaaaaattatgccagatcaatcatattttaagaaaaccaaggtgtaaaaagcacaaggttcttataaggttcagatgatgataaaagtcctcgttagaatgtgaaaaacggaaaagcttccagatccatccaagagtttaaagtgtctgacaaaggaatttaacacctaaagaaaataaagaagtgaagataagaaaccttgaatctccaggcctgggccttttaggatcagcaaaccgaacagtcaatggttgatcgcaaccctgggatgaacacaaaatttttacccattacttaccttcaatcataatttgtaaacaggatatgattaaagtttttccagtgaatacttactctcattgtataggttccattaagagcatttatagctgccaatgccatctccctctgagagtacttaacaaatccacatccttcaatgttaaaaaagatgttacataatattgagtgaaaaaaaatacaaacaaaaggatctgagcagctaaaaccttgtccaaggacaaatgaaaatggactcttaagtcaattcagagtcattattcataaaggaaacaccaaacaatgaatagagcatccgaatatgatgtcaaatgcacacacttgttatagaaacgattatttccaattatgattaacaattaaattagttatcaccataaaaagaataaggagacacgacaaatcgaaatccctttgtgagattgtaacacagcaaaaagaaaccagaataaaattaaattcagcaagagaaagagcacataccgcgactttgcttcaactcatcacgcatgagataaacatcttcaactcgaccatattgtgtgaatatctgcaaaaggaaacagtattggctgtgcataattcaagacttcaaaccatataatcttgggcataaggaaaaataacttcataaataaaatttataaaatataacatattttatttaagaaaaagtgtatttagcctagtgtacatttcacagagatatgtcacaggaacaatatctttgccaagaaaacaaaaatctcaagttttaactatactaaaaaaaaatgtaaatgacctacttcctcaacatccttttttgtcgcttgcttgtccaaagatcccacgaacaatttgtattctaccgcgcctagcataaaaaagggattaacatcagctatttgtgtatgagttaaataaaaatttcccgaccattagtaaaagaccttggtttttaaattttatatgtaatatagataacaaaatgtcaaatgatataaagaaaagaaaaagtcactaccaaggcgctctcgttcgccatcagcatatcgaacttgaataggacccactccctaggaaacataaaacatgggaaaacaagttaatatagtacaggaaaatgaattaaaagaattactaagatcacttaccccaggaagagtatgttgattatgtaaggctctaatagccctgtcagcttcttctgatgttccaaattttataaagcagcaacctgcatac

SEQ ID NO: 1230 - DNA, 2984 bp, Cannabis sativa
atatatatttatataaaagattcctattttatttcttttttcgtcgtgaaagaagagcaatgattttcttgtttgtttccaaagaatatattttacttttttatttttaatttgagtgatatttgttcttctctgagctgggtttgtttatttttggataaccagtgacaaatcttgattttggaggggaaaaataaataaataaataaataaataaaaatctgggctttgtgttgaaaggttctggtgtttcctattttgattttgttgttagaagggaaagaaaagaaaaacacatttggggtttgagggaaaagctcaagattctgaagctgtttccctgacattgacatctgagataggggtttagtgtaaaatttctgatctgatctgtatttcttactgttgctttgtgatttcttatatacaacagtgcttttgtccaagtaagtatatttatttgaagtggagttttgagtcttgcttagtttgggggtctggatttagtttgtactgtattgggactcagtttcagtattttggtggtcatttgttttcaatttttgtttaattggattagctttttgaggttctggtattctggttcaaagctaggttgagaggttttttgatatggggaagcaaagtgggaagaataaagaaaagttaggtgatagtagtggaaagcagagcaaaactggggatagtgtctgtagcccaaaagcccatgataaggacactgaagtattcatttccatggctcaagaattgaaggatgagggtaacaagttatttcagaagagggatcaggaaggagctatgttgaaatacgaaaaagccctgaaacttcttccaaagaatcatatagatgtgtcatatcttaggagtaatatggcagcttgctatatgcaaatggggttgggcgagtatccgagggcgattcatgagtgtaatctggctcttgaagttagtcctaagtacagtaaagcgctgctaaagagagctaggtgctatgagtctctgaataggctagatttggctctaagagatgttggtagtgtcttaaccattgagccaaacaatgtcatggcattggagattgcagaaagggttaaaatggcacttgaaaagaagggtttgaaggtgagtgatacagtaattgagttgccgccggattatgttgaaccaccaatttcattgcctccacagaaagttgtgaaagaaaagttgaaaaagaagaagaagagcaacaaagttgtggataaaaaggctgtggagtttattgaagataagaaggtagaggataaggttgatgaagaaaaggctgaggagaagaaggctgaagacaaagttgttgtggaggagaaaattagtgtaatggaagcacctaaaagaagtgtaaaattggtttttggggaggatataagatgggctcaggtgccagtaaactgcacactcatacaactaagggaggttgtctgtgaccggtttccgaattcaagagcaattctcattaagtatagagaccaagagggagatttggttacaattactacagatgaagaactgaggtgggctgaaagctcaggagaatcacaggggtctgtcaggttttacattgtacaagttgatcctgaacaggacccgttctatgagaaagggaaggatggggaagatctgtgcatacatggttttctggaaaatggtgtagctgaaaatggtaatgtggatagaggaaaagaaataaagaggtcgtcttgcattgaggactggattatccagtttgctcagatgttcaggaatcatgttggatttgaatctgattcgtacttggatctccatgaacttgggatgaagctctattctgaggccatggaggagacagtcacaagtgatgatgctcaagatattttcgaaacagctggaggcaagttccaagagatggcagctttagcattgttcaactggggaaacgttcacatgtcaatggcacgtaagagagtgtattttacagaagatgcttcaaaagattcagtactttcacagatcaaaactgcttatgattgggcacggaaagagtatatagaagcaggaaacagatatgaagaagcattgaaaatgaaaccagacttctatgaaggctatctggctatagggcagcaactgtttgagcaggcaaagctctcttggtactatgcattaagcagcaatactgatatggattcatggccttctacagaggtactactgctttacaataatgctgaagaaaatatggaaaaaggtatgcaattatgggaggaatgggaagaacaacgcttgagtgaactctcgaaacaaaacagtgttaaaattgagattcagaagatgaagttggacacactttttaaagatgtatctccagatgaagcctctgagcaggcttcaaacatgaggtctcagatcaacctcctatggggcacaatgctttatgagagatctatagtggaattcaaacttgggttgcctgtatggcgcgaatgtttggatgttgcaattgagaagtttgaacttgctggtgcttctccaacagatatagctgttatggtaaagaatcattgttctaatgatggtacactgcaaggtaatttatttgctctcctcagaattaggctacttgtgtggcagtttaacaaattaattgatgtttctatatggtgcaggtgtaggattcaaaattgatgagattgtgcaagcatggaatgagatgtatgaagctaaaaagttgcttagtggaataccctcatttcggttagagctcttattcagacgaagagtctcaaaactttatcatgcattggagcatttatgaattgatgattccaagttctgtaaaatgtccctttttctgactcaatcgcctgaaaatatgaatcctatgcatactgaggtatgtaacactgacatttgtttatgttttactaatgagaaatgctaaagagcat

SEQ ID NO: 1231 - DNA, 747 bp, Cannabis sativa
ccctttctatctcgattgagcacttgaaatttttcaacacactaggacaaaaaactcgcctcctgctgtacccctatgccaacaccacacgattctagcagagtttagcaattggacaggttacaaatgcatgtaaaatagattcatcatctagtgaacaaactggacaaagagagcaaacctctacatgttttaagcgaagttcaaccatggtaggaagaaatccacttccagctctcccaactagatttttcatctttgggggaagcttaaggttccaaaatttattcacaaaagactcatccaaattcacctctcctttaagctcttggatcaatttataggcacttttaacagtatataaaccagataattctctggaccaggtgagacaatcttgagctaacaaaactcaaactggaatttgaagaatcaattcatggtctctcaattcaaataaatcattcaacacttccatatcccaatccgagccatccattgtcataagattagagactttgcattaacaagaatcgggtgcaaagaggtaaccattaggtttactttatcaggtaaccaagatttccctagcaccgaaatacttataccatcaccaacagaccagtgaacaccatttagccactaagtattgtgcctcaaaaacactgcgccaaacaaaacttgggttggaaccaatagatgcagtgaggaaggttccttttggataatacctggctttgaaaactc

SEQ ID NO: 1232 - DNA, 878 bp, Cannabis sativa
aaacaaaacaataaaagcacctgttgcaacagtggatttggctgttgtgctgaaaacggcttatgatttcctccggtaagtgtttgaatcatgttactatggccttgctgcacttgatggagccgctgcaaatatttctccctcagatctggtgcaacttcagttcttccacgaaattgtccctgaaaatggaattagataagtacacaaacaacgagatggtcgatataatctatattctaaccaaatatagtaactttccagccaaataataataaatttcttatggaatacagcttaaagcacttatatgtgaaaaccagagatagcaaagacctagtatcacccacaacttcaagaataataaaaagtacatgttacacttaataatgtagttcattcaaacataacataaaagagtgtcacttcagattgtattttgtccatattcaatagatggatttgtggacttttagacactaataaatttcaccataacagccattacagaaaatataaaaatgttccatacacagcctaagataatttgaagacatattggagtgagaaattaatcataacagctatttgaaccaaaagtttttagagacattctgaaggaatttctcaagatcaggcagcctctttaagaacaaaggatagctttgcaagtgaaaaagaaaaggctaacaaatgtggaatgtgaggtgggtaccatggtttcgcaatggtgcttttagagctgtatgcaggatatccattatattgtcaaactgaacctgcttgtgtgggttacatcagagcatttcaatttgtataaaaatttgattgtttaaagaagacgaaagaaaaaaggtcagtatgtgtttttcatgaca

SEQ ID NO: 1233 - DNA, 2829 bp, Cannabis sativa
ttattatatgtacttacaattgtgattgatgtcggtagcttacaagaaaagtaaatgggttctcaataatcaactacgtgcatttagaaagttaagaactttaggctaaggtggctttgtaagatctttttgtacccccaaatttgagtttaatttttgtttatagtatggcattcaaaaggtttgaaattgttggctaaaattgttttttcttaagagtttttgtccctttatcttaaagatgagttatatagaattgtaattaaggctttacttaattgtagtttttgtccctgtatatagaattgtaattaagactttatttaaatgaaaaatgtaactgacaattgggttttttgtagttatattaagttattaactgtgaaagtggtttattattatcactattaaaaaaaaaagtgtgaaagtgaaattaaaactccaatcaacattgtagtaatttaacatcattttttttcaaatgaagaagcagaagtttggcctaagcttaaacttttctatgcccttctcttgcccatgtatccaatatcatatctgctaagaattcatttaatggtacatcacttattaacctgctgttttacttagagtttagacaatgtactaggataatttatatttttatattaatctagcttaagtttatgtgtctctcgaaagccagtacgccatataccctgcatttgttttctattattgttcggttctttaacatgtttctgtgctctcttttctctcaatgaccagtccttgtcaaccagcattgaaggaggaaccaaatggttggttaataaaattaaaggttagttcatactttttgttatattgcatgaaatttttgtgtgctaatttatatgaatgactcatgagatttttgttggttttgctttaaaatgtgttttgatatatgcaatgttagggtgtaaataaatacggtttcaggttgattttttctcatgacatgcacagcttagaacagaacacttaaaaaagaaaaattagaatcttgaagctatattttctggtgtaaaatgcttgagagaagtaataagaaataatagaaaggaagatggagaaagaagatagagagagagaagtgagaagaattgaggcttaggaagagggaagtaggattgatttattaatttttgtccagaatgtttcacatagcaaggtctatttacatgcagcaactatgcttgaaaacttaaagagcataactgtatctcatttcaaatctgactattattcaatatcataatagtactttaattttcgggaattataccaatggtggaaatttgtccttttaacagcattgcaaagtgagatctgatacatctaagcctcgagtactatatgtgtgtatgtatgtatgtatgttagaatagtccgatcaggtacttggaacaaatttcttgcttttcgcaatagtaatggttgtgatgaatctagtctctgatgggaacttggggaacattatattgaacaattttgaaccaaggaacaaactattatagcgaaaagtttctagtatgaatcgagtatggctttttttttctgttataaaccataagctagttatgcagcctattaatttttggatttctgcaccatatatgatctacaggaaaaatgcagaaggcgttgcctgagctgctgaaggagtatgatattcccgtgggaatctttcctcgtgatgctaccaactacgagttcaacgaggagactggaaagcttattgtctacatacccgcagtatgtgaagttggctataaggattcatctgtcttgcggttttcaacaacagtaaccggatttctagagaaaggaaagttagccgatgtagaaggaatgaagactaaggtgatgatatgggtaaaagttacctcgatctcatctgatcgatcaaaggtccattttacagctgggatgaagaaaagcaggagcagagaggcttatgaggttcttcgagacggcgtttgtgtggataagttctaaattgatacttgttgtgccggagcaggacgtttataagctgtaagtctgtttagttatcaaattttcggagactttccctttttctgaatgattcgtttatgtaagtacaaaaacttagaagaatcatattctaaaatgttggttgtgcatgtctaaatgatcaagaacccttttaaattaattttgtggttttttcatacatttgatattatttttagttactattttacactttttttcaaaaacagtttaaggtaatattttttacttttttttttcataaacagtaacttgaacctttccgattcggcttctccattttattattccactcccaattcattccaacctcacccagtttatcgggtaccagattataattataatcctgtcttgtatccatatgaatatggtacttctcctacctcatattttccatgtcaatacgaaaatggtatttctcctaccccatattcataccaacatggtacttttcctaccccatactatggtcattctcctaccccatatccataccaatatggtacttctccatatttgtatagttcttctccatacccatatacttataaataagagttaattttcacctagtcttatgtgttctgtcttttttattttataattattagtaaattctttttcgtaatattaaacttgaccaattgatactattgtttagagtgtaaatgctatttagtctttatttagtcttgtttctttttgaagatcattaatgtacacaattgataattatgttaagatcgattgcctatatatatatat

SEQ ID NO: 1234 - DNA, 4408 bp, Cannabis sativa
aaaacattctttccccatttttattatttagtgagctttttgatgaaaatctatattatataacttgagaagcttgtggtgtgacatttataaagcattgttattgttaccatcaatgatcttaaatactaaaatggccattctcattctatggatctttttcatttttaagtttcattttaagtttctttttatgtatttttctctcaatggaactgcaagaatactcttgtattatttttcaacataagatttcttcattaatttttcccaagtgctgaaaaacaataagacacccactaccaccactagtctattattttacaaacatttttttttagattaaataaacatttattttttttgtgtgtctatcttttgtcctctcttgcagtgaagttaacagcaaatattatacataattgaagttccatccaaaaccatggttttctttaagcatttaattatttaacataacatagtgccaccaacctttcattttcatccacatgcaagagttatatatggactgtacaccactatcacatcaattgtaaagccattttaaagaatccaatatataattttccttacaaaactataaataaataacactagtatgtgaatgtgatagttttgtgtcttatttgggatattaaatatttttatctatactagaaaatcaattttgatgaaggctgtttttatgtaatgctcttttttcttctgcaatggatctaaattagttcagtcttaacttaaaaaaaggtttgataagcattaataaagctgaaatatacaaatctatgcaacgtgggattcttattggatccggctaaagaaaaaaacaataataatagcaaattattgttgtcttgtacttctataatcctggcaccattatttggcaagatcatctggtcttgtccccagagatttgagtaaataatggaggaggtaacatctaatttaattccctttcttttaagtaagaaagggaagaagcaacaatttcaaagcagcatatcagactttgatggcagcctcttgaagaaatttacaggcacagaaggcattttgctcctaaaccttggatgtctcaaccaaaagagtccaacaagcaaagcaacaacttggaatggtgtaacataaatgaacacagcccaaatcaatgagaagattatgaatatagcagtggctctaggatccctccaactcaatatagcctgagctctttccaattgtgatgccaaatctcccaccactgtttgcactcttccagctacgctccttagccggtcgtacctcattcgaactatgtctgctggcttagaagtcgggaatgaatcgaattcttcatcgagttcatcggggtgtgcaaattcagcttgcgaaagccgagcatccatgtgaggaggatgccttggcctaaatcgatagttccaaattccaatcacaaataggtaaaggaagatggtgggcaatatcaattccgggtaacaaatcagcatcaagaacaagacatgcactagacatgtagtgatggggtttttccaatagcaaatgtcatcaagccatctgcaaaccgcagaaaggcccgagagaacagacattatgcgttggaaattcgccttgcttctcctcaagctccacatatggtaatccacatccaacatgtactcaacattctctaaccgaagcgggggctcagcccgagccagcctcatggccacaatctgctgagcttggtgtctcaacatgtcaatgtgcttaaccggtataggattcacataatgcatcttgggaagtaatggtttaccatattgggtaaccatattaacccaagccatacaagtaaacctcaatgccaattgaagctccccatgttttttcaaaccattgggttggagaaccaaaagggggtaataatgtgtataaattcgatctgtttccaaagtcgaaaggcgaatcctaaccttcccaatcctctgatctctagcaccttctttacttccattagtatgagcattgtcaaaaacaccaatggtgataacagtacaaggatcataaacttcccaagtgtactgctcattccacctaggagacaaagtatcaagaagagttctagttcgaacccatttgttaccatacttagctacacaataagcatcagtagtcctcccttctttgctcttcataggaagtaaattcctagcactcaaaatcccaagttcaagaatcccaatattagccttcctaaggtgtttagaagaaggctgaagatcactactaaaatgagtagattcatcaagaacatgataaccagcttccaaacacaacatcatcaaaatcttactagaaaacttctccttcttcttctcagtctcttcctccgccgcaaccgaaggcttatgaagattaaaccatctaggatcaggaaacttactagtctccattctctgagtagcttccctaacaggaagaatcactctccccaaaatctcatctttccctggcccaactctatcctcaacagtcaccataatgaaatcttcaaaaggttcagacacaacaaacataagctcttccttccaaacaggaccacccatacgaacctgtgtaggcctagtaactctaagttggttacctaattgaaccttcacatgagtattagacaatgctcttcctttatcagaagctaaaaggtcttgagcttcaatcacatgaattctaaggtaatacaatttaggagaaaagtaaactttagaacgagtgttagtaagatttacatggctaatattatgagcatcagaatgccaagcttcagggaatgattcatcagcctgagtccccatccaaacagcaagcataacttcaccttttgtcttcatcccatgtttatcttccaatctataccattgaggagccaaaggactatctgggggtactctaagaggaacctccaaaagatcaaaatgaactcgacccacaaaatcatcttttgcaaagtccttatctttaacagtaacttcaagcaaattggactgtaatctttctttggaaaaagcaaaaatctgtttccaaattgggttttgattcttctccaaatgctttgttacccctttgtagttccccaattttacttccacatatgggtctacacttccggtaatgtccattaccggaagatctctggctttcaccacacttacataaaggtaatgcatttgctcaacgagatcgtaagtgctcgaagtcttgtctcctctgtaccttaaccgcgccgccaccggcggcctagtctctactaaagcaaattccgggttctgtcttggtggcatttgcattctcatcactgccgtcgccggtcccggtggagttgcctgagcaaaatctcgcctcatctcgaaacccggtggttttgaagacattggtggtggttgctggtgagcagaaaaagcatggccatggccatggctccccaccaccacctcctcctcctccggcgccggttccgattgagtgaaaggtcttcacctctttctctttcttattctttttcttgaatatcttctcaattactggctcgctctctcgttctcgttctctttccctctcttcttcgattttgttggtgttaatttcttgtaatggagtctgatcttgagtactctcaaccaccggaggaggaggaggaggagaatcagaataagaagaaccgttaacggcgtagattttgagagcaatatctcccttaacaggcgaaaagagatcttttttatcaagtgggcatctctgaatttgggcatcagactcagacatcggaacagaaacaccggagattctgacacggccgagaaagtttttacgggtatggttgtcgtcggagttgctccgatcgttgtaaacaacaacgtctatagtcttgttgggtaaatctccatcgatgttaaagagaagcttctcgttccattgagggttgagatctttatgcttagtctgagtccggtgacgttggccgttaaagtttacttcgacgaaaggactggcggagccatggccgtctttgggcatgaggtcggtggcatcgtgaatctcaactactaacatactcatggcgaagaagaagaagaagaagaaggaattagtatgaaagtaggaagaaaattgagggattaacaatggtggattgaagaaagagcagagaggtcatgtttgagaagatgatgatgaagagagtaacttaacactttgaagagataaaatgtttggtggtgtggtgagatgaggtggccccctttgataaaatattatgtcacttttgatcaatttttttatgaaaacaaaaatatgtgagagagactgttaataagataggtagaactagaagaaataatgttagaatgat

SEQ ID NO: 1235 - DNA, 1874 bp, Cannabis sativa
gcggtggtttggtagaactatctggccctaaaataattacattgaacaactacatgaagttgtcaaacactgagaacaagttggtggctttcgactgtgatacgatgataataatggcttctacactacatgagcatagtatcgcgagtggttgcctcttgttctgcactaaaaattttaacatgtcatttgaaatcacttgctcgggcttaggctgctgccacactcctattcccaagcatctgaagcatttttcactagaaaccacgggcgtgaataaccataccgatagttattactttaatccttgcaggtatggattcttggtgtagtttcaacatctcccaaatgagacatgattttaggccccaccaagtaaagaatcctactgttgtgctggattggattgtgggaaacaaaacctgtaatgaattcgaacgtcgtcggtcattgtatatatgtggggacaatactaattgcagttattcggagaatggtcttgggtatcgttgcgtttgtaaaaacggatatcaaggaaatccatatcacaaacaaggctgtcaaggtacttaaataaatatatatacataatgtttgttgttgttgttgttatcataaattattaatcttaattaatttgtagatatcaatgagtgcttggagcctcaaaaatgtcgaggaggatcttgccagaatacagatgggagttacacatgtaaatgccccctgggcatgcgcggagacgccagagattattgtgagggatatcacctcaccccaattattgttacaggttatattataaaatgctatgatcatatatataattaattaattattcatttcggagagtaattaagtaataattaacactatttcatatttgtgtacagttattggagggatcattttattggccacaatagctatacttgttttcaaagagtttaacaggagaaagagagaaaaaatatttaaaagaaatggtggtttggttttaaaaaaccaaagacttagaatttcagcaaatccgacctcgacatagcaactgaaaattacaatcaatccaatttcctgggtgaaggtggttttgcttctgtttataaaggagtagtggtaataccaaatgctactactactactactactcaacaaattgcagtaaaaaagccaaaactacaaagaactgaacacaacaacaagaacgccaatatcaaccaccagcagttttatgaagagatatcgattgtttcccaagtaaatcacaagaatgtggttaaactcttgggcttgtgtctggagactgaaatcccacttcttgtttacgaactggtaccaaatggaacgctatctcagcacatccatggtataaccagatcatcatcatcatcatcatcatcatcagctatgctaaggccatggaagactcgtctacgaattacaactgaaatcgctcactctatcgactatttgcactccttcatcgagacattattaagtcaacaaacattctcttagacgaaaactacactgcaaaagtgtctgatttcggtgcctcagtcttgatacctccgggacaaagtggtatagccaccactgttcaagggactctcggttacttagatccggagtacttaagcactggcacattgacttcaaagagcgatgtttacagtttcggtgcagttttagtcgagctaatcacgggagagaaacctatctctaatggaatcagaagtaatgcactcagaataactaagcgtaacaaaatatttctcatagagaaaatactagatcctgagattattatttctgatcatcatcaacatcaagagaggcgggaaatagaggtagtcgctagattagctaaaata

SEQ ID NO: 1236 - DNA, 4124 bp, Cannabis sativa
ccactggtgccctttagcatttatgagtattgttacgtattttatggttcttaatataccatattagtacgttaagagtacttactaattttatattatttattaaattaaaatatgaaaaactcaatattaatttatactaatataataatgtgctactgataaaataaggtgaggttaatatatttgtacatattgaacaattctcttctctttaatacataatattctatcatactgtgcttgatcacttgtgtcattttatggttggcgcgtgtagttggcatatttttttattttatttatctttttttataaacatagttggcatatttttgagtctcataaataaaaagcaaagatgcggtcccagatttgcaatatgaacaaatacgtaatatatatataaaaacaatatataaaatatatgggtgggatactttaatacacccattaatgaggattagataggaaaacattggaccacctcatctcaaacacccaaacagtcccttattatgggaacaattttcacaaagcccaagcagcaagggcagcatctattctttaactcaagtcacttacccttccttctccagtttttaactttaataatttaatttgtacataaaaaaaaaggtggaccacaactacacgccccaatcagaacttctctcactaaaaaccccttctgaaaaagccgggaaacaactccaacttaggaattttcttcttgggttttgttcccaatctccatttatgttttttagtagtaacttttcttatcccctctccgccctccaataaaataaaataaaacattattaataaataaaaagaaaattggattttgggtttttgagtaaaaatcattaggagtactaacaaacagaaaaacagggatcagctggcggcttgtagtatgtgtactaggctgaaggacgattttggttcatgatgattaccatctggttgtagttttttctcagttggactctatttcacgaaaaagtcaagtacttttttggtggagttttttttcatttcttcttttttttttatttatactgtttttaattcattaataaataatgaatataatagtattatcagtaattaaatagtgacttttgtcgttttttctaccttaattacttgtttaatagcaccataataataattttatattgttgaggcatgaaataattgaggtggggtagatgttatcagaattttccttgtaggaagtctattttggatgtatttaatcttggagcattgacccacttgagctagggagagagagagagagagagaaagtacttagtcaggcaaaggcatatatggaaactaaagaaacgatgtgaagaagaagaatatggtatcatcatcatcttcatggtctacacctgatcccttgtaatatatataaatatatttatatatatatgtgatctttctttctttcctaggtttgggctttcatggcatcctatatcgttggcttattaggagaagaactcagcaaaaaagagaccacacttatttttccctttctctctccttcatctctccaatccaccacatacatattttccactatcccatatatatatatatatgtatataaactctaattatctcttctgttaatcataaacagcttttgtatggctctgatctcttagaccccgcttctttttttaatttcttttggttaatgtgttattaatccgatgaaaagggcgaaccccttttctgcagggtcaagttaattttgatgaaaacatatatatttatatgtatgtatattaacttgcttgatatgtttacacatgtaaatattctacaatcgatttgatgataaaattgaattttaatatcttggttttttttcttcttaatttgtgatcagtgaacaatcttgtacagtagtacttactatatactactatgaagagaagaagtatagaagcggaagcaacttaagtaatagttgagaagaattgttgaatattcatacataagatggtctcatcagctgggttttgctactcagatgtttcaccaaataacaataatattccgagtagtactacagctccaaaccatattcaacctcagttcaccaacaaccaccagatccaagagtttcatcaccactccaaccctgcagagatcttcaatttgacaacaggcatggagatgattggcttttccaagactagtaataaccaaagtacggatcatcgatcatatagaaaattagcttactaataataatactattactaatacttatattacaacttattatatttaataatccttattccttttcaaaggtttcagtactatttccaaggcagcagccggtccatcatcttccaagaccatggatgagtccaccaataccaaccatcatgatcaaaatcaagatcatgatcatcatcaccatcaattctatgatcatttcacgactgggatttcagaaacaagttgcgagaatctaatggttggaccagatcatgatcatcagcagcagccttggcaagagaataggttcctggttgatgattcttctttgagatgtgtttttccttgtgaaggaaatgagaggccaagccaaggcttatcactctccttaagctcagccaatccttctagtattggactacaaagctttgaattgagacaaacgaaccatcatcatcaacaacatcaagatcatcatgatgatgatcatatgaggttccttagtacttcatctcgagatgggtattttgggaaagtggcaaatatgcaaaccacccaacaaatgaatatgaatcacaatcaagatgggtttttgggtggtaataaagctgtcaattttcatcatcaagtacagtttcaactgaaaaactcaaagtacttgaaccctactcgagagcttctgaacgagttttgtagccttggaactaagcaaacagatttgataacgaagcaaaaatctcaaaagctgagtaaacagacatcatgggacgatcagactgctgataataatggcgccagttcttccaaaaataaatccctttactcccttgaattcatggaattgcaaaagagaaaaaccaagctgctttcaatgttggaagaggtaacacaaaaattaaaaagatagtacctttatatatatatggccattaaaataaaaaagttaatttattagagtagtttaatttcccgtctcctttaactatacttacaattaattcctatatataatacgaattatgcaaatcatgaaaaagtatatagtgttaattgatcatcatgaaataatatcaaaaaaagtacatcctgatttaattcttgagctaattaagcgacttgggggcctttcattaatgaccgcaacgtctgtgatgtctgcgttcatatattttttttcttcttgtttattttactcaattttcataaaattaaaaattaatatgttttagaccatgtgtgtataggttgagagaagatacaagcactattgcgaccaaatgaaggcagtcgtgtcatcttttgaggctgtggctggggctggggcggcaaccgtgtactccgccctagcttcgaaagccatgtcaaggcacttcaggtgcctcaaagatggaatagtgaatcagattcaggccacaaggaaggcaatgggggaaaaggatgctactgggggcgcaccgggcactaccagaggtgagacaccaaggcttaggcttcttgaccaaaccttaagacaacaaagggcttttcagcagatgactatgatggagagccatccatggcgccctcaacgaggtcttcctgaacgttccgtctctgtcctccgagcgtggctcttcgaacattttttacacccgtaagtgaaaaaaatattacgtacagtaagtgtagagatatatttaattttgtttggtaataagattttaccactttttccttttcttagattcccatcgaaaaaattgtagtttcattataaaagttataaaaattgaagtgttacatatgcaaattaatgaaagaagagaaatgttttttccaaattcgaaggaaaacaacatatgaagcttatgtggtgtagtctcaatcat

SEQ ID NO: 1237 - DNA, 877 bp, Cannabis sativa
tttacctcctaataatttcatgaaattgattcctggaatgcattttggctttgctgtaaaacagacaggaaaagagtgaagtttcagagcaacaaacactcattattcttttggagaaaaaatagagcaaatggagaaatgaattggtaatatgaactaaatgatcatgttgactaacactttcttggtaccacattgtacctgagtataaatccagcatctgaatcaacataaatgatacatttattcccgcaacagcgaatggatactcccatgttgctcgcttcccatcttgctttaataataacctacgaaaagatgccttgattttgaattttacacaatcagtaataattcattctttttactaattgagtaactagaaagaaaaatatcatatactgaggagcttaaacacctatgatttttactaaacttcactttgaaaatgatttgggctaattaccggataagtcctggcgaaaaatagcagattctcaagggaaatatatccgcaacccctacgtagaccaattcactgtgagaaaaagatacctctcaaatgaaaatcaagtattaatttaaaaatgaaacagtgctcaaactaaaaaagaacaatagaatctttttctattttttttcataacaaattcatctctttctcttgaataagtcaatactagatctttaggtatgtcaatacaaaaactcgtaaaaccaaagtcttcaacatgataagaaaaatgtattgaagttaaaatagaaaaggaacatgtgtaatgtgatgaatgcatatcttcatccttcaccctatgcatacatgctaagcacaaactacacatacacactgattctgaagacaatgtatgcaaaaaag

SEQ ID NO: 1238 - DNA, 4278 bp, Cannabis sativa
  modified_base (3422)..(3432): a, c, t, g, unknown or other
attttatttttattttgcaatttttaaccaaaatatgtttagaaaacaatttaaatacagaataaaaaatattttatcataaaaatacatacaattttcacactaaaatcatcaaatcacaaagaattcacatgaacatcattcaaatcacatccaaaataaaataaatggttttaaacatatttatacatgacaataatgttatcatggttttgagacccgttgttaaaacttattttatcaggatataatttgctgtcatgtatgataattaacaacttaaaacatgtttcaaaatgattaaataaaacacatacatagtttaggattttcttatattggaacgcagcggaataaatgactcatctcattcaatactttaaccctcgaatcctttttatagcagagtatcactaagtattgaacttgaatctttttttcctttattaagtgacatgtaacaatttgtacacgatcttctacaaaacttgagtccattttaaatagtgtaagctggtactcaactcacttagaatatataattgactaaaactaatagaattgatttcgaattccatggtagaaagatcaattcgaaatttacttataaaaagagaaaagagaagtgaatcattaaggttctatctacgcctctttctttagagcatctccaatgaaagctataaatgtggtgtattgccattttttagaatattttcctaaaatttgactccaatagtgatacaaaatagggaaatttacactaaatactaatatttgtctaaatcttacatttatactaaatttttacatttataattttcctattttatttttttttactatttttactaattaaagtttcaaaaaaaacttttttctcttttcttctaagtcagttgctgacctatttttttgggggatgagtttatttttacatttcaaaatatttttttttttggccttttatatgaaaatctacatagcaaccaactgagcaatctaaattgcaccccaaattaacatagcaaccattggagcaacccaaactgtaaaaatgaaaaaaaaaaaaaaaattatcttatctgtctctatttctctttttttttttttggctgagatacaaaatgaccttaaatttaaaaaataaattagtaaatgtcctttttttaacaaaaattaaaaaatggctaaatataataaattagctaataaaaattaataaaaatacatttactacacattatttttttaaaaaaaactatatatataataattaaattaagttatatatttttttttagtattgcatattattatattgtaacaaaaataaataaatatattagatcattatatatacgacagtacttgatatatcgtattactaaaaattaatataccgtagtattaaaattatataccacaaaaaattataacaatactaaatcaatactcaaaaaaatatatagtgaggacaaagcactctggaaacactcgtgcttgtctgtagagacaatcattagtccatgaaacagccagagtgacgtactcgtgtataagagccataaatctgcgggagaaggcccaatggagatttaaagcgaaggcgtcacaaatgatatcggagccttgacctagctggaagtgtggtcaacgaggacatcgaaccccataacgggagtgattgtgatagtcagtagtcccacgatacgtaaagggaaatactaggtaagttgtgcaatctcatatcgcctggagaaggtcaagtgtgatgattctaagaatgtgtagatttgggactacacaattgaataaggcttaaatagattgataggtactacttatatcaacaaggtccatcttattttttggtagcccatcacgaaagaactccccagttgagtgtgcttgatctgggataattttaggatcggtgacctctttggaagttttcccaagaaacatgcaattgaggacaaagcacattgaaaatactcgtgttggtctgtagggccagtcatcagcccaaaaagtagccagagtaacgtacttgtgtataagatccacaaatctatgggggaagacccaatggagggttgaagcagggacgttacttgaggatatgatcatttggaagatagcttggagttcgaaggtgcctttgaaggtacgtacaacagtttctttggcgtagtttatttggaagcttggctattcatgttcaattggtgtctaagcatgtgtagttacctgttttgtgttcaatgtgtcaacatgagaatgaaatggttatgcatatgttggtttcttgtttgttcgctcgtgcatgttggatgtggtctgctggtagcatcggcggagtggttgggactaattttttggactagtttggtcgagttactcagcagcaagttgctggtatgggtgaagaacttgctatggttgtgtgggcaatttggaaagctcgtaatgatatgatatgcaggataagatgactacgacaacaaaagttgttctcttagcaagagtggcccttaattaatggcaacatgcttaatcaaaaagaatggggttattgtctcacgcgatgaagcgggatagtagacttgagtattggactaaaccgaatgtgaataagattaagattaatgttgtcagagcaattttcaagtcagaagggaagtttggtgtgggagcaataactcgtgatagttctggcactcttttggaagacttttcaatgagttttaattggtgggttgaggcttcttttgtggaagtcattggaatcaaagaggttttaggttggatcaaaaagaaaaggtggcttgatgttcagcttgagatagattgcttagtggttgttcaagccttatatagtgccattcacatgccttcttaatttaatttttaatttgttaaatattttgtaaacaaggcagctcactgtgttgttctcggttcttgtttttattttgattgtattttcaacgagagctctaattctgctgatgttttatatattgttatggttggaattcattgattaataaagttgtcattttttttaaagtgacacttttctaccgctgaattatatcacatcctttatctcccattgataaatagaactaattgacatgatgaatggagaattgactatatgagatctttgaattttaaaggtaactatgattaatactgtagttaaaagtatagcattgtcttgcttttatgtcattacattagaattaattcaaagaaaaagcattatctttctttcttttcttttttttttaattttttttattgaggcgtctatatatataaattacattgcaccacataagatctctcaatacttttacaaaaaaaagttacttttagtgacaatatttaatcacaatataaattttttnnnnnnnnnnntgacttttaatcacaacaaaaagttacttgcgatagatagaaattgttattaatttagttttagtcacaataaatatattgtgattaaaaattatacatttagttacaatttttttagttacaacataagaataataatttataattattaattacaatttttttataataatacacaacctccttttgatggtcacttaatctaacaacaactaattagaaaaggcattaagttgatatgtaataatgataagtctattagttctgagtcacctcatgaatatataccacacaaattaatacaccaagttttaccgttgaaaattctaagtcaatcaaagaaaaacaaactaataaaatcttggcttaatcattcaaaaaaattaatatatattaataaataaataaaagtcttggcttagaaaattccaactttcatacttcatatatgatgaaacgaaagcttatttggaaaaaaaaaaacattgctattatttacttgaaagttgtctaataattgaccttaacaatttcaatttcaaccacatgtatacatgtagttggactatggcagtagtccagtcctatatatttatttacttatttatttggggtttgtttccatataattaataagcaaatgagatgaattcatgtttttgtttattcatctaaatctgagactctcgatgtcaggaggggcatcatcatcatcatcatcaccagcctttaataataatacttattatactatactctgtttattattgattaatgttcttattccttctcttaccaaagctcagaatgaaactaaactcacttctacacctccctctgaaggtc

SEQ ID NO: 1239 - DNA, 1727 bp, Cannabis sativa
actctctctgtcgtaaaaaaacaaaacaagtaacagtcgtggcgctcagatcgcagagaactcgcgccactttgctcttcttccttcgaatttctttgcttcattgcgaaaccctcttctttactcataaaccccaaatccccaaatctctatttccatacattttttgggtcacaccacgaattgaagatgctcagaaatggtgccgaaattccttccaggtacagccccaccttatctaatacttatgctcatcaattaggtttttggggttttcttcatttgattgcatgcacagtaaatttgattttgatttatgcaattagggggatattctgggattttggtttttgtttttaaatttcggatctttatttggtaggtgtgaattgctgagtattgtgaagaaaaactcgaaattattagggaaaactgttgtagttgatgatcatcatgatgatgaacatcatgatgttgaattggattctgggttttggcatgatgtgatggatttctatttttttggtggtaaggaggagtctaataaggaagatgatcttgtgttttttgtcaaaaagttggtatgtcttttaatttccatgctttactttctttcttttcttttcttgggtttatttttctgggaaattgattgggaattctcatcatgacagaactctcaggggcatggtgttagtgaagatttaaaggatggttcttcttcaccttactttgttcgcaggtgggggcctaaggtaaaagcaactttgttagtgaaaagatttaacaactcttttgaaattttctaattgattggtcttcattcatgtgggggttttattagatgcttttacaacagttatgttcaatacttgtttcgctacaagataacattctgcacttgtgtcaaaccagttggatgacatggttggtgacaatgctatagacggcgtggactggagacgctcattttacttgaacttgattgctcatacttcattttctgtcacagtggctatttgcagtcatcaagatcttctgaagtatcaagccgcctctagaaatgcacccttatctcctcctgtatataaggttgtaaagactgtttatgcatctccaagccgagttaattttcatttggattcaaacaaggaagttgagacaacacccgcctatccagatatttgttttgctatagatgattttgactctacttttgatgccgtggtattgacagaattagaccattgctactgtgtacttctgaatgcacagggtggtgcagcatttcctagtgagcacgagcaaaatgattgcggtggatcctctgacaccataaatggaaatactaagattacacttttctcgggatttgtcagttatccaatggttcgagatgcatattacgctagcaaatctcggtttgggagtcttctagcagcattcggttcgcctgctggtaaatcagaccgaatctacatgaaaggtcctggtggtcgaggggaagttgaagtagctgtttctggtcctttctcgcctgtcatttcaaaacggggatatgggattggctcaattgttcggaaagcagcaacagctgctgctgctgctgtcgctgcttcccacacaagtttggatgaagagatggtgcctcttaaatgctgcttaatgtccatatcattaccttgggaacacattgtaaatgatcttttgttcaaggaaactcctcc

SEQ ID NO: 1240 - DNA, 1881 bp, Cannabis sativa
taattatcttaagaaaaaagaatatcgaatcactccacgattaattcaaactaacaagtttttacatgctaacaaagtcttcaaatattagaaaaatattattttatataaagcattttgaaaaataacattttttgtctcattcatctaataagacatgaccccgatagggacatacttttgccctaatagaacaaaatccattttctaacatgtgaaaaacttataactataacttttttcacttcataatgatgtattatgttgtagttatagtacaccttagctattatgtataaatatctttagattctcttaattgtttagtttttttagagagtaaatatgctctattattaatcattactatctgtcatctaaagagaatcaatatccttcctaaaagcatatctagtaaaaccatgtgctgcataattagtagttttacaatatgtttaataattatattaagaaaaaaagataactgataacgaatatcactaagtaaattcgagaatcgattacgctagtcttgataatgttgaagcccttgaataacacaaaattgaaccaagcaacaaccaaagcctatcatgtataatccatgagaatatacacttaaaaacttcaatatttttcactcacaaaattgtatattggaatatctgaagctgaagttgagacaagtgaatcaacagcaattacttaattcattgtgtcacgtgttagtttagggtcagtttattctgttaaagaattgatgtaattctgttacaattagttgttgatcctaactaactctattgtaattgctcgacttgtgttaatataaaaagggttcttacagactcaatttcattgattgagcagtaacaatttccctcacttttcattcagttcatctcccctgttttctctctctgctcagtttcaattcttctttattgtaataagaaattctgtcaaattattctcttaacattccaacacttggtattgttaccaagtggttaacaacattcaaaatgaactaaaacgctcaagtgacagtcgcctgtaatttcttgtgtcatttttgtaacatcattatttgtcacttgataccaaaacattgtaactctcatttttacatccttaatgtgataattttgtgagttattacaacaattacaaatttgtaacaaatttatactctttcaaatgattattacattttgataaataataataggcctttgagagtaactgcattatctatgtaaattaaatttatttataagttatgtaaatctacttcattttatggtttaaaaaaagttctttaatgaaccatatatgtctcctatttttcaaaaatatatttatctattattacactaatataaaagacacacactactataaataaaccaaaatttatgtgtgcaatatattttaaaagatgaagttatgacatatgagggcttcaatagcataaaatttaaatatgtttaatgctaattaactgagttcatcatcgggcttcaagaaccatcggttaagtcgttcagatgcctttcggacctaaaaatgcatagcaataacacaattaattagtttcataatacattagtaaaaaaatattcagatttctagggtaggtaatttcatttttttttaattttttttttataaatattaataatgatagtatgtatattaatttatataagttatatgtaaatataattagtgaaggtacctgaagatcccaatctgttttccatgtaataatcgaaagtgtaattgtttgtgctaatactccacacaacattccaatccacaatccctacatattaattaatccataattaacatactttaaaccaatgattaattcca

SEQ ID NO: 1241 - DNA, 1999 bp, Cannabis sativa
gagagagagagagagagtgcaattacttttgttagaaaaagcctctcagcacgttgttgaactgtacctcctgactttagtcctaatgccgccaatgcctgagacaattcaaacacagaaatgaagcaaggaaaataacaggcataaaaattgaaaagaagttgaacatatgcatacaatctcaaccttttcaaccgaaacataaaatgtaagccaaaaagatagagacaatgatgaaacaatagagttagcatatatgtgatggaacttccttagttagaaactttcgatcttggaaatcaaacacaaacaatgaaatccctcaaagaaatactttattggttatagtcgcaaaaaaatcagctagcattcgagaggctagactccccaaaatacagcctttcaagagggttgttctcaccttagaccaagtctattctattcccaagctagctgaaatgaatccctcacccttatatttataggatttggtcattatacaaaaagacaacccaacccctcaacttaaaacagccactaatacaaaaatagggaaaaattactaagagacctgaatacaaaacaacccctgcccaaagctattttctcggtctcctagagtaaacaaagtgtattgggatttatcaatatggtatctagtaaggaatcatagaaacaagtaaaaaatgaacaagaaataaacataaacaagtcaggggaaagaaatgtagcatccaatactctaaaattttatactgcctataaagaaaagaaatgcctttacctcctttaacttttcaggacccactaccatcagctcttcaactgagttataataatcaagatcaatcacagcatgccaatccggtacaagtccatttccttgaccttcaccctcccatccttctattagaccattttcccattgctcttcaaattctgttataagctgtgcaacaaaatgagattgtagagaaaaattaaaacatgtacaagttatcttgcaagtgaaaaaagttaaaaataatagtcacttagaataatgaatgcaaattttttaaaaaatccaaccaaaccattagtagtgattgtcaaaaaatttcaacctaaatcatagttgtgaatttatggcaattaggatacatgtgactgcgttagatgttaataatagtcttaattcctatttcaacttaaattagaaagaaattaaattgggtgaccaacatgcaaaaccttcagtcatgcttaaaaaaagtgttcacattagtcaaatgatctatcaaaggaaaaaagagacatcgtattaagagaacctttgagaatattctatcaagatcttgcagaggctctgtacgctggaaaaaatatgtcaggtactccagtagattttctatgtattccttgtattgcctgtagcgaccaaaagtacaaacatttcaaatttaatgtaagaaaccaaactactaagggacaaaaaaacaaaaactaccatagtaggctaccttgtcaacttcagcttccgaggaattttatgtggttgtgaaaaaacattaaggtaagtagagtaatcaatatgatctccaaatttggaattgatatactgattatataattcgtgcaaatcaagatatcgtccgaaagcttcctgaaaacaaaaaaatatcaactcatattacaaccaaaataaacacttaataagatgcactcactcaagcaggcatcagatgtaatttggtgtgtacacaattcatttatatgctcaaatatgattgaaaacggatacatatctttactttatagaattttgttaggaaattaacggaaaatgaaagaagataatacctccccactgaattcaattaatggttcctccttcagaagcgcttcaaagtcctcattaggatcaacaacgcgtgcagctggatgcctcctgtggtattcacgaatctgcatacgttggaacaaacacatgacacaaccattgttaatttttattttt

SEQ ID NO: 1242 - DNA, 2841 bp, Cannabis sativa
ggtatattgtagcaacagattaaaatattttgccagaaaagttcatctcatagttaagtttaaagatcatatcatcacctcaggagtgtcgccattagtcaaatttagcaaaacttattagattacgaaaaaaaaaaaagcctttcattatatttacctgtgctcacagggaagggccagaaacggagtggtaggattagcctggcatataggacaatttgagtcatcttcagcagagcttgaagatttatcttttgaaaatgggcgaagtaaacttttcacagatgatgagttgagaagaggaagaagcaacaacaacatttcctgaaaaaagaaatgaaaacccttattagtaagttctcatagaagtattcttatatgagatgagtgttttgttttcgaatagtagaagctaggctgctggaaaagaaaagaaagagactagttttatctataccactgcaagctattaatgcacttgtgttaccctcactcttggttaataagagattatatccctctttctttctctttggaaaacccctatgtataaatcggccattatacaagtggaaagaaatgacaaataaaataaaaaaagaaatacaagttacgaacaagctagctggcctaacaaatccaagactgcaatcaggcccagattgggaattcatagaagcaacagaggaataccctgtcccatgccaaagggaaaaagaacaatcaaagagaaatacgcaattaggactaaactaaggacaaaagcaaaaaagaagaaaaccacaatcagactcagaccacacaaaagtcaccaagtaaaggcaaaatagaagtttgcattttaaaaattcttacaaaatgtgcacagcactgaataaactttaatattaaaatcactattgaagaaaaatgcagttaagatgtcttagaatcaaaattcctcatcaaaaaaggttacttcaaatcatctactattcacagagttataaaagtaaaggctaaaaacaagtagctaccgagaattcattccacactaactggcgattcatgtactcaaagctaacagctcggttcatattaggacttccatagacaagtctggctcttaaagctctttcaatgagattcctatacctgcatcaagggaaagatgtaattgacacccactttaagaacaaatccagataatttttacatttgacaaaaagaaaaattatacattgatcttttgtgaatcagaatgaaagaaagaatccatcttgtaggacagtcaccatacacttgctgaattatcaataatttcctttcatctaatcacaattgacttaatttatgtaaattattcccaccaatgaattccagctgagtaaatttaagatccaagcaatgaagtaaatgactacatactttccggtataaagaaatacaagcaggtttccaaatgaggcagctttataaaagccttctaatcgctgtatcaaaatccatgctcgccttgccaatgtcctctgggtagaagaaaaagtagaaaaacccaattatatcaacttcaaacgaccagaactatctgccttccattatcatgttcagtgtatggagaggcaaccaataagctataaaaataaagtacctgctcagaatcaccccatcgacgaaaagcagaaaaagactgtaaacgagcccaaatgtattgaccaccaacagtcgcagcacagtaccaaatcttctgtgcaactgtaagaccgggtccttccaggccagttctgactgtatataacatgacatggttacaaaaaccatggaaaacttatcttcctatgttttatgcagccaagtttggaaagcagcatcaaaggaatatgcaatagatttcgtaccttttgctcttgtctccatcgcacgttcatctctatacctcaaattcatgagagaaatccctggagtaggcttatcaacccaaattgagaatctccaaataagaaactcaaggaaagcatcgagctcagcttcatactgaaatagcattcctggctaatcccaataaaataaaagaagaaacaatttgacgaatgtcaggaacacaaattgaagctaatggttctatgttctaaaattcttatgaaactattttataagtcttgagaaacaccttcattaaagagaaaaccttgaccagttgctcttttaacatagctgacatttcaatgtccagtcttgctgcatcaacttgatttactcttgatattgtaatgggtataattgactgcaaagaacaatcccgtaactgaatttgagttttatatcatatgagtaattaagtgcaaacagcaattccataaaattaaaatatactttcattcattgaaacaaagaaatgaaatatcatgaatttcacttataaacataaatacatatatttatataaacatcagggattagacggtaacgtaacatattcatgtaaagctttttggaactaagtatagcaaagtaaggacatagaaacaaccagagcctttaaaatcaatactttattaccgaattccatatttcataaatttagagtctgaattacgtttcaatttcaactcccaaacccaaaaatgaaggaaagagaaaaaagagaaattagattacctggggagagcgaggaagagcataggattgccagtggggaagtaatttgtggtaagtatgacgccaagcatcctgaggtggtgggaggagacttgtggcactcattgaaaccctggttcagaggccgatgatgatgatgatggcggtggtggtggatgagtttggttaggtttccgagtgttttctgtggagaatgagaaaggg

SEQ ID NO: 1243 - DNA, 2847 bp, Cannabis sativa
  modified_base (536)..(539): a, c, t, g, unknown or other
tttttaaaaacagatgacaacccagccataatggctcgagaagctgcaatgagcgatatgtgggggcaagtacagaaccatgtatggctgcttaagcctggcatgttgcaggtatgatactcatgtaccaccaggtctaaattttgaagctgttaattggcactagaatgtctacttttttttttatttttaagaggaactatgaggagatgaagtgagaataagtgagtatatgtacttattctggtactgaaacaatacattataggtgaggaatttaattatgaaaagctcatgcaaattgaatttgtcagaaatctgaagattgatacttgctataataaggaaaatgcatagcttaagggaatagtatgcaagtctcatttagagatctgtgtatacaagaaattttattcatattattatgtaagttatgaataattgcataaagtggagtgttaattgcaacctcttagtctacctcttaaatacttaaggctcgtttgatacattgtataagggtcgtattgtattannnnataaataacactatgtttggataaagcaatgcattgtattaattattacgaccaaaatttttaatacaatgtatgttgtattatttaatatataataaatggtccgtgttagtttgtattataatatttacaaaggatttagggtcaacaccaatctctgacccgaacctagcctcgaacccaggacccgaatccaaacctggacccggacttcggaccccggacctggactcagacctaggtttcggacccagactcaagactcgggacccagacctagacttagacctgagactcgagacctgaactcaaactcaaactcgaacctacgacctagacccgagacccggacctgaacctaaacttggatcccggacttgggacccgagatccagacccggacctgagactcaaacccggatccaaacttagatttgagacccggactcaggactcgagacatggaccccagatccgcgacccaggatctaggacacagacctagacacggacccgaacccgaacccgactcgtagttggtgttggggtcgagtgtattgaaatatattataactttacataatatattaatgcaagtcaataccaaacatagtcttgtattaaataatactaaaacaatgcaatctaatacaatataatacaatacgtcataccgaatgagcccttagacacttagagtaatttagaatattagtgtaatatatttacttagagtaatgtaaatgtgtatttatttaatttttttaatgtaatttttacttatgattattttatagaatttatacttaataatatatgaaaaaaaaaatcaaattttaaataaaagaattggctattacaaaaaaaatattgaagttgcacatgagccataagggccttacataataattgctgccatagggtcccttatggttgtagttgttaatcccatttagcaatccttgcaaccccaacaattgcgaatttctccaacactgcttctaaaattcgtttttgaagtagcgcggacaagcaaatggaaaaaagagcctaccgtgttagaaggataaacaggacgatccgagaatatattgcctaatagcccctaccaatctactcggccaaggccaagcccaaagatgagccaacaaagccctagctaggcagagatttcagaaggcatgattccattgtcgtcacccaattgcagaagaaaccctaatcacaaagagagttttttatatatatattttttgagtgtgtcacttatcatgttaatggttagaacttagaatcaattatgattccaaaatatctaaatctaatttttggagatacattaatattctaaaatatttgaccattaatggagatacattaatattctaaaatatttgaccattaattagtttgaataatcaaaggcttactttttaatagtgttattctgtactcggtgtgccataatcgttgatccacaaaaccaattattccttccaatgtaattactttaatttttggtaaggaaagtaattacttaatttatatgaaataaataatattattgtcaatatcattgtttaattacttaattaatttcttaaattagtatttgactgagaaaaaacatagtcaataataatcaattaattaatttcgaaatatatatatataaactaacaaaaggaagggaagcctcaaagaaattgttaaatgtatcatatgagatcttaacattattatatttatatatataagttttggtcatgcacttggtgacgtgcatgcaataatgaaaataatagtacctttaaaccttaacgaaaagacaacaaataaacaatttatttataagattgtttcctttatttgaatcaaagcaccacctttataaataataaacaaagatcttttttgaaaatattttatcttgatgcataatggaatggtggtcctccttatactcccttattttaatttggtccataaagttctcttctaattttaataatgggatttttttttataaatactcaaaaaaagataaaaaatattacaaatgtaagttcttttaagttatgtttgaaagatgaatttttgtgatgaaaaaaaagtaagaaaaatgtagaaaaagaatatggagaattaaaaaaaaaaaatcaaatttttgtgttaggaaaattttgttgattaagaatttttccgtacaatttttcatttcatactatctatgagaattttatttttttttcttattttttttttctatcaaaatctaacttccaaaaatagagtttttttttttttt

SEQ ID NO: 1244 - DNA, 925 bp, Cannabis sativa
tttttttttttgaaaatttgaaactccaagcattttgttgttattgcattgataggtttttggagattgagtcagtggcttggtctggacttgaggaaactgctggatcttctcctgctaagaatcatgttggagcagtatgttcattttctttctttcttttctttgattataatttgtgttgcggggagagcattttgggattcagatgagtgtttttgtaaaaatgctaccaaaaattacttattaccataaatttacactgtgcgatcattatgatcgcagaatggaaagtcaatttgtttatttttctaatttagcattttgatattgttagtttggcaaatttccggatatgatatcacatttgttctgttgtcttagttcttgaggttgttggcggaggaggaaaatggtgagaattcttctcaagatcaacagcttgctttgtctaaagcagttgatgctatgggacgtagcatgaagaaaaatcctgaagcttccgagactaagaaggaaaaatatcgtgaatatgtaaatgagtgtaaggagaaatgttcaacagcggaagtgcaatcaaacttggaggaagcaggtgtcaaaactggggttaagcaaaagactgatgaaaatgatttggtgactgaaaacaaagttgttgttgaaaaacccattgaagaagtaatgctaagttatgagagaaaagttacggttctgtatgagcttctcaccgcttgcctagcagatacacatgtagatagcaagaaaagtacccgtaaaagaaagggatacgatgcccggcatcgtgttgctctgcggttactggcaacttggcttgatgtcaaatggataaacatggtttgtatctaaaaactgtcctttgttgtgttgttcacctaatgtttgtagttgctagcataagttt

SEQ ID NO: 1245 - DNA, 866 bp, Cannabis sativa
tatttatggcagaaaaatataagcattttatatacaaataaaataaataatacaccatatgtaaataatattattcatacaatatggtgtattatttatgcaaattattaatgcttctatactataattatatatatagtatttttaattcatatcatgatgatttaaagtactaatccttatattgtttttcttcttcttaatttgtttttttttttttttcagttatcttgggctaaagatgctgaaggagaggaccaactaaacttagatttctatgagatttattttacacatacagtaaaaaaaaaattagtatacagaaagcatataaatcatgatgatgtataatatcaaattacaatttttctttttctttttctttcaataaatatattgttgctggcggctagccttattgttatttgactgcttcaatatcaattatgtgttattaacaacccaaagacatgtcagatttaataaaaaaaaaatatatataataattttccattgaatgtatattcaattatttaagtaagctttttccaaattaatattttttgaataaaagcaaagacagctaatagatgatgatggttttgttttcatgttgcttttctttattattatatataatattgatcttgtcaaaccgagtatatgtatattattatcatgttcttctttatgtatagcatcttgagatgggtaaggccaatacatttgcatttgctatttttctaattttgcatatagaattatggtatttttaaaaaataaaaattaactattttctgttaatcagagacctagtgagtcatacacacacaatcctggcccagagtaggtcccaaaagttttat

SEQ ID NO: 1246 - DNA, 1926 bp, Cannabis sativa
gtccataacactcttctcactctctactctcccaaacacactcgttatgggcattcctttacttcaaggaatgtacggtcacgattctggaagcttaatggtccaaatcgttgtcctccaatgcatcatctggtacaccttaatgctcttcttgttcgaatatagaggagctcggatcttgatcggcgagcagtttccagacacggcaggctccattatatccttcagagttgactctgatatcatctctctagatggaaaagagccactacagaccgatgctgaagtcggagaagatggaaagctacacgtgacggttcggaagtcaacgagctcaaggtcggagatattctccaggcgttctcatggtcccaactctggtgtgtcgttgactcccagaccttctaacttgaccaacgcagagatatattcacttcagtcttccagaaacccaaccccacgaggctcgagctttaaccacactgacttttactccatggtcaacggtggtggtgggaagaacatgttgagcaatgtgagcccccggcattccaattttgggaacattggttatgatgaagaagttggtgggagaggaaatggtgtggtttttcagcaagggaacaatggaggttatcctgctccgccgagtgccggtatattttctccggttgctggacctggtggaaagaagaaaccaaatgggtctgctcctcctgctactgctgctgatggtggtggtaaagatctccacatgttcgtatggagctccagcgcttcgcctgtatctgatgttttcagaggtggagacttcggccatgggaatgagcttggtggggtacctcataacccaaaaggtttgaaaacactaatctttgaccttattagttgtttactaacttagttttagttgtccgatccaatgtgccaatgtggggttttattttttcttttcatttatttgtgcttttaaatctttaggtttgttttatgcgtttttactcatatatatggtcccatcacctttacctaacctttaccaaaacatatatgtttgtttttctcgcgctccaaaataaaaatccccaatattctttgttttgtttcttacttatttgtcatcttcagtgacaagtaatgtctttttctacaatatgtttaattactttcttttttatggctgtgtttagactatgacgagtatggtcgcgatgagttcacctttgcaaatagacaggtctcaaatggcatcgaccgagaaggtccggtgctttcgaagcttggttctagctcaacggctgagcttcaccccaaggctgcatctcaggctgatttaaagccaacagcaatgccaccagccagtgttatgacaaggcttattcttataatggtttggagaaaactaatccgtaatccaaacacttactctagcctcattggcctaacctggtcgttggtctcattcaagtatgaaaactctattaagccaaaccaattaatttttcttataccatttaccacacactataactattatgtatgtatttatattgtaggtggcatgttgcaatgcctgctatcatagccagttccatcaaaattttatctgatgcaggccttggaatggccatgttcagtcttggtaagttgaagagaacatttaaaatcttggcaagactgaagacttgattaagttactatattagtacaaatattcatttgagttattattattataaatacaggtttgtttatggctttacaaccgaggattattgcttgtgggaactcagttgctacttttgccatggctgtaagatttcttatgggtcctgcagtcatggctgcagcctctattgctgtaggactgaaaggggttctgttacatattgctattgtacaggtaaacttttttttttttttttt

SEQ ID NO: 1247 - DNA, 2719 bp, Cannabis sativa
aggctttggtagttaattggttaattttttgaaccaaatttacaacaaattttacactggaaagaaggagatgaatccccaacaaataataaattatgaaagcatggcagcttcttttctcttcgagaagaaagccaaaggaaaataaccagctctactctctctgattccccaaaacaaaatatttaaatttaaaagaaaataagatttagaaagaaccaaaccaacaaatggaacgcgagaccccggcacccagttacgccaccgacgccacctcaccactcctctcaaacagcccctcgaggagccgccgctacctgcgccggcctccgactcctcttcgtggcgcggctcggttcctccggcgcgccagcgggcgcggtatgatgctgcgtgagccgtccgtacgtgtgcgggaggctgctgcccagcagctggaggagcgccagagcgattgggcctactcgaagccggtgatcgcactggacgtgctgtggaacgctacgttcgtggggattgggatcgcggtgctctggcttagcgttaacgagaacccttcggtgccacttaggctttggattattgggtatgcgcttcagtgcgtgttccacatgggttgcgttgcggctgagtacaggaggcgccagcgcgagaggggtggggaggaattggaagggagtcaaggttgggagagcggtggggatttgaattctgggtctggaagtgatgtggaggaatatgccgttgaggagggtcttgttgaagctggaagtggaagtaggtaatttgaatactggaaatatattaattgaatttattttccaggaaaattatttcttggtgttaaaaagaatcgtttttgtttgatgtggtttatatttatacgaataattgtgtgaaaatcatggtaatttggagctgttttgcattgtattgctttgtatatgtatgtatgccttatatatgttggaacttttgttaatttgaagactctaaaggtgttgaagtggttttctttgaaaagaattctgagatcagaagagccattttattttatatagaattcataattgatttacttcttatttgaatgtgtgttagatatgtgaagtatataaacatatttgttcattgactaaagtttgtattgtattgttatgacagtcttgcaaagcatttggagtctgcaaatacaatgttttcatttatctggtggatcgttgggttctactgggtaactgctggtggtgatagtttgattattgactcaccacagctatactggtgagtttgatcttgtttatttatttatttttttcttttttctttcagttatgtaagcaaatgtctatttgtttttatttttcattctctccttttgttcataaagttgctgtttttgcaggctctctgtgatttttctagcctttgacgtggtatttgttgttatctgcgttgcagttgcttgccttatcggcatagccgtttgctgttgtctcccatgcataattgcaatcctatatgttgtcacagatcaggtaatttacaagacttttaattactttagtttcggatatgctcatagtattctattcactaatgttcgcctgcagtttactaagcattccaatttagcactcttcttgttgtcataatccatgattgattttggtatttgagataagaatttctgtgttagcatttcacgattattgccactgtgttgttcactaagctttttgcttctgggaactgctgacaaacattacgattcgtgtagaaaaacacttataagtggggcatatttctattctcattaggccacaagcagtggatttatgtttttgtctcttctgcttctggcagttagattatatgttacatgtcacatatattggcaaggtatttgctggttacttgttataaataaactagaaagatagtaatgcatagagcatattatatacattaccaacatctacaaggattagtagaatttaaggctttttttttattggaagactacaaattcagatgatactattcagactttagtagttctaatagggcaccgtgaaccaatgtattttgtaattcataatccatgcttcactattttgatttaccatatctaacttcacatcatcttttaggaaggagcaacaaaagaagaccttgatcgattaccaaaattcatgtttcgcaaggtatctgatgttcagaaagttaatggagagatccaagaatcttttggaggagtaatgattgaatgtgaagataattcacccattgaacgtgttctttcacaagaggatgctgtaagttttcatgaaaggataacttgaatgtttgaaatatttgcttgtgtgtttgaagacaacaatttatatgccattttttacaagtattgctaatgggtattgcataccactatcaccaatatcgggtctcaattaaaatttagtattcgattttgaattacaccaataacagtatgccatatcagatggtattggatattatcttaagatgccctgaaagttatgcactttttcatcatagaacctatgatggattgttatcaccatctgtctaggtcttttaaggccgaaacattgacgttttatgcaccataacatgcaatgtagcaattttgttatcataacttcggatccagacctgtaattttcaaataatacattggaattgtgggactgtg

SEQ ID NO: 1248 - DNA, 3295 bp, Cannabis sativa
aaaatgcaaaaggaaatagcgaaagtgggaaaatttattggagagaaatattactatttagaaaaagatggagagagacccatgatgcttaaatgtccttggcgaaacacttgtgccagacggtcactaattattggtccattgatgttaattctaaatcaaatcaatcttattagtgccatctttaaaggactatcaattttcaaccacgtaaattatatttatatattcttatatatacacacacactcacaacacgcatagaggtatgcaacaataatgatgcatatacactttagagaaaaaaatcttatagttaaaggacaaagacggtaatcaaagaagtgggtccttaatttgctttgctcatcacatatataataattccagctgcgaaatggggtcataagaggtctgacttcaatttttgtttttgtttatttcatcaaataattaacaattttgtagttaacatacaattattaattaatattaatttaattattgggagttaaatttaattgtgtcttttgtgcatgttttgtaatacttaattataatgttgtagaataaactgaccaaaagtaatgtgattgtattattttttgtagggttgatcaaaactttatacgactaaaccaacattgttgttttgcttttgtattttactatttctggtttttgggtaagtgaaattgatatccatatatataggagtttaactagtttggccttgtcgttttcataatgttcaccttagctgtttgacaaacattgtcacagttaatagactatcacatctttctttcctctttttcccctatcatctttttattttattttattttattttttgggagtttttttcttctaatttatttatttttgtgtgaggtgtcacttggcatacggtaagataggaatggaatcccatcagccttttaggctttattgacataacttgttgaaagtataggcaagtattatacgtgatgaacaaattaacaaaattaaatagaattttcttaatatttttctgtagctaaataaattgatgtacaatttgctatatatctatatatagatttctactgcattgcatatgtagattatattaggcataattatataatacactatttttttattttttacatttttatagttaattttctttttatatttttacaattttttataaaaataatatcaaaataacaaaaatatcacataaaaaaaaaattacaacaaaaaattaacaataaaataatatgacaataacataaaaaaaaaagcatcaaagatgctatttttcaaaataaaatcataaaaaatcgtaaaaatatttataattacgtgcaatcatatttttgtaattttatgtatttgtgaaataatattatttagagttactctattatttatattatgtgtaagttttgtttcccttttgtgaatttgttacttacttttcaagcttcttttcttatttaattaattaattagctcaaacttcattaatttacaaagagaaacagagtttatttttataacataattaatctccacattgttcttaaatagtttttaaactccaacaaccatctgaagtgtcaaagggagatcctaccaataacatgaaaaatattttttaaataaaaatctctaatttaggggggtcaatggcaatgatgcataaccaaccgtttttagtataacataatttaactttgaaactttttattttattttattttttataataaggacattcaaaaccgactttgattataaaattaggggaaaaggatttaatatttaggaaaaatatatatataatacaaaattacaaaatgatcaaaataaaaggaccctgcaaatatatggtagttgaaaagtaagtgtcactaaaattaagcgagccctaatatatagacaagagaaagaataacatataaacaagaatctaaactcatcttattaaccagagaatcattgacatcaacctgtacttttcttccctactactaattgtattcatctgtatccatacaaaaattcatatatatttatttcaatatatttttcaaaatgtattttgtgtgtgtgcttgtgtcaccatcaaatgtgatgtaacattttaaatagatacacatatattatatatcaatgtttaataatacatatatgatgattctgcaaatatagaacatagacaaagatttttagttttgtgataaagggaaacatttaatctgtcaatctttcataatctaatctaatctaatttactttcttcaacagtacaataagacattttcttaaagttattgcacacatgcagagatttgggtttgtaaaagattgattgaactaattattagttttcactaactaattgagttttaagctcattaagtgatgagttaacacatgcactatatttggagtgacttgcctgttttcagggccatagccaacagagtctacacaatatagtcctggactttgatatatattgttggacttgtatatgtataattggaaaaagacattgttaaaacttattatttggtcattgaaaaagtacatattgttaaacttaataatatgtttggctccaataatcaaaaatatcataaatggtcctaattttaaaattctccttcctcaaaagtcaaaggaaacattatggcgatcaatacttaaagcccatgttctaagttgattagttataaattcaatgaattaactaagtattaagaatgtattgaaaattgagtcccagttccccaaacattaggctttcagagcttaattaagctccaaatcatgaagcaagcagcttcatccatgatttaatattatgtttaacagagttattatattatcaatagatactataaaaaaagataaaaaaataatcaagcttaattaatgaaaaaggacaaagtaaaactacccttttgcgatttaattaactccaattcattattcaagaaaaagaagaaaaggaaaagtgaaaattggcatttaaagaagtaacaacaaactgcaaaatttaactaactttgctatgtgtggagagattagtttagacaaagaaagaaagaaagaaagaaaaacagtgtggaagagaaagcagagataaacactacactactatactaatactagtactgctattatcaaacttgagaagcaagaaacgtatttcagattttagccctctccaaaggaaaattttaataaaagggctcacacacactttaaaattaaaaagaaaagaaaagaa

SEQ ID NO: 1249 - DNA, 3675 bp, Cannabis sativa
ggtcaccaattactatgcttcatataacaaaatatgtattcctcaacaaaataaattacaacaggcttacacaagggaagagaaaatccaaaccacttttacttacactagttctcttgtgggttgagatgtcaagcctgaaacgcgatactttctacgaatatttgctctgtgtgtgacttcaaccttcactcctctaagcgcctttttaatctagtaaacccaaatcaagagacattaaagttataattagccaaaaaagattggtaatttaatcttaaaatacaagcattatatataagaacataaatagtacctttatgcgatctgcatcagacaagggcctagatagcacatctttcccaagaagttgaccaacaaactcaattaccggcaaaggttcaatgaatgcagctgaagccatgtctataaaattggatatttaacacatatataagagaacatttcaaataccacaagtttaagtagaaaattcaactaacgaaaacaaatttaccaatattcagagataggcccatctgtgtgggccttatgctctggtaaaatccacaccaagattccaagccctcaccaagccgttgtggaactctgatatcgggtgagaagaaggatctcccaacggggcagtacctaaatcaaatcaagtgttggttaagacaaagaaaatctaaattagcagctaccaacaaaagctgtgaaaaattatacctcttgtttgagagctctcttaatacaatgtcaagtatttgcagggcttcctggggtgcatcagcacgctttccagctaaaaactggcccaaatgatgcaaatttgcctttgcaacaaacttaagcactactttgtaatgtctctcccttctgcaatttcaagtacacataacttagaatataatcccaaccctatcatatatttattaaaaccagtacttaacaacagtttacacatcaaaaataaagtcttttagtcaacacttttctgttaaaaaaaaaaaacttgtgtcaccaatgacatattataatataccaagaaaaaacacttttgatctagatggcataaatgggaaggaagaatgtcatacttgggaccatgaactgcatcttcttcctctataagcttaacgttgaactccttccatgtaaagggcagctcaccagcggtatacagactttttctgccatcataggcaggcagtctcattcctaagtcagtctctttgtacagcctcaccagttctgccatgatggccctgttcacatttcttgatgcaacttcaggagtaatggtgacctgcaacaaaagcagacgatagtgaaaaggcatcacaacaataagaacaaaattgaaggccatgttcaaatctcatcagagacccaaaaaaaaaaagttaaaatctcataaatgagtagaagaaaaggacaagtaaaatcagatgcccctcttgttaatgatcttcaatgcactatagcaaccaagtataatataaaaaaaaaacaaagcacatacaacattgaatgtcaggtaatgggcccaattatcagaagaagaataaaccccatcagagctcattcctaagcaatcttattattcttaaaaaaagaaaaaaaaaatactaagaatacagcttacatcatactggttcaaatccttgtccggtaactgagcaaagaaatggttagcctttacaatgcacttggtcccaacttgaccaaacccaggtcttcgagcgaaactcaaagacttacttgaactcggaaaacccacgtccatctcacacgcgtggacaacattttcgacggaggagccactcggagtaccgacgacgagattctccggtactggtttgtgagccaccgtgcagggccttgaactgggtcgcatacaaacgtctccctgatcggatttcctgccacctcgacctcttcttctacctctgtttttggtcggaggcgaaggttggttgttggttttagcgttatagggttcttgggttggtggtcctttgccattttgggcagttttgggttgtttcagagatgggttcatggagttttggagatgggttttgatcaccaggtgttgctctgagctttctttcatttgccttatcggcattttcctttactcacttgtaaaacacgaaatgcttcttctttacctcacactctcctctccagtaaattatattactacaacttttaaaaaaatacaaacaaaaaaaaaataatcatgtcagccaaagtcacaagaaatccaaaagaagaaaagaatcttaccaagctccgaaaatagggtaaataattgaacaaatagagatgtagaaatgggtaaaaatcatttgcttttgtttcaaggaaaagttcattactactttgcaaaattgaactaagcaataaagaaaagaagaaaaaacagaaacatatatatttataaaaaatgtaatattgaagtgaattaggtgaggaggagttacagtatatctttctgactagacatttatgcaggcacattgagtacagaaagcaaaagaattatctttaaaaataataaacatgtggtatggctataaccaatattgaatatctacttccatagttatggttcaaaatctcaaaagactaaccaataagaaaaatgacagaagaggagggctttaaaataaaaagaaaacaaaaatagctatagcaacttgtgaaatcataaatgcatggacaaaacagactatttacccagaaaccgaagcttagttcagatagttctattagaagaccaatgacaaagaaaagaatattaaaaatagtaaaaatgttcttatgtttacacatgcacatacatatggtaattgctataatatatatatatatatatattaacgattggaaacccaaaaaatggtaatacccagaagataaaaatgttgtctttagcctgtctctgaccagaaattgaaaatgaacgagtctaaacagataaaacgtagcaagatacaaaaagataataaataagaattaatgaataaacgttttctgccactatgtaagttgataaaaacacccagaaaatgccaaaaatcaagaacaaattcaaggaaaggaataaacattgaaaaaagcaagtgaaatcactatctgggagacattagttctttgctaccttcctttattttttttttatccttttcaaaagaagaaaaaatgaatttttaatataacttagagctgatgaaccaaaaccactagaaaaaatactcacttgaaaaggctaaaacggccttaaatcccagtatataacaaagatatatgaactactttagtgccacagaaggtgaagaagagggttttaaatctaaaggcagagattcagaaaatgggtatgattgattcagattcgaaagagagaaaaaaagtatattatagggagagaaagagagagagagtgagaaagatggtatggtaagagagatagagaaatagtaagaagaggaagaagtgatgatgatgatgatgaatctttatacacgcatgcaaacgcttttggtgttttctttatcacgtgtaaaaggcttatgaggaccctgccgtcccctctctttgctttgctttgcttttaaaaatggcttctctctctttctctctcttactttcttctctctctct

SEQ ID NO: 1250 - DNA, 1191 bp, Cannabis sativa
ccagaagctgctgttcaaccgagacatcccatgataaccaggtctaaagttgggactttcaaacctaaactctattcagcttagaccaaacaacaccagggcatgacagaacctgtttctgtcattgaagctcttcaacataggggctggaatagagctacgacagatgaattattggctttaattcgaaacaaaacttgtatacttgttccaagaaaagcaggaatgaatatagtgggaaacaaatgggtgtttaaggagaaacttaatgctgatggtacagtcgagaggcttaaagcgaggttggttgctaaaggttttcatcaaagaccaggattggactttggagaaacctttagtcctgttgtcaaagcctcaacaatcagaataattctcactatagcagttagtaatggatgggatgtaaggcaattagacatcaacaatgcctttttgaatggcaaacttgaagaggatgtgtacatggagcaaccacaaggctttgaagacaaagagaaacctgattatgtgtgcaagttggaaaaatcgttgtatgggcttaaacaagcaccccgtgcctggtacgacaaactgaaacagacacttcttgagtggaattttgtaaattcaagggcagatacttctctgtttcttttaaaaactcctaagtttgtcatcatggtgcttatatatgtggacgatatcattataactgggaatagtggtctggaagtcaataatttcatcacacggcttcacaaggtttttgctttgaaggatctcggtgctttgagtttcttcttgggaattgaggtgtttagagatgaaacaggaatgtatttatctcaaggaaagtatgtaacagaattgttgaagcgagtcgacatgtcaaacattaaaccctgctctactcctatggtaggaggaaagccactgtcactgtatgaaggcaatgaattggaagatcactctcagtacaggagtgtgataggagccctgcagtatttgacacataccagacctgatatagcatttgccgtcaacaagttgagccaattcctaaagtgtccaacaacaacacattggacagcagcaaagagagtgttacggtatttgaaggggacagttcaccacggaatacacatcaaattcagcgacaagttaactgttacaggtttctgtgatgcagat

SEQ ID NO: 1251 - DNA, 6899 bp, Cannabis sativa
gagtactgtgtaatcaccaactattttgccaaatataacaacatgaatttatacgtaaccacaacttcacatttaaacacagaatatagtaattacactgatttccaaacatgttataccctaaaaaatattatattcttggtaatttcaatgacaattcgttctctttgtccaaacaagaaattacatataatgaaactgctcttgtgttccatgtgaaagtgtgaaacatagtaatagtattactgtgaattaagtaagcactattgttgtagatacacaactttttctttttttttttgaaagaggtagatacacaacttgaacttctatgatactttcttttgtttgtactttgtagtatatgggaaacaaaagtatatgaattatgaattaattattattgtgtttatggcttaagtttataactatgattgtcctattattagttatcatctcaccttattctattgttaaagttctaaaaaacgactctatttccaccaacagactcttattccttgaataactatgttgagatgacatcaagtaaataagatactcacaaaaattttccaagtcatcggacattgtggtgatgctcaccttctttaaaatatgctcattttcacaatcatcatttgtgttgtcactatataatcgttttctgcaagcctgtaatatccacaaaatcatggggactaatgagtctcactctataaaggaaagaaaaaagttggagagttacaaatgtattgaatattcataaaataagaatggagacaaaagtaatattttacaccaatattaatattcaatgtaatatcgagtcaaacttatttactaaaatgaacttctttctttctcaatctttactgataaaaattacatgtcaagatttgtttttatgatggtgtgtattgtaattacaatattcttcacgtatatttttaaatctttttgaataatttacaatatccacaacattcttgatattcttctacacatataacggtaaactattcagactctttcatcataagtggacgaaaaatacaaattggtggttctattaattacttttacactcatttttctcttgcactctctttcctttccaacctaaacaatcttttcttcttctttttcttccaatttaaacaatatactttttcttgcctcttctccattctaccaacctattaattattttaccactcatttttctcttccactctctttactttccaacctaagcaatctttttagtattattatttacacaataaacttctttcctcttttctactctaccaaacattagattaatatacgaaaatcaacatttatatgtatataatatatagcaaacaaaaatcatgacatagaataaaaagaattctcacctgaaagacccgacttagacttgcaatgtgttcttccttcaacaatccagatttcagtagctcttggaataaaactacaatctctgaagttacattaccggacgtgaggttttcgatgatgccagatatacagtgatcatcaaaaacagacctcaaccagacaggaatcttctccagttttagcaatgcaacagcaacattaacagcagccttgtgctcattaacaaaagattttgaggctaaacatggagctgacatagacactgtcaactcttccactatcactctactccaattgtttggtgcgttttgagtttcacatcctataatcatcgacaaactgaggctgcagttcacagccaccagattgtcactgtagaaaaccaaaccctctaatatggtgatgacagacattaggtactcggcagaacactttagctcctcgccttctctgtttataacatctgatattctggtgaacaactctaacaaacagtatgaagctgcaagcttgacttggggggacccgaaatgtatcagtctgcacaagtcatggcaagggattccaatcacggaaagtggttgcgtcctatctggtggatcaaagaaactttgccaatcaatggttcctggtagaacagcatgcaaactataggaataaaggaattagctattgtacttatagtaatagttggtactactaccaaaatcattaacccaaataatagtacaaaccttcttaaagagaagtaactaagtagaagcacatatagtaaatgctctccatagcttgatgatccctcggcatggtccaccaatgcaggcccttttagacatgcttcgtggatcatgctgtcgattgtagagatcagagaagaatttaaaagtatggattttgaagcttctataagtgcattgcttgttgagtggttcaaaattaaggaaagaattccaaggactataagattattttgagtccaatttctagcaggctcggagctgatatagtagtccatcaactgcagtagaatgacatagaaaactttgatcaagctgcccgaaactgtgagtgattagagagaaaaaacaaaaaacaaagaaaaaactgccacttaccttcataatcactgcaagccatatttcatcatcagaaagagtttcggagtgtactgaagataatatgttaaaaatcaaaaccaacacgggcgtggatatctctgacgacaatgtatgtatcttttcactgtaaagagtataaagtgcattcccaatattattcaagaatagttcatctgaagcagctggagaaacattgacaattttagtgaggagatttactaaagaaattatgtaatcttcttcaacttcttccttgacgagcttcattagtaagcatgtgagtatccttgccccatagttatctcccgatgctactaactctgcaattgcttgtatattaaaactagaagcattattgttaaatgtggtgtcagaaccatgtgagatattacttccacagaacttgagaatctgatcagataacagttcgcagcatttttcttgttgaaacatccatttcaatgctattggatgaactcttgcagaaactaaatcacattcataatcattgaccagctggaacaaaatcctttcggcctctggactgtactggatttggtagctcactttagcaagactcctataaaaactatacagaaacagaagtctcattactgtagatgaatcggtagcccgatgttggaaatttctaccattgacaaaaatatattcttccaatgaagctaaaaccagcttgtcatctgcaagcctggggagtatttaaagatgaacatcagataaatggcaatagtgaatgtacttcaataactgcattataatgagagaatagctggctcaattacctttcatcatataaagaactacccaataagattgtcaaaatggcagattgagtagaagataattccaagttattggagctcctttgcccgagtagaaagagcaaatcaacaggatcagatggtaaacttaaagcaacatctctaatacattggccagaatccttgtccagaataacatcaactagtgaactgagtaccaaatatactttctgtttcatcttatctgttggaaataagcctaaacatccaaaggacaaactgaaccaagaggatgacaccaatttatccgcaaattctgttgtttgtatgtcagaatcccaaatgagtattgaatgaaatgtttccagtactattagaactgtttcctcttcaatctccttgaagaaagttaaaaaccaaggtaacagatgtactacgcatatatcaacaatgcaagttcgaagttctatgttactggtatcagcaaatttttcatcatgactgtattcaaaaacctccttaagtaggtacaaagagtgcaaaagttgacaggaatttttgtcaggaatactgagacaagttaaaacggtatattgtaatgcttctttaattgatgttgtgagactcaaagttccatgagaagatggagattttaagagagacacaaagattaagcaagccattgtaaatgtctctggaagcatatctatctctcccccagcatgctttccaagcatccttgtcaaaataacaacgatttcttttatttgagaagcagatggtattcgaggacagtcagaaatacaggtccatatgagctttagtgtatgcctttgagctggatgaaaaggtatttcagccacatattgcaatactggaattagagtggaaaaaccaacaagaagtctctgcttgaaggcctgcttagctgtagataagagatcaagtacctggaggcaagatttgacaactggatctttacaatctgttcatcaacaaactttatcagcaaagaactatatttcctggaaagaactttatatataagcctaataataccatactaattgttttctgagcaaccaattaatgaataatggttcacagtatgaaattaagaaaattttggaataccaaaccaattgtttccatcaagtttaagaagtgatcaaagaattttagtgtctctataactggaaatacataaacatctagactaacagtacacattgtcatatgtgcttcttagtacttaatatcactcaaatttttactcacctgataaccttagaatttcaaatacataatctgcaatgttatcttccaccaggacttggatctgttcaattgaagtaccttctgaagtcatataatgaatcagcaaattcactgtaccgatttgaacttggctatctgttgaaagcagtggacctttgatggcttcagcaaataaaacattcaaaggtgatccatctcttccatcttctgctgcttgcattacgctatctgcttcatttgtatacaagctagttgtttcaactgcaaatgcatttccaaataatcccctctgtgccaataccgtcaaaagtgctacacaagtaaaattcaacagatttagtcacacacaccaaaaaaaggatatttgaaaaaattcagtcctagaagttttttttttttttttgctaaacaatttagtcctagaagttgaatgatgaaaatcacgaccacatacagagctcgatttattaaaattctacatgtatcaagatctcatccttacaacttacaagtccaaatatataaatcaatccagaaaagaatactaaaatgaaagttaaaccgttagtggcattgatttttgagcataaatttgagggtgacataaccgaaagagggcgataaaatttgatttcactttcagtcactaaaaaaatcataaagaaaagaaatcagttatggaataagatattgtagaagaaattgacaacaaacctacacaattcaaccggacatcgtcaacttgagtcttaactaaggcctctaatgacaagtgcaacagcttaggacagaaggtagacaaaatatcatctccatcaccatcctggagaagtaataatctgtacaaaacaaaaaagatctctccacgaatctcatcgctgtgttgtggtagaaagaaaaaagcattattagacaataccctatgatttggtaatggccaaagagaaaaagaaagttttgatgttttgcttcgtttattaccttggcaattgaagacctccaaccagattggaaacaaggtgacatttatctctaatgtgagcataaagatcatctttctcaaattttaagagaatgcctagacagtgaagctgcaatttaagaaatattaagattatgtaacaatattatatactctagcatataaaaaaaacaaaatatagtccaattttgagacaaccattgctaacaaacctaaatcttccacttctttttccattttaaaatttaacaacttaagcatcacttacaatccaagtggaaattacaaaatttaccctcgatttctgttagaaaataagtgttttaacactattttaagtgccctttaaaaaaatgaaaaaaaaaaaacaaacactattttaagttgcactttgaggctttttcctgaaatccttgatttttcatgcatagatttcctcaatttctccagtgacgagtgataaactaagtataaagtctaaaccattgcacttcacaattttctgtaagatcagctcaaattacaaaaacaaaaaacaaaatttgaccagaattagcgaagtcactacgaaacttctgcttgaagaaatttgatgtaagactggcaattaaaatgagctcgagctttgaaaataattaaaattttcacttggaaccaaaaatcttgtttctcttttccgtaattgctagtaacaagcaaatttttctaagctactgcactaattcttaacaacagacaaaatttataggtacgaattaataaacaaatttagcaatggaattacagattgcagagctcaattttaaacaccacacaagtccatgcaatcgaagtctcatgattcgcaaaagctgcaagaaaacaaaatccaaagccacattaccatataaacctgacgccgactccagcacaaggcaccggaagataagcgatcggagaccctagctacgaagcttccatgaacagaggagtgttcggaatcggcagaagcgcacagagcagcgacgagatcgacaatctggcgagcgaggggagcgtcatcgaaggaggagagagcagacacgagaggggagacgagaagaagagggtggaaagagaggagtgagcggaggaaaggaggttgagaaatggcaatggagagctgagagagagcgtaggagacatggagagtcggagagtgaggttcggagatgaggttggagaagcatatgagacaaattgagccgccctcattggtttggaggatcatactggatctgtgaccttgcgagcacgatgatgatggtgatgatgtcgttaatggcggtggttggcttgaaacgcagtgtcgca

SEQ ID NO: 1252 - DNA, 764 bp, Cannabis sativa
agctagagtgtgccttgctgcaggaaatcgatgaggttgaatctcgccaggaggtgatttggaaacagaaatctcgcgagtaatggcttaaggagggggatcgaaattcaaagtttttccatgcctctattattgtaagaagaaagaaaaattttatatgggccatttcggaagacggaaaccagtgggtggaagatagagcctaggtggttgagtatttcagatcacagtttattgaatcttacgccacttctaatccggtcgtcagtgaggaattgtttaggctgatatctccttgtgtttctgatgtggtgaattcaacgcttactgaagtcccttcgggggaagagataaagaagacgatttggatgatgcctcaattgaagtccccggggccggatgggttcccagccaaattctacaaagaccactgggatattgtggggaaccaaactattgattttgtccaggaattcttcagcacgacgagattcacaagggaggttaatcgtacattcattgtcttaatcccgaaaaaggaaaaatgcagcgaaatttgacgactaccgacccatcagcctctgtaatgtgtgttacacgatcgttgctactatcttgtctaacaggttaaggccggtcttggaaaaactcatttccccctttcagtcggcttttgtcaagggaaggtggattgcggagaactcggtgattgctcaagagattgttcatgacatgggcaagagaagcgggaagcaggcttttgt

SEQ ID NO: 1253 - DNA, 1821 bp, Cannabis sativa
ttgagttaagtttacagaaaaataataatagtacttaaactataaatagtgtccctgctatccaaaagcttacagaaaaatttagccatacctccaactataaatagtgtccctgttatccaaaagttagcatacatccacaaaattagaatagcgaatagtcctacaataaaaagtcctggagtgtagcccaaatattgcacagcagctccagcagctccctgaaatgttgttcatactgtaagccacagttctcttgtttcatattataaatatccaatttctatcaacgatgaagattagttcttaaaccatcttggaataaagttttgataaaatagacatgcatcagatgttcattggagccaactaaattgtttcttctgatctatgatgtttttcatgaatcagaaccatgaactacgctcttcttcttgatcagcaaaaaaaaaaaacatccctatgtagacatctccctctctctcattttttctacattttcttctaaagatcgtaaatttaattttgttcttcatcttaataatcaataaagacgactaaattaacttcccccaaaatggatggaagaattttcaataagagatataaatattaaaaatcctaaaaaaggcaaataaataaataaataaaaatacatgcacgcccctgagaatgtggatcttcatgctaaccaagatatacatcctgttagtaattggtatctgttgggacataagtctattttagaggaccacatccatagatggatttgtaccaactttcttcacaaccacctatggagcaataaagggtcataatttctaatcttatgtctcactataccttaatgactcagatcaaccaagtacaaactaaacacaagttgcctttgggaaactgtatcaagaatatttctagataaattaagaaaaatgcaatatatagcatatctaacctcaaccagaaaatcaatcttttatagtagatcaggcaacaacaaaaaaatcaccaattagattatattatacaaattaaggttgaaaccaaaaatggaaaaagaaaaaaaaaaaaaaaaaagaaagaaagaaaaaaagacccagggaagaaaatcaaaatcaaataacaagaatgaaactcaccatactaagaagaacataaaccaagcaagtcatggaggtcaaactgagaaagcaactccacataatgagtagtaatgccgcagaacctaatcctacaaacgaatgaaatccccttataacgcagttcttccagtaaagaagcaagaagcataaaaacctcccaagcctcgcaaatccactgcaaaccatcggccaatgcctctccataataatcgaaactttatctcggccatggtaggcccatgtccgagcacgagagtatatatgcttctgtgactgcagccatttccaaccttgcttaaacaaccatacatcctccattttggcttgaatacccactcccaagaaagggtctcttaatattcagttttagaagaagaagccactgctatcgattaacatcgactagaagtccataaaattcgaaacaatatgaagtaaaatcaacaatgtaggccatagaagaaccctgatctatcagaaaaaaaacgaagctcaagttcacgggtttctgagaggagaaaaaagtagcaaaaatggagatctaattagaccgatcacgttcataatttcaactcaaacttgcttcacatgcaagccttcagaaagaaaagcaagaaagaaagaaaatcccaaaaagataataaaggaaaaatggaaaatatttatttaattttttttt

SEQ ID NO: 1254 - DNA, 2706 bp, Cannabis sativa
ccaaaaccaaaactgtcgtgtcgtgttcgcctaatatgtatcctttttcttgataaacctgcagatgcctaagtggccagagcaagtgagccaatcaagaaatagatatgctcatgtcgtcaaagcccttgctgacaaatatcctacggagaacctccttctcgtaactcatggtacagctgtgatccttgatattatttatatatccatttatgtttgaattgtatttgattgatattataactttgggttcaggggaaggcgttggggttgcagtgtcggagttcatgaagggtgttactgtatatgaagtagagtattgtgcctacgcacttttaaaacggccaatcttcaacatagacgagtcatacacagctggagaatttcaggtagagacacacagaggccacactggtatccgatatatacctttaggtcccacaattactgatgaagatgaaggaaccaagtgatctgtcttcaacgatgattacatgtgagaatcattatgcgctattttgagactcatttttttttatggcattgcaacaaattactcacaatttctttttcttggtattttattgttgttggtttaatttgattttcgtgtatcggcgctcgccctttttggggaggtttgattaacgatgcaatgcagttgcggaaaagatatcttctgtgtcaaacatgtcttggtttatagtaataaaaaaatatatatagttatgctttcaagattgtagatggggattgaaagttacgcaattaacattcttcaaagcaaatcaacatcattattgtgactttatattatagttgaccaggtgttttgaaattttttcatgtcttaataagcaagaactctaaacataatgtagatagttaattatcacaatatgtatcatgagcatgaatatatatatatataaagcacaccgaccaattaataagtcatcatataggagttaacagaagtctttccttatataaagaatactgccagatcagaaggttcttgtaaaattctaggtaagtggtaaaaaggctaatagaagcttttaagaatttcatgttaatgtcactgtaaatcactgctgtgatgatttgggaagcaactcaatttgatcaaacacgtctatagggaagtcatcaaagaagcagtcaggctccaagtcaattttctctcttgcaacaccagttctaatagtttctagtggttcaagaaacggttgtccaaaagaaaattccgcaacatttccaagtttagaagaatccatagagctgaacatgtcgatataagggtcggtgaatatgggcaaatgatcttggccttctgatgaaaatttgagttctctctgggcctgtaatgccggaggaaaagggattaattgttgtgagccaatgcacagattattctcagtagtgctaaactctgcatgatttgtaatatcttgatcaaaattaaacattctagaaggattgactagatctggtagcggcaacattttgatcgtctctgaattctgaatgcccgatgataagctttgcaagaatgttgatgatgattctccttctgatgaaagagatatatttcgagcctaatgatataatgacaaatattaaccaaccaaccagaatagtgacaacatcaagatcttacatcaatataacaaacattcaactcccatgtaaattattgcactattttcccttgtatgtttcaccttcaacttgatttaaaagaaacaaaaaacaatgcaaaaggagtatctatttacaatatttgaaaaaaaaaagtcgtaccacacacctacctcttacagtgccacatttagaccacatttagacgagaggaataaaaaaaaaatgagtaaaatagtctggtaccacatacaacaaactgcatatgactttaccttaaaactgggagcctcgtgatcacgagaaacttccacctgttttttctgtgatttggagggagttggaggtgtttgcaaaatccttgccagccttttctgcctgctactccaaaagttcttgacatcattatcagttcttccgggcaaataggttgctattctagcccatttgttcccaaattgtgcctgtaactctatcaccaccctctcctcctccaatgaaaacttgcacccactaaaaaaatttcaggaacaatcccattttcatgtcagattatataacataatataagcaaatagagattggaagagaatgagaatataagtcattatcttactttttcaaattgggtctaagcttattgacccaacggagacggcaagacttgccagttctctgaagaaggcctttggatcgaatggagctccagtctctggggccatacttattcacatggttaattagtacctcgtcttcctcagctttccaaggccctttccttatgccttcttctctgttccctaccattttttcactcttttctcacacttcaactaagtacaggcattctctcaacacttcggaccaactcaccggccctctacaaaagttttcgctgtgtttcctgtttttagtttttgtctttagaatgttctgaaactcgaaactcaatatctgaaatgttacttcgattttcttattagtagtgacggttgagagcggttatggtcactactcccactataatgcccacaattccacttttttctctaatttataaaa

SEQ ID NO: 1255 - DNA, 3279 bp, Cannabis sativa
tctcagtttgttaggtcacactctatacaggtgagagagatcattggctgactgaaagcctccaaattgcaaaatcacataatctaatagaaatgccatgacaaacctgcctgtatgattaagcttaaccacacctcaatgaaggaaataaatttgaaagcagtctattgattttcatgcaatttactcatctcccatagtttctctctgaaagtctactaggaatggatgaaaaagaagatgtaacggtgaagaagatcgatcaagatgtcacaatttttcgcctgacacctacaagaatagtagtatccctcctctctgttttcctgctcttctgcatcattcgtttaggtttccaagttgcaacaggggtagaaccagaaagtagtcgaaagaactggggttttcgtgttggtgtagtgactttaatcgttggtgtcctgtttgtcgctcttggccttcccatactgataaatctgtttctcaaaatgtctgaacagttgcagaggcatgaagtatcaggcatctatacaggtattagaactaaagcacattgtttcactatagtttgagcagtacattcagaaatttttatcctagtacctgatgccattagaattgaactatcgggtttcgatggaaaggatatctagttcttctggcagccattttctcaagtagttttgtacaatttattgtttttaattctaaatcaattaaatctaatccacaatcagaaacctatagaagaaaggttggttggtgggaaactaaaaaattgtcagttttaactgtttcaaagctaagaattgggagggtccaaatctagtggtggtgtaccttaaactatcattgttgcacaagatcagttaagcaatattgaccaaatacacagatgatatacattgaatcttatagctatgatttgaccaaatatgtagaatcttatgctataaaataacccttttaactatatgttcatgcaccagcaatttcctctcttcattaaatatataacactatttttctgttacttcaaaatgagattttttcaataaatatcaccagtctcacttagcttatgtaataatgaagcagatggagaagagatgaagccactacgtacaatcattattcgaatcttggtgaccttgatgacaatgttcatgctcgcatgggcctcttacactggttataggcttacaacagagccaaggagagacgacaagtactatcccctaatatttccaattggcatagttactattgtgtttggtgcagtctacattatcattggtctagccataattgcagatttatcactatctctaacagtgaagttaatgctgagacgcaggaaaggatccatagttcatgaagaaaacacgacagagacaaaaatttccgtttgaaaactattatgacccgttacataggtgtccgtagttatgtttttcctgattagtatgagatcttaactctatctaaggctgttctaagcaaaaaagaaaataataaaccatttgtaccacttattctaagatttcttcatccctttgtcagacatctaagactcatacttctattaacgaattgttctcctttgaggaacaaatacttataagcataatatgaatcagaaatcacaaacatcctgcagaattggtataaaattaataaaaagccggacaaagacagttatgaactagggtcactaactaaaggggctaaacactaccataattagttaaattatgcacacaataaatgataagagtttgcaaacctataaggatttgttcttctacactttaagcctgaaattgtactttgtacttatgaaacaatatcatggtaatatacagggctctaatgagcaaaagcaatgaaagctctcctattcttcatctactcagctcatcaacattccccctattattacactaagttgtacaaatttcttatatgtatctaacatataatttgaagaagaagaagatcataacactatgtactcattcaaattacaatgcagcaatgataacaatattttcttcttcattttctctttcaatactaaaaaatgaagcttacaatgtcaattcaaaattgtgaatgccaacatgggattttcaccaataaatactttcttaaatctgaatttcttataagtattgagcttattcattagcttcttagagccccaaataacataaaacagaattcaaagactcaaataaaaaagaaaagaaagtagatgaagttcaagtactcaaaatgtcaaaaagaaacaatttttctgagattatttgattgtttatcctacatttcgattgtaaacaaacacacagagcatcatcataacatatccaaatgctgaaccaaaaccctagttgatacacaaacaaaatcacagggcttttactcataataattcaacttcaaaaatgtacacattttcaacccacaaaaaccctagaaacttcaagcaaataaagttgctataacctaacaaagagaaagagaaagaaagaggcaaagagatatctagataagcttgaaagggagaggccaaggagtggacctggggacctcaaccttgtctttgatgcgctcgatcttcttctccttctttggtctggagtttccgtacgatcccttgaacctctttcccttcttcgtcttcttgtcccctcgtccgcacaagatcggaacccctatctcgccggccggcccacctgaggttgccgagaaagacattgatgatgatgatgatgacgccatgaacggaggtcgtcgaagctccgtcatcactattcgtctggctatggcgccgcaccactgtaccatcgccatagtttttttcttctctttagtttggtttttggactttgctttgcggcacttgaaaatgggagaaagctacttaaatgtcaaaaatacccccacactcttcatttttagagctattttgcattaaaattgtctcttctttttaccttgggatattgaattttatgaattttttaaagaaaaaaaatatatatttcttgaagtgaaatgataaaaaaaaattgtgtctcaattcagtgtctaatttattataaattggcatttgtaacacaaacttaatgcattatgatcgagttggttgagtgtctaatttatgactctcaaactcgatgtaaagcttatgattgagttgattggatgttcttgaagattatgctgattcgtatgggatttagccgccattttgtgtcacttgttatgaacagt

SEQ ID NO: 1256 - DNA, 840 bp, Cannabis sativa
aataagatttacatattttattactcgtgagattatttttcttacacatgtgataagtaattatttaaactttattttgacattgtataattttctaaaaatcgatcaataatctttttttttttttatcaataattttaaatagctacaatattttaaaaagttattctgatgcggaaacaaatataagtttacagattctactacaaaagtttccaacaaaattatttatttataagttgtggtggattcttaactaattattcaatattaaaaatgtagttatatatagggtactaattactattaataatttatgatttcctaactggatgcttttagtttgatttatagtctcttaaagttaaaatatttttttagtgaaataaaaagttgattaataaagatgaggttaagattgaactagtataattaattaatttgttattaattagggttaaaataatatattaatcatttgattagctaattacattaattaattaagatagtgtacagtaggtatattggtggggaagttggtagtagcaattaattatgatcgatgagataaaaggatattaatattaatatttaattgtttttgtggtggggagagattataagaataaaaataagagcaaaccctagctaattaattaactacctatatttaagctctctatatatataacacctaatttattaagtaattattatatgagagatatcatattatatatagtgacaaacttaaaatttggaagtggtgtggttaatttgtacgagattctatcttaaaaaattaattggttatgaaaagaatagtctatttattat

SEQ ID NO: 1257 - DNA, 3979 bp, Cannabis sativa
tgtgactaaatagattttatactgcttatggaatcaatcgcttttcttgttgagtctctgtgactcacgggtgctaaatggtgcaggtaatgggaagggcaaggttgagcagccatgagtctgaggtctctgcagcagtgtacatatcagtcgcggtgtcacgactctagtgggcaggattaccctttttggatgcattttgaaatgtaaacttctgtcgtaatgtcattttaaaactgattgtaaatattttttaaaaaataagggtccccatagatattaatacttatcttttacaaaaattatgtgtttgctttgattacaaaattttagttacccacacttttcatatatttatgtagtttaatggaaaagtaattttgtgaaaagcacacacatggcgttcctgtggaacaaggcattacattaacatactattaaccaacgactttataagagaagcattttaccttctgtgggtttcaaatccagtattggtcccaaagtcgaatgacatatgaagaacttgtatagacttctctgacctgaacaaagcatgcccaaaagatggtttcccccttgcccaggattgatcagcttgtcaatgccacatccaggcacgagcttatgtcgtttatggatgcattttctagatataaccaaataagaatgcacaccaatgatcgagagcatacaagcttttttactaacatgggactctattgttataaattcatgccatttagattaaaaaatacaggtgctacttaccagtgtcttgtaaatggaatgtttgaacatcagattggtcaaaatgttgaagtttatgtggatgatatgctggtaaaatctataaaaagaaaagaccatgttatcaatcttgcagaatgtttctcaattctaagagaatataatatgaaattgaataaagaaagttttcatttggggtatcttataggaaatttctaggttttatagtgaatgcgagaggaattgaagcaaatccctagaagataaaagatctactcgacatgctttccccaaagaaactagaaaattggttgcattaaatagatttatctcgaagtcaatagacaggtgcttgccatttataacatattgtgaggcaacaaaaggtttgaatggacagtagaatgcaaggagacatttcaaatcattaagagatactttatcaaccccacccatactatcaaaactagttactggcgagatcttattttgtacttatcaacatataaaaatgcagttagtgccgtgttagtgcgtgtagagggaaaagcccaatcactagtatattacgttaacaagcatttactgagggaagaatatatatatatccacccctagaaaaactcacattaagactgattcatgcttcaaggaaactaaggccatatttttaagcacacccaactcatgttttaacaaatcaagcattgaggcaattcctctcaaaacccaaatgcctcgggacgattgataaaatggtcaactgaattgggacaatttgatataccttatcatccgcgagtagccatcaaaggacaagccttgtcaaattttttgatcgaagggataaatattgaagaaaatatagaaaagattccaaatcagaaaatctagaaattattcgtcgatggctcatctaacaaaaatagctcggggtaggcataatgctagtatcacgagaaaactttaagtttcattatgcattaaggtttcaatttccaacttctaactacgaggcgcttctagcaagtttaaggatggttaaagttgtaaatgctaaaataatacattgttttagcgactctcaattgattataaatcaagtgcttggtgaatatcaagcaaaaagaattaaaatagccaaatactaggaaaaagtttggaaaaacttgggaaaattcgattattacaaaattaaacaattactaagagaatgaaattctaatactgaggctttggcatcaaaatttgaatctaatgactttgacttagtttcaattgaaaagttacaagaaccaagcatttttgagatggaagaacgagatgtagaaataattgatgcaagtccaacatggatgatacccataatgtatctcttaaatggtcaacttccataaaaaaacgaggcaagaaaactcatgtataagataccaagatacactattgtggaagtaaagctatactaaagaggatattcaatgcatctactacgatgtgtattacaaacagaagacgagaatatcataaaggaaatgcatgaaggtttttgtggagatcatgctagttggcaaagtctgtcaaagaaggtaattcgacaaggatattattggccaatcattaacaaagagacacataagtttaaagaaatgcaataaatgccaaatattctcacacttaccaagaatcccccaataaaatttcacatgatgacctcgccctaccaattcataattttggggatagatttaattggatcattactaacagggcgaggaggtacaaagtatgaaattgtcatggttgacttctttactaaatggattgaaattgaacacttagttttgattacatcaaagatagtttcacattatgagactcagtttgatatcaatttattcactgaatttcgcaagaggaattaaatcatcaaaaaattcatttgtcacgcaaccacaggcaaacagacaagtcaaagcagtcaataaaaccctaatagacactattaaaaagaagcttgacacattcaagggaagatgagttaatgaattaacacaagtgctttgggtccatcgaataactgaaaagaatgcaacgggacatgctcctttcccgctaacattttgctcagaggaaatgcttcttgtggaagttaatatctcatcccatagacgagagttttatgatcaggatgaaaaccaggaattacttaaagattctctggacttcctccacgaaagacgcaatgagtcacaaatgtgaaacactgcatatcaataaaggatcacaaaacacttcaataatagagttagagaaagactttttaatattgaagatttggtattgcgatagtatttgccaagacatgatatgtagtggcaggagtatttaacccaaatcgggaaagtccatatatgattagcctggggtttataaattagcctggcaaaatagctcgctagtaaaaaaatacttggaataacgagcattagcgactatattaccagtagtaaatgtaaattttttcaatttttttatgtaattttgacttttcatgaaataaattttaagtcattcacttttacaagtcatcataaagttttactttaaaattatctcggggcatatagatattaatcaactagactttataatcatgtagtttaatatgggagtcaaatatgatgatataatgctaaaattaaaatttttgcaagaacatgaatattcgattaaaactagtctatagaatttgagttctattaagcaaaaatgaagaaaatagatgttgtaaaatgagattacaaaagaagatcttgaaaatagcgcaaagctaatgcgacctgagaaaataatggctcacatattatgtaacaaatgtcataaacgaaaccatcaaaagggttttgttaaatgataattaagctaagtgtggttaattagatggataactactcgcatgtcattgatacaaagtgttaaaataacaaatattcatagaataagttctttttttgtgtgtatactctttgatattaagtatgtaggattatttgtcatttattcattgttctgaatccaaccatacaatattcaaattcaaaccaagctatcagaacgtaccaaaagaatttggcagacaccagtttagttatccacagaccgtacatttttataaaaagtggttccatattaattttaaaattaattattgtgttggtctaaaattatt

SEQ ID NO: 1258 - DNA, 4087 bp, Cannabis sativa
agagagagagagagagatttgtttctgacagacatttatatatttgcctttagataattactgattgtaagaaagaatagctccctctagtattggacactcttgagatgatgcatgcacacttgacggtcgctgttgtttcaaatgattttcactttctacagtcaaggatttctttctcataaagctatgcataaagttattttctatatgtgttgttcattcattcaacaatatccaagcatgcaattttttgatcacattatcacagtaggcttgaactttaaacaccagacctcaaagactgctcccattaatctcattaaccaaatcttccacttgtgctgcaacaacccaatattcttaatagctgttcccaagaacgaaacaaactaatgaaataacaaaacaaagtaaaattagccattttacacaagtttcacagtcaaaatggtagtatatacatatgtgtatatgtaactgtatgtatatatataaggttggatatatatatcacattagaaaacttgatttttaatacaattgctctcctcattctttcccaaaccctacgccaagtttctctattttcttaacaagaaaataaagagagaagcttaattagcttatttgataataatgtccttttccttattatcatatatattgtttttttattaattttatagagttttaaattataatcttacagcattaacattgctttcctgttaattggtcaataattatctaacagtttagtcctacttcgaacttacgcattctaaaataaataaaataaatgtactttgtagattatttttttattatgaagaataatattacgtaggaatactgcaactttgtcgaaactaccacaaacaaattattcaaggaaaaatggacagtccaattatatgcggacctatatagaataaagtgcagaatacaaacattacactgttgtctttgcgaaaataaaagaagattaaaactcaattaagagtattttatttttcttttctacaatttttagatagatattatcttaaattatcaataatttagaaattattttttaattttacacaattttaagttgtgtttccttcaaaatttgaacattaattttgttttatttttgaattaatttaaaaacaatttgcagttacatatcaagatttcttcaagtgttgtataaaagagagttagttataaccgttattggttatctgttttaggcatagtcagttagttaggattggggtttatctgtacatgtctgttatacctgttgtaactaatggtgtgtataaaaatcagcttcttactctgtttcaaacagagcttcacaattcattctttcattctcctttctccacttcatttcataacatggtatcagatgcttaggcttcaatggcgtccaaagaaacccagtccactgcatgtagtgatacaccagaagctctctcagttaaagctgcaataccacaaattcttcccaacaacaatctccttccactcaatcttcgattagatcgatccaactacaccttttggcgttcgcttgttcttgctgccgttcgtgcatacaatctcgatggattcattctcggcacaactcctcaaccacctccacttcttgccggtaattctcccaaccctgcttatcaccattggctacgtcttgatcaattcttgatgcactggctcatgaattccattactgaacccatgcttggttatgtgatcaattgtaacacttcgtcggagatctggaccgttttcgctcaactttttgctactacatctctagcaagacttctccaagtccgtggtcttcttcaatccaccaagaaaggatcttctacccttgatgaatatgtccttaagatgaagggatatgcagacaaccttgctgctgctggccaacccctctccgatgaagatcttgctctttacattcttggcggtcttggttcagagtatgagtcgatcgtggtgaatcttacctccagatctgaaccattgacacttcaagaaatccaattcatgttacatagccatgaagtttgtcttcaacagttctctacatcggctttgcaaactgtccaagccaacatggctaatctttctgtaaatggctctagccgtggtcgtggataccgtggcccatatcgtggaggcagaggccaatccacaaatcgaggtggtcgtggaaataggcctaattgtaaactctgtggacgtgcgggtcacacagcacaaaagtgctaccatcgatttgatattaccttcactggaccacaagcttctggtgcttcgagttctacttcgactaatgacaatcctcaagctcatattacagaatctgcaatttctgaagagtcccctgtcacctggtatcttgacactggtgcaaccaatcacctcacagctgatgttcaacagcttcaaaacacaactgactacaaaggaaaggcaaaggtgactgtaggtaatggccaaactatccctatttttcatgttggttctaacagttttcctaccaatatccccaccaaatctttacagctcaaagacattcttcatgtcccaaacatcactaaaaaatttgctaagtatttctcagttcactaaagataatgatgtggttctcctatttgactctctttgttgtctcattaaggacaagacaacgaaccaagttcttctcaagggttccctcagtgatggactctatcaacttcacattccatctcagtctgcttcaagtccttcaggaactcagcagtcaactacttaagttccttacaattctgcatttaattacagtacatctagtaataatgtctttgataaatccaagataaatactatatggcattgtaggcttggtcatccagccaagccaattttatctcaagttttatctcaagttagtcctaaatctaagtgtaaagatttacctttctgtgatgcttgccaattaggcaagatgcatcaattcactttcaagtccactgttaataaaacgatttccccttttgaaataatacatacagatgtttagggtccttctttttacacttctcgagatggatataaatactaccttagttatgttgatgattacacaagatttgtttggatctatcccatgcaatctaagtctgaggttactgttttgtttacacacttcaaaaactttgttgaaagaatgtttgaaactaagataaaaagtgtgcaaactgatttaggcaaagaatacttacccttatacaacctgtttcatgatcttggcataaaattgagacaatcttgtgctcacacacatcaacaacaaggccgtgttgaaagaaaacacagacatgttgttgatgtgggtctcacattattggctcaagctcaaatgcctttgagtttttggtgggaagcttatacctctgctacctatcttatcaatagactccccactcctctgcttaataatgtttccccatttgaaaaactgtacaatcgaaaaccagattacacacttcttaaggtattcggttgtgcttattttcctttgttaacaccttacaactctcacaaggtggtttttcgatcaagcaaatgtctatttttgggttacaataacactcaaaaaggatatcgatgcttgcatcctagtggccgtgtctatgttgcccggagtgtcaattttaatgaagctgaatttccctataatgagctattctctgtgtcaacttcccctccaactccacctgtctttaccaacacaaactgctatacagtaccaaactctcctaatattcaggctactccttcaacctctccccccacaaaccaatctatatccatacaggccacaaacaacaccactcctgcatctcagtccccacctcttgctgtatctccctcacatagcccccaccctaatcaacatagctcgagtcacagcatctccacagactcttccctaccctaccctcttcctactcacagatctgagtcaactcaaagtgtcacccacaattcaccacctgcccctacaaacaacactcactcgatggtcacc

SEQ ID NO: 1259 - DNA, 3194 bp, Cannabis sativa
gtagtctcccactgaagaatcatacacaagtcctggatttaatgcttgaattgggttgacatggccagagccataagcaaattctccattggaattcccagtattgttcatcaacaaagctacaaacaaagagagaagaagagattcagttcacatggtttggtagtttgcatacacataggagaagagaaagagcaaattctcatcgaggtaagcctttgcaaaacagttcttgagcaatgccattacctgtagtcatgagagatgatttaatggctgagggtgaccaatcagggtgaaaagttttaacatatgcagctgcaccagcaacatgggggcaagccatggaggttccagacataaaattgtaactcactcgccttttgtcagcagggctgatcgagggtgaattaagaggaggatatgcagccaatatgttcagaccaggggcaattatatctggctgcaacacacttaaacatagtaatttaagaaaaatagttatctaaaaaagaaatgaaacaaaaacaagtaggaaatggaaatggaacaatgtgaaccttcagaatatctggtgtgattaaatttggtccgcgagaagagaaggaagcaacagtaggagctgaagaatcttttatagcttcacttcttgaaatggttgcttgaggattactgaaaaaacaaaataaaagagagaaagacttgcattatttgagaggtagcaaacacacttaaacatagtgttttaagggtatatacaatgatacatacttggtggaatttaagtatgacaagaccaatgcatagtcagcttggttcagagctgaagcagggaatggaacaacagaagaaacaccaatggctctatcgttgttcgcaatgcaaccagatgcaccggccttataggcctctttgatcccgaaaagtgaatcacacaacacaacctttcccttgactataccactgtctagacagccttcatcacaccttctgaaaaataattgcagccaaagaaaaacaagtcatttcttcatcatattgatctttttctttgaaaattatgaatatggaatgaaaggctttccaaaagtacccagccattgaaacagagcactgacttgaagcattttttccatgcactagaggaagcattgttttgttcaaactgaaagagtttatagaactcccctgtttgtgtaaaagtccatgagcataaaagtcttgacaaaaagaagtgttaaaactaatagaagcaaaagattgggaagaagacatacaatgatattggccattccatttccaacaaaaaccttgtctattatttctctatcaatgctactagctgctactgtcataagccatggtgctgaacttagcatagttccaagagaagggccactatttcctccacaatttaaggttaatattcctttctccatggcatggaaagcgccaattgcaatcgaatcatcttcaaatatttcaagggaataaggatttattgatattgtaatgatgtcaacaccatcagcaattgcatcatcaaatgcagccaaaatagcagctgaatggcactttaaggggttgcagactttataggcagaaattcttgaagagggaactcctcctcttgcagtgcctttggcaagtccataaaagcttgcaccttttacattgttcccggctgctgttgaggctgtatggcttccatgaccttcagtatctcttgctgacacatctgatgtaatcgatggatagtaccgagctccaatgatcttgctgaaaaacaaggattatatacagaaacattgtaaaaggggtatcaaaagcagaatcatatgtagttatttactttcaattaaaaaggaaaaaaaatacttgttgcaagtgaaattttggccgcctacacatgctcctttccatttctttggaggaggaccaaaaccttcatcactaaagctctctgactctggccaaattccactgtcaataacaccaactatagtatcactctcaatggccggttttcgagtcactgtttcactgagccccaaaaagtcccatgatcttgttgtttgagtttgataaattttacttgggaaaattgagactacctcttttgaacctgccaagtgccaacccccaccattttacaaaattttctatcactatttttacttggttcaaatggaacagctatgagttctagatgacttacttgcgagcttaagtctttcttgctcagtcagttttgctgcaaatccattgaagctccttttgtaacttcgaactaatgaattcgccactgaactgtaacaataacacataaagtttgtaagaaactgataacaaatcagaaaaggataacattaaatagatgtaaatgttaataaatattcaaggctaccttaccttccctcaacaacactctgtagaatactaaggtgatgagaggctggtgagtaaaacttgtctttaagtgcccccatatacacaatataaacctgtgattaaataatggtatttttattgttcaacgttcatagaataaatatgacaaagaatagtgatttcaagaaaaaaacttgtacttgcctctctatcttcattggctttgcaggaaaagctaatggtgagaatgaaaatagacaagaaatggtaaaactgaaagcttctatacttccccatgcttgagaaactgatggtaaaaccaaaagagctgttcattacaagaatagtgcgtatactaatttataggtaaatcgaaaattcaatacaataattccttgttcaaacaaaaaagtaccataataccataaaaatccaacaataattccttttacgacaatattgtacattgtatgacaacaatacatatgaggttaccaaacaaattcttggctggcttctttactgttattactgctattgttgacattgtttttgttattaatgttatttttataagggataatactgctataaatgaaatgcggcaatttcactcaattatggaatatattccattcattttcgatgttattaatttttaaattgtgacaaaatatatcctgagtccttatcgtgttcgcaatgaatgtggtgcggttcttaactaatatattaggccacactacatagacctcaaaactgcatttcaaaaataaagtacggtgtatgtggtttgtaccgat

SEQ ID NO: 1260 - DNA, 2526 bp, Cannabis sativa
acacaaaatacaggccgatatagatataaagggagagagagatgagcaccaccatctcgccaggttccagcaaggatctccgatcaccgcttctatctgcgtcagcgaaagacactggaagagctgcaactcagaaaatatgcatcgatgttatgctccaaaagtattgtggggagtttgggccgtggcagatgaggcattttgtgttaactagcttggcttgggcccttgaggcctttcacactatggtcatgatctttgcggaccgtgaaccggattggagatgcgtcgacggtccattgggccaaaccagctgtaatagggtggcaaaaacggtttgtgggcttgaaccgggttcgtgggaatgggtcggcggtgtgggtagctccactgtggctcaatggggattggtttgtggtgagaagtataaggttgggttggtccaagcattgttctttggcggctgcatgattggtgagttttgtcttcatcatcctctgttcttcctcatcactagtataattttttttttttgatacatttcttttttatctatatttaagaaaatattaatatttaattgttctttattaaaaagaaaaaataattaaaataaatgagtagataacaagcaagtagcttatactagagagttctgtttgaggggaaagtaagatagggtcgtatgtcctttagttggattcaaaaagtagtactattttctttgaaattgtatataatgatcacttctgtagtggcctttttaaaacagcgtatacttacttcaatatattatcttggtctagtatacgcaacatataggtttgtatcaattttgacttgtgtgaaagtgaagtgatagtttatactgctttttataataggctgctttttatacttcttctatatcaatttgatttatctctttcaaacttaacgaaaaagacagatgatattaaaagggaacaaaataatcagacgtcataataattaattaagcaaatgctacaggtgagataacgatgaaatctcgtattaatattgagtttgaccacgaggtaggttcagatcatgtatataatataataattattaggttcttcacaagtttaacttgatctagatgcttgtagttgtacttgaataagaagaaaaaaacagtttcatcttagaaataatattatattatccttagacatgacacatgtttgagtggttctcatgtgctctggcacacacacatatagctagagatgaatgcatgaaccactagctataagagttaggagatccttatttaattcttttatgtggtccaatttcaaaatttatatatatttaaaacatgacaataagcctatttgcccctaccacaaactctatgatcacttttcttcagctaatttgagatgaagaaaaagaaaatattaaggtatatataccacaatgtgggcatattgagatggtagcatattactatgatggaactactccactaattaaagtactcaaacttaacaaggttattttaatttcaacctataaagagataagattcaagatataaaacattacgtgttgaagttgtgtgtatgggggttggctcaagaggccatacatgatattgatgagcgtgactaattaaggtgttagaacatgctttttaggtggaaaatttagtaaggcctaggcgtcatttttctatttgttgatttgcactgcaattgactattttggttgtctctcctttttgcctgtttgtcttttttccttgggtctatctgaggaatagtatataaatacaaatggtgatgtattgcattatcatcacattcttatgcggaagttattatcttcacaatttacgaagtcttaggccttcatgaacattcatgatttatttcactttttgtcttgattagtgagacaatattttttattcagaattttagcattcacttaactaattttgagatatttagttagagatcatctttcactactaatctcaaggtttattgttggagaagttagaaatatattgttaattcttatactgtatggatgtattattgaagattgtttagattattggaaaatttaatcatctagatgagtaattgcatggaaaggaataaatctgagtatgtttgtgaaatgtacattagtttgtgtcactcatgtattaaaagacataggaaaattaggaaaagtgatgatgacgtgcaatatagatccaggttggctgatgggcctaagcgcgcggcttgaggttacatataactcccaaaagtagacttgaaaagataaaagttgtgtcattaactaattaaagggtacactttttcagtatcttgtgtgatattcaagtcataaaaactttatttcacattcatgaatattccactattgatgttttgaatcaatgaaaccaatagaaactcattgctctgtccaccaagatgggaaagaagagaaaacattctgtggtttgcgcaattactcttgactttttgcttttcatct

SEQ ID NO: 1261 - DNA, 2226 bp, Cannabis sativa
gacgtttggtgacagctagatgtgattggaatcgatgaagctcaattctttggagacctttatgatttctgccgtgaagctgctgatcttgatggcaaaacaatcatagtctctggtctagatggtgactacttgaggtatattttagtacccttcaaacttttaatcaaaataatgtgaggtcatgtatagaaaggcttgataagtttttcttctatgatgatggcagaaggagctttggttctgtgcttgacataattcctcttgctgattctataacaaaattaagtgccagatgtgagctttgtgggaaacctgccctgtttacattgagaaaaacacaagagaagcaaaccgagctgatcggtggtgctgatgtctacatgccggtctgtcgccaccactatgtaagtggacaagtagtcatcgaggctgcaagagttgccattgaatcccatgttcattgtggttccattgcatagtagtaatattatatttatgtatatatattgctttagatttgatacactagaggcgagtctggatatgaatcttccattctatctaattaagatgtattttagctttaactctttatattatgggtgtgtagactagtaaattcaaatttagtttggttaaaatcttagtttactaaagagagtgcctctattattctcttctatcgatgcatttacatttatctctctaatattaagataaaaaaaaccaacaaaactaaaactaatacaaatgtaaaaagcttaaactaataaagtactagccactacacccaagaattccccgtggtagtaattttcgtcgtcatcatcaaaaagcccataaaaaaatgggtcctgaagtaattgggccgcagtgggcctttccgggtcacgaacaatgcacttttcaatgaaacatttcacttccgaatcctccaccttattcagggcctgaggtttgactccaccgctcaccttcctgtaaatatcaacgattgacttacactcgctgtacggaatctccctagtgacgagctccaacacacagagcccgaacgagtaaatatcaaccgtctccgtatacttctcctcgaaaatctccggcgccatgtactcaggcgtccccaccatagactgtacgaacgcgttccggtctttcgcggtggccaatcccaagtcccctatcttcaccttccccctatttccatcgatgaagatattgctgcagtttaagtctctgtgaatcacgcgcggttcgcacgtgtgaagatagtccaggcctctcaatatctgccgggcccatttcttgatcgcagataacgaaaccctacggtgtttcttacggtactccctcaaattcccagacatgcaaacctcggtgatgaaattgagggtttggttatttttgtcgttccaggcggcaaagcaagaaataatgttgtcgttttttaaagaagttaacaaacgaacctctgtgaatagcctagccatggttgaatcgtcgtccatgaattttctcaaggaaacttggttccaagctacttcttcgccatttacaatgtcaaaggctttgtacactttctttactgaaccggcaccgatcaactccctgtacctgccgtaacggcccgtcggatcggtctcgacgaaaggctcaccatcgtcgtcgttgttgtcgaggtacgccatgttttgtttggaagtttcttgaatttaaaaatcttagggcttgaattgatgaattcaagtagtgagtagaagaattgcggataatggatttaaatgaaaactgaggcggagcatataactaagaagtatgcagtgagacattctttcaaatacaaactgtggtaacccatttttgcagagaggagatttgattaaggtaaccaactatttataggctcaatatattaataataatataatagtgagtaggatatcgtgggtagaagagctataatttcggctagatagtttaaatcgtttaaatttaaatcctattttcttaaaaaaatcacaatattaaatgcttatcttttttccttttttcttttttaataattaaatgcatttattaaacgttaaaaaaaaaaggcaataaaatcccgaaatttaatatagaactttcaaaataaataaaaaattgtttcaaaaaataaagaaaaaaatgatcaattaaattaacgagcattaaatttaaatcagattctgaaatctttta

SEQ ID NO: 1262 - DNA, 729 bp, Cannabis sativa
atttatttgggtagtaataggattatcttgtaaaaagaaaaggactaagcttttaagttgtaaaggcaagaatcaaagaaaagaaatactgttttttcaattggtaaaaaattgaacaggacaaactgaaacattatttctcaatcacaatatcatgtgttggatgaattttgagttggaatcattgtagctacatagtaaacagagctgggagttttaataagccaaaaagtataagaatcttttgttccagttcatcaaaatagcttcttcaagttaataatgattcttcttcacgcaagtcaccttggaaccgacaaaccaagctctgaatcaatacagaatgattttagtcagagcacaagaattaaaacaaacactgttatatcatatcatgcagcattatgcacattgcaaagttcatgaatcaatctcaataggataatacatccatatgaatttagaaagaaaaagaaaacttaaaatcttgttaacttttccatgttacatttttttgggaaaaataaaccctgtcctctacagcaattgactggttttcactagatagttagacacggactccactagcaaggaagacaagagacatattatgaatgaagcatagatgacagtgcccacctccaaacagagcacacatgtctcacgtgccatcaattgcatctggggaaaaggagcaactatgttatcagggtgtactctaatcactct

SEQ ID NO: 1263 - DNA, 687 bp, Cannabis sativa
ttggaaatcataggttgtgccaacagtgattggtcatgaacttaatgaaatcatgttcagtggtgttccccttccctttacttttgttactggtgaagccaatccgatctttgctcaatggaaaaaaagggatcaactaattctttcttggctttggttgtccatgactaagggcgttcttgcttcggttgcgaatcacaccacgtcttttggagtttggcgtgccttggagcaaaaattcatgagtcaatcttgcgcccgacttctccaactcaatggtcaattctcgcacattcagaaggccagtctttcaatttctaactatgtggaaaatatttaatcgttggatgatgctctcactattgttggctctacaatctacaatcatgatttggttttacaattcctgaatggcctttggccataatacaattctgtcgttttaggcattacttctcgtagtgattctttgattgtttaagaagtacaggccttgctcatgtcccatgaaagttgcttggagcttcatagtgctatgcccaatcttcccttgaagatgcaagaaaatattacacttggttcattacgaaatggtagcttcagaccatatccaccatttgtttgaggaaattccactaactctacttcaaaatttattggtcgtgatcgtgtcacccctttctttca

SEQ ID NO: 1264 - DNA, 2183 bp, Cannabis sativa
  modified_base (817)..(827): a, c, t, g, unknown or other
aaaaaaaaagaaaaaaaaaaaagcgcaaatgtacgttacaatagagaaaacaagagaaaatctaacaaatgtacattacattacaagcccaaagccaaaactcaaaaactcgtaaaaagaatttcatgaaagtaattttacaaaggatcacacagattcaactcaatatgacacaagaaatggaatgatcatgcacatgaactcgtcgtaattaagagttgccgatccagaatactgcttatccttctctttaaatttttcggtcagaccctgaaattcaacaaaaacacgaaattacaaagctatgattatgttgaacaagtgttgtttgacttcttaaagagtaattagaagagtgtcttaccttgacaatcattccacatctgtaaatcaacatatcacaatgttagaaatgagaatattgaaaaatttaattcaacatatatgtcaattaatcgaaagagtacttactcgacgaaactatcaaaatcaagctcaactcttcgtccacttccattgttatacttggaaatcagaagttgaagaacagaagccgggactgcgtagcctaaaccaaaaagagcgtctcttagctccgtcagatcaattttcccacttctatctctatcgtattgctgaaatatgccctgtgaatcacagcttaacaattttagagttgtgctaagcaaaagacaataagaggtacaagttcattgacacaaatagttcattggagaaaattgagttatcttcgttcggatgatatgtttgaaagaattaatgttggacttgttggatccttatcaattcatgcaannnnnnnnnnntggggatctctagaaagtccgttttatgaaatctctgagagatctaaaagaattaatccatttataatcctcagcaagttggattaatggatcgtctaattagaaaaaagcaaagaaaacgaagcatgttcaaaagttactttttgaagaaaaaaaagaaaatagattttaactcgattggtgaaatagatttaactctctccaaaaaaaacgcatatatttttttagtaaaatcagaaccgaagttcttcggggaataacaagagatgtgtcctttacaagacaagtaaaatttgtgaatttcaactacagcaaaccgaggatgagcaacaacatgagtacgagttatataagtttcgcaacatatcagtttgtttgatttcttaattagaaaacttaaaaagccctactcatatgaaaagctataaactaatatgaagacacaaacaaaaccagagaaaaagaatgttaagttaggtacttacgcgccattgaccaagacaagtccacattgatgaaaactcttttggacctgaaataacacaacatatatataggtaccattaatatttattaccattatagtcaaagccaacttaaataataattagaacagtcacaacaattggttatcatcattatcaaaaaaaaaaaaaaacacagaagccaatattggatattcaataaaggagaccctctttacagaattatacaaaaagaccaaaattcacacacagcaacataatccaacttgcaaagttggaataagactaattaagaaggttaatttggattatatgtaccaaatcgtgacttcgaatttattgtcattgaaaattcggttggatgcaaagaacttccttctaactctatttgattttagtaacgggcgcttgatgtggacggaaatttagtaagcacaatttatgttaaagtttaagggatccgatttggtatatgaataattttagtaaacttgaacataattgaatagaaatctttaaatctaacaatcttaatagttcagataaattttattaacctaaaatgtatgagggcataattttatacatattaaacttcagcctattatttttttaacttgtattaaattatgcctttgaatttttcaagtctaaaaatcccctagaactaacggctaaaagattgtttatgaactttaaaatgtactaaattatgttaataccttgtaccaaatcgtatactcaaactttaaactttttaggccgttgaaaaattctctaaaatctatcgagattgctaaattcaaagaattatgttcaagtttactaagggacaactaatgtggctatctcttcaaaaaaaaaaaaaaaa

SEQ ID NO: 1265 - DNA, 3104 bp, Cannabis sativa
aactcagttacctcgtcttttagcactagttttttatcttcttcaccaatccagtcatccagcaaatgttctagcaatacaatgtcaagtgaggttgagctattggacctttttctttgttggcgttctcttaatcgaaggttgtagtgaacataaatgaggtcattcaatctttcctgagctagacgattctgtctgtgtctgtaaatttgatcaaatacgctccaattatgctcacacccaaaagatgagcaggtctggcttagaatacgtacagctatccgttgcagctctacgcaacttatcccgtgttgttgccaccatgcggctaataaggtgggcaaatagaaactctgatcagtataggaatcacttatgcatgaaaggctgtagtttcaaactagtacacagtagcattatgctattacctggatcaagatctgttcttgtactaatggctaattcagttccaaaatcagcttttgcagaggtatagtcagaaagctgatacatagaaaagaatgagaaagcttcttaagaacactagatcattaaaagtaaagttcaaaaatcaacctgcatggaggcagtgacccttttagcattgtctggctccagccgagtaatgcaatcattcagtccacgaacaacctcagcatgctgcattttggaaaaatcacgttaagatttgaaaagaaaaccacagaaacgagaatcaccagaagtcattgtttctcctaccgccacaaaatcaggttgatatcggtatgctggatttaagaaataagcagccatatatagacgatggtagaacaacgaattccagtgattctctacaacagccaagaagggtccatacttacttccatcatcaccatgaaaggatttaatagcaagctttgccctgtacatttcataatatatagatggcatagagaagctgtcaccactttcaaccgtttgaagtacttgcattattgggtccactgatttgacaacaaaatgtaccttcttccaaaatccagtatttagtacaattttttctacctcttttccatcacttgctttggagtacccggatgaaacccatttgcttgattgaaacattcttttgagctctgtcctatggtccaacaaactctgcaaggtagcaaaactagaagcacaccgggtaccagctgaccttaaaagttcctttccctgagtgaattcaatcttcatgagatttatcaaccaaatctggctgtaaatgaacttcgtaatctgttgccctttttccatgcactcccctacacattttatcttgagaaaatcttcaagcatttggtcaatacagtcagttgcacatggggtccagaataggttatttctcttctcctcaagcatctttccagcatttttataggcgggagtatttcgagtgacaacctgcaagaaaaacaatggtcacaggccgtcgaagtcctatggggttagttgtgttttaggaataacttgtatctctaagaacctatcgacccttgtgaatagtcttaatctcaatcttctattcttgttttgttcttcagtgtttgtgtgagtgtgtgcctatcaggttagtagagaacaaaagaaaattacctgcactacattttcctcaccgatctcttccactactttatcaagcagcttaaacaaactaaaagaatcttccattacttcagtggcatcaattgaagaaacaaaataaacaccatttggtcctgaagacaaaaagttaatcaatgtcctaccctgtgtgtctctccaactatcagccaatatagaacagccagtgattgcccaagaagctttgtactcaattaggtagtttttctggttcgcaacttcctcctgaagaaatcggcttgatgtcagttggctagaaggccctactaaaccctgtccatgttgaccaaccaattccaacatcttatagaagtaaacagaatctgatgcttgtaaaggaacgcctgcatggtagaagaacctgcaaattgcagagagaacttccttccgtgattgtttattagacactgttttcacttttacttgcctataacattctggtgtctgatccataaaggtattcataaaaacagaatcaagtcttgatctttttaatatgggttcagaaccactagttagagacatgtccttaatagattttctccgatccttgccaacttttccatcattgtcaatcagtttttctttgcttctatgatgcaaatcaacttcctcagactcatcctcttcatcatcagaatctgattctgcataaaatgatgaaatttccttaacatcagctcgtctttgttttctcccagtacgatgccatttcatgttgtctttcatttttatatacacatcatctggagcatgtttacaaggtgctacttcaccaggaattcttgctaaatgttgcttaaatcgattgatacctccactaactattttctcacagtaattacatttaacctttttcttcctctcatcttgggcaacacaatgttcccagccaggatcaacatatcctaatgaccgaagaggagtacaggtaatagctaagttcctatcattcatcaattgctttcctttgcttctatactcaacctgcacctccagttcttcgtcatcattagagtggaaattcaaatatccctgcccattatctctggaatgttttggtggtttcttattcgaacgacatccttccaaattctccttcattctcaagtacacttcctctggagccttattacagtaagtcacttctccagaaactctagctaaatgttgttttaatctgtatattccaccactaactacttttccacagtaattgcacttaaccttcttctttttctcatcttgagcaatgccatgctcccatccagggtcaacaagtccagtggaacgaacaggtgccatcaatttcaaccattcaggaactcttacaaataattcttctatgattggctagctgcatcatgagcaaaaatttagatgcaagattaatactttaaaattgataacatggacacaaattacaaaacaaattaattagcatttaaatatgaaca

SEQ ID NO: 1266 - DNA, 1487 bp, Cannabis sativa
agcactgccgccgctattgacttcatttgcaagtaagctaagtctttgcctaggcaaattctagggccagcattaaatgccacaaatcgataggaatcttgtacctcaaattttgttccatctaatgataaccatctgtctggtttaaattctaagcaatcttcaccccaaatgtacttcattcttccaattgagtagattgagtaggtaaccgatgagcctgccggaacgaaggtgccgttgggcaaaatgtcatcggagatcacgtgcttggaatcttgaggcaccgaaggatatagccttagggtttcggacaaggctgccttaagatatatcaatcggtcaatttcttcaaatcctagtggctcttctacccatttctctacgttgttgccacgtgtatcaagtaagactgtgcaaatttccatgaggattttctcttctatttttgggttttgactgaccaaccagaaaaaccaactcaacgctactgatgacgtgtcacgtccagctaggatgaaattgagtgccacctgttgaaggaactcgtttgagtaagattcctttttcttcatgaacctggagagtagatcatcgtgaggatctttttgttgactcatcaattcaagtttgcgtgtgttgatgatactagataagtactcatccacgtgtctaaggcttcggctcaagtcgacttccattcctaagccgagccatttcttcaacttccatatgatctctggtaaaatgaaccgttgcagtgtggcttcggtggctcggtcgaaagctccggcgaagctgttgtccggcaggtcaggggaaagcgtttgcggatcctttccgaaagccaagccacatatgttatcgaaagtgagccggagcaagaggtcttggagatcaacaggcttcccatgtaactgagccgtttcaagaatggggcaaaacctaagcttaatggctcgactcacccatcgagccatggcttggcgaagagtcctggtggtgaattctagtgcggcggttttacgctggaaaagccacgtgtcaccatctgagttgaagatcccttggcctaacaaatcatgaaacacggcttgccacgtcggacccttggggtaattatcgaaccggatcttcaaaatgtgctccaggttttttgggtcgcacgtgacagtcacaagtccctgcttttgggccaagaatggaatggcacaaatacaagtctggtacgtgccgccacaagcaccaaggttgtccacaatccagtcgtgcatgcggtgagcgttctgaactaggcccggaagactgcccaataagggccagacacgtggaccgttcattgaccgcgtgatgaatctaaaccatatgaaataagctgctacagcagataagacaatcacagctgttgatgcttccatggcgaacacccgaattagcctggaccagcaatcacctgaaaactattgttgacattaggaagaaaaaca

SEQ ID NO: 1267 - DNA, 2829 bp, Cannabis sativa
ttggacagggcgttacaagctcaatctagtctggatctctcctactggtggtatgccttccagcatgctacttatgttattaacaggcttccatcaccagtgattgataactacacaccatatcaatgcttgtttcataaacaactagactatgattttcttaaaatatttgggtgtgcatgcttcccatatctcagaccatataactctaacaagatgccaatgaagtctgaaaaatgcatctttgttggctattcaatgcaacacaaaggctatctgtgtgaaaattcatctggaagagtttacattacaagaaatgtttaattcaatgaagaagattttcctgcacttggtgagaattccactactcaagtacaatcttcctctaacaactcattatgttatacttgtttccctacaccacctataatacaacaaactaatgcacctttttcacctgttgctgaggaactaattattggagcattgcatacaccagtatctgtggtggttgatcctaatttagcatcaactagcacaaaaaatctcaatcctgcacctaaccactccattgctccatcttaaaatctttctgcatctacatctcaagtgcctgcagccaatccctcttccactcctcaatttgaacaacctcaacctttacctactccaccatcaccacctcaacgtgctcaatccaatcaaacacaatcccaacctactcttgatatgccttcccctccccactgcttcccactaccactaaaccacctacaacaaaccaacatcctatgcaaattagatccaaaggtggaatccacaaaccaaaagcctacacggctacttatcaccctcttcctgaatcacttctacctattgaaccaaaatctcttaagtaggcacttgttgaccccaaatggaatgcaataatgagcatggaaaatcaagctttaatcaaaaataacacatggactttggttccatatcacccaagcatgcaaatagttggtaacaaatgtgttcacaaggtgaaactcaaagctgatggtaccattgataggtgcaaatcaaggcttgtagccaaaggatatcatcaaacatcagggatcaattactctgaaacatttaaccctattgtgaaaccaacaactgttcaaattattctcactttagttgtttcttacagctagcaagttacacaacttgatgtctcaaatgttacacaacttgatgtctcaaatgcctttctcaatggaaatcttcaagaaacaatttttatgcagcaaccacttgggtttgaggatctaactaagccaaatcatgtgtgtaaactacacaaagtaatctatgggttgaaacaagcaccaagagcttggaatgataaactcaaaaacaccctaatcaataaaggctttaaggtacctcaatttgataactccatgtttgtctatggagatggtccaaatttagtcattctatttgtttatgtagatggcatacttgtggcaggtccttctgttctcaacaaagaattttctctcaaagatttaggagctcttcattatttccttggggttgaaataataagaaactcaactggtatgtacttatcacagtccaagtacatttcatacttacttgtcaaggttcgtatggaaggagcaaagcctagtccaagtcctacaagctctgctcatgttttgtctttaaccaatggtgaatccttctcagatccaaccctacacagaagtacattgggagccttgtaatacctaacactcactagacctgatgttgcctttattgtcaataaactaagtctgtttattcatgcaccaacaactgtgcattgggaggcttgcaaatggttgttcagatacttaaaaaggaaaattcatgaggaattacacatcaaaccgtgcctcagactttcacttcagggtactttgatgttgattgggctagctgccttgatgataggagatcaactggggggcatgccatattccttagaggaaatctcattttctggtctgtcaaaaagcagcatgttgttgctcaaagcagcacagaaagtgagtttcgttccttggccaatacaacagatgaaataaagtggttgtcatcaatactatctgaacacaaagtctctttgccaggtgcaccaataatttgggtggacaatcaaggagctgcctttcttgcagcgaaccctgttttctatgctcactcgaaacacatagagatagatctccattttgttcgagatcaattgcttgcaggagagttggaggtttgatatgttccctctattgaccaaactgcagatatacttacaaagactttgtccaaagatcgattcagctatttgaaatccaaattgtgtgtgtaatacgccctttcatttgagggggaataatatagtgagtgtctgttaaagtattagttagtagtctgttttcattctctagctgttttttagttgtaatagttaagttaactaactttttattttgttctctatgtaatctcctctctataaataaaggatttctctctttttagtctataacttttttatagattgatgagattgttgaattcaatatactctgttacaatgtatattgatatgttcttaaattttcacaccttaacaatgttactctcttgtaatatatgcacataaagtatatatcaaaacatattattcattaacgtatcataatttttaaataggagtcatctttattagatataattagctgaaaacaactctcgttactcttatatagaaatgtccattttcttatctatatctctattctt

SEQ ID NO: 1268 - DNA, 4524 bp, Cannabis sativa
cctggcctcagcccctctctttctctgtctcgtgcgattatgatgagtggcctcagcctcagagccgcaacagtgagacctcaccccaactacctcctcagacagtttcttctccattcgcaagctccatctccttttctccttatctccaacagctcacgcagccagcaccgtagcctccattggtatggtacaattataaatatgcatatatggttttaacttttaagtttaacactacatatttttgacttgtagtttcgtatgatttgaattgatcttggcttgggtactgtcctttgataaaatgaaattgtattgtacagaaggttttaactttctatatattattattatctgtttctcaattttaatgcatattagttgtttgattaattgccttacaaagacatgaaatcgtaatgtacaggatgtttcataaaatgattcaaagaatgacgttggttgaatatatatttacatatatttgaaccccctgccctggttctagaggtaagttttcttgccttccctcacttccttttttatatttattatttctttgtttctctgaaaaaaaattccgggtgagttttttttggaatgcatttttgtattgagattcaagatagtgtgaggtaactgtggtctattactcttgaactaatagttaatgtcccacaactgttttataaaacgatgcaaagaactgtatatacaatctgacttttgataggtagaatgtgttgtagtatgacccctttggtttaatagagtattagaaatcattttagaaggtggcatatattctaggctattaatccagaggaaaacacattttagaatgtgatgagatataacactacttcattggaataaattgtcctgactaggatcagcttatttgtataaatatatagtgatagagagaggagtatgcttttttttctattggaacgaagagctgtatttaagagtattatttagcaattaattaaggaaaccacagaaaattctgtgttggtaattcttgaaacatgttctttgactagtattaatatggaaaaaaaaatgcaatgtgaggtaggcattgatcaacatgatggattcgacatgattattcctttcttgtcgatgtaaaattagagatagaaagtacaaaaaaggatttttctcctacaatattttatcaaacaaacttgtattgtgtactgcagtcaaaacccagttaatacaagcatcttgtgctcttttctgtttttatcacatgtaaaatcaacaattgattattgctgattaatattctatttgtttggtttgctctttagagaggtaaaatttatttttcttcataaacatgttaagtgggctctattaattgtcttaggttacttcaagtctaatgtataaatgttctccagatttggctggctgagtatgagctatccagaggatgcagttatgtctaagtactgctgtggtgccccttctttcccttctgagcagtgaggtgtttatcacattaaaagacaaattgacgtttaccagacaaactgagttatatccttccacaatgatcaatgatacaacgtcgtttcaattttattcgatcattctctggctcttctgtaccagtgcaaggaccctctacgactccgagcacaaccaatattgtccaatgcaaccacaagattcaacaacttactcaattcggccgagttgccgaggcatgtcaagtgttcaactcaatgtgtcaacgagacccaatttcttggaactccatgatttctgggttcactcagtatgggttgttgcatgaagctcaagcattctttaatgcattccaaggcaagaatgttagaacttggaccattttgttgagtgggtatgcgaaacatgggatgttggacaaagctagaatggtgtttgaatcaatgcccgagcgtaatgttgtttcttggaatgctatgattagtgggtatatccaaaatggtcacttgaaacaagctagagagttgttcgatcaaatgcccgagagaaacattgcatcatggaattcgatgattactggatattgtcacagtggcattatgagtgtagctcgtgagctctttgaccaaatgaaggaaaggagttgtgtttcttggatggctgtcatttctgggtatgttgcgataaatgattttctcgaggcatggactgtctctctgatgatgttgaggagcggaatggtgccagaccagggtctttttgttgtcgttttatcagcagccatagggttgaacaagttcagattagttgaaagtttgagaacaacgtcgacaaagatgggttatgaggggcatgtgtttgtggggacatctattttgaatgcttactcaaggaatgggagcttagatcatgccgtgaagttttttgagacaatgccggaaaggaacgactactcgtggaccacaatgattgcagtactttcacagtgtggcaggttagatgatgctatatcactatatgatagagctactgagaagggagttgctacaaggacggcaatgatgactgcctatgctcagcatggaaagctttctaaagccagacaaatatttgatgaaattccaaatccaaatgtggtaacgtggaatgctatggttgctgcctatgctcaaaatggaatgcttgaagaagcaaaaactatgttttctagaatccctctccggaattcagcttcttgggcagccatgatttctgggcttgtacagagtggacaaagcacagaagctctaaagctgttttccgagcttcatagatcaggaacttccattaatcattcgagtttcacgagtgctctctttgcttgtgcaaatgcgggagatgaaggcattggtcaacagattcactcactcaccatcaaaacaaggtgtcattctaattccttcattggaaatgggttgatctccatgtatgcaaagtgcaaaaacatagaggacacatcacaagatttcagtataatgagagtgacagactgcgcatctagaaacccagtaattagaggtctttcagactttcatatattgcaggaagctcgaaaagtttttgataatatgcctataagggatgtggtgtcttggactgctatcatatcagcttatgaacaagctggccaagtagatactgccttaaaattgttccttgaaatgttggctattggaatgaaaccaaatgcattaacagttactagtgtccttagtgcttgtgggtgccatggagcgacaaggcttggggaacaaatccatgtcctgatacacaaacttggattgaattcatatttgtttttgtgtaatgccttgttgacaatgtacttcaagtgtgggagtttagatggtcttcgcatctttgaaaagatgccagacagagacattgttacatggaatgctgttttagctggttgtgcacaaaatggattaggtaaagaagctgttaggattttcgaacaaatgcaagctaatggggtttcaccaaatgaaatcagttttttggggattttatgtgcttgcagccatgcaggattagtggaaaatggatggttgtatttcaactccatggaacaagattacgccattaccccctcagttcatcactatacctgtatggttgacctccttggcagagtaggacggcttaatgatgctgcatctctcgtcgaaagcatgcctttggaaccagattctgcaatttggaaggcacttcttggtgcttgttcgatccattgtgacaacaaacttggccagaaagttgctgaaaagcttttgaaaatggggaagcaaagatctgggacctatgttttgttatcgaatatgtatgcgtctcaaggtatgtgggagaaagtacaagaaataagagaactgatgaaacacaggggagttaccaaagaacctgcagttagctgggttcagatcaagaataaggtgcactattttcaaataggggataagagacatgatgagattgaagagataaactcaaaactaaaggacttgtacagaaacttcaaagcaacaggttatgtgccagacacaaattttgttctgcacgacgtggaggaggagcagaagcaggatgagcttcttcaccacagtgagaaattagcagttgtttatgggatcatgcgtacccccagtgggagtccaattcagattctgaagaacctcagaatctgtggagactgtcactcttttatgaaatttgtctcccaaatcaaccagcggaagatcatcattcgagatggaaacagattccaccactttcaagatggtttctgttcttgtggggatcattggtgatcatgtttcaaccatagaaatcttatcaattttttcatgggatcactggaattcatagatataaaaatttgaaaacaacaaaaataaacagatcactaattagatgacccctatatgataatcacatacgcagtacttagctataaattaagcactacgaaatttcaatttagtttcaatcttcaat

SEQ ID NO: 1269 - DNA, 1379 bp, Cannabis sativa
ttttttttttttttttctatttatagagtagatttgagtagttgattgagctagagttagttacaattcgtggtaactaactttattcttgatgtggttatgtaatattgttgagattcttcaatgtattttcttttaagtgtaaaaatctattattgtatgctgatttggtaaataattagaactggttataagtgaaaaatttaacaaacaaagataatatttttaaatttaaaatacaatattatagttttattttataaatctaattatttgaatattataaaaattaagaataacaatcactgaaaaaagaaatccaaccaaactcaccaaattattagaggagttaaatttttttaggtaagtctacagtacacccttaaagaagtatttcgatggattccttatctgtttcagcatacaaaagagctttttagtccaattttttttttttttcatgatcatgtacattatacttatttaagaacatttataaattttcaaaaaattctaagtaatttacaatgctaaaataaaatttatatattttgttgcacgtacgactatttttcttatacacatagtaagtaactgtttaaaactaattttcaaagttataaactatttagaatttttttaaaatttacaagttgtcttaaatttttgtttatcttatttttggccaacaacactgagtctaacaagcaatctagaatcaattagattcaacgagaatatagttaatattaagcataaaccaaaaacacaagattttatagaggttcagtcccattatttggtaataacttactctttttttagttgtatttaacttatgagtagagaaacaagtataacttgatctctctcgaaagctttacagcattacaggaaaatgagtggtgtaatagctcttagaagaataatttcgaatccttttacaatagaattgttccactatttataggagatgcttataatagaaattggtttctcaaaagctgttaaactacaaaaataagaaataaatgactttcttaaattgtgagaaatacatagaaatttccttaaattggaatttgattacatataaaatgggaaataatctttaacgagtctgttgcacgcggtttccctaattggatcacgcgaggttctgaccgcttctctctgaccagtttaacttcgtgcaatctgtgcagcgagttttatcttgcttatttgttattacattcgacaaggtgtatgtcttgggcgaacactttgtgaggttatttcctccatataagcattgatgccatgatacatgtcattcaaagaaacatgttacgtaacccgaacaagattcaggataacaatttgggggggggggggaa

SEQ ID NO: 1270 - DNA, 1311 bp, Cannabis sativa
catgtgagggacggagaagtgtctgaaactgatgttcggacgcttgaaatgaaccaattattagagcagtttgttgggaaaaatcttgaaggagaggaagatgcagaagatgacgatgaagaagattatgatggagaaatcaaagacaggtactacaaggatggatattattatgagcatgatccgaacctgcttgagtgtctaatgagttactcacaacatcaaaaaaaattagcacaacaagaaaagttctcccaaaagatggagaaaatgacgactcacctttaggccaaacatggggacgtagacaaacactctgaagaagacgcctcagaggagcctgtcgacggagaaaatagagcaaacattaccaatgtcggaacctcagccctaacgaattggcgagcctcagaccaaaacttccttgttacctcctaagaaaaatatgaacgcgaccaatcagccctaacggatttagaaggccatcaacgcctaagggtttggatgcccttctactccataaggcaaggttgtgcaaaacagaatgcctagtactaaagtaccaaagcctaagggaaggaaaaattgccctagtaattctgttaactaggacaagagggtggaggatattttctctgaagatagttgttgtatggtagatctatggacgcatcttgatgccaaatatgagaaagtcaaaggagagaaggtgagacctcgagggaatgacatgagggaccatttcaatgataaggtttttggatgcaaccattctcatagtgagactaaaagattgaaagagcaaattgatacaattaaaagtttttctgaaagtaaactgggaccctctcaaactcaaaagatgaagatctaaagtcgtgtgtcagatggatcattgaatccccactacccgataactttgaaataccccagatagagttacaagatggacatgctgaccaaggatccacctattcaaatacaactagatgacgtaagtggcaagagtatgtgctgatgccaagggcctttcttttcactaacatttaccaagtccgcaaaagactggtggaagatatttactccctaattggttcatggctggaagaagtagcagtctgccttacaaaaacagtttatagctgttagaaattgtgatatggagattgaattgctaaccaacctcaaacaactgtcaagtgaaagcctgaagaacttgatccagtagatgatggaggcaactacaaagatgaaggccagtgatgatatgaaactggtagctctgcagcctgagttaagagtaggctccat

SEQ ID NO: 1271 - DNA, 1939 bp, Cannabis sativa
acccaatccaatttaattaaaacaaaactcaacagatgagctaagtgactagtgtttgaatatgatgttgttaaatttttcatcatcatcagtgatatataataacccaattttgatttattatatataggtctatatatgatgattggttatatatatatagtaagacattaataatataaaataattttgaagaaaacgaaaggttaccaaaactattatatattaaatactaaaagattctcgtgatgatgaaaaactcttcaaactaaaattaatgcccttacatgaatcacgtctccatcgataaaaagaaattgttcattgtgcccaactaacagtaacacatatataatattatattgtaaagtgtggtaaattcaattaatactatgtatttaagtttaataagtaatattgtagacctttccgttactaagttactttatatgaagagaattttaagaagtattattttgtgcctaacagtttacttgaagttatattaacattaatttaattaaatataagaagataatttttaaaaaatattattaacctaatggagtgtcgggcaccaatgcctaatagcaatattcttatatgaaaccctttaaattatgagattctgtgactgtattggacacaattaacttgtcaaataataaatacaaaaaattgtacgtagtaattttttgtgaatacgtttttttaggaaaattaacacgttatattttttttttgataattaattactgcaaattaatttaagacctataatactgtccattaaattattattattattagtttacaacgttgatgattttgagtctctactacacaggcgactgagctcaagtgcggtggagtggtggtcggatgttcattcgaccaccgcgtagccgacgcatactcagccaacatgttcttagtctcatgggccgaactcgctctctccaaacccctcacacacctcccatcctttcgccgttcccttctcaacccgcgccgcccaggccacatagatcccgccttcgaacacatgtacatcccagcaatgccgccgccacccgaagacccctcagctcccccaacagaccacctcatcagccgcatataccacatcaaagccgaagaactcaacaaactccaaaccctagctagctcgaataacaagagaagaagcaaactcgaatctttcagtgcatatttatggcaattagtagccaaaagctctcccaacaccgattccgaaaagccatgcaggttaggaatcgtcgtagatggaagaaaatggttaagcaaaggcgatcaacagacaacaatgtcttcttacttcggaaacgtgttgtccgtaccatttacgggaaagaaagtgagtgacctaatcgaagagcctttgaatgaagtggctaatgaagttcatgagtgtttgggaaaagcattaagggaggaacatttcttggggttgattgattgggttgagaaacttcgtccggttccgggtatgactaggatttatagttaccggagagaagatgggccttcttttgtggtgtcttccgggcagaggtttccggtttcggatatcgatttcgggtggggcaaaccgtttttcgggtcgtaccatttcccttggggtggtgattgtgggtatgtgatgcccatgccgagtccgagtgggaatggagattggattgtgtatatgcatctctttaggtggcaacttgaggtgattgagttggttggttctaaggtctttaagccattgacttttgattacctaatcaattgtcattattgaatatttataataatattggttttgtaatttccctctctcaattattgtttccaaacctacaaaactataaaattacataaaaagaatgtgtgtttaaacaataattgttctctacgtacattgtattttaat

SEQ ID NO: 1272 - DNA, 1895 bp, Cannabis sativa
ttaggaaatttttgtacattattttgttttgattaatttttatttgataatgttacagcaattgtccctcaaaggatttgccggagacacagcaaaagctcatgcaaagacaagtatgattgccggggaaggtgtgagcaacatccgtactgttgctgcattcaatgcccaagataagattgtgtccttgttttgccacgagcttcgggtacctcaattgaggagccttcgtcgcagccaaacttctggcctccttttcggtatctctcagctcgcgctttatgcttctgaagcgctcattttgtggtacggtgctcatctggtaagcaagggcctttcgactttctcgaaggtgatcaaggtgtttgtggtgttagtcattactgctaactcagttgcggaaactgttagccttgctccagagattataagaggtggtgaagctgttggctctgttttctctgttcttgatcgtcatactaggattgatccagatgatcctgatgctgagatggttgaaacagttcgtggggaaattgaacttagacatgttgattttgcatatccttcaaggcctgatgtcatggtgtttaaggatttcagtctacgtattcgagctggccaaagccaagctcttgttggagctagcgggtctggaaagagttcagtcattgcgttgattgagcggttttatgatccaatggctggcaaagttatggtcgatgggaaagacattcggcgtctcaacttgaaatctcttcggcgtaaaattggcttggtgcaacaagaaccagcattgtttgcagctagcattttcgataacatcgcctatggaaaagaaggggcaaccgaaactgaagtcaccgaggcagctcgtgcagccaatgtgcatagctttgtaagcggtttacctgaggggtacaaaaccccggttggcgagagaggagtccaactctccggcggtcaaaaacaaagaatagccattgcgagagccgtccttaaagacccggcaatccttcttttggatgaagcaacgagcgctctcgatgctgaatcagagtgcgtgctgcaagaagcgttggaacggctaatgagggggagaacaacggtgttggtggcccacaggctgtcaacaattcgaggcgttgacagcattgcggttgttcaagaaggacgcattgtggaacaaggcagccattccgatctagtgagccgccccgagggagcatattctagactgttgcagctacaacaccatcacatttgagatggttatggtggttatctttattattataaaaggaaaaaagggggcaatgtgggtcttgtttgggtgttaattaaagtgtgtccagttaaaaattaaccttttatgcttccatttttttttctagttgtagatatgggtggggtggtaacatatttcagaactcatggtgactactattctctgatatttctcaaaggagtagcaaaggtgttatattatttcatcaaattaatattttatttatctgaagcatataatatagaaaattgggctttcttttgaggatgaaatagaaaaaaagaaaaaatgaagttactttttggttttaatcttttttgtgtagagcattggtatggggcatcaagatcactagtgcacaagagtgttatatttctcttttttctctttagtgtaagtgaagctttggttatatgatatggaaactaaatttgcagcctcaaaatcaaagcatatcatgagaataagaattaaaaagccattaaaaggcatacttatctttttttctacattacaaaatggcgacacattcatttgacatagatagatctgaattattgcaaagatatttataagatagaaagaggtaatacatacatatatacat

SEQ ID NO: 1273 - DNA, 3486 bp, Cannabis sativa
aggcctagtattacaccaaaactcaaaacagtaaaacagtacatgaagttgagttaatttgaaactctcccctctccaaaacaaattttctctgtcatactttctacaagctatatcatcctatctaatttcaccaaggcttttatgaaaaagaaagggaagagaaagagttatacttgggttttgccagaagacgatggaccaacaagttcagttaattgtccttcgcgtaatccacctccaagcaataagtcaatcctaaacaaaacacattcagaaaggcattgaatcaagaattttcagtgaaagccccaaaagtagagaagaataaactgatcatttaggcaagaaatttaatacccatcacacccagttgataatacaagtttattacgaagagcatcatccaaaagctccataccattcagcaatggctgacgttggccatcaataatagaaaaaatctctctaattccctacattcccataatattacacattactatatgctataagcagagttgtgaattgagtagataattgataatggagaaacctgctttattctctctgaattgggttgtcgttctgctattgctgcaaattcatagtgatcattgagtaggaaatcttcaactgcaccatcagaaaatgagaattaaaattgcaaattttagacaaaaaagaaaagagaaaagcttgagaattggaataaagaataagaagatacctgagagaataccaagtgaagcacaaaatgattggaaagaggaatcgatatgagggtgatcttgctctaaagacttcaatggggccatttcccttgtgttccctattctcccacattagttttctcatgtaactttatatataaggaaatgctttcaacatttttacccaaaataccaaaatcagccactctcttacctctataccattttaaagggattataaggtgttcgtgatgcgggtagcgcgggttgtaatattttttttttaaaattaaattgtatatgtagtttttgtaatttctcaaatagtaactgtatcgcgagatcttaaaattggaaaaatcacactgtaaaaatgcatgtggtgcagtgaagtttgagaggtttacaccaccatcattattgaacattataataaaaatttaaaaatcaatctataaaattttaacaatacaaaaaaaatcttattaaaattttaacattataacatatatactaatgaagacaatgagtcttctactattctctctctgtgtctttctttttattcttttcttgctttagttgaccttggtgtgtccaaactttgcttttttttctctttccttttgacttttgtgtgccctttctgtctggtttgtccctctttgtggtggtttgtggggtttgttttggttcatctgtggggtcttgctgttttgtggtgtcttgctgctttgtggtgtctcgtctttttctggttttttcggttgctccttggtctggtcaactgcttgtttgtgtggatcttttgtctctgtttttttggtttgaggttgtatttatgacaatggatgaggttggtggtgctactggtgggaagcaaggtagatgcctctccttaaatgaggtatctatttcacttgcccctagtgttgtgactactaaggtgctctcaaaactttacctctttggtaaaatactctcctccaaaacattcaatgctaaggatgtggagcaaacttgctccaatttatggaaaactcgtattaaagtggagcctatagaatgtactctggctggttccaactcatttcgttttctgtttgagaatggctcagttagcaaacgatattggagcacggaccatggtgcgtcaaaggtgatatgttggtgctcctctcgtggtcttctggttttggtgtcaaggttttcgctttcaactcagtccgtttttgggtacaaattcactctctaccccatgactatttctcaagagtcaatgctaacttgttgggggctcttgcgggtaaagtggagtttattgaactcgatgaagccaagccagtcacctggaagagatggattcgggtactggtggaggtggatgttagcaagcctctgtgttgtggttgtttcttcaaactctccaatggtgataatcaatggactcaactcaaatatgagaagttggggaatttttgttacatgtgtggtatgttgggtcatcaacggagggactgtaaactcgtttctctggtcacagtgctgaacgaaaggggtactccgtttcctttattcggatcgtggatgaatacccattcacaatatgctaactgtttttctgggaaagttagagtcccacctggtatgtttgaagagaatgatgatggagctgaaggtatcagattagaataggtcgaggaagaataggatttggtgccggagttggctgtgagtgaaccgcctgccatcgctgctctgtcgtcgcgttgttcgtcatcgagatctatgcggggacggccttcgaggggtaggggtggcgcccaggtacggagggcgtggcacccgaagtcttttgctacgacgaagggaaacaatgccattttgggtgtaccttcactttctacccaactgggtattgaaaaggaagctgctaatttacccatttcaaagggtattttaaattgcaatgagaatgatgataatgttggtattcgtgggtttgtgggaactaatagcttgggcaaccccatttctttgactaggatggtgggccaattgtcttgggagaataatgggccaaaaagtggtaagcaaaagagtaaagataatgggcctatttctaagacttgtggtgactttagtaggcaaaggcttgggcttataattaataatattcagactttgtctaaaaataatagcattattggaggaagtgggccgtgtggcatggagtcgagacaaggcaatatagagactattttagatggtgatggtgggttaaggctatctacgtagggccaagatcaatctgatcatcttgatgagagaaggtctcttgccaaattttttcaagcgcaagaaggttatcttcaagaactggctgtgtttgcttcacaaggaccaagtaagagaaaaattggccattgtgatattggtgtttcagctacttcgataactaatgaaagaaccaccctggttaagaagaggcgtgtggatgttgatactcactcgctaaaaattatgccttcatggaatatgagaagattcaaatgtgtggttagggatttccctcgcggtgttgggccacggggcattgacccggttgtgtccggggagcatgatggatcaggtgattcagatgagccgtctttagatgaggggagctcccccaacaagttatctgccggttgttctcaacacgttgacaaaccagtctctgctggccaatccaagagactcacggcctggaaggctagggcaagactggcgg

SEQ ID NO: 1274 - DNA, 1201 bp, Cannabis sativa
atgagaaagagattacaaattcaagaagcaacaaaactttatttcatgtcaaactattgaatgttatagtatttacgaattttttcagaaacaacagatttttaaaaaaaaaaatcaaattattcgcataataatgagaaagagatatgaaaattgtaagagtgttactatctctctaatgaaagttttcaaccagccaagaagagtgctacgtaaaacaaagcttaataaagactttcaatgtgtttatacacaaaccaagttttcaaacaaaattagtggctaaaacaaagaagaaacaaaggacatgttgaaacaaaaagacactataaaagtaactaacaaaagtaacccatcaaatgtaacaataaatgtattattattattattattattattattattattatgattggaaagtgaagtgattataaagaaaaaaatcacaagaattatgatataatcttaccacagtacattctacttctatagtagtattttgtgggttagattgagctgaaacataaggaatgtgaatgtcgagagtttccattttagattgtttgtttgggtgagctagattgtgaataaatgttactaagtagtagtagtaatagtaatggtaatggtaataggggaaggaagcaggggcgaagctacatgtacctttataggggtcgtgtccccccctaaattttgaaacttagttatatacctattagagatatatatatataataattataggatatactaacacatatacaatgaaatgataaaaagttggcatttacatattcaacaaatatacaatatactatatatattaaaagtaggtcccacaattataataagataacaatattataattatattataattttattatacttatttaaattaaattaatatttttattacatcattcttttttcctctaagatttataattactatacttattgaattacacaattcttaaatattaaactaatattatttttacactattctttttttttcaataaaaaattacaagtaaatattaattttaataatattaaattgagtctctaacaccactcacatttttttagcttaattatttgattcatattttctaaaatatttataaaattaaaacctattaatattttcttaaattgatacgcacttttaaaagtgaattttaatcaccga

SEQ ID NO: 1275 - DNA, 1039 bp, Cannabis sativa
agagagagtacacactataataaaatgtcgtaaaaactggttacattttaaataaaaataataataagacataactataaaattaagggatcattagttttcaattcaagtataataattaattgccgagagcctatttaccttttttatatatataattttagttatttacaccaaatagatataaaaataaaacaattaacattatttaatctcaacttaaatatataatataattttatttttacaaaaactcatccaacatctgtatgggttgagaattgagatgagaagttgaggacagaggattattatcaaataatgatgcttctttcttctagctagaaagcaaattcatacaagagctggcctgaggaataggaattaaataatcaagtgcattcattgtctacttctctctgtcttataataaatgccttgcaaattaagggcaggcctaactcacccaattattgtgtattggctcttctgttttccatttctagattcttataggccagaatataaaataccctactagaagtagagcacagtgacaaatgagtagaaccaagtttcaatttttttgggggtttgtactacaaaaatgtactaagggacaaaattaaagttttctgttgacaatgcatggtttgttcatacttctctcttttgattctactacactatatagatgttgtctctacaacttggggtcttgttaatgttaaactctccaaacaacaacaaacacacaatgtcaaaacctatatataattgttataagtagtattgcccatgtcatgattaggccccatttaattaaacaaaaatcaaatgtcacatcttatttttagccaaacaataaacatatataaatgacaaacagttaaagatcatcttgattatctgttcattacctttcatcataattgatcaacacacactaacgtggagaaaagggtagtagaatatttatatgtatatattagatataaatagtgtgtgtatacacactcatataaagttacttattaga

SEQ ID NO: 1276 - DNA, 1968 bp, Cannabis sativa
aagagtaagaattgtaaaagaaaaattaattaaggtcttgtgcttgactctttattgtttgttatttaatatactatatacaacattcatgttatttaagtatgtatgtatagtgtaattaaaagtctaaggcactgtgttttatttatttatgttattaatgtttcaattattttaatttatcaattattatgtaagaaagtttttcaagaagtggacgagtgagacaaagcacgctggaaaaactcgtattgatctgcaaaatcagtcgtcattccatgattattccaatatatatattatgatatttctttataattacacttattttattgtgattatttttatgattattgatttatattttagaaaaaaaattaatcatagtgtaatgattaatcgtgtgtgaagaataatataaaactaataaaaaattaaaatcttaataataagaattaaaaaattaatttatctgaaaaataaaatttcaataaattttgttaatattaacaattttgtcaaagtctaatttaatttttgcatatggtcttgttcaagtattgcctataaggcattgtacaaactcgagagggccctacgttccaccaaaccaataatagtatatcacgttagtgctatagacactcttaattattatttatcataatatgactacattttttgctagcttgatttttttttttcacatttatatttaatgtgtcaggatatataaatatcattattggagatacacgtctaatattattagtgtacaatttaatatatatgggatgttacttattttactttaataaatattataaaatatatattaatcaattataagactataataggcattttagtacctcataacaatgtttttcttataaataatattaatagagaaatgataaaaaaaatctataataaattaacaataaatctaagatttatttgtatataatatacacgataacaatatataataattaggtatatgcgtacatgattgatttatagtaattattgcaatttgatagtacaatactatcaactaagtctttttccctagatctctaaattagaagcagtttatttatctgattatcaagagtatacaattgtgatgaaacaatatgtatttataaagttaaggatatgacttagctacataactttagttgaattggatctgcttatcaaaagcttcagttaactagaaaagcccatacttctatttcacctagactttacacacagatgttataagcacattaactattgatcaccaataatatgaactaacacaacaaagaagtattatccaatcaacctaaattttaataaaactaataaaatttaatgtaagcacaaataaaataaaaagtaaagtctagctaacatcatcattgtaaggtataatattaactatttacagcatatttatagcatactaccgtggtagacaactaagaatgaaccatttattataaattagtgtgttcgaccatatatcatgtgtgattttgttttgttccttaattcttgatcttattacacctgctccaaaataaggtagtgattataatatatagaaaaataagtattagcacggcaaagctagaaatttaaatctggtggaccaaaatagaaacaaaataataaattaggagagagatatatttataaaattaaactattcatataatatcaaaatcacatgctatattaatgatattattacatgaaaaaaaaaaacatattcctgatgtccccacttctctactgtgtttctgcttatcacaataattgttggaaattttctttcgtagggatatgtatttaattaagtctttgtttttagtaaattataatttaattatatataagaatgtacacattgtaattatttaaggtctcccacaatatttctgatttttcttaaaaatatttgcaaggtaa

SEQ ID NO: 1277 - DNA, 1773 bp, Cannabis sativa
ttccatgtgttattgcttagaatgttttttgtttattttcagtttttaaccttctgttagactccaggattagtaggagagggtatatgagttattgtattagggtagtgattgggagggaataggacagtatagatagaagaatagggggagagtgatagtatgcaagaattgagtattactctttgcatcacaggggcctaaaggctccaatagtttgtaaccttcttcctctagttcaataatgctcacttatattttttactgtttggctactattctattggttttcttgagttcagagcatcacttcacatcactttcttcagtctataattcgttatggtttggctggaaatgttaccaaccaaacttcacctcatagaaatcgcctttactatttttcttttttgttaaaaaaaaaatgtaattgtatttattttgtgctattttagaaccacactgatagatgaaacactgatttctgaacaaattctcacaatattttcgttgtgtgtctgtcatccaatagataactataaccgctattactatattactggaagaaaattatacatcttttcttgaaaaaggctgttcagacctgttgattttttatcgattgcctgctcacaaacttttggaaacgtctgaacaatttctgaaaattatagaaataggtgatgtcttctgttcgttaccagggattgtagcatcgattagttatatagtcttgagaaatgattgagcatcctgaaaacaacttgctcccctcaacaaggcagattaaacacttttttcatttcagctccacaataaagaatagagatcctgcatggattgcatatgcttttcttgggttttctagtaatgaatgtgtatgtttcagtatgtcatgacactatatgacaatgttgcacaccgattaaagcatttgtttccggagaagtagagggagtattgtagagtatctttactgatcatcacatccttgattgatttctgggattataatgtatgattttgtattttgtaggatggccggcaaaggacagaaaacaccatgcttcacatggtaatcttcaatgcaaacaattgatagcttagattctgatatgattatggtctcaaatggcactgcaccaatatggtttaacactttcttatggcataggtattgaaacaccagaaagtaattgaagagttgaaggaagagaatgagaagcttcgccaagtgttagttgaagagctgaaaataccatttgaaaagctgcacattacttcttcttctagtaaaaataattatccatgttctgattgttttgaatgtagaagaagacaaagaaaaaaatagactgaagatatatatattaattaatatatgatgcaaatgcaatgaagtgtccttaccattatcatgttttaccaagtagtctagagaagattaccatactgacatatgaagagaaattctgccagaaaaatacaaagcaattttatgattcttgtttgtacttcttcatgtttatacaatgttctactttttaaatgggaaaatccaaatcagagtgaagtttctttttgctagttttctctactgtcctttttttaaacttggtgatttcactcatgtgtttcctttacttgatggcttgattaacccccaagtctcggagcagatgaatagaggattggttcaaatcccaacagcagtggaaattaaaggggtggtgtggtctatgccatctatcaatgctctaggtcttggtaaat

SEQ ID NO: 1278 - DNA, 1147 bp, Cannabis sativa
ctctctctctctctctctaattcactcaaatgggaccctgcgccctaattttcaaacctctctcacatggtgttacttaattcactccatatataactacaactatattatataatatgtacactactattattaattcttttcttttctgaccatttttctagcccaattaatttatactgatcaacacaacacatgatcacaagaatatatccttcattcaacatatattatgtggtttgagaatcaaaatatataattatgtatatttttgtttttcaatctctatggctattcggaatatatctaaattcacaactaattattttacttatgtggatgctctctcaactttctttctattataccttgtaaaacatttggtatatatcgaatcgtgaaatgacactttcaagtatctcctaatatgtatatctgcctatattgaattatattattaaatactgtagcgatataagtactttttgaacgacttgtggactttaaaatatataatatgtgtttaattataaaaaaggaaaagaagaagaagaaattgtcatagctgggtcaagaatgttctaattctgaaccacgccatgaaatttatagtaaaactttcatcataactatgtctatatccacacatgtgaagacttagataaactttatcaacataactatttccacacatgtgaaaactgaagtgactttatataacatatatatgatgcaccaagattgactaaggaacacaatctctataactttatacctaaaataaaaggaaagagtaaaagggaaaaatacagagaaatgcacaggcacactcgaacagtaattactactactgcttgcttggtgctgagacatgtaagaacaaaacattgcagagaatataaagatagagaaagaaaataataataattttgataataataataataatatagagtgatgaaagagactccttcggttgagatgtagtgttggctttggttttggtttgggtaagagagagagatttttgcatgatgagtctctcactcacgtgtagtagttgttagtgactttgtcagatcttgaagaaataaaagtaaatgctccaaacttcaaagcaccatcgtctatcataaatatatatata

SEQ ID NO: 1279 - DNA, 4627 bp, Cannabis sativa
attgtgacttgaggaggccattagtacaaccgaaggggcaacaaaagggacagcacgatcagtaatagaaaaaagaggggataagtcaatggattagaaggtcagggcttacaacataagcaaacagggaaaacaaaagagagaaaactatgtcatcagacatcactattgaattcttgttattttagattaccaccacgacacgaaactactatttaatcatttagtttaccaaacatttatatattcatagctgttttaaaattatattcccacagcacagatatgccaaactggctctgaatcacagattttgttattttaaacttagtgagtactgtgtagtgagtcggttgccggaagtaatggcagttcctcaaaacccaacaaatttccaagatgaagaccctccctcccatcacccttctcctccccccgatcacgatcaggtaagtacatatacatatatatatatatatacatgtgtatcaatgtctgtagccattccttctattgattttatttttgggtgtttttgctcagctattcgaggtctccaccacggtggatcctagctatgtaatctctctcattcggaaactattaccaactactcagcctcagcaagagactatgcagcttgatcaacaacaacaacagcaacaacaacctaatcatcatcatgaatctctctcggtcggagttggagaccaggcttgggaagactatggctgcattttatgggatcttgctgctaataaaactcatgctgactttatggtatgctatatataattctctatacatatacgttcattttgttgaaaattccttctctaatttgaaatatgtaggtggagaatcttctgcttcaagtgctttcagcaaatctcacggttcagcaatcttcgcgtgccattgtaagtgtatacttctacgcttaattacagattttatgcactttttattaatttgggatgatattgatgatatagttacaatgtattgtttcttttcgaaagaagaaaaggagagattttatgcatatttggaattaatttcctttttgttggtctaggaaatttgccttgggatcattggaaaccttgcttgccatgaagaccctatgagacttatagtcagtacaaatggattagttaaattgattgtcaatcaaatatttttagatgacacacaatgtctatgtgaagcttgccggtaattgacagctactctctttcaaatattaccttttccatttgtttttctttttcattgttgttgattaaactatttgtttttagattcataattcctatgaattggtatctttttccctttggcttttccttgtttttggtaataggtttgcaccctttctttctaattgtttctaacaacaactacaagctgaggactgtaccttgctacaatcccttagatgggttgggctaactttggcttttagctttagcttgagctaaaattcttcaataatccataatttacaagtttacaaaacactttttgactcatggcttattaaataacagctttaaaggtacttagaatctattccaaattgaccttttgtcgtattgaaacaaatttttattcatttcttgtgatacttttctatgttttatccataacaccgggaaatggtaccgtattttggcgaagttaagttataatataatgcactcttggttgactgtggttccactgttctgcccttgttgaattctagtcatatatatgtttttttctctgaaactctgaattttctaatgactccactgcggtcttgtgcttctatgtaacattgttaaaaagtgttcatatatactttttttttggtcttgaatgacattatttccacgagttttatgcttctaatatatttataatgtccacaggttgttgagtttgggtgttcggagtagtgagagtggtacttgggcagcagcgattcagtctgaaaatgttctttgccgtatcttatggattgctgaaaatagcttaaatctgcaacttgtggaaaaggtattaaattcgatttttgtgtttgcttgcaagaatgtaaagattttacaattttatatgcctatgcactacttatacatgtaaaacctgtgatccagcaaatttgttttagttataaaactattgattagtttgcagaaagtaaatgtatcctctctgaaacaataagggtatgttggactgggtagtttaggacttccctgtgctaacaatcatgggttgttttggatatatatttagctaagctccagttgattaactggattatgaatgaaatttactccaacattgtggcagccgtttgaccactataataagtaagatattttctttacttgtaaggatcttggagttcgtgctttattgaagcttattggactttaccaatattgtcttgtctatggcttattgattggattggtaggctgatgaccagtgaccatatatgtgggtcactgcttattgataaagggttaaagctttgtaggcagacaaacacttccttaacattgagacatatggattctcacacatagagcagttctttataatgcaaatttaattcacagtgataattaatcatcttacaaactaatttgaagctttgttaactgtttttacagactgtggaactattattagccatcattgaaagttcacaagaagtcatggaaattcttctatctcctttaattaagatgggtttaccaagcacattgctgagtttattggcttgtgagatcagtcaactgtcaaacgagaaagtacttgaaaggtgtattttgttttaaattagattacttaagtctgtcaataattatacgagtttggttttgatatcttataacgagtatgtaaagtaagtttttgtggaagatatatatattttccagttatgatttttagtggtttttgtgatttactgtagcaaaatgtgtttggatggaaaattagacttgtttgctcctgtctaatgttggtttttaagcaatatcaggttgtcgattcttgatgtaacactacgtgcaattgaagctatatctgtcattgatggacattctcaagagatctcttcaaacaaggaactttttcaactggtttgccaattaatcaaagtttctgataaagctgaggtacactatcctgcttcattttccattgctcagagttaatggtcttctgaagataatcacatattctgaactagtttgcttataccaagtttttgcaactatgttatattttcttctaacactgctgctttttggcattaattacaattgtagtgtacagtactaaagtgttctcttatttagataggaataatatattaggatattagtggtgagattgattgtgtagtttagtttccagaatagtttatgtatacttgtgtataaatattcctttgagaagaatgaaatattcattcaaccattctgcaattattattgtttgttttcaagtcagtatcacagagctacggagtaattgtagatggtattttatgatgctgttattatctgtaggtcgcaaactcttgcgtcactgctgcagttttaattgcaaatattctgtcagatgtacctgatttagcgtctgagatttcaaatggtacttttggttatatatacaaatatatttttccattacagatggaatttcttatgatcaagtgttaacattttggatgcatctagatttgaattttttgcagggtttgctcgatatatttccttttgcttcagatgatttagaagcacgaagtgcactttggagcatcatggcagggttactcctccaagttcgagaaagtgagatgagtttgccggctctatatgaatatgtttctgttttagcaagcaaatctgatctgattgaagatgatcttcttggctatcaactagatggcctaaaatctaatgctagaactacagctgtatccttggattaacttctctgtatcaatgctataaggcggattatagcagagtagttgtagctttatgaaatcgccaatagctctttctttttgtcatatcaaatagttttgtgccctttactttgaaacagcttagaaggataatcaacatcttaaatctgtggactgcatcaaaggatgagcccgaagagaatggtcaaatggcggctgaaaatcaaacagccaatgtagatatcagtagattgttggattgttgcagaaggcataccgaatgagtgagtgcttccccactattaattttggtacacttatgggtggtagtgtactggtgacattcttatgaatttttattttcccttactaaatgctaatttttctgaacacacaagtaagcaatctaggaggagagaatgacactgcaattgattgaaagtacactctgatggcgaaattgataggacaaaggatgcatctgtttccagaatttgctgataaattaatcaaataagccctggtatgatattttgttactatgctaaatggatgaaaggaattttatctggtactctgtgcctgtccctaccctcggccatgttatgatttgttaaaacagatgacaaagcagccataatggctccc

SEQ ID NO: 1280 - DNA, 3557 bp, Cannabis sativa
gacatatagtgatggaagggatatgaaacttaattttgttcgaccgactaaagaaaaaatatatttggtatatgattgaaggaatcaagttctgcatgtgatcacttcaccaaagggatattttctaaggcacatcaactttcacttcacaaaaattaacccttgatgggcatagacactacttaaactatagaaacatgttaaacaggttcaataacccttttaaaaacttcaatcactcaaaaacagtggtcaatagtaaccaactagagctttttagaaaggaaaaacaattaatcactcaacaaagtgtggtggataaatagtgcaaaagctctaaagacaacccttgtaacaatcatatgatatcagaagcttgcctagcaaaaatataacagtatttctttttttcttttttcttctattggcattttaaatcacatttcatttcgtgattgtggaaaagttttttgaagcaaatggcagccagcttagcttggcttatagcttacccatgtcatgtgtagcagcatatataacattaaaaggcacctctctgttaataaggcccatccattcttgtaccccactttggcataattttctatattcataaactacatttgattctaaactcaacccatcaatcaaatcgatgaaccaagaaattagagccattcagctgcctctgttggctctagttttgcttcagtcgtggttggttttatagtgacttatcttcctttaaagtgcaagaatttgcataaaaattgtaagccatagattttagttagcctattatttagtctggccactccaactagccaaagccttctagaatatgatgcttgaatatgcttctcttgtcaactatatatcatttcccaattctagagttgcccctcttccttagatgatgttttaaggtccatccaagactctgccagaacatcctaaattgaaaaaacaaagtagaagtagagtaagaatgattactataaagactcctgctgaccaacttgagccaagagacacttacaagattgcttacattatgcatttcttgcttggtgctgggaatttacttccttggaatgcttttatcactggtgttgattactttggctttctctatccatacaagcatgttgagaaagttttctctgtggcttacatgagttgttcaatgctagttttggttctgatgctgatttggggtagctgttatgggaaattaagttcaaggctaacactcaacttgggattttctatgtttgttctctctttaatggtggctccaatgatagactgggtgtggtgcacagaatcaagtgagaagacctatggagtgacagttgcttcggtcgctgtttgtggtatagccgatggcttagttggtggaagcttgatgggatcagctggaaggcttccgaaacagtacatgcaagctgtttttgctggaactgcttcttcaggtacttgctgcatttatactttttcatactagttcaacacagataatgttgatgaagtaaacttgaaatataaggtaaagcattctatttatgctatgtggtcttaaaagttgaccaagaatgtacacaactgtctttgtttagttaaggaagagataaggacattgacccagtactataaaaaaatgagtattaatagattttatgccattggagtattctgcaagttaaacttatgctactataattcaagtgattcctacggaagtactggcatatactgaaattgtattagcaggcaaatcaaaaaaggtagttaacgagttattctattgaaagaaaacatgaacttgaactatacacttttctggaaacctattaaatagaaaacataagagattaacttatctgctacataccttttacaaaacctagtctttgctgcaggtgttatagtttcattcttgaggatttcaacaaaagcattgcttccacagaactcgaagggtcttcgaacaagtgcccacttgtatttcctctttagcactatgatccttttatgttgcataatttgttctaacttgttattcaagttaccagtcatgcagaagcttagcaagattgaagaacaaactgaggctactttctgtttaagaccacagatattctcagtcgcacgaaaggtccgatggccagcttttggaatttttataatctacatagtgactctttcaattttccctgggtttatagctgaaaatttagaatcaaagattctccaagactggtatcccattttgctgatcacagtgtataatattgcagacttagtaggcaagtctttaacagccatatatattctgcagagcataaataaagcaacttgggcttccattgccagacttctgttttatcctctcttcacagcttttctccatggaccaacatggttgaaaactgaagttccaatggtggttctgaccttcatgcttggtctgaccaatggctatctaacaagtgtcatgatgatattggttccaaaatctgttctagttacagaatcagaactatctgcaattgttatggttgtattcctgggacttgggttggttggtggttcagttcttggttggttctggattatctgaactttgtcatattatgtaagcttatgaatcaaagattttaattgaattagattatagctagaaagagtttcctattataagaacatagtaagctgataatactatactctgccagttagagactttggatttactttggtcaatgtaaaaagccagtacgactatttttaaccaagacaaacctcttttacgagttctttagcaccactcatctatgtctctcttaaaaatcttcccaaaagacctaatcaatcaacccaccggaaagagattgtagaaaatagaaattacagtccaaatctggcaaacttttcttacccaccacataatcataaggaacaaaaacattggtcacaaaaatcaactgcataataattcaatttgagttaagagtatgttcaacttcaaccacagcttaaacccatgataggcaattcatttagccgataaaaaataaatcataacgcaatactgagagaaactgagagcaacaaattgattctacctctttacttcatccatacattattttacaagaagaaaccatagctatcgttaatatagttctactaggcacccaaaaatttgacaaaaagggttaagagaagaaataaacaaaaggcttgggaagttaatatcttaactattatacaacagatcatgaaaaagggagatagcctaagaagaagcagctataggagttgtccctctaaagaaattgggtgttgataattctgtatttgcctcttcctcatcatcatcttcttcagaatcccaaagaaaccgagcatatgatgctaaaacaaaactgcacaatccatacaaaaagtcaaattaataaatatacaaaccccaaattcatttcaatcaaaacatagaaagtctaagaattaaccattgctatatactaacaaacaagtatatacgagtctat

SEQ ID NO: 1281 - DNA, 2925 bp, Cannabis sativa
tttttttttttttttggagataagcaaagacattgcttctaatgaagcatagttgtgtgcatattatgttgttttgctttagtgaaattaacaagtccttgcttgaacaatccaagttagatatgcaaatggtaagatatatacaagaccttggctcttccagttttcttttttaatcatttgacattcaattgaattgttcatgtctgtaaagtctatataagaatccattttatttgttaccaaattaactagtatttcatcatgccagatttcgagtatttagaataacagagattatagagaacaatgggtttatatagataaaaatggcaaaatgcctttgtattgaatacccaggacttccagagcatggttctcgaagattcacccactacactttaatccaatctaacctagtgtactgaagccagccacactctaacaaaacccacataacaacttactttactgccggctcactaactaatcctctacactactgaccacagcccctttcctagacctatgggagtatacaatagtgatatggtctatcaaatattaaacttgcacaataccaaacttctcttgttcatacaccaactattgcattggctcacttagatcaccttacgatatgatgaacatactcttaagagttaactgaaaactttctatgtaataaagaaagtttgctcaagacttgtgtagattactctttccatttataaatgtagtcaataattattgcagaatattcaaataatatgttcctgaattagcttcttaagaaacttaatataaagggaagcctctttggctgttagtttgagttcttattggcttactcgtcttgggttatccatttctactattaaaagtgatgcaaagttcataattaattatgatgtactatccttatttttgatactatataacatatgatgttctagctatgaataaaccattctaatagtactttgaatggcctggaaaaatatgagactatcaggttcaattaccatttgtgtctaacctttattttcaatccaactcaatgtttttcttaactcgatcgcttcaacttttggattcagaaaaagtgttttccaacatcctcccatcataatttcaagcaattcaactcaccccaaatttaccctcactctcaaaaatggcaacatattcgtttaccttgattatgtcatgtcaacatttggcttgttcaactgctcactcttgtcgacctcaacctgagtcaatatcgacgacaccaaataatgtacccacctattcaactgagtgcattattctgttgccaagttagatcattacaaccatgccatagagccgaacaaagcattcaaacaactcccaactggtcattagttcctatgtcaaaagcttgtttccatccctctacgaacataggtcaatcgcctgacaacatcgccaatcctcccttataccatcatagtttagcgaaagcgcaagttagaaaaatatgtgaacaccttccctactagagactcctcattaactagcaaactccagctttacttgccaagaaaaaacaaggttaaaatccttcatgttgtgaagctcatacctccactcaccttatgattgtcatgcaatatattagtaggcatttacaactaataacaagtttacttgccaaaatgaaatcaccttgtattatggcaaaatgatcattgtatacttattggcctcttgaataatgttgcactgcaccctttgtgttttggcaactttaattataatttataaattttaggaaaaaaagtttgactaaaataggcttcaagctatttcatttgagttgagactagccataagtataatttaattaatgttgttaattttttctttttgaaagaacaaaactattaattaatagagtttttattatagggtaataatgttagattttgagttttgttttgtgacactttttttttgttgaaatcaaaatgaaaagcccaagcccaatctttccttttcatcgttcactttctcttctattcttttcccaattgatttcctccttgcagcaactgagttttgtctcaattttcaatcttgttctttttgaaggtgtttgtttctctctttgtgaagctacattcggcaatctagggtgagtttctttcttttttcttaacaatttcttctttgtttcagggattacacagattctcaaaattggatcttgatgaagactttgctagtgtgttatgaacaaatattgacaagatttggcactggtatgtagtttgatttcttcttctttgctagtgattgggctatttattattatattagggctatatcagtagtttagatttattttaaggtttgatatcattgaattagtcactagattttgagaacaaaattcattaagactcatattgggactaagaatggtttggtttgtctaaaaggtcttacttttaaactgcataatccataatccattctatagtctctgttctgttgttgaaatggttctgttttgatagaattaggttaagccttgagattagtctcactataggatttcagaggctgagttgtccagttcttagtggctgtgatacttgtgtctaatacttatatgttggctagttaagattctttgttagtttagaacaaaattcattggaattcgggattcatagttaagttagaattgaggatacctctccatatgaagtttctttgatgctactacattgggactaagaatggtttggtttctctaaatgattttgttttgatagaatttgaggattttggaggctgagttgtccagttcttagtggctgtgattattgttaaagtgtgtctaatactcagattgctattggttggctagttcggaatctttgttagtct

SEQ ID NO: 1282 - DNA, 2359 bp, Cannabis sativa
gcgaatctgagtttgatcactgtggtatttgaatagagactatagatttttcatttcaacaaagaaagtgtttagtgagttattgtctctattcaaatatgagttaggagtttgtctactccttatttgttttttcttatttacacttgaattgtttagcatgctcttaatatagtatatattactcagttacccaagttaggattaggagaaatttgtcaaattaaaccacatttactaccaccgcagtcttaaagtatatggaatctaaggcaaaatcaaatttaggagtaatttaattattatcaaaatgataaatctaatactttaatgtaattgttaagttatagaaaactcttaaaaggtcatagctacatataactaattttttttttttttttttaaaaaaagtaaatattagggattgatcccttgcttaaagttaaaactttttgccattacaaccaaatgatatatattatattttttttttgttatttaatatcttatttatatattaataatttttgttttcacaaatttgggggcctgagtggtcggggcccgaggcgcacccctagttctcctacactcagagccaaccctccaacgaattaagtgtaacttttaaagttagttattttactaataagaaaatttagtaatgtttatttttgtatgaaagtgtattaaagtcttattgggtttttttgttcaaaagtggaaaaatggaatggttttatcatgttgaaacagggagcaagtgcagaaggagcaccaaaacgtctaacattcgacgaaatccaaagcaagacatacatggaagtgaaaggaacaggaacagcaaaccaatgcccaacaatcgacggcggtgtcgagtcattcgccttcaaagcggggaaatacaacgcgaaaaagttctgtttggagccaacttcattcacagtgaaagcagaaggagttagcaagaacgccccagcagaattccaaaacaccaagctcatgacacgtctaacttacaccttggacgagatcgaaggacctttcgaggtctcgagcgacgggacagtcaagttcgaggagaaagacggcatagactacgccgcagtcaccgtccagctcccgggaggtgaacgcgtgccattcctattcacaatcaagcaacttgtggcttctggcaaacccgaaagcttcagcggtgagtttcttgtcccgtcttaccgtggttcgtcgtttttggacccaaagggcagaggtgggtcgactgggtatgacaatgctgtagcattgccagctgggggcagaggtgatgaggaggaacttcaaaaggagaatgtaaagaatactgcttcttcaactggcaaaattactcttagtgttactaagactaagcctgagactggtgaggtgattggtgtttttgagagtgttcagccatctgatactgatttgggtgctaaggttcctaaagatgtcaagattcagggtgtgtggtatgctcagcttgactcttagatcaatattagtttctctttgaatgaatcaatcaatgaatcaatgaataatttctctttttttttatcattgttattatgttgtaagttttatgagatttttgggtttttattgttattccaaaggtgtttttttctctgctttaacttttgttaattttgccttgtaaaaactaaaacccatctctctctctctctcttttctcttacaactactcaaagaggaacttgtttgtgttgtatattataattatcatcttcttcctttttattggctttaatgctaaatatcgttttaaaagtaattacaatattataaatgtcaatattatgaaccattgtttttattattttttttaccttttgtttcaaatgagacaaatattgatttttatagtttagatattaacttgttttatgcatcaaaatttcaaatataagcttaatgcatgtcataacacgaaaagttcgaaaattacaagtaagtacaaacaccctatattagtccgaaattataaaacgttaaaaaaatttaataataatagtaataaatatgtattaattaattataaataaattaaaatataataaaactcaaatataacaccgaatattataattatataattgaaactattaaaaaatataaaattaaaactactttaagttttaaatatttattagtaaatattcaaattttaataattctaacgatttttttttatatatatatatttaattgtttataaaatattattggaaaattgttaaaaaataattgaagctagaaaaaaaacatatagtttagaaaaatacttaagtagaattaattttttttttttttt

SEQ ID NO: 1283 - DNA, 2144 bp, Cannabis sativa
ggatgcacgtgagtatagacttgcatggcattttgtcgtgtcttaaatccaaacgaacggtttcataacttcatttgaagacaaaattattatgtactacttgggattgtgcacttcctttcctttctcctgatttgacttaaaagtggttttggctgagctttatgtgttttgtctatcaggcatatgattatagtggaattttagttttttagcaaaatgaatcccttgttttatgttcattttgttgcaattttgcttcagggcttggtttgaggagctacgaaagaagcgaatggcagagctgaggcaggctttggaccattcagaagactcaatagggttagtccttttcgttttgctaactttctatttcaaccttgttaaaaatttacaatacaaaaaagatgcaatgtgtatattgggccaaacttttttaacatctccttaatggttggaagatgaaaaagagtagttcacagctctcaaactgattatccttttagctatattttcaaaatcagcataagtggtaataatgagatctaattaagcctaaatagaaacataaattcttaattttcatattggaggatgtggaattagttttagttggaaacagaaagacaattccatatacagcacacttgaattcttagcacgaattgtatgacttttcggtgaatttccataagaaagaaaaaaaatcttcactgttttctgaagaaatattcagcagcctctaaaaatgaccacatcaacccgtgatacattccatttgggattattagcatttttgaaatagaaaacattgtcaggtccaagtcccttactttacattcctctaactttgagttataatataatataagtgtgttaaaatatatgaaattggtttttagaaggtgagctgctatgttagaacatgttattgtctcttgccacagatctcttgaaacaaaacttgaaactctgaaggctgaaaaaggcgtctctcgagtcaactatgcctccagccaaactgaatcaccttcaactttgcaaaagttagaaggagttgattccttcagtaaagagtccaaggatggtctttctgctggtagttttactctggaaacaagaacaagctggtcggctgaatgtctaaatccgtgcactgtctcagccgaagagacagagacaaagcttaaagatttacactctttcaagacagcagaagcgtgtaatactgagaagttagcagaccatgtacatgaaagacaaggaagtatacttaagaaaaggagagggaaaagaaagagaaaagattgtagcagggacatcaaagaaagcagtgttggagaaagtggatttttagattcagctgaggctgtaactgcttttcagtctaaagaaaatacaaccagcgattgtggtgaggtttctagatcttctggtttagataatcagagtaaagggacaaagaaggatagcattgatgatctgttgaagattttcaactccattgtggaacataaatgtgcctctacctttcgtcgtcggcttgacagccaggtatggaaatgacataatgatttttgctgtatatgctttgccacaactgaaaagttatgttagctcactttattgtctatattaatttctacattgaatgtatgcagaagagaggaagatacaagaaaatgattaggaagcacatggattttgacactttaagatcaagaatcaccagccgatcggtgatgtcagttaaagagctctttcgagatcttctgctgcttgcgaataattccttagttttctactccaagaacacacgtgaacacaagtctgctttgcttctaagagacctcaccacgaaaacattgctccagcatttcaaagactctacaagcatcaaggctgcctcagccaacatctctgtcataacaacaattcaaagtagtcctcctcctcttcctcctcaagttaaacccagaagcaatcattctggcaataacaaaaactcggctgttaaaccaacccatccgaagattaatgatgctgcgaagagtcccaagaaaggctctagtcaggcaagaagagttggacgtaaaagtaatactcaacaacaaccaaccgttgctcctgcaaagggaaggaaa

SEQ ID NO: 1284 - DNA, 2635 bp, Cannabis sativa
aactgttacttcttctgttatttttgccactggtcccattgggtagtctcaatgtaatttgtgaagtgtcttttgacttgactgtacaaaagtgtatgcgaactctaccattgtggagccaagttgagtttgtttgtgcacaatgcacataaatgcaccttgccaccttggtagtgaatagtgactatgactctctgtgtggtttgcttattggtgttcctccctcgttaacattttactaatttttgaccctcttacgagtttttaactggtaagtttacattgttacaggtaattttgacatggattctactgcacaaactttcaaccaccggttgacatcaattaaattatggccccccagccagagtaccagactgctgcttgtagaaagaatgactaagaatctcataactccatctattttttctaggaagtatggcctgcttgataaagaagaggctgagcaggattcaaagaaaatagagaatattgcttttgcaactgcaaaccagcattttgagaaggaaccagatggcgatggaggttctgcagtacaaatatatgccaaagaatcaagtaggcttatgctggaagttttaaaaagaggtcctagagtgaaggatggagagatgataacatctgaaaaagttggtgctgctcatgagactgtctttgatatatctggtggtcatcgatcctttattgatgcagaggaggccgaggagcttttaaagccactatcagtacaaggaaaatacactaagatttgcttcagcaatagaagctttggattaggtgcagctcgcgttgctgaacctatcttattatccattaaagatcaattgacagaagtgaatctatcagattttattgcgggaaggccagaggcagaagctcttgaagttatgaatatattttctgcagcattggaaggatgtgtcttgaggtttctggatctttcaaacaatgccatgggtgagaagggtgtcagggcatttggttccctattgaggtcacaacataatttggaggagctttatttgatgaatgatggaatctctgaggaagctgctagagccatttctgaattaatcccatcaacagagaagcttaagattcttcattttcacaataacatgacaggagatgagggagcagttgctatagcaaagatggtgggacattctcctgttttggaggatttccgctgttcttctacaagggtgggttctgaagggggtgtggcgctggctgaagcacttgcgacctgtaccaatctgaagaaactagatctacgtgataatatgtttggtgtagaagctggattagctttgagtaaagctattcctgccttttcagatcttaccgaagtgtaccttagttacattaacttggaggatgaaggtaccgaagcgcttgcccatgctctcaaggattctgctccttcacttgaagtgctagaaatggctggaaatgacattactacaaaatctgctgctgctttagctacaactatagctgcaaaacaattccttaccatattaaacctgtctgagaatgagctgaaggatgaaggtgccattctgatcggtaaagcattggaagatggtcatgaccagttgaaggaggtcgacatgagtacaaatatgatcagaagggccggggcaagatttttggcgcaagttgttttgcgtaaatctgggttcaagttgcttaatattaatgggaactacatatctgatgaaggaattgatgaggtgaaagatatttttaagaattcacctagtatgcttgggctattggatgagaacgacccagatggagaggatgatgctgatgaggaagatgctgataatgatgacgaattggaatcaaggctcaagggccttgagatcaagcaagatgagtagaactctggcgcttgccttctgcttatttggatttatcttgattgaaattatggatcagaacttattttttatttaattataatgagtagtttcggctccctttgttgtagattaggtttagcattcagcacattcatgtttagtggaagctagctaaatactccaatttacctgccatgttcatttgctgactggtgcaggttctctcttttttaatgtttgctcgacattaaatttgtggaacatatctttcttggtgtcaaaagcttattatatggtggtcccaattacaatttatgtttcacagaatgtgaactgttctataataaacttacagcatgatgcgtctctttattagtttaattttctttatttataaagatttgcatatcatccatgtttgattattacaataaagaaacaaaaattgttaattgtagtcttcagcgaagtgcttatacaagtaaacaaacaactgggagatgaatagacgcaattttgatggtcattcatacagctactggaactttaagggattctaatatcttgtcatctaactcgaatttcatttctttcttgtctctcccaatctttatgtactcatcgaatcgttctttcaaatcttcaggaaggtttgtggatgcctgccatcccaaaatttcttttgcagctcttggttcagcataaaagtgctgcaaagtacaacaaatatatggagttgg

SEQ ID NO: 1285 - DNA, 1618 bp, Cannabis sativa
agagagagagagagcttttccatacgttttctgaaattaaggcctaccttgggacaaaaaagatcaaaatttttgaagaagcactgttttcctgtcttttcaagcttttctcgcatcagaagactgaagtcattggagccgcagcaaaagtcaactatctgttcaacaaagaaagattattgtcaatttatttgttgaagtatacattcctgagtaatttagctttaagctgtactgtagtatataaaatttattattactggttcgttaaaatacacaataattatttgcactagaaaatgcaataactatcaagataacacagccaaattgaaaataactcactgtatctccattttgaacataaaaatgaagcctgttaacaacctgtagagttgtattatgctattagctttcacatcaaaatatataaataaacaacacatataacatattacatagccagtcatataaacaaaattcagtagaaaaaggctcagccattccaggaatatagaaacagtagaataagactagaaaattccaagaacaatcttcaacaaacaatacaggatgaacaaaatccctcagaactaagaagcgcccattaggttataaaaaattcctcaaaaatactaaccattaataaaaactagagcattgattattaaacaattgtctgtagtggtggaggtaccatggagcttattttactagcatcggcagggaattatcaactattacttattatgcctaaaagggcatgcgagtttagcttcaaaatctttaccattattattataattattttaaaacaaaactgccttccttgtatgtattaaaagaagaatacaaggatcagcttcataatttttaactattaagccttctcagtcttcctgattattttacacgagaaaccagtataaatatatagttaaaatatgctcaggtagatatataaattgatatatatatatatatatacatgtataaaattgcaaattgaaaaataaacaaacagcaatgtcattctcataggggcaagttgctacttgctagtgctactcagattcttatgttacaattctgaaaaactgtacacataataaaaatgttggctgagaaaaaaaattgctccttattgaatcaatttacctccttaagcttatccactttagtgaaatgacgaccataagatgtataccgattcccatgaagaaaaggagcaagataaacaccaagctttctctgcaaattcacaagacaataatcattgcacagatcaaagtgataccaatctctctaattaggactaatgtgacaaaagagtttaagattcatgctaaacacagaaagtttttttttttttgctggaaagtatttaaactttcaaaatgtgaatacttcaaaaagggctggtaccatcattcgtgtcgacataaatcacagctcaaagctaataattaaaagagtaaattgattagcattctgacaatttcctatgaaaaagtcaaccaaaaattcaaaaccagctactatttagcatagtaatccaaactacagctatgtacccgaattgcaaaaacgaacttgatgagcacctgctatcaattca

SEQ ID NO: 1286 - DNA, 2979 bp, Cannabis sativa
aaaaaaaataaaaaatggcccccgttaagataacggctggctccgccactaacaccgtttaataatctagctgaagtcattggtcaactcctccttgttccgttaccagttaccattacgaagaccctcaaaaccagaagtaacaaaaccccagatttttactcttcaattggttttgccccaaatcaacaatgacatcgtttcgaaccctaaccctaacccatttcttcctcttcatcgttctcttttcttcagtgacccacaatgtatcctccgattctggcagcgatcgagtttcggagctcctagaattgcaatcccgatccaaatcgggagtgatccacctcgacgatcactccatctctcgcttcctcaaatccgtcaaaactccaaggccgtactcgctccttctcttcttcgatgcaacacagcttcatgacaagcaggagctccacctcaaggacttgcaaaaggagttcggcattgtcgcttcctcattcatcaccaacaatcaagacccatcttccccttcccatgccaagatcttcttttgcgacattgagtttaaagagtcccagaatagttttgctagctttggcgtcaatgccctccctcatatcaggcttatcggacccaatcacggcctcaaagattctgaccagatggaccagggcgatttctcccgattggctgaatctatggccgaattcattgaatcgaggactaagcttgttgtgggtccgatccatcgtccgccaatgttttccaggaatcaaataattttcgccgttatcgcgtggctggtttggttgccatttattgtgaaaaaggttctcagtgggaagactttggttcacgacccaaagctttggttgtccggtgcggttttcgtttacttcttcagtgtttctggagcgatgcacaacataattcgaaagatgcccatgttcttggcggaccgaaacgatccaaacaagctagtatttttctatcagggctcgggaatgcagcttggagcagagggttttgcagttgggtttctgtacaccattgttggggtgttactggctttggttacccgcggtcttgttaaggttcggaatccgacggtgcagcgtttggttatgattattgcacttttcgtttcattttgggcggtaaagaaggtagtctacttagataactggaagacaggttatggagtccatgctttctggccctcgagttggcagtaagctcggaattgatgtgatttcaatttggacttctaagaaggtgataattttggtttagtgaaaaatggataaattggtatttactttgataatttgatatgttacttgctaatagaaattatgtatccttacatttctctgaagagatttacattttggttaaagcttgaaaattgtattaagagtattttgtctgactgatcttgaatccttttgttttatgttacgattttagctttagatagtttaaaattggcccatacgccaattcttaacatcgttttttggtctgagtttaagttgcactttaagtttaatgttttgacttatatctattacaaaacattgtgttacctagtttatccgtgctcctagcagtgcatgcttcatgctaaataggttagaaatatctcctagttccctactctgtttttcattagtgatatttttagtaaggaaataatgataagaaacaaaacatcaatgtgacaatgtttaaaattttggatttttggtctaatatttaggtaaaatgttatgattacaaaacattttaatagtatcttgtttggaattcttccatggctccttaatataagatgctgcagtgtctaagtgttaatgtctagactactgcacttttatgattttcatgagattgctgaagttatttggggcttctgagaacactgcctgttgcgatatatattatttagttttcttggacttgaagctgctgagaacaatttctttcttgttaccaaatatgttgttgacactgttggggggtttttttttttttttgttatcataatttattgtttgaaaggaaggtaaactcgtgaatccggatatgaaagtcttagtcatgaaatttagacaggaagtgacatttttgactatattgccttttttttcgttcttttctttaatattgacgagagttctgatacaaaatagaaaatcttaccctgtttgtgttgcctttggagctgtttgtgtttgctatgttacagagatatgcatgcaagacctttatctttcagttgtggttagagacagtgcttaagtagattagagttaaaagcatttaatagtgtcatcatcagtttcagctacttttttctgccccaaggaatgagtgatctcccttcactgatcagaaggtcatagattacttgacaattgataaaccatatagctaggtacctagaagattagggagagtggcattcatatctcttgagacaaaaattaaaattgttttagtcagccttaccaaaaaaaaaaaaaattgttttagtctgttttatacacaaatcagatgtgttttttttagtgcattagtgttttctgcatgtaaagtttgtggcctcggccttgtgggcattaaactatactttggtcgctactctggatttttattacaaataatacttggctggttgataacttactttgagtattccaatttaatttctttgatctacttggataatgattttgcagtatactcagtgcaccaatacaatatagtatccttttttctttatatttttgtatgaatgctggaatgttcatggtggacaaagatgcatgcattttgatgaaagttgtaaaacttgatttcattttggtcgcattgagaaaatgggattgttttggataatgaaaaattctttggaggcaaaagtctctggtgattggcttatgcaaagacatcggaatatagaagtttcccatc

SEQ ID NO: 1287 - DNA, 1775 bp, Cannabis sativa
ttagaggtaatgaaatggaaaggtaaagaaacaatatttatttcatttttttgtttgattgcattttgaattattggtatgaaagactattctaatctaagatgatacaaaatttaataactttttgatcatttttttattttttatatgtattttaaattttatttcattccatttctattcctattcctattagtgtttaactagtcactgtatgaaaagtctaattccatctaagatcataattacatacctttccacacacggaaattcttttgattaataggagaccctgtcaccttttgaattgcatcaaacagcatctcctgaggagtgttcttcagctcttgaactactgcataaatggtctttccattgttaaagtaaatgtgattattagggtgtttggtcttgcaaccagcatgacgctcaaactcatatgcgttgagagcctgcatcacacaattcaattccaccgcaacacatgaatctcaaatcaaacatgacctcgtcaattagtaaagacaacacataatgtgcttacttttgcatcttttgtttggttgcagtcattgcaggaacataaatacccagttcctcttataactccctcgagatttttctgcgaaaatattagtaagaaaattgatcagctgagcatactgcatatacctaatcgaaatcaatagagacaatgagcatgtaggaagaaaaacttacctcccgtgaccatgaaacatacttcacagtaaccccatcaaacataccagttgataacagacttttcacatttgaaggaaagttgttaggaggtgccttcttaacagtctttggctccttaatctttggaatggcatcaatttgagaatcagcttttggaattccatttacatttgaatccacattagcctcaaccgaaatcttctgcccagatatttccaaagtctgagatgagttctgattactcatcaacaaatcataactgctaatgataccaccagaggaattagtcccagattcatcatgaaaacctccaaaagatatggtagtgctttctcccttgttgtagttctgacccatcgagagattgctagagtctcctttattgtagataggaccacccattgctagaacatttgaatcagacttataggttggacagtttgatatcatactattattatccctcatataggagggggccatttggataaaattattgtttgatttaccataggttgcaccaatggaaataagatcttcatgacccttggtataagaggtacctaatgatatgatattattatctcctttttcatatgattggttcattgatatgaaatttccctccctcttgtcgtagggctgacccatcgataggagaccattatcactttttccgtaattatggcccattgatatgaaattgccatcccccttctgacctactgaaatgaagttctcatctcctttgctgtaagtaggtccagctgcgatactgccatcttcatgattataagttggacctagggaaatggcgttttcaacactcttgctataagagttacccattgaattggtactactctctaccctggtgtatgaattccccatagatgtggtcaatgtgttgtcatgttccctaacttcattgactttaactttacgaatcccaccaaaattgagacatgatgagggatcgtcaatggtatgagacattgacaaacccactgatggactgcttccatattgattatcaaaactctttcttcccg

SEQ ID NO: 1288 - DNA, 1962 bp, Cannabis sativa
ccaagcaagactccctatggaaagggtaatgcaaatagaaatttagcaccataaatagaaggagatttataggtttgtgtaagagcagagatatgaagcatatgttgccaaataaactttaatagatgaaactatagtgcagccaaacccgaaaacgaactgagttttaatacttacagaatatcgaggagcaatatcttgatggtttgaatatagaccagattgtgaaaatgcatcagttccctataaatcaaaaggcaataaaattgtttatctaaaactgtatatggtagatcaaatgctctgctcttagctagaaagatagcaaaaattcaagaagcctgagtaattatgaaagttcacagatttgataattaataaataacaatttttttttttatttcatttgtttctattagtaataatcaaacctggctgcatgccatgcatagaaccgccattgcaggagaattaatatgactcaattgagtcaggaaaaaagcaggaccaagaaacccaattgtttgcatgccctacaaaaggaaaaattcaaatgcccaatcagccatgaatcaaacttaaatgcccttttagttttcgtttatatcgctttgtgtgtgtgagcatacaaaagcaggaagctgaatacttgtcaaaagttcaatttcataaatttttagcataagatcattacttcacttgtaaatgcactacactaattcagtggccaacatatttagtaagtttccttgtgaatttgagtcatatgtctagtcaaactgtaaaagaacctctccttgccaaaacactcatcatgcatagaggagaaagcatataattttctatcatggtaaggcactttcccaagtacaccacagcagaagaattcgtgaaaatcgggaaaggaaataaactaataccttacgaacagttgtcactgaataacctttactgataagtgtgtctgcaatccaccctccaagatttgcagagaatgccattgtaagccagggcaagacacaaaagagtccagattctgtgagattgaacttcagcacctatggcaagagcacagcaataataattacacctcggttattacagtgaactcatccttgatcccaaattacataaacaagtaacacacatcatggtgaacatggcattgaaaagaaagtgaagttccattacatatcaataagctgtattcataagcaatagcttacttggtgatagtatgttggcatccatgtaagaagaatgaaggttccccaattgtgacagaaatgagacactatcagagcccatacaggcgcctttgataatatttggccccaaggaattgttttaacgggttctttggagacactgttagtaagaattagctttttctcttcaggtcgcagttgcggatcctcaagtggagaactgtatgcctaatgagacaattcaagaacatagatggtttattaagaaaacaagaattggatcattgtaaaagactctacaaagataacaaattgaaatgttaaaacattaattaagcttaaataacaaatagcttcacagttctcaagaataagaaaatgattagaaccaaacagacggtaaagctcaccttatttaaccaaattgtaaaccatacagttcccagagaaccaaaggagtaaaatactgatgaccatccgaactgatgtattaaaaaaggtgaaaaggcgaaaccagtgaccgaaccaatatacatgccgctgtacacaagagccaatgatcgactcctctccgatacaggaacccatttcgacaggatattattcattgcaggcatagcaacaccctgttaaagagttaaaacaatgtaatttatgtgaatatagcagttgagttgatttatacctttgtttcctaacgaatagatatcacaatctctaaattccacaatagcctcaaaagtgaaaaaaaaaa

SEQ ID NO: 1289 - DNA, 848 bp, Cannabis sativa
ggattggatggtatcaacccctaaacatacacatagcctagctaggaacaatacttgcatacatgtaaaacgtgtttatatataaacaatacaattagtataacatataataagagactaagaatcccgaagtcccatttccttgttgcaacacttaaaataatatatatagctagacaaatataaatattgtatatatttatatagtcttatttattccaccataaatcaaacgcaggggaagtctcgagattcaaaattattagaagccaaaagtggtagctagctagttcctgaggggaatggccattaaagttcatcctctgatcgcttcatcatcaaatttaataatagataatcctcttactatttcttcttcttcttcttcaaagagagaaacactgacagtgtggatgaaatctcttgtgatgcaaggaaatgggtgcactgcatacaatcaaaatggtcaagttgtttatagaattgataactatgaccacaagaacagcaatgaagtctttctcatggatctcaacggaaaagttctctttacaattctaagaaaagtaagtaattattatttattattcatctattctaataatttgatctaattaatattctgtgtataatatatattgtgtgtttattatttatactgattataattattttgttaatatttattataatttgcagaaaatgtgggtgtttcgaaagtgggaaggctataaaagtggtaacaaaattaatacagagaagccattatttcaagtcagaaaaaattgcagggtacttaattttggaggaggcttttcatgcaaggttactttcaaatataatgatga

SEQ ID NO: 1290 - DNA, 1448 bp, Cannabis sativa
atatatatacatgcatgtcataaatatttgaataatgttttaagtttatatctattagtagagaagaagaaaaaaaaatacaaaattatgagaattatgattcatgaatctaaaattatacatgcttttaataaatataggaataaaattagttaattaatattattactttcaattttcaagtgtgaagaaatatattcatctctaaaattaatgtaataataaaattttgataaatattcattttaatagattttttctaatcaagaaataaaatttctaatttttaaactttttttaatcactcttatctgtacaagagaaattttattaaataataatattattgcctcacttaattttttttgattatttattcacttagcttaattaatttatcatatatactttcttttggaccaaacaaccatacaaaaaaatttattttcgttggttttcaaattgatttttttagaatactcgctaataaaattatgtgactatttaaaactcttaactatagtgtagtggagtattcccaatgatttattataatcacaaaattatatgctctaaattttaaaagaggctattcaacgattttaaaccgtcgaaataccctcttttacaataacatgctcattctcactaatctctctcatttatagtatacccagatttaaatcattaaggatgtcatgttaaaaatataaaaacctaaaaaaaattattttgttcaaacatttctctctcttgtcatcaaaccctaaaataggaacccatcaaccaccaccatggaacccaccaccaccacgacggaacccaaaaccaccaccacaaaatgcaatcacagtagagaatccagcggtggagctgtgggaaacaaaaggagactgtgaagctcagggtttgcaatcatctgtcgttcgttattgtggcctgggcttcgtcctcgagaggtcgttgtcttcaacgtttcaattttgtaaggttttaaaatataaccctaattaatatttatttctttttattttctatttatttatcagttattgttgaggattacattgatggttgacaaccatcggccgcaatggagctccgacaagcttgggtagtagctatatgtattcgtttaattattttttttattatttatttttatatatgtatataagggtatagccgaccgtcttaaacagccggctatgcttagcatccttgacatttttgcacagtcaggaaaaagttttcctgataattttacaatgtcgcccattctatcaatttttttgacgatcgaataagcaacggtcttagagaccgacaagaatactttacccgactgtttaaaacaatcgagaaaactcagttttttttttgttgagaaaagcgtattcattcatagaagaaaaacttagtcctcatggtcgttacaaaaaatattt

SEQ ID NO: 1291 - DNA, 1993 bp, Cannabis sativa
tctctctctctctctccattgaagtatcattgagttttcagttttcgctaattttggtctgattcagcttacaacgctgcaactggtgctgctccatcaatcgtagaaaagctacatgaagatgaagatcaacatcatcaacccaataacaaacgccaacaaaaacgaaaacgccactctcaaccaaaattatcttctttggaaaaagctgaagatgaaaatggacctatgtctcaccatgattatatccagaagataaggtaattaatctcttttctttaaaggaaaaaaagtaacagttttgattgaaatatgtttgatattggtgtgagcaggaaagaagcttgttcttcaaaatcttatgaagaattatctgctgatgttctggtaattgagatattatctttgaattggcttgtttctttcttaatgggtttgttccaagtattgattttgttttgttcttcttaatttctctttgtttcagggaacttctacttctgctcttgtgaatttggtagcatatggcagtaagtttttctgcaatttgaatggttcaaattcatgaaatttgatgtaattgtaatctatggttttcattttcatgctttattaacttaatttgagttattttgtatgataatttaggtgatgaaagtagttcttcagaatgtgaagaaaaacaagattcactaaattctggttagtgtcctgagattattaattttcttttgcacaaatgaagtaaagtttattagattgttctagtatgagtatgaaaatctgagatagttgatgaattccattatgagattgaaatagtatgattatgtttatggcaactctttaatgttgaccttttaggttatgaaaatgaacttgatcgagtaaagagcagaagtgaacaacgttttcctttagctggagaacctgtttgtgtaatctgtggtaaattcggagaatatatatgcaatgaggtagaaatttaaagacctgtgtgtagtttgaagttttccataattctgttttctatttcattaagtttgataatcctttaatggtgttggtactttttgatagaccgatgacgatgtctgcagcatggagtgcaaacgcgagcttttagaattcagtaacgttacaaaggtaatcaatgcacaaattcaactttagcaatcaaaatatactgctttcatagttctgaagccttcaaataactacattaggaacctttgaggacccaaagagctgatgctgtctcatccgaacttaaacttagcttacccgtgtctgagatcgaagaggacacatgggatttcaatcggaatcgttggtccagtaaaaaatctaacctttgtacttatgaatggtatgcttatgagtgctgtatttatgagtcaattatccaaagttcttgtcaaacttctcttttatgaatggctgagaatttttcgtctttgaagcacagcctgattatttgcatctgaaactctgaaaatgttttgttagttggaaatgtcaaagacctggacaccttgctgaagactgtctggttatgaaatctaacgaggtttgtaattctttacgcatttatcagaaaaatgaaacctgctcttaagttcattcattccttaccttgtttggcctttaatgtagacattacaagggaaaaacaaaaccagttccctttccagagatcttgctgaattgtacaaaaggtgtgttaccgctccctttaaattagccgtcaaatattaactataattcttcagttctccaaactttgaatcaaagtttactcaaaattgcttcgttttttttaaaccttttatctgcagatgtcatcagatagacagaaaattgtcttctgctaagtgtagctcatgctgcagctcaataagtttggcgacatgcctcggttgtaatactgttttttgtgacgagtaagcaacaatattcccttttaacagattgggagaatgatgccatatct

SEQ ID NO: 1292 - DNA, 2811 bp, Cannabis sativa
agcggggtatttcattttatgaataatcttttgcttagtcaaaacaagattttattactagtacctcttccaattgggttgagtaattccaccttattgaagaaacagcttgaagtacatcagaactgtttgacagcaagcaatcgcctggtgcagaggctgtaggttttgttttccccattgcctgaacaaatcacacgttaaaccagtgaattcaggaaagtttcttaaaaaataacactttgacttgctcaagaaaaagaaataagtactggcaaaaaactgtaaaatctaggatactcacttgttcaaactctgttctaatttctttcacagcatgtctaagctctgtccgcattgcctcataaatactaccattcacatcatccccagttggatgttgtgcctaaaagataagaaaaacaaattgatgtgaaaagcataaagctaaggccaaactcacaaatgataatttcttaatatgtggcaaaccttcttctgtgcataaactgttcgaattgtccgctcaattccatttttaccagaatgagcatccctcccttcatcgtcggttaaaactgaagattggctctgaaaggtcaaagacattttcaacttgaggaatctaagacattaattataatcaaatttagtagaaagaaaaagaaaataccactgatcccaaactcaatggtcaaagttgttccttttacattgtttttttcttaaaagaaaaatacaaactatactaaaaaaatttcccgaactaggtacagtagatattcttcaataagcaaaataatacaatggtaggatcatccccagctcaacactgaaaattgtcccatccttttttacaaaattagagctcaaatttttaccatcaaaatatgctagaaaatttcaataagcaacaagaaataaaacttacagaatagccatcgcaggacctcaagtccttctggctgaaagaccttctcagtccttgtctttgattagaagctttcggcttatgtgaggagcgtaactgttcatttccactccctaagctcttaggattagcattgttacgtttctgggaatgatctaaatcactctgtcatttgaaaaacgataccaaattagctacatgaaattacccaactgcatcttatacaactagcctcctataggacctatcaaatggatcagttcaaataaaagtaagacaatggggcattggggctcaatatcaaatatgcccagcaatcttctttcgatcagtaaactcttcaaggactggaaaggtaatcacaatgctgtcatgtcagcctatgttcaccagtccgtaatcgactttgatagaaagctagaaaaagtgttcatttttcacaccgaaccatctgtaaacttacacatttacaccatttgtgattgcatttccccctataactaaatcaattgtagaattttcctcattccacgctaaaccctttccctcagcacttttctttttttcaacaacgtattctagtcaacatgcccttacaataaataatattcagtataatttcaattctctaatatttacaaatttaatttttttttagaaaaataaaaaataaaaacgttcttggcttcatcaaattacaatggtacacatgaatagactctacaatacgatactaaaactcaaacgagattacctcagaatcgctaatttgataccgaaccacagaaaccgaacgccgtcttctggaaagagcactgttatccgaagtcaaccttcctccaccactaccagaattgctaccagtactccctttcacctcaccaatacaactacccccagtcaacctcgagctctgcctcgccacggaccttcctcgtctctgcgacacactagagccactcaccggagtaacctcagacttacgcgaagccgagcgacctctatctcccgagtcaaagaactcaacagcaaggtcatcaaggctgatctccggaaaacccgaacctcggactgtgttaacgaacttccctcttggagctggagtttcatcgaaatcatcgctcgcaggcgtctgcaaccggtgcgagaatcgactgaggctccgagaacggcgatgaaccgaactccgattcgaggaagccgagtcttcaactgaagccgacgacgatgatccaatcgacattcgcttcgaggtcgatttaaacgccgaggtagccatttctctctcagatgaaatcaacaaaaccacaactttatttatatatagaaattagggcttaacgaatagagcatttaatggaggatccaactgctcaacgtctgaattaaaactagtttaaatgaaaaccagagagaaatgagatgtacacatatacatatacatatatatatatattatagagagagagaaagctcagtatgagtttgtgagagtttagagagagaaagtgagagttttaaagaagaagaagaagaaagttggatagaacgaaatgaaagaataaatttgaattaatgtcgattattaacgaagaagagactctgaactgaatcaggcgggtttgtttattttgattttagcctttttcctttttcaaaaaaataaaataataaaattaaaaaataggttgaatctgtattgatctggtggggttgggtggaaaacgaaaaagaaagttcttaataaatacgacacgtcgttttagtagatttcaacgacattaacaatcttaaacgacatgtagttaataattttagcccaataacgataaagagatcgggttgatcgcctaaaactaatgttattatgtcctctagtg

SEQ ID NO: 1293 - DNA, 1667 bp, Cannabis sativa
tctctctctctctctctataatgaatctttaaataaaagttttcctcaatttccgaacctatctaaaaaacaatctcattccatatatcgatccctcttattacctcccggacaataagccctccgcctccctctccgcctctttagggttctatctatctctctctttcacttgtcatcatcatctatatatatcaaacaaaaaacaccattataacctaatcatgcgtatctttatgtatatctacaaatatatacaagatggatttgttttctataactatatggatatatatatatatatatacgtttttaaattctctccccttccccccctttttttttcctttaattctactttctcaaatatatatgtaaaattaatatttacttttagtgatttgaccactcaatctccctcgacttacgcacagacagatacgtatttaagtcagtaaaaaccatcttcagagagcagactttgcctttattaccacctttgtcctttcctaaatttctttcttttttacttacttttgctaatttggttagaatctttttcatctcacgccttcttttcctaattcccatccacacacacaataacacacatctctagggttttcctttacaaaatttttctaacctagctcttcctctcctctgttatctgttatgtgtagtgtgtttacatttatatatatagatatatttatatttatatattgccttaactttggtgaaaaagatagtggtcgataatgatcagtgaccagaaatataaaccatcgccatcccttctcatcccattaaaccctatctatcgatttatatatatatatatatatatatatatttcctcactaccaagaaaaacgaaatttttaataattactattattatatattatttaacgaaatatgggtcaagtgtaactcgcacgagtatatatatatatatattattatatctctatatgcaaatcatattaaatgtaaacatacgtgtttatgttaatggccatatatatatatatatatagaagagaattgtaatataataagcctaaatcacttgaatatttgtcatcaattaatttgttcaaaagagatctagtaatcttttttcttaaatcattacaaatatacaactatacatgtcaattatttgttcagcattatagtgtcaaatttcttagcaatgagggaatatgtacacccatatatttgggacaagaataagaccactgatatttgggacataagtatgtatatatatatgtatagatacagaaagtgaatggggttatttatactcgaactccggcctttttactccggatcgaaggccgcccaataagaacctaaataaataatattaaaggttgtgtttaatggtgatgatatggatgtgacacataaacatttatttgacgatgaaataatacattaagaccatgttgataaagtaagcccttacaaagtactacgtactactgcctactgcagggcaagagtactttgattattttatgatccttttttgtatttttgctcttcatcttgttggaccttttacagcactccatatgtggatgtaatctaatactcaatacttgtaagacaagatgttataatacattaattgaattaaaaattaatctttt

SEQ ID NO: 1294 - DNA, 2039 bp, Cannabis sativa
tgttttctgctattaagatagctaattgtagatgatggatcccttataaataagcaagattatcacttagtagtagtgtacataatggatgatagtttactgaagaagaaggttgctgaaacaatcgggcatgaaagaagttctagctttttgtccacatacatagtaattgctatagttctttgaattccaaatattgagagactgataaaaagataataatgattacctactgtatgtatcattttttcctcataactcgtaagatattaaaaatatgggttcttgcgtctcttgccttttgcaggtgtgccgcgaatcttcacagacgaagaaaatgctgaaatttcggctcttgaattacacttctcgaaggaagataactgtttcttagactacatccagacttcaagaatcaacattaatattagacaagtgttttaagttttgttattttgtctcataaaaaattcaggtcttgatagatcaacagttttggggaaaaaaaaattgacactaagcaatctttcataaattactacaatttttatgctgatttaatgtgatctgtttgaattactttagatgctatggttgtacaaagtgtaatggcttgaagtatactaactaatgtttcctaacaacgcaattattacattggttaatgaggattataatacatgatgataatgacaattacaatgtaaagtcattaatatgttagttttcaatgacattgtatgagtttcaaaacttgaacaacgaaacaagtaaatgtatttactgaagaaaaagtaaaatcaacaaactaacaaagttcaaaactgaaatacaaagtagcattaaccaacgtgggtttttagttaattcataaagcttctatgaccatttccatttgcatacataatggtgagtcaaaactgtaatcacgtcatttttgggggcgccgcgcatgaaaaaaacatggtttgaaagagtaaatacagactcaatctcctccatccaaaatatcctacaaaagatctatttgagaaattgatatttatttatttattttgaataattaatcttttatctttttctctcttcatttttcttactttaaaaaaaaaaaataaaggataagatatgaaaatgtatccacttcatttttgtcactcggaagatatttcaatacaaacaactacagaattacaaaactccatacgatgattgaagattgaatcaggaccgtccaaataagaggctaaaaaaaagaaaagaaaacaaagcacttcttttctttctttctactaaaataagttttgactgtctacaatactacattccaaaatttccgacctcttaaatcttgagttgtataacaccatgccaccaatgcacgcgtctacgtgtacaattccaccaccacttttattgtcttattcttttatttctttatatttatttttcgcttccactcaataaatattaaattaaagaaaaaaatcaccaaaactcaataaaatctttttctacaattttctctctttcttcttcgtcttaattgcttagagttatctttctatctctctttgaaaatctcttcctttttcttcatcaatcgatagataatgggtccgattgtgttgacacagttggcaactgggcttagcgtgttggccggagcagccttggtcaaatcagttatggaccagaacaaccccatggccggcggctcatttccgaggtgtcccagctgcaacggaaccggccgagtttcctgcttttgctcgcggtggtccgacggagatgtcgggtgtcggacatgttccgggtcgggtaggatggcttgtaacagctgcggtggtacgggtacgggtcggccccttccggcccagattactgttcggcgttcaaacactccgtcgtgatgggtttgttcttagatttctttagttctctatatacaatctaatctcctcttcctcattttttttaaaattaattctgtaatatataattaagctgatgatactttgagagaggcagaggatgtg

SEQ ID NO: 1295 - DNA, 3990 bp, Cannabis sativa
tgaagactcctttcaggtggacatgataagcatcccggttctcccttcgagatggcatctataattctacgagattccttccggatggacaagttaaagtttcgaaaactctctttcgaatgtcatctaactttccataatcagaacaacttttgaaaatctttacatttgaaggaactataccacaggcaccttaaggtgcctaacactacactgctatgatgtattcttaatggttagtagtttttatattatttattaaattaaaatatatgaaactctcaatattaatatgcactaataggagtatgacgcggtgctttacaacttactcttagcattttccttcataaaattgcatattttgacaaaaaaaaatccgtttgagtaagaggataaaaatgtcaattccatttccaaacaaaggtttggacagtattgacttgggactggatatgaagaagaagacgactacgacccctgaccccttgactcctgagaacaattatccatctctcattctattaataccgtccgatcaaaaattaagagtggttctcaggttgccacgtgtacaccctatacgctaatacccatactcaaaaatcaccccatccaccatggccgattcattccgtcctttcctttcactggtttcagtgccgtctgtattacccctactgcctcctgggcctccattccacttcatccatggctgaatccatagcgatgcttccatggagcatctcctctgctgctcccctggaccatcggtaagtctatccaagaaggatttttctttttcatcttcgttgatttgagtaccgaagaattggagtgtttgattcttttttgggttctgctctcagagtaatgcttagggcaaattgtagctctcagaagcttgaacgctactctggaacttgtactgaagctagcttttcgagattgagctcgactcagccttccttactgttctctaactctaagaagtcgaggctaaagtgcttgcctccattgaatgtgttggtggactcagagactcaagctgttcccgctaagccgcttgtcgggaatgataagattggggttttgttgctcaatcttggaggtcctgaaactctcgacgatgttcagccttttctgtttaacctctttgctgatccggtaaagctccattttctcacatatatgtgtataataatatagtaggtatatacatatgtctagaaacacacacacacacacacagagacatatatatagattatatattctcaggagcttcggccaaatgacttattgttaaatctttttggggtgatgagtttagttgtggactccctctttctatattcaccttttatgttttttttgggaagatgcggcaagggtgtactagattacgaatctgggtagattttgctgaaattattgattatttatagtactttttaatgggtcattatttaaagattattatcagcttaataaaatattgttacttgctttcgttactttatttttattatattctttaatacatgtgagcatgtcatgtcatgcataatcatcgttatgaatcatgggatttgttaattgttttttttttgttccttttccatttttgacaattcgttaactgttttgtttgtacacatgagtttgaattgttgtctagtgtgctaatactctttggacaggatatcattcgactgccaagattatttcgctttcttcaaaagcccttggcacaattcatttccgtcttcagggcacccaagagcaaagagggctatgccgcaattggtggtggttctcctcttcgacggataactgatgctcaggcatgcaattttttaaaagcatactgaacttagtctattgcatgacattctttcgtgaatgataaactgataacttctttgtgatgttaatatcttttcttttgtgctctgatatttgattctgcttacttaactatttatcattgtttactcagggtgaagagttgaagaaggccctttggtcaaaggatgtcccagcaaatgtatatgtgggaatgcgatattggcatccttttactgaagaagccatagaacaggtatccatttagttctatagatccttattttgatatacccttgacaatagtgtgtgtggcacattgcatttcagaatcggaataaccataaaaaaataatattattggaaactggatagttggataactttctctatttctttaaacttttgttgtattttgtctatccctcaaacttgcaggattttacgtgcaaggctgtgaactgtagatatttttgttgattgataaacaattttgcagattaaaaaggatgggataacaaagcttgttgtcctaccgctttatccacaattttcaatatcaactagtggttcaagtcttcgactgttggagagtatattccggtgatatctaagcacagttgccattataatattgaaataaaacaaaaaccattttttgtgacaaaaatagatatttgattgatcagggaggatgaatatttagtcaacatgcagcacacagtaataccttcgtggtaccagcgtgaaggctacataaaggcaatggcaaatttgatcgagaaggaactacaaggttttgacacccctcagaaggtactacacttgtattattaagaacaaaaggatgcttattcatttcatgaattttttaataaatttgttaatgctattaagatagttaattctgttataacagttaagttggtaggttgtactgaatgtatccataatcggggtggagccagcttatgctaaagggtgggcatattcccccctcaaatttttttcaaacgagaaattttttgtcaaataattaattttttcctacatcaaatatagtaaaattatatgtaatgccacattcaatttgtctacgttaaacttaataattattgatgtagtttaaatttaaataattataacatgttcaccctaaacaaaaatcctggctacgctccagtccatagcgccattataaattttatcattcattcaaaacaattgaaagtttactttttctctaattttcttatatgggataactgtctaatctacttgaatttgaaaatgcatgttaccatgcatccaagcagcaagtaaaatatgcatctctcttgacataataaacactcaatttttaatctatagtttataaattttctcatattgagcgtaattgttgtattaagtataacttgttttctttcagtgtgtgatattctttagtgcacatggggttccacttgcatatgtagaagaggcaggggatccatacaaggcagagatggaagaatgtgtagacttgataatggaagaattagaaagaagaggcctaaacaatccgtatactctggcatatcaggtaatgttagtttttgcataaacaattcatatcttttctttcttttctatttttttgtcaggaattcttatttgtatctctaaatagtaagaaaataagatttttagtattcagaaagaccttccatgcatttaagttgatttgtgtaagggtatgtatgggaatggggggatattttatttataattctttttaatatttatttttgtggatgagacataattttatttttttgatgaaatgagagataaattttatgtgtagaaaaatgctattttctttctacattattgtgatttgttgattaaattatgtttgcatgtgttattttctgtgattgccatttgaaggaacgtgtggtttatagtttagtgatttctttcacgtatgttgtgtcatatcctatatcatctgctagttgactgatattgaacgttcttacagagcagagttggacctgtggaatggttgaaaccctatacagatgagacaataattgaccttgggaaaaaaggagtcaagaatttgcttgcagtgccaattaggtgattaaactt

SEQ ID NO: 1296 - DNA, 2864 bp, Cannabis sativa
agtgatgagttagaccaaaatgaaacaatcacatccgagtcaaaacttcacccatgagatgccaacgataaagaagttggcttctttggcctcactgcctgagcaaattattatagataagaaatcatttcacctagtatttttatgaatctgtcactgaatgatacccaaaatccacagcattatatataacatgttttttctttaatttgtcgaaatccttgtctctgtatctactctagtgtgagatgtatattacataaaaataagtaagatttggggtgatcaaaccacacttttcttctacagacttacagcttaaaacattacaaaagtacagataacaagaataattgaagacatccaaatccataactgtttcaagtagagttggaggatgccaaatatgactaatcatcaacagaagaagccactttctgacgagtacgagcagtgaagccagcaaaccaagcgaccctcatcaactgcataccaaggattagaacccaccaggacaccaggcctctaattgtatgcatcatccaaccaggtgcactaagttcagctcccaaccttaaacccctcattagctgcaacaaacggtaagcttcatacacaacaggggtcaccagccaaactggtgactgccaatgccatgtcagcatctctgtcagcatctgtacaaagagcagtaaaaggtagggacccaataaaactgcaaatgtaatgaatgttagctgaggttggaggaatcccttatgtgagccataaatcatgattagtgggatgatgaagccggttgcaatagcaaccatgttccagaacttgtaactaaatggaggcttgcttttgcaaggttgcattgcaagctttggccgagcaagagagtcagccatgagaaggaaaagggttgcaccaatgttgaatatgcaatcaagcccaatcagggaaagcaagctggctatgttggggccaacaaatatggaagatataggtaaccacaatgttggagccatgcctgtaatgaggagaacagaagggcctaaaagccacattggccatttgagtaactgaaactgattacttgagctgtaaattttttcactgctggcttcagatgtttcagttgtgttttcagaactcaatgtctcaaaaatgttggcagttttcttcaacaaattattttctccagtttcttcagttggggcgtgtgtagctgaagaggtctcccaaagactcagtttggtgcagctaatggcagaatgctttatgtgagagtttgaggatgtgagtagacgaaagccatttgagggtctcaagaagttgaagcttctggagttgaccctaggaagagtgatggacctgatggtggttgaaaatgatggcacagttactgaagccattctttgattcagaacaccaagagaaccactacttttcattgtctaaacaagcagagctgaaaaagaaagaaggaacagaaaataacagcaaattaatcatgttggaaaaagaaatgataacaagattacataacatacacatttataatattctttagctttgactcttctgaatttcagattctctgtaaatgtaaccatatttctataacaacaaaatcatataaagttccaattttcacatgtatatatacttataaattccactaaatgccgtaactcgtgttacagagggaagaaaatgtcgtattaaaaagaaggggtcgtacacttccattgtatatatataaaaatgagattttatgtcgttttctgaaattgaagtcgtatcagtgatctacagagaaaaaagacgtttaattctttgccccaaaaaggaaagctgaagaaattaaagtgccacatacaatagttgtggtaagacaaatgaaaactgcatgaaagcagaaaacgatgtggtatgtaattaaataaggagaaaatagatgtcgtttaagagatacctgagaattgaatatacaggtgtatcgctgcaaaaatcagaactcaatttgtattggtaaattagatttcaactaaaattagtttatatattatataatataaacagaaaacataaattagcgggaggtgattgagatgaaaaataaataggtatgtgggaaaccttaaaacaattcagaatcagaaaattagagagattgaaagtacaaagctacctgttccttccgccatagctgagactcgatcagattctaatggtgggattaattcaccgtttatttatatttatccgccatacctgttcctttgccctttcaaccagccgtcggggcccacctgtcatatcgctcttatcctaattacgtgctaatcgatccacttgccacgtccttacacagcccttggattcatctaacggctcacgaccattccagatcccaaaacttgctcgacctttaacgcccctaacctctcgaaattccccattaaatatctctgctactctttgtatctctctcctcaattctgggtatcactctacacagagctcgagatctctttcgggatattagccgctttttcgatctctcagtctcttcttaaaaacttactttacccatatgggcctactcgaccagctttgggatgacaccgttgccggacctcgtccggagaacggtctagcaaagcttcgaaagcattccaccttcagtttccggtctaattcgggcaagggtacggcccagttggtggcttattattagaacaaagatcttaataaataataatactctactgctactattactactactaacaataatattaaaaatgaccggacggcttggatctactgtcatctctttatatttgcatatttaattttaacttaaatgg

SEQ ID NO: 1297 - DNA, 2961 bp, Cannabis sativa
agactggcattaagtacattattccaagcaatggatgagatataaaatggagcatgtaccaggaatgataggtccaatttgttcagagagaacaatgggcccacgagcccagtctgttctaataggttcgcatgatactgagatgaagaagccaatgtcaccaagtgagagcatgtatgaagaagtggaggcaccccaaatttcattctgtgagccatctgaagcagtctgcaaacaagatattcctcgttaattctccaaacaaagaatgaacaagaatttgtcaaaaaacagatcttatggggaactattatttgtctgataatgccaatcaaacaagcaacatttctcccatctgtcaaggtacccctgaaagagactgaattacttcaaaccaattgcatatattttaaataaatacccggaaccatcgaaaaactgattctccttcttcaccgccccaatattttttgtcaacacttagtgtagttccttcaatgtgagttccaactatttgtagagaaatcaatcttggacttcctaattaccaaattgcaaaagtgaagtatgagttaatatcaagcatcaaattaaaagtgatcactctagaagagtcatatagtagtctgttgatcatgacccaccatggtgggcaattatattgcttttgaaaatagcaaatgcaaataaatgtcctttacaaaatttatgatgcacgctaaaaaaaaaactgaattttgaatgtagagtaacagtataagccatagtgttgtatatattatgcaaatgaagttctctatgtacaagaatataaaacatgcataagctcagcaccaaatagctccttaacagctacttttattcaatagctgccatcttaagagaggaggcatgtagcgtgctttaaagatattgcgttcataaacaggggttagtataatataaacccacatagttaaatcctctaaaaagaatatttaacttacccatggataaattcaaaatacacaaggatgaattcaaaacatacaaaagtagtgaaataaacaaaattcattgtgaatcttaaacaggaagaataggttttagtcaacaagttactaacgcagatgcaattgttaagattttaaataatggctctcatgcatcacaggacattagcaaaaaatactataccaggtcgaatgcgttcctgccccaagcatgttcttggctcacccacagttccatcatcacgcactggggtgcattcaaaagaaataaattttccaatggcatctttggtaatacgatactgaagaattcctgaaacctcatttattagattaccaggttcattttcaacctgcatattaccaaaacaagttagcagagtattacctgaaaaaagctagtacttaacaaacatattatgcacataaaacaccattcaagcaagaaagaaaacatctattacattttttacagatcttggagcaaactatagaaccaacaaaattataaatttagctatactatatagatgaatgctgactaagtaagcaagggaagaaatgtttattgtatctctgatgattatgccgaaatgacctacaatgttccgttgggattaagctattgagtgccaactccaaaggtgttatgaagacacacttatattatgcaaggaagacagaacagaatacctcatgaagataccatttataaatactttttccttcatgaccacccacgtaaccataggatgctgtcaagattccaccttcagtgtaatccccagtaattgataagaaatttaagctaggaggaagagctgcaagaatgtcaaaagtttgtcagcatgacatatcaattttaaaagttggtactagggtctaaagatccaagctgagttgtttttgctagagatctagcaactaggtatttcaagtattcgtcatttgacaaagttctttatcttttctatctctttcccctatttctaaactttaagttggttgaatttactaatcatcacttcactacgttaaatgaaaacatagagattcacttactgtcaactgctctctctgatatgacgtatgctggttcaccagattcaccatctggggtcatggggataaatcttgcaactatgtaatagccaactgctcctaaaggtatccgaaatgcctgtaatgaggttggtaattagttgcactagatgtaataaatcataaaccatcaaatatttttttctgactattaagattttatgctccttgaaagtaccatctaccttagcaatctttaacgtacttaacgcttcaaggtctttctcaccatccaaagtagaagaaacagttttgaaccattgtactctactaaatccttcagttcctccagtaacgattccagtcacagtaaccttactgttctctcttatttctccaattatcttgacatttgttaccttcggaggtgctggaggtcagcaaaaaaaaatgtttgtaattacgaggaagggtgtggtacatggtgatgctaaaaattaaattttataaagataataaaacattaagcaaagctcaaaaaatgcgttgacttaccttgcttcactacattagacaccactgaaacagattccccttcttgacctgaaaaacgcaccaaccagaattgttgctaccattaaaaaagctataaattaaatgtgtgttgtttccacaatttaagttaaatgggcaaccttcaaaattaataggtatatatacaaatgccaagcgtcgtccaacatcttccttagttaaggtgtactcagatgtgccagttgagagtaacacaaagtctctgtcagtaaaagtcatcaggagaaaataagggataacaatgttcattcaaaaataaaaagtaacagcaaccaagtgaaagttaatatgttgataaaatatcaactaaagcgattttgaaaccatgccttaa

SEQ ID NO: 1298 - DNA, 2624 bp, Cannabis sativa
tacttaggcttaaattatgcatactttcatttatccagtttgtgaatttttaaatttccattaggatgttaaagggcctcaaactgttgctttcaatctaccaaatgacgagcgcatagtaaaagaccgtggaacatcaatggtgatgcttaagaatatttcagaggccaagtatgaagtttcttttcacaatattgttcagattgcctaagcatgatgaatttattattcccagccattttcctttgcttactaatattaagttctctatttttaaatgagaaatatttacaatagctagctgcctaatccaggttcaagcatattcttgtgcctatagctgatgcatgtcttgtagaggagcagcaagagcttgttgattttgattctttcttcactcacaccatttgccatgagtgctgccatgggattggacctcataccattatccttccaaatgggaaacagtctacggttagattggttagtgacgtgattaaacttgttaggtgtttacttttcctaattatcaatcatgtttcaaattttttttgggggtggtatatttgaacttagaacactaatgtggagatgtggttccatgaggctatctgcaaccattatgttagctatataatctaatataatgtcatcataagaaaaattgatatattatatgcatttaaatttataattggtgtctttaaaaattgacaatgccaagtgtgctgtataatttactttacaccgatcatgtatttgccaagtcaagaagattttgactggggacagagttccttaagttattctaatggttaatagtgacattatttggttggtttacataataagctgcagggtaggaatatttgtagaatcatttaactaatttcgatttaccatgacttttcttgccaaatgcaggagcttcaagaagtccactctgctttggaagaagccaaagctgatatagtaggcctttgggcactaaggtttctaattgatcaggtaaacaactcttaacttggtcatcatattacgttcttttgattttattagcggtattgaagctaataacctttacaacatttgacctgtttccatgctattgaattgtactgtaaaagcttgactggcgattgatgttgttttagtatcttattgcgtcaatttcaattttaatttctcaaatatagcctcattagaaagtaatatcaatttgatggctaccttgagtaaacaaccattttcagtaaattatggaagagcatcatactttagtaacacgatcgtatcttttaaggtagttaacgctcttattattttcagtaagcaataaatatagagaccttggactttgttttccatccatctggcgtaccaatccaaatttgttttaatcctgctcataccacaagataaaattttacattcaatatcataaacatgctccttttgcttcataagcataacaagatttttagatttgatgtgctgcataggagaatgcttttcatttgcaaaaattgttgaactattagtgtggacattgcataactcctttcgggtttacaggatttgcttcccaagagtttattggaatccatgtatgtttccttccttgcgggatgcttccgctcagtacgatttggtttagaggaagctcatgggtaaacctaactattcatcatccttggtcctacgtcacaaaacttcttttacttacgtctgataacaataatttatactttgaattatcagaaagggacaagcactgcaatttaactggatgtatgaaaagggtgcctttgttctgcatcccgatgaaagattttccgtcgatttctccaaggtatttttccattgtttttatggtttttattttcaatttttttttcgctttactaattagaacaaatatataaaaaggctgaaggtgcagttgaaagcttaagtagggagatactcacaatacaagccaaaggtgacaaagaggctgcaaaattgttgcttcagaagtactctgaactcaccgaaccgttacaaatcgctttgcagaagctagagaacgttcaggtacgagagagaccaaacttaagtttcttgttccattttgttttctcattcgtgctgactaaaatcgtaaattttaagctaattttctgatgctgaattcttgatactttgtatatggagcaggcattctcgatgtgctaattcttgttttttccattataggttcctgtggatatagttcctacctttccaattgcaaacaagatattgaagaagcaaggacactaaatttgaccatgccattggctctttcagggaggatgtagttataatttataaataaaattatgctacaaaaaatcgtacactgaataatgtgcatgcttacttatcaaaaagaataataatttgcatgctttttagtgttatggatgaagcacacttgatgatgagaggcaaatctttcttctaataaactggcttttctctactaatgctaataaagtggtacaccatttttttctcctctttattttgcccaaattttctccaatttttttaatacaaagatttgataccattcgtatttttttatatttgaatagttg

SEQ ID NO: 1299 - DNA, 1734 bp, Cannabis sativa
ttgtttttgatataatttatttgttactctagtgtaattttttactttttggcagaaagagagtgtagattgaattacgagctttgtaaaaattcaatttctctgaaggaaggagcctgtaattttaataaatacaattttcataaaaagttgagggggccattaagatgcaaaaacaaaatcttggagggagccattaaacaaatttgaaagaaaaatttccatttctttaaatatacaacttgatttatgaggggcaccatgcaaaaacaaaataaaaataagtaaaatttacaaaattatcactaaaaaaaattgtaaaagaaaaatttgggggaccctatgagctacaatatagctcgagtcttgttattctctctatctttttctaaactctcactattatccttccctctctcactaaacatagttttaaggtagtttagctagatgacaatctaattgcgaaggttaactacatattatccacctaaatacacaggtgaggtgataccttttttagctttttaagattttacagttgatttatagaagagaagtgccttaaggaaaatttcaagtcaaaatatacagatataaaaagaggatttgcctacttgattcttgaccatctttcatttatatccatacaagaaaatgaacaagacaaacacatctcttaagtaggacaaaatcataagagtttttattggggataaaaatggcacaactcaataggaaaatatactcattaatgtaccgaagtaatgctcaaaaatcaaaggagaatttccatctcaacaaataaaaaagaattgaaaaaaaagggggggagaagattacacgaggtgaatacaaaattacatcacaatcagtggcggcatactatataatatggtattcacgcgagggaaaaacaatcccacacgacggcatatcatctatatacggtgctaatagtaagtcgctttgaataataagaagcaaacacaaagaagagcaagaactactacccggctaaaatgcactccaactgtcggtgccttttttcggtgtttgactatccagtgatgtcctaaacggcgctgaagaaccaaaagggtctgatcttggagtttgactatccagtgatgtcctaaacggtcctgaagaaccaaaagggtctgatcttggagtttgactatccagtgaagtcctgaacggcccggatgatccaaaaggatctggctcatcgaaagatgggaatccatgactttggtcgaagtctctactcccgcgcattgaatcaaatcttgagaatgtatcacttggtggaggaaagaatccactgtcattggtgctcctgaaagagtcgaaccttgagaagctgtcaaaagatggttctgaactctccttgaatcctggtggtgaattgcctagattgtagaggggtgtgctcggaacagaatcgtcaaaactgaaaggccggctgttctgtgagaaagcattggcttttggggaggacccagttctaataggattgaggccaaaatcaccatccccaaaaaagaagttgtcaccatttctttcatgatccttgttatcctgttttagagcgaaattaagatatgaagcaaagattttaactagagcacaataaagtaactaaaaacaaatacattatataaattcaggccaatcagcttattcactagtttacaccactgatttggtcaaagttctcccctaaaaact

SEQ ID NO: 1300 - DNA, 4834 bp, Cannabis sativa
ctgtagctacaagctctaagaccgctaagaagaagaagatgactcttaatgagttcatgactggttcaggagccggtgccggagacacggggttgacacatgacgagaaactccggcttccgactggtccaaaggaaaggtctgctgatgaaatgcagtacggtaggggattttcaacttatggaaggtctgggtcgatgcaagggggtaggggtcgtgaccgggaggatggggatgggtcttggggtggtggtggtaggagatcgtatggtggaggatttgatgaggaacgtaggggtccgccttctagggtttcggaattggatcaaccttcgagggctgatgaggttgataattggaaaactgaaaagaaatctcttccttcatttgattcgggtcgacaaaatcggtatgggtctctgggtagtggtggtggtggtggtggtttaggaggaggtgcgtctagggctgacgaggttgataattggacatttgggaaaaagcctcttcctgttagatcttctacatttggttctggtggtggagggttccgtgattctgagcctgatcgttggaataggggtggtggaggattccgtgatagcagcggtgacagggaacgaaccagattggttttggatccaccaaaggccgatactggcttgaatgaaccgttgccggtggtgaagaccaataagccaaatccatttggggcagcaagaccaagggaggagattttggccgagaagggtttggattggaaaaagctagactctgagattgaggctaagaaaacaagtaggcctacgagtgcccattccagcaggccttctagtgcgcaatccagcaggtccgagggtcctggtttgcatggaattgagaatgtggttaagccaaggcccaaggtgaatccttttggagatgccaagcctagggaggttttgctggaggagcgaggtaaggattggcggaagattgatcttgaattggaacacagaggcgttgacaggtcagtgtgcattgtttgtctatttggttcataaaatgtcttgggtttttgttaagaaagtttgtttctttttcttttgagctttaaacaatttgcaagtgcatgcatgcttttaaatatattcccatctcccttgaattatctaccaattaaccaatcattgatttcgagtagcatgtatgtgttcttttccatttttttaactttgtgatgtgtggtttagtcatgggactttatcaggctttttaattttattacttaaaatactttttatctgcctgattaattgagaattggcatgtttattctgaaaacttatacggtttgtggaacttgacttttctataatgttacatattattataccttgaatgctttctatttgtgggagaagtggttttagttcactagtccttaagaaccttacttgaagacaaaatttaatggttacattgatgtttgaaaccagtttctccttttatatcatttagttgggttaagcacgtgaaattcaggttaatctccttccctccggagaatatcagacaattcaagttagacacttgtgttttagaggttctaggttgaaataaactaggataatcactagtaccacaatcaacttgattagcattattattcctgaaatattagtattaattaaaagcatggttttgctcgcttatttctcttgaatcatttcattttctcgatgtttcattatgtatttgtttgattgttctgccatgctaaatgtcagtttggtctccgtggaggctttatgaacttgtactgttttcctttcatattattttagtgtggctaaaccaagaaagcttctgccgcgaaaataacatttgcttaggagcccttgccttttagatgattggttaacatgcgaccatctttcatgtttacctgtgacttgtggatgtatttctttacaaaatatctcgtctattggtctcttaatgaagaaaaatatgcatccatatttgaatatttgttttttatttatgtttacttgtgcaggcccgagacagaagaggaaagattgttgaaggaggaaatagagaatctcaagaaggggctggaaaaagaatctcctgtaaccagggaatccgaagaagagcctgctgctaaggaacaacctagtttacaagatacaattcttcagaaagaaagagagttagaaaaactgatacgagatttgaatgacaaagtccgctttgggcagaaagctgctgaaaggcctgggtctggagcaggcagggttggtacttatctagagagaccaccttctcaatctggatcatttgacgagtccagaagtacggagttctcagaaaggcctcaatcgcgtggcaccggagatgtatggacaaggcctgtggatgatagaagagcatttcaaggtaacagggaaagaggatttctgggtagcagagacttggacaggtaggcttctattgcattttaacagttttcagcaaatgagattttgatgtttcgaagatgaggaatttgattctgaatgttttaacttctatattgataggccaagatcgagggatagatggtgaaggaatctctctggctccattgagtttacggtctacttcgacaaaccaaaacggaataatattttgtctcaccctttttgttttcttcattttgttttcggaattggagccagaattattgagtactggcgctgggggaactctagtgttaaatctattattaaatactttgcaactatgtaaaattggaaattttatcctttttccttgtgtaatcaaggaatctgtatttgtttttttaggactcggttgttggtggacaatggatttgaattcccttagtttatttttttatgacaagttctgagtgttatacatttactttaactttgattctattgtccatcaaactcttttcttttctcttagtaatgtatttggtatgggagttcatttctctctcactgtacttcactattattttctttctttagacaatgtaaacagttttattttaattgcatgtatgactttggttgatgcaaggtggattggatttaacagttttaatacccaaaaaagaaaacgagtaaagggtcataaaatgataataatagtaataataaagaaagtaaaattgttgcaagtgccaagtggtcaaattatcttcagattttagctattttaatagtactattatctaatcatttgtctgggtccactactgggtgattatcattaatatagtaatttacattaaaatattatttagacttggaattggaacatggttaatgttttacatctcagatcaaattcatagaactttaatcctttagatttgttaaattttatcaataaaagagtcaaatggcagcagcaattggggttgttttactggcttcattgctgtatatatacccatcaaaagcttgtcactttcctgccatttataactttggcgattccaactccgacaccggcactgtctcggcggtgtatggccggcttcctccaccttatggtgagaccttttttggtaaaccttctggtcggtattctgatgggcgtctcatcattgattttataggtatgtcggtccatattttaagaccccaatgcaaaagcaaaatgatattttgaattgagaggtggtacccttttgggatttttctccaaaggagctatatttctgggctagcatagcataacagcatgttttttgtactatgtagttcagttcaagtgtatggtactagtgatgagtattaaatggtatttctttgttgaaattgacactgtttttgctcttctttttcagctgaacatttgggattaccatctttgaatgcataccttgattcaattggatcgaatttcagccatggagccaactttgctgcaagtgggtctacacttcaggcagtaaatgccaagttatatgaagctggttttaaccctttttctctcaatttgcagcttttgcagtttgagcaacttaaagaccgaaccgaagagcttcactcagaaggttaggacttttagctagtaactgactgaaatcaatttgatagtgcttaaaagattgtattttttggggtttgttttttttagctaagagctcccagatcacaagtaatctccccaaaccagaagaattctcaaaatccctctacacattggatagtggtcagaatgatcttcactatggatttatgaaattgacaatggagcagttaaacacatccattccctacatagtttaccagttctctctatccataaaggttagtttgtgtccatatcagttacttttttttgatatatataaaagaatatgagctagaaatcatattgatttttgtcatgttgccttgactgtttactggaagcattatttctttaaatcttcaactgagttcatcaagtaagatcatctgtttttcggtactactgtctaagcctacatttttaatggaactgattcagaaactatacgaaaaaggtgcgaggataatttggatacataataccggtcccattggctgcttgccttattttgtgattacctttccaccaaaggctgaagatactgatcaaattggctgcataaaatcttacaatgaggtggctcaagaatttaacaagcagcttaaagaggaagtgtccaaactaaggactcaactctctggtgcagctctttattatgttgatatctattctctcaagtattccttaatcaatgaagcagaaaaatatggtaaagacttcatcatttagctattaagtttcatatatatat

SEQ ID NO: 1301 - DNA, 555 bp, Cannabis sativa
acaatgttctccaataccctcaataatatttaatgcactaactaattgactgaactcttgtttatagatattcatcacacctacgcatgtataaaaaaatgaacacaaaaagaacaaaaattagagttcaaaaccaagttcaagaaaagtcacaaaaacatgtacaacggtacaaccgtctacatgtggaagttaatcttccagaacatgaatatcaaaattaactaactacgcatcgttaattgaaatcggttattcgatcacctcaatttttaattataacagttactcatatttcttctatgacacattatatataaaaaaaaattcaactccattttatttcgattgtaacttctgttagataaagagttaggtagagagtgttagagaaagttaagagacaatcaagtttgtggagagtaataactctagggtgtaatcgggtttggggtgaatgagtgaaattgtctttctccacctagtacacaaggtgtaatcaagtcaaaactaactcaccaaaatcaaattaaacaatcctaaataaaactcaaa

SEQ ID NO: 1302 - DNA, 2873 bp, Cannabis sativa
caaccttctccttttgaagtgcatgaagctgtctgtgtaactcttcaagctttctcaaggtaaaatcagtttcatcaattgttgccgatggaatgtattctgcagatccatatatctcattagaaatatttcgtatctcctctaaaacatctaggaattgcttcctcctttcagatttcctctttcgcatttcctctaattggggaagaatttttctcagttcttccttcaagcttccgatactttgatcagactgcaatagtggacagattgtgagcttcaacaaaaataagttgtgttctagtagatcataacattttaactaacccaactattcaaatcatacaatagtatcccaatcttgtaaacatccagggcacattagaattttcttgattagttcaaatatgggtgataaaaattgtttctttagtcaactgttccttcttgaacaatcatgttctttcttatttcaactattttaattatcaaatgagctgccgagataaagtaaaacttgcaaaaggagcataaacttcttcacattagtgtcactctccccaatcagccacatgaggaaggcataaaaggaaaacacaatttctttccatacatactaacctgcctaatatgtactggtcgctctcccattgcagaacatatagctgccaaatctgcttcggcatctgcaatggcttggcgcaactgagccctacaccgattcgcttgatctacctttcttcgataaacttctagacactcttgttcgagctcaagcagcattttatccctatcagtgtcagtttccccaacttcatcccaaattatctgattttttattaagacgacaaataagttaactatcttcattacactatttatataaatgtatataatatacttgtagatttaaaatagaaataatataataactgaaaagttggggagaaacctgaagctcatatagaagtgttccacatgttgtctccacttgttgaagtgggtcaagttgaacactagacatctttaaagtgttttacctggcacaattcttcacagttaagcttatgaagaaagaagaaaaaaaaccaaggtttacagcagaaaggtagaacattccaagcatatcaattctctaagcagtttttgaagttttgcaatacataattcccagggtttttttttctttggtagagtagaattcccaggtttggtataaagaacagaggctttcttttttgtgttattcaaagcatacgaattctccatagctgttgagaaagcagaaattgctaaagctaattaaaccaaagtaaagagagattatccctaacagaaggaaaatccttccatgaagatagaccctgaaattgggaaaacaatttaaatagctaatctatcggcacaaacacacacacaaaaaaaaaaaaaaagttttcgtcatcttacccgctaggatgaaaaatgtcagaatcccccgaaagaaatctaaattaagacagatccaaatcattcccccaaagattcaaacttcaaaatgagttttacaaaattttgttcattataatttagctcaaagaaattcctctctaacatcttagagatcaccagcgatcatcaaccataatcacaacatttgtttggtgaagaagctcaaagtattgttaatttttaattaaaaagaaaaaagaaaaaggcaaatctagaaagatagaaagcttctcgaatagtcgagcctttaggttccaaaaaaattgcaagagaaaataaataaaactaatctataattagaaaatttggcctcttccgttgagttggagcatatttctcgcgaacatggccagataattgaaatagagagagcaaaaaaaaaaattgaagaagatacacacctgatatagcaatctcagtacaaaatcgcttttgtgtacggacttttcctgagaaaatgaggctatggattttcttgaatggaagctgtaggagggaaaagaatgaacttgagatttgaaattttggattacgagacagaaggcgtgtattgtatgtatgcaaactggacctggagagagaaagcgggttagatagagagagattgagaaaagtagccgtttgaatggagaaaagggaccgttgagacctcttaataaaatgttcaagttcagaattgagatttaagatttgctgtgcatcatcttaaaatatttgaatttcaaatatttcttaaggggacgactaggattcagtgtcacgcactaaattttttcactataacaggccaattaagcttcgacatgtcagcatgtaagtaagtacattacgcttcgcccgttaatatttgaactctttttttttaagtttttgaatttttttttttgaaccgagaacttgttttcaaaggaaaatacatagaacttttagttcgtatgatgattttataaagttttttattttttaccattttacactgatcttttatttctcttttatcgttttatttttttgcttcatattttataaatggaaattggactctgacaattttgtaacgtttttataggtcttaagtttaaataaataatttcattaatgttctctaattatacatttccaaattatcctcaaaaatatgtatatttcaaacaacaacaacaacaactcttgtagtgaattagaagttgcaaattttgtaacgttttaaaattttaatgtgcaaatattacttcaattttaaaataaataaacaacaataaaatatatatatatcattaatttttttttttttgagatatattattaattattttttagtaaagcattaattaaaatgttgaattcacatataaattatatttggtaaacttttatgaaca

SEQ ID NO: 1303 - DNA, 2903 bp, Cannabis sativa
gtcactggaaatcaactatttgaaaatgcatgattacctgacatcttattccatttatctcctaaaactcttcccacttcagtgaaggaaattccggggttagttttcttcacattctgcagtcagcaaagataatggttagtgaccaaaatttgttcccatgaccagtgacaaagtacatcaaaatttgcaatgcgggaccatatggttgagacagaaggaatatgcatccaatactctacacaaacacaaaagataatgacagatatttagataacaaacccacctccctttccatttgtgagaagaacatgaagccagacaatgctcttttgggtgcatttggatcctttttcttcttctgttttttcttcttcggcccatcttcatctccatctttagatttcttcttggaagaagatgccttagaagatgaaggttctttttttgtatccttttttacaggcttctgaaaaaggtcatgtagttgatttgagaataacaaagattttgaagagaaccttcttagtatgcaaaaataataagaaaagattccatacctctttctcccctccactaacactagcatcagaatcatcttccccagaatcatcagtcggggaaccagaatcatccttttcggcaacaaaatcttcatcctgtaaatgttcaccgtgtcagaacatttaagtggattagcacatcaagggatacccaacagtggttaacagacaagcaattttatactaaatcagagagcataaaaaaaaagatgagagacagatattaaaacaagcacaaccatcacacccataatttgggaaaatgtacatgatgattactttgaactcttgaaactaagttttacttttctttgatattactaccaacttatatagtttctttcttgtaccttttttttttatccaatccaaatcaggaaaaagaaaacatattaagtataccatttatgtgtagaaacaagttgagcctggatcattaagtactaggaaaagccctcaatgatatagcccagctaactaactcgactacatttttcagcaatgatattgtgacacttcctcattttaaataaatataagcgtacctcttcatcactttcatcatcgccagcttcattcttaacacgaacaagatgtggatcgacagcatcatcatcctcatcttgaagaacagatgccacaccatctgtaggtcttgtatttcccaaattcatgatcttcaaaccttttccactgcatcatagccattggataaagttaaaactgaaaatagcaaaatagtctttatcaaagtaatgtcttcgtgtactgacctcatgaagtcaaaaagattatggtactcattcctctgaatgtttcgaaaaagatgttcttgctccgttttaagtctaataagaagatcgaagtaatgcatatttgagccaccggcagcatgcctttcaaattccacatagtcaatctagaaacacaaaccagtaaagctccaattaatctctggtacatacagaatagatcagcaatacctgtatcatatgcaaagacaaccttaaaagcatacctcctcgtgaagaataagggtgggaggcttaggtagaaaaaagaagctcttctcaaggggatagaggactccatcttcagcttttagtgatgatttaactgcatatccatcttgacaactacggaactttcctggttttgtaactttagcgccagataaaccacgcaatactgtggtgaatacctcatggatgagtccctattcattcaataatgtatgtcaaaagctagtcacatttgaaacaactttaatttacttgaaaaaattagtgagtatgtcaatctattcagttcacctaaacaaacatatgcaacacatggcatgtatttttcttttaaattaaaacaataataagccaatacctaccttataagatggttccaacttgtccttatatttggtattcaagagatcctcactcattgataggtcgctctgaactacagtttcagtttcaaactatagatgacagaaaagtaaaataaataaataaataaatcaagcagaatcatgacaatggaaagaatgcaataaacactacctgcaaaacaatgtgtggatacaaagtttgtcctttacgaattggaggatcaagagtaactacaacaaatgtaaatggctggttggactgcagaaagaaaaagttcctgctgttataactaacatcacgatgactggtgcattgagcagaggctaccagagaaaaacaacaagaatggaggaagaatttgaaaatgcgcataaaaatcttaatcagcatccatgcagaacccctgctattgaaacgaagagtaataccttgggaagcaaaaacaggcgaacaacactgctatactgaattttgaagtcatttgcctgcccttgcaaccgcagaaatgacagatgaagttccacactgtagcgccccctacataaagcaagaacttgatcaaatataattctgaatcaaaagtttttgcttgtgtgccagctagtatgtgtatcgagaaaaatctctacttttcagtttagtagatatacctaggtgtgaggatagcaataccctcaaatgtaacaacagcgtcttcaccaccagcaccaacatctgccattgacataattttgtcacgaaatacctgtcaaccagttgagtgaaagaaattgaatatcaaataatcaatgtcaaaacaattctaccacaaaaatagtgagctagtcacaatctaacctgggcaggagggcggttttcatcaccaacaaattgagtgttggaattaggtatgtgaaaactaatctccatcaacgaatctttctgtgatcattgaagattgacaattgcaagc

SEQ ID NO: 1304 - DNA, 2946 bp, Cannabis sativa
acactgacatgtaatgtgacgattgagcatattaaaagttctaaatcaaatgaagaaagacattctaaaatgtattacgttgacgatgcacatttcttctcatacattgactgtgaaaatgcagcaagcagtactgataatttttgcactttgtcttatagttaaagttacaaaataatgataatataaaacatttaaacaactattacctcaagatattcattaaactctgcttgcttcttggctgcttcagctccccaagcctgctgaaacatccgaccaagaacaaatacgcccacagcagtgtatctgcaatagaaagagatgtgaagcaaaccacatgttaacattaaataaaccaagaaatgaaagaaataaatctgagtatatgatgaaagaaataatcagtattctctacaacatctttatcaacaatttaatgtcaaaattcatttcaaaacatgctcagctatcagataaacttgactataagctatcaaagtgtggaaatttgctataaagatcagatttgaaagactatactaccatagtgagtcaataagaattatttagccacgattttgtgtttattttcaaactttaagttgtaattttattataaggattcgccatgtatatccttgattttcaggtattaggagatcagattttcattttctggggtattttcgtacatatatctagcttgcaattggttctgatataataagaatttcagagtcttcttctctaaaatcttcaattaacaaatgctcctatcatttgggccaaaaagaagaactttatattccattatttctttttatttttctgatttgaaaggatattgtgtgatttatctttattgttagctagtcttctccttgttctattctgtcttcagttttgatgttatggtgagatgtgggaatgtttttgagcatgaacctcaagacactctgatctctaggtctggaagcattctcctctgtaacaagttcaatgatcagccatttctgtcattttaatcgagtactaacctgtaatttggtcttactgaaaaagtaggagaaagattatgtagctttatatcaaagtttttgatatatgtttaaacaatttatcatcctcctgagtttatggtttttttttcttcttcaataaagcttaaatctgtcatcgacaaagtacataatatattccttcctaacaaaataacatggaaagcatttaaattttatgtctgaaataagaaagaacatagacagattcaaaagcttaaccatacatattgccgaagctgtttttcgcgtatgctccaccctcattaccagcatacataaataaagagccagagtgtttaagtgaaacctgaatcatttccaatatatccaagtaagattaacttactcaagcaactagtataatttatacaacaacaaaaacaagaagaggctatttagttaatatcaacattcacaataaagccacaaaaacaatccagagatctaaatagtctctttcttactaaaacaaaaactcaatgaaacaagttacctccatggtagccaatccttttgataccatttctatcatccttgtccgaacctaagaagatgaaaaccttatccagtcaatcaaacttaacattcatgataagtccaagttggaatagatattctcatcaacaaaaagagcacataacaataacaaacacatagtgaactaattacacagacagcaagagccttcaaataaaaatgtacccggcaaagaaaatcagtaaactggcattaaagaagttccaatttaccgaatacggttgaaaatgaatatctgaaacaatcagggtatgcaactaagtgatagaaaatgtaaagaaaacataattcacctcctgatcagacttctcattttcaaatttgggatagaaagtagctcttatctgtgcttctgcataagtagagttgtccactgtaaaactttccaacaaattacccttgaaaaacttactcaaaccaatgctgtttctttgagtaagtgaggtttgtcctaccccactgccagggttgagaaccacagttttatcaacaggttttttttcaacctctactgcagtgactccactggctgttccataagatttaggcttccagattgttttttgaccttgctgattcccctgatgaacattcccaatcagcccagtctgaacaacagacgcattaactggtccactgcttccactgacactcaacccatcaagtctcttagttacaccttccacagaagaagccgatgaaacctctttatctgcagctaacaactcaggtttcgacttttccctccatttctgctccttgtgattatccgtatgctgaaagtttttatccacaaaagtcaaacaaagtaaaacacacctaaaaacccctgctttttcatcatcattagtattggcattaaaaatacattcaagaatccaaatttctccattgatcgattaataattacatgttaaaccatcgcaaaaccaattagacaattactgatacaaaaaacaaattagcaacaattccaaagataaactagctaagaaaaagttaagaaacaatcataatcatcatcacatgaagaaatggctagtgaagccgaatctcccaaagtaaaattcattgatagaatcaaacaacaaaaaagctcatagaataataagtaccttgttgcgatacataggagaagagaatgagaatgagaatgagaaggagcgaggtagggttgcgtaagaaggagatgaacgaaggaagagaaggtgtctgaatttgagtaaagcgagagaagaagaagaagatggagaaagagaggagagaatcctctgcgatgctgacattcagtaagtagcgtagagacgcaacaccattagtaagactagtgtagaagaaagtggtg

SEQ ID NO: 1305 - DNA, 979 bp, Cannabis sativa
gccacagccaaagaccccaaagccttgatagtctccaacaccaactgatcagctccttccttaagctccgaatctatagcctccaacaacctctcttccctcaaaagtttcttaacataaaccaccaagttcacgtcctcttcttctctattaaaatcaatggctttcttcgaagtcaaaagctccaacaacaccaccccaaaactataaacatcactcttatccgtcaattgaaaattaatatagtattcagggtctaggtaccctaatgtcccctgtgcacaagtagtgatatgactcgtttcggttaccacaagcctagagagcccaaaatcagccacttttgcatcaaacttttcatttaaaagaatgttgctcgatttcacatcacggtggtagattcttggtatggccgaggtgtgcaggtatgcgagaccttcagcagtttggtatgcaatggcgagccgtctcctccagctgagcgggtctgtcttagcgtgacggttgtgaatgtgatcgaaaagggttccatttggtacgaattcgtagactaaaatgggctgcaagtcaagctcgacgcagcagcctaggagctggactaggcttcggtggttcacttggcaaagaatgcgaacctcattgattatttgcgcggcgcccttggtgctgcctggcttggcgcgcttcactgcggtgactctgccgtcgtccaggacggccttgaagacctccccgaagccgcccgagccaaggaggttatgtttggagaagttgtttgttgcttttgttatttctcgggtgttgaatatcttggctactgccattccattgttgctgatgtagtttgcgtttagcttcatgtcttctctcattgatatatttgctttggattccctttgaatattgtgctctcgtcgcttgtaaaccataatcattgttgtcatgattccgataagaattgcaaccccagcaaaagcta

SEQ ID NO: 1306 - DNA, 2135 bp, Cannabis sativa
attgattctcatgtcctctggtgtggccatggccaccagcaagattgccttttctgagccaaatgtttcataagcccatgtcctcacactacgtataaatttaacagctgccataccattgtttgcaattaaaatactatggattggcttcttgccaccaagtgcattacagaacttatcaacttcagaaacggcagcaggatgcctgattaaagctgccccatttacgtatccatttccacctagaacaccagccattgtcgaactctttcgggcttctaacatactgcaataagagaattatttgttcaacaactctagtaattgaatggagaaaaacaaaagcgttttactcctaattcactctaatttagtcaaatctattttttacaagaaaatcagcagtggttctatactgcaactacctcaattacacaaaacacagttgatgcacaaacatagttctccaacaatagaaattattcgttaacagtagacattttctagtgatcataaccactttccccagaataataaaaaaaaagtgtgaaactttctaagatataattgcttttagaagtaaatttgattgactgtacagtcttaggatatgtaatatcacatgaacatagtttaccacgaaaagggtaccgctcaaaaattaataatttagaaaaggaaaaaacttaacttttacaccaccagcataatgatttacatataaaaaccctttttataaaaataaaataaaagtggaaaaaacatgagtcccaatcatagcctactcagatttacaagctgcaaaagatgcagtctttaaaaaccacaaaaaccagtagaaagtataactagaatagttctaagctaggagaaacacttacctcaatgtccaaattaacacatattaagcaaaacgcaactgcccataagagaattaaagaaataatctaagaaaaaactagcacagacctcaatgaaagtggaacttaaaaattgaagaagccttgaatcaaattgcttcaaatctctatgtgggtatgaagcatattgaaccaaaaacggaaaaaggcggtgttgaaagtgaagagaaccaagaagaagagtgtaaatgaatgttgtttatatgatgataatgatgatcatgcacaagacacaaagcacaaatcttgaaaaagcttaatagtagttataaggaattgcagcgggtaggtgtgagtttggggtcgggtagcaagagcccgtggggtcattcaagtttcttaacgactttaaatgagattcgcacgtggcacttgctccttccacaacgctcacatcctcacttacttactactactactacagctactcgtagctcccatctacccttctctctcatttcttcaacccaattttttctactctttttaaaaactcaatttgggtaacctaattttttaatacaacttcatgaatcaacccaaaaaaaaaaagggggcaggggggtctttgttatgtcttgaccaagagagttgggtggtttagtcgaccaaaccaaaacctccaaatgttccataatgataaatatatattatagttttcttgttacacatatatttaatatgttatatgttttttactaaaaaagaaaaaaaaaatatattatagaggactgggtccaatattttagtgtgtttttccctttaaaaataacaataatgcatatataggtaagagttggattagtaaaacaaggcattaatattgcaaaagatggggatgaggttggatatggttggaggttaggtctatccatgtcatcctttcccttatttttgttgtgagctcatatggtatatttaataagaagggaaggaaaagtaaatatagaagactctcttttgtatcaaattatttacttattagttattaggaaggagacgtttggttgggaatataaacatgagataaataagaaagagaatgtgaaagggaatattaataagaatatgaaattaaattaaattaaattaaagtcagaataaatagtatttttgttggttttccaaattatgatcggttcatatgtgaagcttgaatggttgttaaaaattccttctaacatatttgtgtctccgaacattgatcattgccaa

SEQ ID NO: 1307 - DNA, 2206 bp, Cannabis sativa
gatgaaattctctggaactctctagcggctttcctttttctctagtctttcgtccagtcttttgttcatccttagtgatgtgtaacctaattgtgattctatccctcattttttagtttctttccatctttaccctttactcatcatcaaacagcatttactctcccctgcaaaaatatcatgcggtcaccttcatttattactctcagaaatcccttggttcctctcctccttcgcatcttttcatgcatttaataaccgacttttttctcttcaggcagattttgatcatcatggtacctattttggcaaggtttgggctaggacaagcaaggatggttttggcatctcctcgacttccctatactccctttcttaggtattcttctcctagtattttctatttaaggctgttatctccaggcattatcttatctgttacctatattccttttgttcttctcttccttctattcctatatatctcgatggctatgaatactagcacccattctgatgttgttgttcatctcacacctgaggaaacccttgtgcatgagtttgaccatgtttccctcaaccctgatcctcttcctcagtctttctgtttagttgttaaaatccttactcctaaacctgtgaaactagtgtgggtgagcaacgctatgaaggaagcctggaccgtccgtttccccttaaccttttctgagtactcttccagactgtttcttgtgaggtttggttgtgaaggggatcactgacgggttgtcaaaggacaaccatggcattttgacctatctctaatggtttttgccatcccaaatggttttgatactcttctacccaaccaacttctctatgttcccctttggatgcaagtacattacatcctttttggcaatagatctctccaacttgcccaatttgtagttgatacagtgggtgatcttattgagactcatattgcttctctctatgatgtagtcactccattcatgagagtttgagttctttttgacatcaccaaacctcttcactgagggatgaatgtcaagttcaggaaattggccatcactaaatggctcaaattcctttatgaaggtcttcaaaactactgttgtcactgtggaaagcttgatcacactttcaacaagtgtgagaaattcctcaagcattgtgatgatcttgcttatcctccatctttgagttacaaagatactcttcgtgcccctaccaagtccatctataaaaagagtatttttgaactttctaactctgtccctattgaggaatctcataatcatattttttcctcaagccaaagccttcaagacgttgttgatcaattccttgtcccaaatattgctaacacctcacttttcactacttctacccttagcgttgttaatatggtgtcaagttcccttcctcaaactttggtggttaactcccaccctttgtccttaagtcccatgactcactctgtttcatgtcctattagctctgctcctattattgtttctactgttatctcctcaacctccaaaggcaaaggtatcatgcatgctgaccaacagacccctccctctatccctatttcgattggtagtacaaaaaatatttcctgtactaagagaactttctcaaggtagaacctacaagtgggatcctctgtggttccccctatgtctgattcagatggccaagcgggtgttgctttgcaaccctgcccagaaaaataagtctgatcagttggaatgcccatgggttagggagtccccgtgcatttcgtaacctctcccgtttggttactcaacatcgacctcaacttctttttgtgatggagaccaagatggctgcaaactctagttctaagtttaaggtttccttgccttttgataatgtatttgaggttcccaggaatggtttgggaggtggtttactactcttttggaacaatgtaattaatataactattttatcttactctttgtctcatattgactgttttatttctactgctgataatgtgaagtttcatttatcttgcttttatgcttcccttatgttagctctaaaaatgattcttggacgctattacatcgtttatatgattctactcctaatgctccttggcttattattggcaattttaatgattttcttagtctcaatgatcgtaatagtgttcggttttgtgccctaa

SEQ ID NO: 1308 - DNA, 1880 bp, Cannabis sativa
tcagccataaaaatcgaaaataatggatcgaggactgtaaaaccgtagcataatatatcccataaattactcatgcataaataaaatgagacaaaatacacacatacaacaacgaagtatctataaacaccataaagtactcccaaatgaacaatgcagaccagagaaaacaaacacacattaatttccttcttttcttcagcaagttctattaactttccatgatccataaaagagtagagagtggttgatgttacttacgtgttgttggtgcagtggaaagatttgagtttgtttggagaagaattgaggagaaacagttttagttaggttgaagaagaagaagataaagaggaacaccatgaactacttataaaataaatacaatctcaaaaggactaatgtagaaaaggagaacagagaagacaaccatctttatttattaaaatccatttatgttccttcatttacagaaaaagtctttaaacaaggtgaaatccaatgcagagtatccctcaactgtaattccctttccggattgcatcgagtaaaaactttgatatgctcccaattaaccaaaggagaacgaaatactgtcttcatgtcttccgggaagatgagagccttcaagtataaaattaagcaaaatgtattaaattattagatgtgtggcaaataaactaatattaaaacttgtaataacaacaatagaatcaattatgacatgtaacaacatacctcaactttgccaacatgcaagcttagtgtgttccatggacaattgagattcagaaaaaatttcatcaaactaacaaaccaatttccgtcatagttttctggcacgtgaattatgaatgttccattcaacaaattggatgactcctccaccattgatatactaaacttaacattacccttgtaccaaaatgatgctaattttggagcggattcaattataacaaccatgtcatctttgctaacaaacttgaaactttttaagctttgatgtgagattttaatgtgcttcaaacccaccgagttatacgaatcatccaaactcaatttctcaagaagaggaaggtttgaaataacatattctactgaggacgagtcgtttgtatgccaatcacaatttagagtgagatttgtgattgccttgtacactgagaaatttactttgtcaaagtgaacaactgttagtatcaaagatttaagatttacagctccaattttccccactataaccttaggttggtaaattctcaagaactttaggctgcttaaactacgtatgtggagcttcccaccagtactcaaattacaatcatgtaactccaaattctcaagggaaggagagcccaacaacagtttatctaacgcatcactatcggcaagcagaacataagacaatgacaatgatttcaaagacggaaaactaaatgagcaacgtgaatttaacttcacactacacaactccaagatagtcaaacatactgcgttgactactactgtatcaggtaaggaatagaagctgaagttaataaagaagctaataattatctccttaactttattctcaactgcaaaagctaacaatttatccaaggggccacacaaagaactttcataatcataacaaaactctctaatctccaacctagtgataaccgaatgacccatgaaaaatattcctcttttgcggtgttgtaaataattgtccacataattggctgttaaatttaaatcagggaaatagagagtgggaactgaataccacatgagtttccaacgctttgaaagaaagcttgtccgaaccacatccttagttggaagaaacgacaatatgtgtttaatggttgcatcaggtagtttcgaaattc

SEQ ID NO: 1309 - DNA, 4079 bp, Cannabis sativa
ttttttttttttttttatgataaagtgattgaaaatgaataagggcgcatttgaaaagtcacaatgtaattaaatttgtgtataattagagataattacacgatttgacatatttgtctaactatgtaattacactataattatgtattggagataattgaggggtttcaattacgcttttcaattctcatggccttataaattttctattttaaatatcaactactaaaaaaatattttttttcttgtgtaattactatttgttttgtcaaacaagatattaaaaatttatatgtaactacctccttcttgttttttaaattatagtgtaattatcactcaaataattatactatctagtaattacattgttacttccaaacacattctaaagaattaacgatgtcgacctcccccaggataatttattgtatacccaaaggacattcagccaaaaatcaaagaccaaaataaataaaatgttgcgaaccatcatttgacaaaataatttgtgataaatttaaacattacagtattttttttttttttgaaaataaacttcattcagcaacccaaattacaaagaggcgagtcatgcggtaaagcaagcctcacacaagagagagaaacccctatccacataactctaactttgtttaacaaagcatgattggctaatgcatgagccacctcattggcttcacgatatacaaaaaaaatcccaacaacattgtgattagataataagtccccaatatgacccacaaccccatctatgtctctacacccatcctccttactatggattaattggacagcttcaagacaattagatttaacacaaaaatggggcaatcgccattgaattcccacatgtaaaccattatgaatagctaacacttcaacatgcaaatgagagagagcttgcgggagtccacagcaaaagcaaacaccacttagccaccactatcgtgaaccacacaacccaaactcgatccactattccccttcttgacactggcatcaacattcatcttcaacaaattctgaactggtgcagcccatctagcagcctgccttttattgctggtcgcagtagtagcatgcactcccctatactctgaaataaaattagcacaacattctactatgtcaatcgcctttggatgaatgtcatcatgttttatattattccgaatataccacgtatgccaagagagaactaaaaaatattccaagtcttctctattccataccttagccaactgcatctaaaaagccaaaacatgctccttctcgtgtcgctttaaacaatacaattataagattagcaactagcacaaaaattctacaaaacataataaaataatgaaagatgaatcagctttctaaataattatattgataaaactaacaaatctcaatatttagaataaaacgtctctgtaacgtatttttttattgaaaattaaacttatttactaaatcgctataatcataggccccaaataaaaaaaataaaacaaacacttaaaaaaataataaataaatttctattagtacataatttaatgataaaaataaataatatcgaaaaatattagaaagaaacaatctaaattataagttgtgaaaataataaataaataaatgacaaatacttatatgcgaaaaacagaagagtctttgatatcgagattatgagcataaaataagtcaacaaagtgaaacttataaataggattcttacactgtatgcaaaaatgaacaaaatgcaataaagggaaaattgtaattatttccattgtttgaggaattttttttacaaaataataataataataataaataatccaaaagataaaaccttacaaatatcatattttggatacacaaatcttattgattttggtcgtcttctcaaaacatggattaaagtgcagaaaaactactaggaaactaaaatttaactagaaatccaatttaattcgcaataaactaatgtcgtgacttcaatttttagatccatgaaatacaaatctcaaaaagttgaactagagttcccaaacaatccaactcaggtataataaaaaaaaacacatcaatactataacaaaatgtttatcctggtgtatttctgttgttttccaaatttctaatggtgaatttattcatattaaatcacgaagagacatgtagatagagttgcgtacgtagaaacattgttctgatttttaatgtttcataacagttgcattacagttacataaacattttgctcgctagtagatatttctccacatattactattaaggtacaagtaattatcgatcagtgacaaaaaaaaaaatactaacaaatagtttctaacatatacacattcacattttatatttttagttgcaattaagttgcacgttagttggctcgcaatagatataactgttgcattacagtttcaacagcaacccacgattcatgcttcctaggattgaaaccttcgtctgatgcaaccttcggtcccacctaacaactttcgtctgatgcaaccttcggtcaaccacccaacaaccttcgtctaattgaaaccttcgtctgatgtaaccttcggccaaccacctagcaacctacgtctgattatgtaagtaataatgtgagaggtattttggtaattaaaagcatataaaaagtataaatattgtccacatcttatggaagtatttttgtaaataaaatgtcaatttgtattttctatataataattctttaaaaaatggtgaaaataacattttattactttagaatgaatgggagtgacaatttcaccaaatatcccatgaattgcagtatttaatttagatatgaacaaactattttgagacattaattattaattgaacctaccttgtaaccatgtgttaatttcttgcaattaattttagtaaaaatttttataatactatattttaaatttttaccattttgtataaaaaaaagttcaaataaatttttctcccaattagcttggaatgtgcatgctcatctcatgcactttctcaaatccctcgtaataaggactcaacttatttataccctaaatatgtcactaaatatatattttttaagatgtaattacagcataactcttaatattgtcacctcgctagcagttaatccccaaaactcaaaccttaacggtaaaatctcctaaactcaagttctattggcacttagctctttctatcaatttttggcagttaagtatcaagttagttgtccatgtgtacatagggtaatatccacatggacacaatgtacacatgacacaatgttattggcccacgtaaataaatatttaaaaataaaataaaaattcaaataagtttacttaaaataaaaataaataaatcctattaaaaaatcattttaaaaataaaaatttctttttcattttttcccttcttctttcttctcaccctcctcaaaccctatttttcatcaaccattacccaccataactaattaaccatcatgtgcaccaaaccaccaccaacaccattaaaaccatcattaccctccaccatcgcaaccaccgttacccaccaccccacaacctatttttcagattcaaatcacaaagaaaatgttaaacaaaaataaaaccaaatttaaattaatttagattcaacaaaaaacacatttttatactaagggctcgtttggaacgtcgtattgtattgtatgtattgtattatattgaattggattatatatcatatttttatataatgataagttaaactttaatttgtactaaaatattatctatttaggtgcccataaaagttaataccacgtataattttacataaaaatattatataaaatacaattcaatataatacgacttacgaaggaaccttaaaatctcaaatctaagcccaaactgcagatttctttcccaactcttttctcccattctcaaaactccacttcgaatccaatggcatgggcgaatccacctgaaactccaactgcagtcagatgagaaaatatgaacgagagagagagagagaga

SEQ ID NO: 1310 - DNA, 3210 bp, Cannabis sativa
tgatatatgtaggcctatagttggttggtccacaaagagtaataatataattataaattatagagaaatagtcagggtcagcagtaaatggaggaaagagttccttttttgcttagccaattaatgttattatatatatcgagtactatcgatatatttggttttagctaggtacgtttctaacttagatgaaaagtcagtcaccactcactcgatcaccacaggtagcttcacgtgaaaacatgtcatcaaaattaagtatagtaattaatatcttgatatacatcatgtcaacaacaattagacgataaatcatgaaaaatgagacattaattaacattttattaggtcattttccttgacattagggagatattttcttggctatatttaacaagaagtaacaccatgtctagacacttccacactaattaattattatattataaaatgtttttattttcattttcagcttcattattagttgttaacctaatccctaaattcattataattatggcctttgtcttcatacaatcatacaatctattattttatatatttatatagatcagaagaatcacataccgcaatatgtaaatcgatattctcatgtttcatttttttttttctttgagagattttaacaatatatttacattaaaattattaatgatcgatagtgtttatttttgttaaagaagaagagaagagttatttcacatccaccatacgatgtcaaagtgtcaaacttattcatttatattaattatacagactttatataaagacctttgtctgataaattatgatccatctctgtgggtatattaatgaagtaggtcctactccttggtgagtctttatatatggttagttacattcattatttgatgtgaaattctctgttcaatgcataattattggaccattacctcagcaagtaggtttcttgatcaattacgtaacttttaattacaatattcttctccattattttatttcacgtttggataggatgtgattaaaaagattactaaacatataagtaaaaaaataaaatattagaatgaaatatttgatcatgccaatacgatttgtttttatttttaagctatatcatcaaattatacgggaagatatgaaattcacaatacaaaattagccataacccccatcccatctaaaaaaaatatcctctactacttgctaggaagattaaattattatttatttacaatataacaaatttacattaatttttctctaatccaaccttaccctccaattatatcatacatgtattagtagtgtggtgttcatcatcgtgtatgtcttttataattataacacaagttttatttatttatttaaaaaaaattaatatcattttagattttatatattttgcaaaaattattaaatttattctctatttagttaaataataaattaaattatatatttttcaaaataatataaaataatactttgaattcaattttttttaaatataagtaatttgaaaataatttctaacataatgtagaaaatttattcaatcttatcataacacctagtttattattaaaaaaaaaattgataaaaaatcaacttggaatattattgtgtactatttaaaaaaatatatggtttaaaataatcgtgttttaaaaaaatataattttcttaaataaataggttataaatatattactcatttaaattttgtattttaaaaaattttaactttaaatttattcggattttgtaaaaagttaaaaataagcccttaaactcaatttaaatatttatgaatattattattagatttgggaagcttttctccggtagaggagaaagtgagaaaatacttttgtcatatgccaaaatattttgacgaaaatcgagtccaaaacaactaactaatggtattattaagcttttaaaacacataaaacaaatagataattgtacaaaatatacggtctaaattagtataaacccaaataaatattataaatgtcaaaatagttggaaaagaaaatttcgtgttcctctttggttgcatcagttgatgattatcatggtcttaattttttttttaattcatttcatttttttgaacaataattcatttcaaattttaaatcaacttctttggtatgatactgtcaatttccttatatttaaaaagggttttacaaaaatattaaattttgaataaaaatttctaattttacaactatacagaatttatttacaaaaatacaatttttttgaaattactgtaaaacaactaaacaaaataattaaaataatagtggaataattaaaaaataaccgtgaaataataatgaaaacttaaccaaatacacattataaaaaatacacaatatttttgaaaaaaaattccgccacaacaacaaaaaaaaaatttaaaaatatccctatttaaaaagtattaattgaaactgtataaaagctttctgcaattttttatttacttaaaaagttaggacatttaactaaaataaagtgattactttatgcgtttgtgatattcttaatactatatcactgctcgaatttcttagtaactattttgtttaatttagatggaagagttataacaacattaagttattttataataataaaaaaatagtcaactttaattaccttatttttggaagagtaatatttatcaataaacatttcctggtatgattcattatttaagaaataaagtggcacttacaaaatcgtcctttatgggatgttttacattcggctaagtttggatcttgggtttggcaaatatgatcttgtgagcccaatgtttactattttcatattccaattgaaaaaccttgaaattaaatttcaatctatcaataataataataacataaataattccgttattttctaaacatagaaatatatacatgtagcatccacaacagtatcgatccaccaaaattaaatttttttagtaaagctacgagccaaggcacctgtatctatttaaatgcttttgtgccttcttaagtcttggagtgggctagatggagttgagcttttcttactgaagatcaatcattatgctttaaaattttgagtgctaagtatctaaaaggtaggcctttcttgaaatgtgttccttcaagaattttaatttgcggttctggaagagtgttgtgaaga

SEQ ID NO: 1311 - DNA, 1527 bp, Cannabis sativa
aaaaaaaaaaaaaaaaagttaataccagaatctgtaattacttgaaaatcaactaggaaaaagtaataactagtctggtttatttaaaaaaaaaaaaaatagaaatttggcctggtttctaaaggtcacatggctaataaaaaccatacaaaatggtttaatccttgtgagtttattttacagcaaatcataggagggaaaaaccacaaattatgtaatagagatagattcttatgtacttttttcctagttcacaattcaaggcataaatatggggaaaaacaactactacccaaattcagacacaggtaaaagataaaaatttccattatcatgtaattcatcaaagttctatacttttagtcaaagaattattatgtaatatatattaagaacttatgaacaaattcagatggcctgtcgatgtttgaactagtatgccataaagcatttaaattatgctgaatttgtactctaaaacttataatacacataaaatcatttagtatatgcaaagtaactcaagaaattagcacactatgatgacaaacctcctcatgagttgattgcattccattgctagtgtttcgagctccttaaacttgtgtccgagcgtggcatcaagatcccacgacttctcttcccatgagttcctttcaagctcagcctccccgatatccctctcgactgcctgcaattccctcttcattctctccacatccctcggattgaatgtctgttgctgcaccctcttcttcaaatcctcattctcttcacaaatcctgttcttattcacaactttctcctccaattccttctctttcatctccaagtccctctccaattcagcaatcttctccttaaacttgccaatcatctcatgaaacttcaccacatcctcttccagcatccctttctccttctcgagtacctccttctgcgaaggcgcggacttcaacccctccagctttgcttcgagttcagtagcattcgcctccaaagccttggtggcttccacagaattctccctctccctctccaacttctccagccaatcacgatccagcttctccaccgaatcatcatccccggtaatgtaatgcgagtagctatcgagggcgtaagaatgcagcgggttgtgatcggcaaatgaagtcgaatcagaccccagatgatcattaaacatggcgacttggaccagccagtggattatggcaagaaaagtgggccattgatgaggagttccgggagatctcagaatcgatttgttgagtttatgaggataatttatagatctcaagacaaaagggagatcttcttcgagcttggaggaggtgaaatcgagacaggacatgaggaaagctagggtttgagtgatgtctttggcggagggaaatgggagtttgaggaagagatttgaagagtgagaggaaaggaaagcgttgatggtggaaacggcggaagactggtagcgatggtctttgtattggtcgaaggtgaaattggatgaattgcggccgatgccga

SEQ ID NO: 1312 - DNA, 1357 bp, Cannabis sativa
aaacatagactttcaatattgacacaaataatgttagttcaagaaaaatgaactctagttcaacttattatgacaagtagtttttcattctactttcttttttaattagtgtagtccaaagtctaataaatggggaaatccaaaggaaaatatatgcttaatactttctaaattacaagatgtaaattccaatgactgaatattggaatcgatcatgaccaaaatggtcatattatgataattgctctcatatgtcgtagggaaagggttcaaaatcaaattaagccaacacccacaaatgatttatatattaattaaaagaagaagaatgaatcaacaatttgactattatgagactatatatttcagtgcaaattatatagtaaaaataaaaaaataaaataaacattggttctttgggtcatctctatagcttcaaacttaagaaaaaactatataataccaacagggttcgacgggacgcaggtcttcttgtagaccaaaaagaaagaaaaaaagaattgttgaaaatactaagtggaccatgaccaagtcacaccctctctttctatagaaatacccaaacaaacagctagttaattaatccatgtatataacaagctgatcatccctattctattaagagtccttaattcaattaacttattatatatcaccccaactcaccatcacataattatatatggaggagcacaataagaatattgtttcgttggtcctccatggatgcaagttagccaaagaagtggaattgaatctcggcgatcatcagcggaacgagctagcgaatcgctgcgacgagattgcaatgatcttcagccaagccaaggagtggctgcgccgaggtactactactactacaagtgatgatcaagatcattacaataataacatgttggtcacgcaacaaaatagtactagtattggccatagtagtgggagcttattattacaagaattgctaattaggccttcttctactactactagtattcatcatgataacaataagagcatgtctgatattgttatgaggggttttgctcatcctcaacatgaaaataggaataatatttccaataatatgggtagaaatgtggaaattcttggctcatcatcatcatcagcaatctactcacaaagaccgcgaaaaaggtaacttaataatttatatacattaagaatatttgctaaagacactatatatttttattgggataatttagttttgaatcttatatattttaatataaaataaaaatacataaaattataagaatgctcatatatgttggtgatatcatatggtcatttttgtttaatttatacatttaat

SEQ ID NO: 1313 - DNA, 983 bp, Cannabis sativa
atggtattttagaacatttctttattttgtactttgtcttataagaacattaccttttggaaagcttcccatgaaggactatcttttctgtgaggctttggaagaaccaactttgaatgatttagccataaatcttcaggtttctgcaatttggtcaaaaaaaaaaaaagctacttaaaatttcacccttttgaacattttagtacaaaatgatgaaccaataataagcagagtttaccatattggcatctggaagttctctcactgcatcatcaacattttctgcagtttctttgatctgaaaagtacacaaatatatatatatgttaaataaatcactaaacaagttacaaaatacagtaatttaatcagaacagaagttgtaaatagaatgtaaaagagttcatgaactgaccagttttttaccctcttctgcagtttgttccgggatacagtttcgaagcggctcaacatgttgactcccatctagttgtactccaataaaatactgtacttctccctgttgaacatgtaaactagctttgttaattcactttcttttgactaaaacatgaagcttaggtagttagttagttagtaccttctgatctctcataggctgcagatggaataagttccagaacttcttgcctgttttgtacaaaggactttatatcatagaaaacaatatagtttgatcttttactttgatgatgacattcctatgtagttgattttgatagtattgagaaattgagtgagaaaaaaatcataccagttttggtgtagttaatgagttgtacagtaacatctttttgattgtcaattgcatctcttatttttttgactgttgctggatctgtttcaggtccttgtaaaaatctacaaattcacatataaaaaagtactcaattcccaattcccataaaaattatgagttacaaaatattttgacacaattggggatgtcaatatagtggtta

SEQ ID NO: 1314 - DNA, 1584 bp, Cannabis sativa
cgacatatgtttttgaggtaaaaattgagaaaaaagttgtaattagcacaccttttttaaaaatattttttagtacatatatttctttttttgtaaagatttcttggtcaattttaattagtaattactattaaattggttgtttttccttctattggtttcagctgcaggagttagttttggaatgattctaattataacactgatttttttcatcatgaagaaaaagtctattctcttttggaaaaagagccaaactcatcaaaacgtggaagcctttctaagtaactatggaccacttcaagttaagagatatagctatttagaggtgaagaaaataacaaactcattcactgaaaaattaggccaaggaggatttggtgatgtgtacaaaggaaaattagacaacggttgtgatgtggctgtgaaaattttgaatgatttaagagatgttgatggtgaagatttcatcaatgaagttgcaacaattagtagaacatcccatataaatgttgtcacattattgggattttttttcgaaggttcgaaaagaggtctaatctacgagttcatgcctaatggatctctcgaaaaattcatattcaatgtgacccctattgactcgaccaagagccaattaggatgggatatgctttaccaaatctcacttgggattgctcgaggcttagaatacttacacagaggttgcaacacgagaattttgcatttcgatatcaaacctcacaacattcttttggaccacaatttcgtgcccaaaatcactgatttcggcctagccaaaatttgtacaaggactgagagtctcattagctctataatgggcccgagagggacggcagggtacattgctcctgaaatttttagtagatgtttcggcggagtttcacacaaatctgatgtgtatagttatggaatgatgattttggatatgattggtgggaaatataatgaggatattcaaagtgaaaataatagtgagatatattttccacattggatttataaacgtcttgaggtgaatcatcatgatgaattgggattggaagaaataattgatgatgaaaaagacatagtaaaagtgaagaaacttataactgtgagtttgtggtgtatacaaatagctccttcagataggccttcaatgagtgaagttattgaaatgttggaagttatgagtttcaactctttgcaattaccacctaagcctttcttgtcttctcctaattcaaagatgttttaaaagttgttctagtgttataaatattcaatattattgtgatctaaataattttctaattcaaatggaatatgagagaggaatggatattataaaatcatatataagtaagtatggttgtgtcattttcaatagagtcttgtacttagtataggcactagaagcaacattagtagtattaagatcctatcattcaatatagggtgtgaaaattttgataatgaaattataaatttgtcaattaaggaagatggggactattcttcatcttattggactcttcatcacttgccttagtaaccatgagaatgttaacactctcaaaa

SEQ ID NO: 1315 - DNA, 1910 bp, Cannabis sativa
attcatttttggaagggtgatgggaacaaatggtgtattgacaaagatacactttaaattctttcggtaatggaagggtaaaaggttaatttaattttatataaatgatgtaaagatgattaaagggcattacagagttttcaaaaccaaaccaaacaattaatggtgattccattagattacgccacaccaaacatgggctaatattcttgtgccttcaggtgtacctgtctatcttatacttgcgaataccagaaagtttcaaattaatacttaggggtgaagttgtggaacaccacaacattgccgatgatctcaaatttccagaatttatcttgtatgaacctcatagctcaggaattatggaggttagttttactgtgttgtatcaattgttttcatcaagtttcaaggatacatgaacacttatttccaagatgcaattagttaagctatgttggtatagattaagtggtgttgaactagcagctctctaacttgaactgtttgcccattatccagggtcaagttattacaactattgggtttcttaaagaggctccagatgtcagcatccatggcttctgtgtctaccatagaaatcgtctaattcttgtaagtatttttcttactttggaagttaagacaccatgcttttgatatatgtatgaatatgttccatttgacatttatgggatgtgagcatgctccacagaggctaggcatttcattatcttgattttttccttcttgtaaattccaatttgagaatcaaattctctgtattcctccatctatttctatgtagactatgtgttttaaatttacaaagtttctatagaagcatatattttgacttcaattgttgttgtacagtttatagtactctgtacaatatacatgtatttacactttcttggcctttgtcttgttgctgttttaatatattagtacttttaggtttctttgtttcaatgtaatgttctttaaaaggtttattgtctaatttgttgtattcactgagtaaatgtacagtctaatgtgaaacattttacactatcatttctcgagagcaatttgcacatttaagagatcttttacagttttgtctttcctacagcctttttggcaggtcctaagctataaacatagtaaaggaaggggagttgttggtaagaatccgctacatgtatcagatttctttgttttcaagattgcagaaaatgtgttactaatttatttgtttattttttgtttcaggagtgttggaagcaaattttattgaaccaactcataataaacaagattttgagaaaagttctctttttcagaaacttgaaaatcgtctgaaggacatgaccttagaatactggtgagcttttctatcacttttgtactgttattacatgtgaatattttgattttccttccagtactttgagataggcttcccacttagactatcaatgcttacactatgtttggtagaggggagagaaggatggagggagaggggtggagggagagggattgatgagttcctttgtttggcaagagggaaagatgaagggagaggagagatggagggagagaggggagatagactcactctctccaaatacacatattttaattccttaaaaaatgggagaatctaagaaaaagacaaaaacactatataaatgtactttttacccttttaaaaataatgtatagttgtattaaaagtaataaaatgatttaagatttattttactttccatccttccaactctactcctaatactaaacgacacaaaagaggcaactatcttctccatcactcctattctccatcctttctaaattccccatctccgctcaccttggctccaacttcttcctttcggctcaattgaagctgatgaaaa

SEQ ID NO: 1316 - DNA, 998 bp, Cannabis sativa
aaaaaaaaaaaaaaaccatgaaactcatacttaaaatttaatcttcttaccgacataatttgcttattcagtcaccaagttctaatgcattgaaaaatattgatgttttgataccattttttaggatttatatactcttgtagtgcagtatgattatatagttataaatataatagatgagttattacgttgtaaaaatctaaaaaagaaactttttgtttttacaatgaattggatgttatataacagctgagattattaaatgaagttaataatcagattgtgtacgtagtttttctaatagaacacttgtttttgagggatgttgtacaaaagttttaagcattaatgtgtttgttttatcataaggtacactccaataatagaaccaactcatgtgatttagattactaaaagggacaaaaattctcattgagaacgagaatagatggtttacaataataagaacttttgtgcctaaatcccaccaaaagaatcaaatagctttgaagcatactataacagttcaatacttcaatatagaaattcaatatctcttataccacattcaccttgaagctttactatcaataatccatcttcaacactgtagctgaattcttcttctttttgttccaccatgcaacgctttggttttgagctcgaataggctccaaatcggccggtccctctccctttaattatcattgtgtagcctgagacttccaccctgcaactcactgattctacagcccctcctgagttgtacatgtcaagcaaacctaccggagcaaaccgcagaccattaccaaagacctgccatattttcatagtttattgttaaacattgtaaaataggaatttttacaaagaggagaaagaaaacactgaccccaattggagaaattgtatagatttcccattgaagggtgacaagtgaaacttcaagacttctcttctttggcaatatagaaagagatcctgcaatacagttaatg

SEQ ID NO: 1317 - DNA, 7142 bp, Cannabis sativa
atgtaaacacttactcgaaatctcttatcagattctattgtggaagacataattttttctgaggaattcaccatgatatatctaattcatgcataatatcatgaaaaaatacaacccgaataactttatgaaaaaattaaaccaccaaataaatatattgggcgaattgaatattattctaacccgtccaaataatccgaataaaccgtataaaccgatttacatattttttattataattatttataacatattacataaattacgtttgatagttaagctattttacatttaaagtatgtattttatagtgcttattttgaaatttagaatttataattgataattttaattgtatttaaatattaaagttaaaatttagaatattaaagtatatattttatttttttgaaaaatattgtttaatactttaatgggtttattcaattcatatttattttttaacgttcatttaaactataactattttaattttaaaaagcatatactatacatttatttttttaaaatccattatttgaacaccaaaaactaacaacaatgaaaaaaataaaaaataaaagtcaatttaacgggttaaactgacgaaaccaacaaaaatcattagacgggacacttttttttttcattacacgaattacaattagatatttacaacccgacatttatattgagttgataaaaatacactataacccgatcaaaccgacccatatacccctacaatatatatatggaaacgattttgtctcgtgatgtactttcacggaatgtatttcctggtacattaaataagtctcaaggtacgttaccattttttaactataattacccctaaatcaaccccaaccctcagatcaaataactccctccatctaactgtcatacatcacgaaatacattccgtgaaagtacgtcaaaacaaaatcatctccccatatatataatcaaacgatgcagcactacatcgtcaatatttgagaaatgaatagcttttcagcattccaatgtgtttttgtcattactgttaatgcaacgtactaccttatagcattgaagtaaataaagctcgacttgatcccaaaatgagtaaaacaagataaaacgaccggagatcaaaatattttctaaaaaaacaccaatgccactaaaaaaaaaaaacaaaaaaaaaaaagctaccactcaatatgaataaaatgataccggatttacattatctgactacaagattttccttttctttttcctttttctattttatgagtgaaaataataagctagaaatttgctttgtcctccacaaacttgtgcaaaaaactcaagattgaagccttgggatcgtctccacttaccttatccttgatttcaaaaattcccttcataattcgggtgtaaagtctctccagctgtggaatgttgaagttttctgattgatccacaaaattctgctttacagacttcaccaggtttgcaaacttaacatctaacattgcaacatcaagagatccacctccctcggtaggatcagaaacttcaacttctctggcagaagcttcatcattattctgctcagcaacagatgtttctagcctttcaggatttacatccattacttctgattcctgagatggctttaatggctcttgttgtcgagacttctcttctgcagtaaatataatgtcagcaattgtaattttccaaaatctcaaatttgatgaatcatcaaagcatccacaccaactactaatgttaacaaatagagtactgccaataacaaaagtaaaataacttcattagctttactagaaataactttcacaccaaaaaatgggttcaactgctctgtttagtttacacaaaactgtacttcagttcctaaacgtcttaaatctagcaattatctcgtgtgcactagttttttcatggagagataatatgctagattttaaacagcaagatgaataaaactgtgtaactcatatatatgaaatcacagcagcagaagcctgaatacctgtatttgcagtatctacattctttttcggtcgttttagagcctcataactttgatccagatttacctctggctggacatttcgaagtcgattacttgccctagttgttcccaactgcacaacaggagttgaaggaaaagtagatcccccgaattcttctggtatattcattggaccaccttgtgctgcaatcttgtcacagcatgcaacaagagcagggtccatctgtgacagcattccatgaacctgaaaggaaggtaaaaaaacatattatgatgatgtttctttacaacgaactaatgcatttttttttgaaagccaactgagacaagaactgcttacagcatctcgaagctcatagcctctgctaacgatcctagcaccattgtaatcatctccattataactctaaatttcagacagaagaaaatgataaattatgacgaatcttgataaaaatagttgaagtgtgatgcccaatgttttgagcttgtcacagcttggaatagcaaaatcatcaaggcaacgacaactgacaggaattaatttcagcagaaaactacagagctcaactctttcatgcaggtaaaggggaagaatcaagagagtaatattgcaggcttgtccagatggtaaaatttaatctattgataaaagtttaaggaccgaaaactttaaaagttcagtaactcataagcccagcatttacttagaaatatatacacacacacctcctggagtatagttaacgtttctaaacgcaagcctcagttcaatattgggggggcctccgttgaaagcaggttctgaggcgtaggtttcaaatgttctcttttttaaaccatgatgataaaaacaacattgtaattttctttgtaattaataatgccgatccttgattgacagaataaactactcaaattttctactgtttccaacattttagtaaagatttagctctgttaagccatgaccaacttatttaaagacatgcaaaaactacaaagaacccacacctttgcattggatactatgagatcaaaatcttgaagaaatgccgaacatgtaatatactgcccagaatcaactcgctgcaaaagagtagccatgtccattgggctttggattactgaacgatagttgggagcgtcttcatctgagacaggatagtggaaggcactaaaccgtttatcatataaaatcctgcagtgaaggaacaaacatatgaataaacatagaggaatatgatgcaaaaaatgggaataactaagagagtgtttggcaccgttactataaactggtttttgtttataaaaacaaaattctgtctttaatcacaagtaggggtgtttggcattgttctcagaaagcaaattttaaaacgaagttacaagaaaattttgaggacagctaaaagttgttagtttacatcactttttttcttcagattactttgatcccattatttattacaaactttttaatcatatatttatttattatacaaacagaactttttaatgtatcaaacttcaaaggagtacaatacaaagaaaataaagaaagcaagctttaattcgaaacagagcgtataaacttgggatataaccaaactgtatgtcattatgtagccacaatgccaatttaaccttcagcaagacccagagcctatacatgtacagcataatgcttcagctcttttttctttctttttttatcttatcacacaagaactgaaagactttgattacttgcggggaagtcaagttcaatcatttatggagaaggctttaagcttataatcgatcaaaagtaaattactaataatatttttccagttttttaatgtattttaacataatgtgtctatatattattcacaagaatatgtggctcgtggcaatcttattaagctaattagatccatactttaaactggttatcgtgcctttaagttcaaacttctcttaattgttgccacccaaacacctattcctttttagtttttacaacttacagtatcctagactccgcacaaaatccattatagatagattgttccaaaattcaaacaatctagaaccatgcaccagcattacaaattacagcaatctgcccactgtttagtgctaaaaacctccatgaagaatttacgtaaggtgtttttagcttatgtcaatgccacacacaaacacaccacaacggacatagacagtaaaatgcaactaccactggagattttaaaaaaatggcagcattttcaaacattcatgagaatggttaagggctatctaaccggttgcaaatatctcttaggcacatccgcaatcggcgaagggcatgctgctcagcttctatcttggcttttaactcagagatctttggtccacttaccacttttggagccttaggaagttcaggagtagatgacaactcctgggttttctttgccatccccaccgacaagactgacaaagcagcttcaattaaatgatcaaaaaacaatattctgtcttctttagttagttcaccaacctcgtagctgaaaataaaaaagtaacaaattacgtaatatgtaggctgcagaaatgtttacagagaaataaaaaaatagataaaaatctcctcagaaggcagagtttcaagtaagtaaaatcataattgtatgctacaaattgttttatttcagtgtgaacaaataaattataaacaagatcacatttatcagacgacactttgagggtataaaaactaacaaaattctatttattaaatagaatgctacaatgaataatataatgttcaaacagggtatcaacaagatatagtctatagataagcatagaacagcaatcagtgtaagcatatatcagaaatagaggactttttatggtttattatagatgagggttgatatatattcattaaaaaagaaaacatacacagaacggagcgaaaatattgaagcagactctgaatcaatttcagcaagggatactgatgaagtcccaagtaataatataggtaaatcagatggcaattcttctaacaaggtcagcaaaacagccctcaattgctcgtgtgcctggaaaattttagtgacaaagaaacattcaattataataccacagaatcagcagcattacagaagaacaaaaataggtagaatgactatacagaattaaataataaaacagcaaaatgaagtatgcactcacagtctcccaccaaagatgaaactggggcaaataaaggatggacggtgttgttcttcttgcttcaccaaatatatgtaccaatgcctcctcaggagtctttgcactgggatcagaaagtagagatgatagacccagagaatgaacagggaacttctctagttcgtgcaaaattgcaggcccaagatgatcctgttaaactaaagcagtaagtaaatttagtttttggcaccaatggttacacatatcgacagcaagaagttccggaaatatttaccagtccagaaccttcactcccatacaacagaagccggggcctatagacaagaggaattgccgatccataggaaagtaaagagagcttagtcaattcagaagacattgcaagggggggaaaattatcaaatatagagttcatggctttaagcaaatgtctttgcaaacacggtttaactactgaagacaacggtctagattgaacagtggcacctctgtgagcagcaggagtaatggctgacatggcttcaacaaaatgacacttctcaaccctgactgaatcaacatctatgacatatttgtcatcacttgtataaacctgaggatacttttcacggaatgcacgaatggcagcttcagtgcaaagagccttcaaatcagcaccacaatatccaacacaactagctgcaagttctagtttcaactcatttgaaggaggatgctgccatttgcgggtatgtatatctaatatttcagcacgtgcctcacaaccaggcaaaggaaagttgaactcccgatcaaaacgaccaggacgacgcaaggctccatcaatagcatcaattcggtttgttgcaccaattaaaacaacttgtccacgagaatcaagaccatccatcagagcaagcaaagtagatacgatggaattgtgaatctgttcttgtttgctagacctcacaggagcaagtccatctatttcatcaaagaaaattatggaaggttgattcctttgtgcttcctcaaaaagtagcttcaattgtctttctgcctcaccaacccatttgcttaagacatcagcacccttacgcatataaaagctcaccttctgcccagcttttgatgcagcacaagccaatgccctagcaatcagcgtctttccagtgcctggggggccacacaacaataccccccttggtggggtgatatgataactggcaaagaaatcaggatataataaaggaaagaaaaccatttccttcaacgcatcaatatattctgaaagtccaccaatgtcttcaaaactcacactctcatcaacctgtaaaggttgaatatcagcccctccctttgaacttggccctgcagtttgaatcccagaagtcaaggtggccaaagcatcaccctgatgaccccaacctgaggctgcagcattcaatccccatgttgttgtcccatgcatgtcaagcccgccaaagagccaaggtggtccagatctactcccaccccgtccccatggaattgcagggccttgatccaactcatccacaagaagagagtcatcagattcttctgttcttgtaatccggtgacgcttatgaacccgtgatccacttttcctaacatccctgctaaccttagtccccattccttgacgtaaaacccttcgagtagatctagttctcggctttccttcttctagagacatacgacggactcgattcctgagatcataccgccttcttccatcttgttcttcttcaccctcttcatcatcaccatcttcctcgccatcatcaccatcttcctctccatcatcgccatcttcctctccatcatcatccccatcagcttcaacttcagcttcaacttcagcttcgccttcaccctcaccctcacc

SEQ ID NO: 1318 - DNA, 1250 bp, Cannabis sativa
gatacttattgggtaagatatttaacaaaacgccaaaatattaatacatttccaaagggtcatcttgattaagaattcaatttggttctttattggacattttgacttctctttttagtgcttatgacggtcaaggaggttattgttaaattttcttctttttttcctgttcattttcgtctctgcaagtcaatccttatgagactagagatatagtatttgtcctgctatgtgttatttaattttccttaaaaattattgttgtgttggtactaatattgatcgtctccattgagttgcagggaaagcaatatcttcaccaataggtgcttgatcaagcatgaagattggctggagatatagcctttactttacataaagacttctaaggttatttaattacttgtgtttaaaaaattttatttttctttgtcaatagttaatcttagcacgagcatctggaatcattgttattccaagaagttttatctcctaagaaacttcttattcactaatcattagatttgcagagtgaatgagatgatgcgtgaccaaaggggtaaagagaattggcaatcttaggtgataatttggacaagatttttggtgtgataaaagggttaacatggtctcctagagaaattatgatgaagattggcttctgaagagatatttttcagttcacatatatgcttgttgcactttactttcaagccttttgcaatatcagtatatacatgtataaagtcatgtttttgctatgctttacatgctcaatagagaaaggtatcgaaatgttttttatgagactggacaactagaatggttaagatcactttggttgctttgcatattttattttactatttataatttacatgttttagttttctattttcttctttcattatagtgttaaattattacaagtttgatatttttatatcgttttctctatcaataaagattgaattcacacactttatactgatacttaactatggcgacaatcccaaaagaatatcttaggaagcacattagtacttcacatattattgtgaagttaatcaattttaaatcatcaagtaactaacataaagtttgattcaatttttattctgcagtttcatggtattattaaatatacaataaatgaaatcaacactgtagtaaagaatggattaattactacttaactgagtatatgtcaacataatagcttaggtttcggttttgctggaatgtacaat

SEQ ID NO: 1319 - DNA, 1256 bp, Cannabis sativa
cttttttcattttttcaggagcatgggttaatttagtgggagatgcatcgacaacataaacagaacacaaaagcaaagtatccaattattgtagctgaaataaagtataaataattaaataaataaatatttctaacattacttgttttcttcgcctccaatcttccacagcttctttgatcacggtaactccaatcactaacatcaacggaccaagaacactgattgctgaatatggtgctaacggactaaatgaaacacaagctacaataagaaagtatatattcgctactctcctaaactgctcaaataaggacttgggaagaaaattgatcacagtgtatttggttgttgagacataatttcctctatatctcatctgaatgacctcgggattgtcaggatcattacaatgcacaacccttgagtaccctctttgcccaatttgatcatgactgtctcccgacgacgatcgaatacaagaaaacgagtaaagcttactaaaatgtatcctcttcctcctccttccttccaccatattttcaccccaaagagaaaagagaaaatacaatataaaaaaggttgcttcttttccccaaattcaagactaaaacccctcaaattctcacccacattttctttccaggttaatcaacaaacgaccaaacaagtcacaatcacagctatatatatttcccctcaaaccgacaatttttctaaccttttgaattgatccaaataccaagaaaactcaagaatcactacaaacaaaaagaaaattcacaacccttccatttccttaatatgtattttggttcacataaatccaaaaccattaggtgagctgaagaagcaacataacttggcagtcacatatgctccaaaatgctttgcttctgagtcccaactatatctatcatcattcgcagccaaaccaagaatagaatcaagattcacgaaacctttacggctttgtaactaagctataaaaattaaagaaagaaaaagaactcagaaatcaacttcaaatgaccttaaacgagctggtcaagaattatcagaaaccctagagttgagtttttccatgaattcctttcttgctgaccaagttgcagagatctcttccttgtcgttttagctgaaatctagagagagaaagagtgagtcttgcagagttgtagtgagggagggaggaatggtatgtgctttgtgtacaagtagttaactctgtgcctttaccgcttttataagcaaag

SEQ ID NO: 1320 - DNA, 1692 bp, Cannabis sativa
tccataaagtatacctgccagagcctagccatagttgagttgctccacctccattatatcggtaacgatacatgtagcctccctcttgtcctttcatttcttcctcatttagctggggaattgttccacccattaagctgtcaaaatcagtgttgttcctaggatccatcctcacctgaagaagcataacagccaaagaagagaacaaagagtaagaaaagtcagcaaagatactctttttatacaacaacctaggtaggactaggaggaaaagtttgttagagaagggagcaaaaaagaaaactgaatgaaaataaatactggataccataccttatcaaaattgacaataaaaattgcataaggcataggtttatccatctcttctgttgaggaggcctcatcatccacatcgaatgtgtaagaatataaactctgaaatactggctctaccattgttgcctccacctcaaacaaaggaacctcctttccgaaaccggcctaatcatcgcatatattcagaaaattacttaaagcaattaagctcaaggtgcaaaatactgaagaaatataatgaagtttgaaaaaactacatgaaagtcacctctcttgctgttcctgctgaaaccatgctatctttcaatgccttctcaagagctagcaactctagctgcccagcctggaattttaaccataaaaatgaaatattcaaaaacaacagttgtcatgaactagttaagaaggaaaggtcacacaagcatatacatatacatatattctattcaataagcaactgatataatctgaaaccacgaaaaaaaatacaaccagggtcaaacaagcttacagggaatgcattgaagacgatatggtgctcaatatcaagaggctctccggtttcaaaacaagagggcctgtgtgatgggaagctaacccttaaaaactcttccaatttatgtgaatctaaagcgtatctgtaacctccatctccattgaaacctactagcactacattaacttcaagaggaacctggaaaggaacctacatagacattcaaattcaatcaccaaaactctaacatagaacagtcgtaatgaacacaaattaaaatttctcaaactgtatcgattcaattcgtaaaacttcaacttagtaacttaaaaattcgaacattttgggtaattctcccgcatagattctcggcaactaaacggattcattcaaaatcgaaaagaaaattaatacctcagctcgagaatgcaacatgcgacgaacatcggatcgaacgctgtctcgaacatcatgaaaggcgctatggtgccactgggagtgtccctgatctctcttgaaaggtttaggcttcgattcggatacgaagacgagcaaggtcagtacaagaaagctcgtgtagaaagacaatgaagatgacagagacgttgatgttgacttggaagccataactgaggaagaagagcttaagctcgagtttttggttgagaaagatactgaatttcaagtcaaagagtctgaaattttcatggctgaattgaattggagattgtttctgatcgcaaagcaaatgttgcctgaactccgactgcagtggcaatttggtaattctccgttaagttcctctcttgtcgtttgggcctgttaaggcccagttcttttcaccggcccaactagagcaa

SEQ ID NO: 1321 - DNA, 3245 bp, Cannabis sativa
ttaaagtgaagtgaagccaattgtaggggcagtttggtcattttaaacataggtaaaacattggcaaaagcgcgggaaaattctcttactcttttctcagttctgagtcccccgcgacaccacacaacacaagctcagattctctctctctttctctcttcagattcttctgatcgaagaagccatgaacggcggcggtggtggtcggaaatgggaccgcaatgacttttgcaactcaaagaagcagaagttcattcgttccgccgaggaagagctcgaggctaaattagggttcgatatcttctctgaaggtgacaagaggctcggatggttgcttacatttgcctcagtaagttttattcttacatttgtattgaattgtcaaattatgtgatggtgaattgaacttaaattgttttgtaatgtttcggttaggtttgaattattgattttgtgtttgttgcatttgattattctgctaaaagtgtgtggaaaagtttgagtttttaaattagattactaaaagaatgctgacaagtggactgatcgattctcatttgtaaatttgcagtcatcttcggaagatcaagatacccgcaaagtatatagttgtgttgatttgtattttgtatcacaggtaaactctctgttctattctagaaaacttttttttttttggaaatggttaactatttgaaggtctttctgttgatataattttttttttttgataagaaatcataatgttgaaataagattacacacccaaatgtactcactttacaacagaatttccaactctctcctcaaatcagtaaaaagagagatacttgaaccttttaacacttttgagccagaatgcagccaataatttggtctttatccatacacaattaaagaactctctctatcatgaaacattctgtcattttttttcccattcatactacccatataactgccaacacttccacagttttagagcaacttatgtctttctgttgattattattgttagcttaatgtttaaatgttctatgcttttattgcaggatggttctactttcaaatctaaatacaagttccgtccttatttctatgccggcactaaggtgtatatctttctatttatctatcctcttgtttagcatttttattttgtttgcagtgttagcatcaactgctgttgccatggtatggtgttaagtgttagcattttatccaataatggatatattatttggccgaataaaattatgtatgttaaaacttttctagcttttcgtaagtcttcattttgtatttcatgatgatgatgctattaagctctatcattgaccgtggtgattttgtgttaagtcctatgtgtgttatgtatgtaggaaaaaatggaaatggacgttgaagcatatttgagacggcgctatgaaagtcaaattgctgatattgaaatcgtggataaggaagatcttgatcttgtaagcaactcctcagtggctttaacttttttcttttttgaggaacatattatatattatcggaaataggtagaatcattacagaagatgataggaaatcatctttggttatataaagaagaactaataaactaggtttacatccaatgattccagttaccgagtaattagtcagcgctttaaaatttgaactggtactcaaccattttgtcaatgatattgcttataatataagtgaattctgtaagtataagttccaaaaaaaaggttaattgtatactaaattctactagttttattattttgaactaatttaattttctttcggaactaatctaaaatttcttttatccacttatactagttaatgtactctgatatgtgtgttcattcgtggcagaaaaatcatttgtctggtttatgcaagtcctatctaaaactatcattcgacactgttcagcaactaatgagtgttaagagagatctattgcacgttgttgaaagaaaccaggcaaaatctgatgctacagaagcttatgagttaatattgacagggaaaaggtgagttttttgttttacaattgaaggttacgatttccttcattggcctgaaaatctgatactaagattcttaggtgaaaagttagtcttttgttactgtcgtgtgtaatattattgtgcctgatttgtagagaaaaaaggtctcaagattttttggattacattgttgacctccgagagtacgatgttccttaccatgttcggtttgccattgacaatggtaagtccattctgttgcttggggagttggtttttaagaaaaggtgccaactattaaataaacttgtttttctcctgtgacatatgtttcctagatgtacgctgtggacagtggtacgatgttagtatatctagtaatgatgttatggtggagaggagaacggatcttctacagcgtgctgaagttcgtgtttgtgcattcgatattgaaaccaccaagcttcccctcaaatttccagatgctgagtatgatttagtaatgatgatttcgtacatggttgacggacaagggtatctgataataaacagagaggtatttgtgactggttcaaactagtaatttctttccttcttcaatgtttcttatttaaaattccatactatatatacattctgctggttcctatgtaagcttcattattgcactggtcatctaggtacttggcatcaattacatgtacctgagtaaatgatatgtagcaactagcaagacatgtattgttttctcatggcttactttaacacgtctaattgttttttgtttgcagtgtgttggtgatgatatagaggatttggaatacactccaaaaccagaatttgaagggcatttcaaggttacaaatgtaaaaaacgaggtaatgaagtcttgtagaaataatattcctattaccaaatgtggtttcatctcttaggttgcttaaggaggtgcgtgtcttttattgaatatattatgcactactaattttgcaaaagatttttcatcttgcagctagagcttcttaaattgtggttctcccatatgcgggaggtgaagcctggtatatatgtcacgtacaatggtgatttttttgattggcctttcctggaaagaagagcagcccatcatggatttaaacttagtgatgtatgtaacttctgagcttttacttaataccgacatcttgagattttagttttagtttttctatatttagtcaattcaagtca

SEQ ID NO: 1322 - DNA, 2152 bp, Cannabis sativa
aaagttattatatggacttaaatagtttccaaggaaatggaaaagaagatctgatgcattcatgaccaagaaaagtttcactaggagctatttgacacctatttgtacttcaaagatacaaataatattgaggaagaaatcaacctacttctttatgtggattatatgcttattatatgtaaaaatagatcaaaggtgtatataatgaaagaatggctcaatattgagtttggaatgaaggatcatggagaagctactacgatccttcaaattgacatacatcaagaagatgctagaaaaaaatagttattaaacagccaatgataaatcaattttagctgagcaaagataactaccccaaacagcaagcagaaattgaagacatgagtaatgttccctactcatgtattgtggaatctcttatgtacctaataatctacactagagttgatctggaatttcgattgagtgttctaaataagtacatggctaattctaggagagaacactagaaagccatgaagtgggtgttcgggtacttaaaaggaacaactgatatatggctcaagtttaccaaaatgattaataggactataattgaaggatataatgactcagacttttctagtgatagagatcatagaaagtctacttcagcttattttttctaattggtgagaattgcatacactgtagagtctagctacaacctactatagctttatccacaacaaaagttgagtatgtaacagtcataaaggtcatcaaggaagctatttggattaaatacctaatgaaagagcttcacctactcaaggaaattcctacagtcttctctgattgttagatttacattcatttttccaagaatctttttttttatgacagaaacaagcatgtgggatatagtagcataagaagaagtgcagattaagaaagttcctatagaggagaaccctccaaatgtagggactaagatcctaaacctaattgtattcaaacattttttggattttgctaggaataggtaatagaggatggacattacataaagaaagctaagaccatcaggaagaagaatagctaaacctaaaatatccttatgaagaaaatcgaggtgaaattttttggtaagaatcccttcataaacaagtccaatacagctgtacaataattctcaccacatttgatcattaagatcacaaacaaaagaaacaagttgcactactctaagagaaatccaattaacctagctaactctagcttctcacactctcgcaactaactgcaatagaagactatgtattacttctattcacgtcaatctagatagagtgaaaattatttatttccaagtaaaatagagaagcaccccgcaaagagagttagaaagacaaagaatgagttagaaaagtgtttgtaataaaagagagaaacataaacagagaaagtcttattgagattactagccaaagatttgtgatgtagaatttccatcaccattgtactgaattggtttcatcatagtgaagaagagcaagcttcctaagacgagctcacggggacgtagcccaaatattcaggtgaacctcgataattttttggtgttcttgattctgatcttcttctccttctcttctctttattttgatctagtattttgctttaattattttttgtttttctgtttacgtaagaagtgtctagaatttttgttcatggtcaaaaccaaaataagggaaaattaatttaattaaacaagagcaaaagtatagtaacaacatgtgtatgtgtgtgcgtgttagaagattgtgtgtacactgttgtattgagcagtcaagatcagattatgcgtgtgctaattgactttgtgagttgtgtaggaattcaagattaaattccaacacattgctattggatagcagtggtgcctagcagcactttgaggtggcgtcctacaattagttagcgatattttttaacagttattaccttaagttatatgagactcgatacttagttgcaccaatagtgatatgatatcgggaagggtgctaggcaccactggtgcattttagcatttctgttaaaaatatggttttttttttactatgttctagtttcattgatttctcctttttttttttttttt

SEQ ID NO: 1323 - DNA, 6171 bp, Cannabis sativa
ctatatcttttccttgtaagaagccaccatcttctttaaccataactttgatggatataactatatgctgtaaaataatgcacacagaatatggatggttgatacttgatgaacccaaggagtctgacaaattcatctctcgctccactaaaagttaacttattacatttttctgttttcaagacgagtaatcattaataatgttacagacaaatagagtaacttctcctctttccttctgtggtataaactatgaaaacacatctcgcaaatgacaagcatgtatgacaaaccatctcgtgtcagtgaaaaccagaatgactgcataccatacccttcttactatacttttgactccactcatttaggctcccaaaatgtcaactcctcaatctcttattttatctacaacttaaaaaaccttatctcaatcatttagcttagctagaaaccttaatttggcaatattactctctattttgtgtgtagttaatttgtgtaattacttcaaggatgccaagagtgctagcaagtactaaatacgaaagcatcattatatatttcctcactttcctaaataaactagcacaaaataataaagttttggggaaatgtataaatgtaccttcaaacgagtaatagcaacaagaattgcccttccaggagcttgaagggctttatgatgaagctattgacaagaaattcatgttagtaaattgactggaaaattgatgttacatgtctctcaaacattaatcgaaccggcaaaaacaaaattaaaatcaaggacctgtatataaagtagggaaacaactttcggtagaagagaaactggatccgtttctgccgacacttgagatatcaaatcctaagattaatataagaaaggaattaacaaatgcaaagcaccattgaaatctccaaaacaatttattcttcgattctcaatacacaaatcacagtttctatcatgattagagcaacaagaaaaaagactgaaaaggggtgggaagaagagcaagtggatccctgcagaagtttacaaaagcaaaaataacagaccagtaacaaggctaaagctaaactgtttaaagtccaaatgcaagcatggtacgttttcaactactatgttatccataaatggtttcaaaatgaacagtaagaattctttaattatttatatacaaaataaaagattcctgttgaaatgaaaaataaaaataaataaaccttttatttgattggaaattgaacaaaaaaaattgtgagcggaaaaaaacagatatcatggtaatactttttctattttggtaattggacaaatgctatgtttgatgtaattatatgaataaacaaagaaactgcctcagtctacttttaaccagcacgatcattttccactacaaagacacaaaagagttactaggtgaaaacgtcatatataggacaaataatgatactgcctagagcaggtgagcataccttgcgatatgaatgcagaagtgttctttccaatttcttgtcaagctttcttaagtttaatccgctggaatacatacatggatcataaatttatagtttgagtaaacaatactgctccaaagtcgtaaaagcatcaatcatgtgatgaaatagagcacaacactacctctcttctgcaagagctcttagcgcagtcatgaatgtgtccacccgctgcaatcacaaagaacattaaaattttaaatttgttgacaatttgtcatagaataagcagtaaatgtaagaataacttttgaagttccaatttattcagaaggaactgaataaaacaatgttttctgttctttttacgatgattgactacttagtttactactttagaataaaatgaagtattgattcttatataaatatgtatataagttcaaaattgactatattaatggttgtaacataaattcatagtgattagtgaggaaggatatgtattatatattaaaaaagaacttataaccctatatttatgtccttgtaaaatcagaatgtaggaattaaataattgcttttgtgataataatttgtttaacagaacattgttttcaacaagttaccactaaccttcccttctagagcttcagccaccgcaaaagccatatttgatagagatcctggaaaactcttcacctacaatgccaaaaaaaattagaagtttggcaaatatctcaagctatcaaacacaacttcagaagacaatctcactggcacagtgtaaaacaatattagctgagattcatgattattcgtacgatggcaattcgttctccagaactaagtgaaacagaatctgaatcctgagattcttcaacttcaactccattctttagttttgtgtgcatatcctaaaatcaaacaaatatgtcaaattaaattatgtggccgattcataatagataaaaagatcatctaaaatgcaaaactatcaaacaataccaagttatagatgagggtgtctgcaatagctgcagctgttgttcttaacaaatgcctgtgcaaaatgacctgctgacatagaatgttaggcttcttttatataattgacctttgctctgaaaatgcttttaagtatagaaaaactcaccgaagttgattgatcatcgtcaaacaaatccaaggctttttcatacaactgcatgttcaagaaggactgcaaaggagagagatcacaaatagagaaagaagtaactagttagtagagttcagcattcagaagaatccaaatacgtagccacttaatgattccatctaggtaattataattcaaataattacaaatgtagggaaaaaaaaaataaggcatttgaaatactgaccacaggcaaaggaaaaacatggaggtaaactaacctcatcaagtttcttttgcaaattgtcaagcacactcttcattttctctgcgttttctgtaaacaatgccttccttctctgcttccaaaattcgactagcttaggtcttaaatagtttgctaaaggtctaataattgtctccggatcatcaatacctgccacaatggagaatggaataaaatcctgctatgttgtaattggaatggacaactccaagataaagtcaacaaaccttgttcttcaaaatcagaagccagtactgagattttctgcattacccattcttctgaaggaatgttgttattctcctcttttattttacttgattctttcttcacagaagcttttgaatctgaaaattgcaaagatgtatccttgcctttcttctgacttttctttgattttgatgtaggattttcctgcacattcacactattctctgttgcacttgctgcggcagtcccagaagatttacctcttttcttctttgatcctttctcagttgtctgtttattactacttgtctcattaacagcttcatttgaatctgtaatcctgcttgaatcatgtccaattttggtatcagataaaacatctgacggcacagccccagaagaccctgaaacactaaaggactccatatccttctccactcgatcatacacagcctagtcagaaaagacagcatcaaaagcatcagacagaggacatgtacatgtgatattactatgctgtgcttcctaatgatagactttaaaaattatagacatttcttagattccttaaattttcagttgcatagaaaaacacagagcaaggtcatcatgaagcaactggtggactgcaaataaagcaggtagacgtatattaaaagtattaccttaagaaaaccatcactaaatagataggactctccaaagattactgccttattagactgcagagaagtatcacacaaaaggttataagaatcatctagtttaatgtgaaagtaacaataatgaatacaggaatgccacctttagcgctaactgaactgaaggacaaagcgacaaaagtttagatgcatcttgagacccaaaggaagcaggtaatactgaaagagcatcaatcctgcatcaaactatcccgtaagacaaggaaagaagaaatttgaagtctgcactctactaacattacattacaagttttagaatatttaagccaaaatatgcagcaaataatttcttcctgttacttaatatgattagaagatcatttcagtaaactgttcaaataggataatgaaaattaagttattaaaaatggagctatttgaacagttagcaaagtgaaattttctagtataaccctcaccaactaccacgttcaagagcatcctcagtagcagcatccagcatttcaatcaacgagggatggacgaaaacatcaatcagagctattccttcaggatacctggactatatttgtgtataaaaccaaaagaacctaattagacaatattctaagaagggttcacatagtatagaaatagtctacacagtcaattatccagaaaactagcatcacatatgatagcaattagataccttcagatactgaggaggctgggggatgccaaggttttgaagaaccccataattgatgaatgaattctgtggcatataaagaaacataagggcgagaggttagcgtcactttggagtatttttccccatggagaaaagataatccattaccattagaataatatataatataatctatgcaagagcctacatttgcatcaatctatgcttgactctgacccagaggttgtaacttgtaagaacgtaagtaaaataaccaaacgaaaataagaaacaattggatcaagtatgtattgcatatataatttagaagtacagagagtaacactataaagttacaaaggaaccaaggaaatagagcatcatacctgtgagaaaaaagaatcgacaccttccttttgagcaactgcaaagacctgtaacaaaaatacacatgagatgaagacatgatttccaacaaccatacatgattttttaatctagaaatttcatcgcaatatactgcatttatatgtttatatatttatacactatcattacaaatttaatgtaatttagtgaagatgatctttatctgccagttgccacagaaaaaggaagaaagaacaaatggtttatttaaacatgcatcaaatctctcagaaatggtgatcttcacactttagtttatggaatttttttcattcaagttaaaattaaaatgcaataatttgaattagataaaaatagtaatagtgataatagtaattttatgcctaataccagttaaaaatatattcaaagaataaaactagaaaattaaaatcaaataagtgcaatgccatgatgattctataaacaaaaattattttctttcttagtttatccaggtttttccttgaagaatagtagcccttttttttaacataaatactacacatcatacagacactgagaataggcaatttttttttcttataatatttttaaatgtgatttaggctgttgtttcaaaaataacaataatgagattaggctacatacagtaggtgtccaatgaactcctgctcgaagtgatccaagaatctcgccttccttgagaagtccattaaaaagagattgaaaaaatgagctatcaacagctacaccactcgttccatccatatcttgtagcaattgctgcaaagaagtccagactgcagacaaattcgtgggaacagtgatagctcgagaagcaccccgaaccattgcactaacacgagcaacataagcaggggtatacaactgcccaccttcaagcctacctttcacctaggcacaaaaatagtcacaaaacaaaccactctctatcacttaaaactccatttaaacaatcaaaccaaatgaattaccaaactctcctatcttggcacagccctcttctattactcaaaaatcactcaaattccaaagttatacaacgttgtaaaaagaaaattaccaaagtcccaagtcgtggttccaacattgaagcaatcaattccgagcccacttgcaactgtgctgcgagctcagccaaagcaatttgactacattcttgaagcctatcattaatttcttcagcaacagaatcccaataagattgtgatataacttccccttgaatcaacatcaaaccaggttcttccaaaacaatttggtgagcatgtttctcaacatagtacaaatcaaccccaat

SEQ ID NO: 1324 - DNA, 2905 bp, Cannabis sativa
accttactaaaatttaactaagcctaaattatatattcactttctttaacatttttgtatataaattttttttttacctttacctcatagtaatttagtcaatattgattatattattccccagtctataattaataaattaattaaggagaaaaaaaaacattattacattataccgtccgtttacggaaatcctactaagctgctcagtcctcatcggacggtcctcattaaatccacgatgatcatcaagagcttggcttgtttgcattatagtcaaaggtggatgaaaagtcaacctattaatattatcacccttatcttcattttccaaaacctctttcaagtacttagccaaaacccggcaattctcatcaacaacctcctcatattccgtctccaatattttcagctcagaagcctgttcgtcgctcatcttcgacaacgatttcgtgctcggcacggcacccatttcatcgttaatcgagtaatcgtcgtcgtcgtcgtaaaatgtattggtaaagagattgttattattcggcggaggagaagtagtgctaatcgacaagatcttcgatctccgatcattcaattcgcggagaacggggagaaggtgaattagaaagagctcttcgaaaagcgagggagcgatttctgagcgagccgacgaaggatccaaccggaaaacgtctaggaggctgagagcggcgtccaccgggcggcgccagaggccgtaggtgagggaaaggaggagggaggagacggagttttcggggtgagagaggaggaggttttcgatgaggcggagggatgatgatctgacggtggagcttgtggaggttattgcgttgtcgagtgtttcggcggcgaggtttaggggtttgattagggcggttgggtcgtgggaagggggtggggaaagggtcagtttgcggcggagaatcgagaagagacggcggcgaatttcggattgcgagagggcttcggagacgaaagtggcggtgtggtgtaagatttgtgatgacgtggcggaggtggaggtggttgtcatggtgatcaatggtaggagattgagatgaggttttagatggaaataataaagagtggaattaattatgttggttaattgtcatcagattcaggggtgatgttattaactgaaatacctgtttcataaaaagctggcgggaatcaaatgggacggccgttctgaaatgactactctaacctcataaaatgaatcaaatataacttgttagtattctcagggaaagggttaagatagtaattttcgatacctttgaaatttataaggcaagtgatgttttgaaaacccccgtagagtgtgtttaaacattcaaaggttacgattacccaaatggcaggcgaggccggcttcgaatccagagttgatttaataggagctgtcgatttccaatttctgaaatattaaatttgaaacaatcccaagtttttccaaattagtccaatttttcttagtattcttccttttgtccctagaatttcccactcagatccaaatcaggaaaacgtgtttggaatggaatgattgatagaattccttgtattgtgtcatgcaccaaattataaaatctatttataaaaaaatgtaattagtagtaatactggtactaactagtatgacaagggtcttaattatcgaaaattcggaatcgttttgttggttgtttttagttaagcgtaacaatagacgagtacagcataagatcaatattagataaatacgtggagcttttcttgaagaaactgttcatatgaatatataaatattattaataatgatcaagtgataataataataataataataataatacagccgaatacttagggccgccttggcttggatggcgagctaattagacagacaatatgggtcgattgctactctcgattgataaagcaaagaacattaattagtaaagtgagaaaagaaatctttgcaggtgaattattaaaaggtattattggtgtatctagcatcctactgtcattcggtaatcagtgtaattaattattagtatcatttaacttaagaaaatagcttttttaaagaatatcattaattattagtatcagtgtaattaattactgcacattaatattcaataacaaatgctcttagcctcttagcaataacattctttggtcttacaaagtttaaaatgttactactcattctgtacagaggattcagaatgatgttatattaaaattttttatacaatgccgaggaaggtaaagagtatagatagagatgggtttgggaattaaaggcttttgttactgtatagatatagagattgatgtaatgggattctttgaagcaataaattgattcttatttacaaaaaaaaaataaaacaatagtttatatgcatatatatacggtccatgaatagaagcctgtctgttaagacaacaaagcaacaaaatattgtagtgtacgtagttttccaaagtagagtagggttggagtaagttaatatgggttgccaaacaggaagagcttcattcggagacagttccccaccacaccagcccaactaagtagaccgttaaaaaaggcgattattcattattattccactctcctccaataatatatccatctcaattcagctatctattgtttcatcatgttgattgtcttgtcacataatgcaaataaacaaatatattagctttattttattaatttgttagttaattttaagaaaattttatatatatggacaaagttttaaagattccaaaactaacatgcttaaatatatgtgtatggcacatgacaatacatacgatattatataattaaatataatgcataattatagcttatttcatcattatgttattgatc

SEQ ID NO: 1325 - DNA, 2464 bp, Cannabis sativa
tgcagggaaggggtcttatggtgcagtatacaaggctagggatttgaaaacttctgagttggttgctatcaaagtcatatctttgtctgagggggtatgtatgtttgtttgcttgtttattactattctttcattttgtactctgtgccactaccaattcgaagtatagtttcggaaaattgaattaagtatatgctataggaggagggatatgaagaaatccgtggagagattgagatgttgcaacaatgtagccatccaaatgttgttcggtatcttgggagctaccaaggagaagagtatctttgggtaagaatgtagaaaaagttttactttgtctaatctcataaagaaaacagctatttttttgtttacaatgttatgtgcctggaatgtttttaagtttgggacagctatttttcgctgtattggcagatagtaatggagtactgtgggggtggaagtgttgctgacttgatgaatgttactgaggaatctttggaggaacctcaaatagcatacatctgtagggaagcattgaaggtaagatccatgaataaaactataattttgagacgaaattatataaactacagatggaacttttcttaaaagttaaaactgaaagtggttgaaaacaaaaaattgaccttctggtcccctgtgtagaaaggcttttacttgatttcttggattagttaagtggacacacttttgtttaacccttctcagtattttctattgtgctgattcagatggtctaatgtagatctcatacgcattctcaaccttctatatttcccttttggaattttctatacataaaatgctgtaactttggcatatttgttttttgtaggggctagcatatttgcactcaatttttaaggtgcatagagatatcaaagggggtaatattttgctaactgaacagggagatgtcaagttgggtgagtaatcttcactagtcatttatatattagacatatagttgtttgaactttttgtggattaaagttctatcgcttttgttaggcaatataagcctttgctgttctttcacaaccagttttataggacattgttcgtgctcctcaaagtttactagaacaagagtgttttcaatagactagactccatggttattttctattgctcttttgtgtacttcaacaaactgaactgactactaaattggctttatatttgttggaaaatgaacaggagattttggtgttgcagcccagctaacaaggaccatgtcaaagcgcaacacggtatgcaatttcttaaatattttttaaatcgtaataagttacgtttcgtaacatagacttttcttttggtcattaatgatttgcatatattaaatgcttcactgtccatgcttctatgttctgaggcaatacaagcagtgagtttcggttgatgactgtttcttaatgcatttagttcttattgttttcagttcattggcaccccacattggatggctccagaagttatccaagaaagtcgctatgatgggaaggtatcgagagtttttgagttttgtgttttatgctgcttcttttagagaattttcttactttttgtatgagtagcaaaagtcttcttcatttttttgttcatgcgatttgtctccacctgtgagctgttgcatgttttgaagccttcagtctctttgactgatgttttcccttttattctttttgtttaattttataatttgtttcttttacaggttgatgtatgggcacttggtgtgtctgcaattgaaatggcagaggtactttactttctagagaagatgtaaattattttcaattcacaagaaaattttataaagcagatctgggggggagttatgtaatctgacgattcggacccctttccccacttattaacatacccaaaaacttgtttgaattttgccttgttggatctgggaaattagtttgctgacaataacgaatactacttgctatggtgaataaaacattgtttttaaatatctatggagattacctctgttttatgtttttgagatgagattctgtccttaatatttcacattttgattttattagtactaatttgcagaagtttctaatctcgttaattttcaggggcttcctcctagatctgcagtgcacccaatgagggttagtactttagtaacaaaagttttttttcctttttcttgcaagttacttttattgcccccactctattttagtttcaattctgtaacacaattatcgcctatcataggttttgttcatgatatccattgagccagcaccaatgcttgaggataaagaaaaatggtttgtttactttctttttccatattcctcttgctcttatttatttattttataaaagggcttcatagctcgctcctttagtccatgtacatgaataagatgcagcctaacaaaaacagagtgaaaataaatat

SEQ ID NO: 1326 - DNA, 2905 bp, Cannabis sativa
gtgacaatcaaccaggaatctagaaacttttgcttcctattgcagtgatgaaaatttgagagagagtaaaggatgagcaagtgggtttatttatttattcatttatttttgattaatttttatttttctacttgaggggtcagtctttcactgaaaaccagggaacaatatatatttttactgttaaagtacagaacttttaacagattctggagtaacacacgtgtaaacaccattgcttttggctttctctgaccatttataatggaagaaaaggaaaactcacacatcacatttatgcagagttgggtctggctaatatgccttaggatcttgttctgagaattgaagaagaaattccaaccttatgtaagtttcttatattcaaagtttgaatctttatcaataatctataatggggttttgtcaattagaatgattccttttcaatttttgttattatggattctggttcagcatttaatgctaagtctgtatatgtctttcttcccatttgattatttgtgttattgtttttcaaactagaattgattgtggaagaaaaaatcagagtaaatggatgagaaagtggtccccaatgcaaagtctttaatcctagaagataagagtgatggcctttatcccatgtattttggtgtttcttgtgctttttttgctgtgagactcttgtcattacctcataataatatggaagatgaaaaatggtgtgacattagagaaaaaatgcttcaaggaagtgcacagctcttggggttgcttgtgtggagagttcaaagagaagagagtgagaaaagttctgaacttttgcttaagcttgagaatgctgaggcagaagttaccgagttgaagagactaaggcgcgaagatgcaaaggcgaatgagaaagttgtgagcatctttgctgctcaggagcaaaattggttggttgaaaggaggaaacttaggcagcatattggttcgttgatgagcgagttgagatttctcgagaagaagaaggatcaagcggttttggagatgaatgaaaagtttaaggaaatggagactttgttgcaaagtaaggacaaggttttggaggaagagagtgaaaagaggagagagttagaagagaagattaaagatggtgagagtttggttgaagagttgagagaaaaagcgaaacaagaatcgcaggatcattcttctgagcttagaaagcacaaaactgcattcattgagcttgtatcaaatcaaaggcgtctcgaggctgatatgagtagagcagttaggcaagttgaagggaagaaaagggagctcgattcggtgttgaagcagaaggaagaatctgttttgatggttcagaaactgtctggggagattgtgaagatgcatgatgatttggaacaaaaagataagattctatctgcaacattaagaaaattcaagatggattcagcagagaagcaaatgcttttgaaagaggttaagttgtcaaaagctaaaaggaaacaagctgagttagaaacagaaagatggaaggctgtttctgagtctagacaagagaggcattcacttaggaatatgttggctaaacaagtcaattctagtgaaagagggccaacaggctcatctcacttgcacattggccacaccaaatcacaaccaagtgatgttcttatggggtttgagcatgctgctgatttcagcaatgaatctgatggtttttcacccccttatgacagcaaccgaggtaagaaagaacgaagtactcattcgcctttacaattggcaaaatgattgaaatttgtggtttgagttgcactttctgattgttcttgcttttgtttatgttagctgatgttaaacaggttgagagttgggttcggtcagaagcagagaggtatgcttctgcaatcgaacaaaggcatcggatagagattgatgcttttgtagaacaattgagactcaaagatgagaaagtagaagcttttagatggagattgttaagtatggaactagagtctaaaagattacaatcccatatagagggattgaacaaagaattagcacaactcagacataacaacatgaagatgggagcattgttatcagaacgcgaagaggaactaaattccatgaaagaacagtttgtggctcatctaaggtcattaaattttcagaagaacagcttcaattcaagctcacaagactcaacaacatcagcatatgatgatcatgccagttgctcacaacaacttaactcgaaagagcaagaaacaaagacagtttccattgaaatgtcagcagaggaaggcacagatgaaaatccatctgttgttgatgatcagtcaagaagaacagatatggttttgacagtacaatctcctgacaaagagtttgatgagcagaaagagtttgtttcgcatgaagttctacccgaagggggaagttcgagtccatcagaaggagtagatggtggcgagaagttgaaaacaaaatcggttactcaaaaaagtttgagcagaacaaatagctctcaatggcgaatggatcttcatgctctcggtgtcgcctacaagctcaagaggctgaagcaacagcttgttatgcttgaaagtttgagaggaaagcaagaaagtggtgaagataataaggaaaaaagcaacaataataatgatggagaatctgatttgaaaagtgtaatatcattaatttctttgctgaacaaacaagttggaaggtaccaatctctccaaaccaaggttgatgatctttgcaaaaggatggtaagctctaattctatgtggtaattcttacttctagtgttttaagattcattgcttttgctattttaagattgattagagatatacttatgagatttccttaaatataaaatatgcataat

SEQ ID NO: 1327 - DNA, 1775 bp, Cannabis sativa
aggtgaagcctgaagcccaatatggtattgggctgaagcccaacaaaaaggtacagataagtgggccacgtggggctctgagtttgccgcttaaatatagtatcatccgcgttcccgccaaagaaaattggcgccatatagagtacccctctttatcttgccctacccattcagattatcattcccgctctctcctttcaacactgatatttagccctaaactcagtcaagcaattcctcgatctccattttggtgatctgtctttctgaatcagatcttctacctcccgctgagagctagccctaaactcagtcacgcatttcgtcgatccattattttgatttctgaatcagatcctctagtttccggtaagttattttcgtttgatttgtttttttcttcttttctggtttggatatctgcaactgaaattattagtttcatcagaatgtgtatttttttcaagtagagatttctaatttcatggcagtctttgtcctttacatgttagcttcttacattcggttgaagaaataagttagaatgttcgtcgttgttgcgttggtggttttttttgtaagttcgatgttcatttttgacaatttttttgcttagctttttatttcccaggaacttaataaaaagagaaaaaaaaaagtcaataaggggtccttgctccccagagggctattttgttgtgcggacttttatattttccgttggaatcaatatgtctcgtttctaaatcaacttagtttgcaagttaaagataatcttgaaaacaatgatgctaatttctagaaagattatgtggatattaatctactttataggtttttgtagagtttaacttagagactttgtttgagtgacaaattaacatttgtttatgctgagtgttacttagaaaatagatcatgttgtatagattcaagctgttcatttgtagtgatggactgtgcattgtatttaaagtgctattggtctctgcacatcacctatgtacggtcacaagattacctagttacggtgaaattggtatattgctaattcttatgaagttggcatctctggttatgtttaccgtttaccacacctgggcatatacacattgagttttggttaattttacttatctaagttgctactagcttgtttttggtcttaaggccaaactactttttgcttctcttacttatttccttgtaaaatatctttccttacaggacaaaaatttcagcaacagtaagaagagcatatcttttattccaatggagttgaggagttgcaacaatttgcattttatcaaagctgcgagaggtgatttggtactaaatactcagaatgtgaaacctggaaggcaagtactcaaagtcaggacgttggaagacatattagacactttagatgcaaaagatcagaatcggattgtcccaagcaggtgtactttagcaaaacgtgttctgataagtgatttagatgcttctgagtttagttgcagtgatgacgatgacggaagtaacagtgacgtggtggatattggttttggtgagatgacactgaagcaaattaaagagaactgcaaaacaaagaaaagaaaacgttcaaagtttgttcattccttaactgacgaaaggtgcacccgtttcaatttacagaccgatgaagacgactgtgatctcatggaaactctcattaccttgaaatcaaaagtttcaaagaagaaaaagctgaaggcaaaggagaaggcgaagggtaaacgtcaaagaagtct

SEQ ID NO: 1328 - DNA, 1606 bp, Cannabis sativa
atatacgtccaaaacaaaatagttggagaaaaaaataaataagagtaggttgtgaaataaggctatacttgtcaataaaaatatcacctttggataaaatggtcatgaattacaccaataacacttttatataagtaaaaaataaaaaagcagtattttttcttttttgagaaaaatgtacatctatttctcttcttttttatccacacatttatttattttattattggtataattatcggttttcgtgaaggaatatatttgatatgttaattattattgaagacatgttatttccaatcagtgacgtagatgattgatagagccagatgtgtgtgtatagctaatggtagacagggaataaaacatataatagaaatgtgaatgacgattaactctctctaaaatatctctctttcatcctgcacaaacattatagccatcgaaatctgaacatggaaataaattggacatattaattaattagcataattattgctattccttaataagagaatgaacgttattacattacagaaagattaaaatggattatcatcaaaaattaattaaacaatctaccatagtgtagtatacctttatacgcggaccgtactattgatgaagtaaggttacaatatactacttattttgtaagaagctagaaatgatgacgaagatgacaagagaataattaatatcatcaatacataactgactatattaatacattattcatgagatgattaaattctaaattatcatcagtccagcactgtttgccattaataatattattagtaggagtattattagcagtagtagcattagtagtactgatcatgttgttatccattaaacctgggcttaaccgaaacatgagaacgcaaaactccatctggttcaaagcaccatctccatcaagatcaccttccattaacatgcacaccagatcatcatctctcagctcctgcaatccaagaagataactgttcctcttcaagctctcaaaagtgataacccccttttccacgtccatcaacagccgaaacccgttgcaaagctcccaaatgaatccttccgctcccaaccgtccgatcatcgatggaaagtagtcctcgaaatcaacaatgcttgctgctaattggtgatgatattgatcatgagcagcagcagcagtagtaatattcattgcctgcatattcaagtgttatactagctagctctctagttactctcttatatgtaatgaaagaaaaatgaatggagagtaaaataatagtactaaggggcctttctttttaagtaatatggtgagagttagagaacagctagtttatataaatctatatatatatatagtaaagatatttgaaatgactaattgaacaaagaatctaaccaagaaaaagatagaagatacaatagtaataataattgttagatattatccgagtattgcgagcttctttgggctttcttctattctcttttcgttgggtgattttcacgaatgggcttatctctctccttccgggaagttgcatcagatttgatcatattatacaatacatattttgtggcttatttatttatacagcggcag

SEQ ID NO: 1329 - DNA, 3995 bp, Cannabis sativa
ttattattattaaataaattagttatgttcttaacgtgttacgtgggtgtacggaaatatggtttttgtgaaataaataaataataaaaagaaaaaaaaagcattccttttctctggggtactgtccggccatggagatggaagtttacaagtaaaaaaggaaaaaaaaaacaaagaaaagggcatagctttagctgtgtatgtgtgtgagtgtgttggttacattattgtagtttgattatttaatgttggaattgactaaatatcatcttatggaaggaaggaggggaaggaaggagtagggtcccaactgtacaatgctaaaattctcagcttttgaattcatttctttattggggtcttcattttcatcttcatcttcataatcatatctctttctctctctgctgttcttcattattttcaagcttcaaccttttaatctctctgactcttgtctctgcctcaattgaagttttgggggttaggcattattttgggttctgactctgtactgtgattttggataaaagagaagttctagttggctttagtggagccaaccccaacggtctttttctctctactgtggtaattataatacatcttcaaagctttctaatcatttcaaatttaatagctttgttttgctttctttttcacttttacatgacaagaattctctgctagattgattgggttggtgggttcaattctgtttctgcaaagattttgtctttcttagattctatctaattttgtgatatgttttaatgatccttatgcctttctataattgttttgatatcaaattaggttctagttttcaagaggtgtgattaagaaattgataattgagctgggaaaatatgaccatgatgacaatataaactaattcttgtattaacaaatgaataaagatggtttttcttctggttttagtttaagtgatatttgggcatcttctggttttgcagtcaaaaatccactgcagcacttgactttgtagatagttagttttctttttgggctaaggaatgatagccttttggtagatcagtcagcaggctgcatgggaggtctgttgcacctttttgcctttgaaaacaggagcatggcaaggaaagttcttactcataagaaacatgttgatggtaagttcttatgttgttcggtgttctaatagatttaacaatggaaaaaaagacactgatcccttgttttctagattcatttggaagtaccaagtgacagatttgattggctgaactgttaagaagactggcatgttgatgattacctcttaattgaattagcaaacataggattagatttctatgttcttactcaaatgatgtcccttttagactgtgatggtggtacatttctctttcagactctcaggaagttgtcctgttaatcagcttactaaatatgcattatgcaggtcttgaagctcctcgaaatagcattgagcagcaaatagaaacttctcagaattattctgctgtacgagatttgccggtactttttcagcacacaaccttttatggcttataccaagtctttaggcaatgtagtttaaaagggatttctcaagtctgaatatactttcgggaggctttgtctccgttgtcaagcttacatcagcgaaaatctttgattgttttcattgagaatatgattattggtactgataaaaacaaaagagaggaaaagattctaaattttttatttcttgttgcatggtccagattaggaactggcatagaaaagttgaattggtcttgaatcaatgctttctgttttttttttcttataatagctctggcctctctttcaggtggaagaagattggtctacaaataattgctatccatttgaagcttcaatgaagaaattgattaatgaagaaatctccaaacattcaagtacaagacaaaatgcaccaattagcatagttgctcgcctgatgggaatggattcgttaactttagatacaaaatctacagttgagccaactgaggaaagaagcgagaatatgagaacaaagtgttcaaacaaggaagcaaatggattcggtttaacagaccatctttcttccaactcaaactcttcaaggcaaatggaacttaattcatcataccataatggagacatagattctgaaagatggagcaatggcgggaggtgtgggaaagggaggagtcgagagcatcctcaggaggaggaattgcagaagtttaagaaagaatttgaagcatggcaagcagctaggttcagagagtgttcaaaatttgctgagcttggaaacatcccttcacagtcatcacttgctcatgaagatctgaacaaggaaaggacggaactttatgggcgaacagctgttgagaaagctgtaaaatcaaaggatcagacaataaaagcaagggcacaggaaataggaggcctgcaacataatgaaatggaatctttccaggttgaaaggaaatattcatcatcaaaaaccagaaactcaagcagatatattgagcaatcttctatgatggatactgatcagaaactatatgcattgtctgctccaactaagatagttatattaaagcctggccctgatagggtgggtgaccatacagagtcttggacaagctccccgagcttttcggagcagagaggtagcatagaagactttcttgaggaggtgaaagaacgactgaaatgtgaaatgcaagggaaaatgctgagaaagggtggttcagttgttgttcgaggaagtggaatcgagactccttataatgaaaagccatcatcagatcctaaacaaattgctaagaacatagcaaaccaggttagagacagtgtgagtaaggatattggtgcaaacttgacacgttcagaatcaacaagatcatataaaagtgaaatccagctaaatggaccgaattcttcagagttcatcagtagagatactaggagattcgtgtcagagaggctaaagaatgttttgaacaaagaaacaaatatgcacacagttgttggtggccactctagatcttacagtgtgttagacttagacaatgatacttcaaaagatgtacaaaaaatgcaaaccagatccttcagatatggtgtaggagatgacagacctctccataaggagttgtcccctagaaatctagttagatcattatcagccccggtatcaggaacttctttcgggaaacttctcctggaggaccgccatattctaacaggtgcccaaatcaggcggaagcttgaagctacagaaaattttcctgtggacttgaagaagcggaaaagggagagatttagcttcaaagaaaaagtttccaatttcagatatagtttttctcttagagggagactgtttggtaagaagattcaatcagtgttggaatcacatgttttcgaacggtatcctctgaaagatatcatgagtggtccaactgtagtttctaactttgatgagagacatgtaaaggtattttcatctacttatttttcttttacatatggttttgaactgctggtttcatctttgaaaagtatctaatagtcttttgcctttgtaggagaattttactgaagttcctcctagtcctgcatcagtgtgcagcagtagtgctcaagaagagttatggaggccagttgatcatcttagccctctgtcaaccccagatgtaacgccaagcaacgaatatgctatgccgcaggtttttagagagatcagctctaatcttagtggtaatgaattttattcattcattcatttaatatgctgatgaatcttacactgtcttgtacataagaccaaagagtttgtagaaagaatttgaagtatttttgctcattcgttgccaaattaggaaagaacccgagatgctattataatccttgagatgaaaaacagacaatttttttaatgtttgtagctaattgtttgttatgcagaactacggaggcaactgaatcaa

SEQ ID NO: 1330 - DNA, 1721 bp, Cannabis sativa
taagatatgtgataataaaaaatagactaaaatggtaattattataatataaaattagttttttattcttgtgtgagatatttttataatttgacataacaataaaaaaggtataaattgattttgtggagctaaaatctaggtttttagttttgaaacttggtcattaagaaactataaatttaattgccattttaaatatagaaacttggtcaactatatatataatagttaaattgacattcaaacctaaaataatcatttgaatttttgaacatggtgatggtgaggaagatcaagtgtggaacattgatgaggtaaaagcaagcttatgatattgttcggcttaatgctgttatatcataagcttgtttttgcctcatttatgttcggaacttgagattatatataaaggcataaagaccgaaagagagaaagaaggtatgtatttatattattcattaaatgttatttatgtttgtggtcgattcaaagatatataatatggaacaaacgagaaggcttttcttccagaaattgaggatcaaagcgttttcaaagcaaatctctatctatgaatatgaattttaattttcaattgtgtttcgttttgtgagtggcgtgttgttggtgagtggaatgttgtttgtgatgtgctgtacttgttagtttcatttgaatttatgggttttgtgtttctatatatgtactgtatggttagatatggttatcagtcatattattttagcgtttatcaggcatatgtaatgtgacttttgatggttttttttttgggtaggggctcatcttagccttaatataaatcccgaccctcttgattcttctccaacccatgatttcattttatcatttgtaataattacttaattaagcgatcccacgaatgcatttaaagagggtaattctatctctttctctttgaatcgattgaatcgaatccactactccattatctctaggctattcctccatcatctagtttaaaatgattgagggaccctgattttgaaccaaaacttttagccttaatgggtaaatttttcataatatcaccattaacaagctaagataaagcttcatacttgacaatcaattcgtgaagcgccaagctaaagtttttcttgtcaagtaagtggttctttattttgttgaaatttctcccattatcttcatctaaaacttcttctaatcctctctatgctattcatgggtgttaatggggttggttctgtattgatagggttagaagaaagagaattcaagatttggtaagcttaaacacaaaatcaaagcttcaagaggcaaaagaagttatttttcataatttctttacgatccatgattgtttttgatttgtaataatttttataggtagtttagaatgtgtaatattaagactagagctctgatcatgcatggatgctgcttttgagtttcatttattttgttggaattgtaaaaatctgttcttggatctgacatccaatgggttagattctagcattactcctctgaatttgtaaaatatttatatggttctaaattactcgaagagtacatgagatttagctttggaatcactccaacagcttctttaaaactcaagttatgggtgttggaagttcgagtaaaatttaggaaagttttgggcagattaactacccagattgtaaaaatgatttggatatttttaatgggct

SEQ ID NO: 1331 - DNA, 4371 bp, Cannabis sativa
tatatatataatggggtcatcaggttcatggacagctaaacagaacaagctgtttgagaatgctctagccatctatgacaaagacacaccagatcgttggcacaacatggccaaagcaattggtggaaaaacagtggaagaagtgaagaagcattacgagacacttgtcgaagatctcaacaaaattgagactggtcaagtccctttaccaaattataaaaagatcaataacaacaaatcatcagttccctatatcccatatatggatgaagaacaaaggtactcctcctcctcctactactactatatactttggctttcttttatttattaattaatgatatatatgaatatacttctttttgtttttggttaatgtagcaggttgaaaaatctaaaaatgcaatgaagatctgctgatgatgattttaattactctcgatattgtattaaagattatatatcgatcctctcaattcaagcaagctagctaggctagctttttcaatcgagagaaagatttgcttataaattattattattattattgattattttcaagtccagcacacatatacatataagggaagattattaatgttggaagtcggctggagtgtccctcgcatcttttctcatttcatcatgttcatatataataatgtgtgtgtaacttatatatgaattaatgatacagtatatgctgctgaagagtacttttaattatataattaatatatgggtgatgtttaatttgtttctataattatatgtcttaaggcctaattaagctggttattttaatttattaattatgatctcttgtatatgagattatatatttaaccaactatgaagaattttcattacatttatgttaatggtatatatatactaaataatcattaattatttaaaatgttgatcaatattaataatatgttactaccctattgttcaaatatatatatggctgaaatcattaataaagtcacacctctgtagtatatatgttgagccttaaaagtgtctaataaacaatacttattatcacagtacaaaaaagaactttaacttttagaattttgcttgttgactagaccacatcaaactgtaatctggaccctaacgcagccatccctcctaatcatgaaatatatgcgatcaagtcagttttattattatgagcacattgtatattattccgatatctaatattatttaataacctcatcaacacaacacacacgcacacacacacacacatgtatgtatacatacatatatatatatatatcagttttgttttgatatataatataccatgctttataagatgtatcggaggcgaaaattgattgttgggttgatgaggttgatatataaaagtggtataaagtgcagagaatccatatctaaatattataatgatatatacacatcttatacagtctgtactacaagatatgatcctttggagatagagaatttttgctgatgaggttcatctagtactccatcaaaagttgaaagttggggtgaattgctcatttatctaaaaatcgacgtgagtataagaatttttatacatatatatacatataaatatatatatatttatgtaatctatcattgtcaacgttcgatatgcttaaatatatatattcataaatttatgtgtgcatatgtatatgactttatttgtccaatttccttattggttttgtatatagaaacgcacgaaaaaattaaataaatataaaacatgagtattccagcttctttcttacatgcatatatatatataagtcaagtttctataatggactaatttttactttccataaatagtaagtgtgggattcatggctcatgcataattgttttctggtgttgaacaagtataagagagaatattatactggaaacatatacttatatcatatttcacgtatatatatatttaaagagaaatactaaaaggtaccaatatgatgcctaacactattttatgtgttaatttcgctattggtccaactaagtatcgggttccatatatataatttaatataataacttttaggtaatattgctagccattcggaacgccaaatgttgagaaggggctaggtataccactggtgccttcatattaatttaaaatataattactgaataaatagcgttgactgggtcgtctattctcatgacccaatagaatcataaattcaatcaatcccgtttctcattttattcgaacaatattctgtctctaatatgacaaatcccaacttgttgggagggaccgtgcatcgatggagaaggagataaatggttatttattcttcctttttctatcttttctttttatatttgttattattttgaggaattaatgacaaggactctttaatggtttccaaataaatattatatattattatataactttataaatatcttagttagccgggtgatatgtatcatgaagatcccatatatataacgtttcatcataatatataagaactctctaaagaatggagtttgagtagctagctagttatcactatactacaaccaactcttttaccttaatccaatttttttttgataatttaaacaatatatacgaattatctttcccgatctttgtagagtttgctcccagatttttttaagttgccaaaattctcctcaactataaaaattattacaaatatcaagtatattaattgtggtggtttctttgaaaaattcattgacataacactaatctaatgatagtctcactagtcactactaaatgaacttttagaatcggttaatgcctaaaaccatcacaaaataacaaataacaaattaaattttttttaatcagtttgggactgatgctactttgcgtcgatataaactaatatttaattgacacatgttaagcgaaaattttaaagtagaatattaaaatgaatacaaaacacactttcgcttatgccaaattcatagcacaagagtttattaattttaaatttgaccctacaaaaatcatactctttaatgaggaaaaaatttgtcaataaaaagtagttatttcgtcagtaatgattatcaatggtgacacgtcgttagtaaaaatttgttggtgataaacttgttggtcttttttttttttgattttatggactgttcttttttttttagaaaagaaacaactttatttacatattaccacaatattatactatatttactcaatgtgaaaagaatattttttttaggactaccaaaaaacaaccgtctctaaaatgtaaaaaaaaaaggtaaatctataaaaatctttactttttgttgtttatgggtatttatgaaataatctcttatggacaattttattattattgttttaaataataaaattattaatttttatatttttaataaatagtaaattttacttgaattttataattgcgtattgatcacaatactaaaagttgatacaaattataaatatatgacaatttttttttttttttttttgcaaaatgaaatggcctaagtagctaaaatcattccacaaaaaaatagtaattgacggtggaactcttttaattttatacattaaaggtgcgtttattttttttttttaagattcagacatttgaatttaagtaataagatattatatctgaatttgaatgctgaaataattagactgtttattttttacatctgaatatatttttgcaatgttttgaattgtataatattagcaaatttattatattatttttttcatttaaaaaaaacaacccaaatattcaatgcaaaacataattaatttttaaaaaattaaagtatcaattgtttcctctaataacttaattactctttcaattttactaattatttcatttaatagtatacaaataatatattattggaaatattctatgcaacttttttacaaaacatatatagaatatgtaggtaatattaggttaagacatgtaataacaaacaaaaatgcacaatattttctcattatctatgtaaatgtataataaagcacacataatcaaagtgatcaaatcactaaaaaaaacacacacacaatgatgtgatcaatactgatcatgcacctcacacacaaaacgaaagagattcatcaagaacaatgcaaaaagaaaaatatgagaatgattgagcaataatttaaaattaaaatgactataataaatttgctaaaattaatgctactgttgctagaaaattgcttgcaagaaatgtaatatggtaaaaagtggcttgaataactaatccccctagtcaggttttttccggttgctattgttgggttttatgctctaa

SEQ ID NO: 1332 - DNA, 5817 bp, Cannabis sativa
acatgggttgtttttatcttttacaaaaattaataaatccataaacatatgttaattattctataaatttatagctaaactcaatattcataccttatttatataaatatagtttccaaacacttcatcatcacgaggaagatacatgttctgtgacttctgtccaaatcaatatattcatcatcaattcatattagaaaaaaaaaatatttactaaataatatttgtatcaattttatttttatttttcctcatcacgcaaaaccttaaagtatagtactcttgtacgtacactaacatttctctctttctctctctggttgtcatatatataaatatatatgttttagttttagctctctatcaaatagtttcactacagtttccacacatcaaaaccccataatcagcacgcctctcttatatccctgcccccacatatcataagattattcttattgaatatcactagtaccgatacttaatagtatagtatgatattatgaaaaatattagacaccaataatcccttataataaccctattaattccccgagatttctttctacacactactactcatataaatataatataatataataaattattaatatataataaaaccattatttttcatttcactttctcttcctctcccccaaaaataaaaacccataaagccacttcttctctcatcaaaccttccagaaacacgtctattgagcttaccaaaatccctctctctctctctctcagtacaaatattatggatacttcaccacacaatattcgagaattctaccaccaaacaacgcctttcaccgaaattatgtctcgaacttcaaattctttcaatcttaaccaatacgacgacaacgaacacaacgacgtcgttttagaccaacgatatcgtcacccgaatcaaaacgacaacaacaacaacgaagaagaagaagaaattataataatgaaggaacctatgttcgagaagcctttgactcctagcgacgttggaaagctcaaccgactcgtaatcccaaaacaacacgctgagaaatacttcccactcggtggcggtgactcggtcggaggtgagaagggattgttactgagtttcgaggacgagtccggcaagttctggcgtttcaggtactcttactggaacagtagtcaaagctacgtgttgactaaaggatggagccgttacgttaaggagaagcgtttggacgccggcgacgtcgttttgttcgagagacactgtacggataacgaccgtttgtttattggatggaggcgtcgacaggctgcggcgcaagatagtgctgctgcgttagcagcagcgcacgctagcaattgtggtggtggtggtgacggttatattaacaatatcaataataataataataataatacagggtggactaggatgttctattctgcgcatccttatcctacgcaccctcattatcaacaccaccatcagctccaacaccatcctgttatgccataccatcctgactctatacatgcaggtttttctttcatctcccttattttccactgttcaaccctatctccaatatcgctttctctttaattttaattttattttttttaaaagaaaaaacaaaaatgaaaattgaatttttcactgataaaaaagtaaaaaaaaaaaaaaagaaaatatatttttacgcatgtaaaaagtgcgtgagtaacacgttcctgtgagttgggaggaatgtgcatgcccatacaaatggtggtttcaggttatctcgggggttgtgttgtaatcgatcggagtgaaacggacgcgctcttatgttatttctctttctttttttactcgtggaaaatattactgaaactgaggagtggttttttattttctttttttaacttttattttatttaacgtgcacgtgttttgattttgttataactaggaatatccagtaatgttcctaaccaaacgacgtcgtcaccggttcatggaaactcgaagatactgaggctatttggtgtgaacttagagtgtcatgagcaacaatctgatgagaatgagctcgagccatcaaccccagatggctcgtctctgtcgagccaaggtcctccagctcaccaccagttctaccctcctgctcattattcagatcacatggtaagaaggccagctcttataatattattatataagtaaatttaataatgccttgattattttcttaatatatatagcacatggaataagtatattttaacataattggataatgtatgtcgtttgttaaaacaaagatctagtaggtatattcatacgtatatatatattatataaaatgtagatacatagagatggaacatgatttttcatgaactatagttctaggaaattacatggtctcctttcttcctaacaatatataagttcgtggaattcaggtccatatataaattcattgttaattatatttaattaaaaaatgaggtcactaaaatgattgagttctaaagcatagttcattttcaatgtctttgggattactcaaatcactaacataaatatgtaatgaggattagtggggtccaataatatagctaagaaaataaaaattagtcatacgcttatatatagcaaacaaaaggattatgtccaagtttaacaacatgataataaggggtatacatagtcaacattcatggacattattttagaaaagtgaacatctttccagcctatttttagccccaaaaaagtaacatttggggacgaaaaaccgaacttgacccaattacggtcagtttggtttgagttgatatcaacgtgagagaaaagttagatcccaacaaagcatatagttagaaaaagactatttagtgggtctcatgatttatatacatatattttattttttattccacttgaaactattttgatttttaatacatgatatttctttctcacatgtaaaattattaaagggtagtagtcattgtattaaattgatggtcaattggacggtggtatagttaggccgcatgtggtacaacattagaaactgacttttttttttttctttgataattgttgttcccaaactttttatttagaaaataaaaatgactgaatattatttgtgattgaaacaggatttcactttctcccgagatgtcaaacccatgagaaatgatcgaggataaagatctgtggatgtgacgtccatggattgactaatacttttttttgaacccacttggaatttccccacccaaaaaataaaaaaaaaaattaaatgtacatctttaaaagaaaaaaaatttacatattaatatatatttatatagatagaaaatcccagattttaagggtatgaagtttgatgagagccaggtgatatgggaaaccaaaggtccaaaagggaagactgagaagaagaggtggagtactggagtggagtggtggaaggggaaaaggactattgtaaggagagaattgaagaaagaaaaaatgggtcccacacaagaagatagaatgaaaaaactaggctgacgtcatccaatagaaaataggggaaatttggttcattgaaaaaaaaatatatatagagagaggaatgtggaatctggattttgtaactgctgagattctgtcacaagatttttcatgggagctcattataaataatgggaaggaagaaaaagaagagaaaaggtatggtatggtatggtaacggtgggtgggttgttgggtggatttgaatggatggatgacagagttgtggaggtcttcttgatttgtactactcaagcccactcctctctccctttcaccatttttttttgtaatatttatttttgtttttgttttcttgtttatctaacttttttcttgaaatcccattagttttagttttttttttttaattatttagatgaaatgatatgattaaaaaggaatggaggtccttataacacgatagaataatgtgatagaaaagggtataaagaaatttaccgaaaacagtagtcgttttggttcattgttaatagggacaaagcggttaattccacggctatagaggtttttgtatgtaactatgcattaaattggattctgtgaatacagtatttgaaatattagtagaatgagacaagctttgttgtcacaaggttcgaccttatctaaattctgaactagaaatttgatatctgatgatgtctatacaaattatgaagacacatggctagtacttagagatcgtctctgttaaaattagttgctgcagaagataaaaggaataaatttattaaattaaaaattagattgaattgtggactaaattactttctttaagacatttgtggtgctgtctaaaactgtgcaagcaaactatcagcttcgttgtttcttgagataaaacgacccaattgaaaatactatatcagtgctctattacacgatagagaattattaaaataccacatctaataatcgtactactattcgaaatatatatgtaatataaaattcttgtcgttctccttctagttctaatacatcatatgggaaggcacaatatgaagtaacaggaaaaaagttatttttttttgtcctgaaaatcatgtaaacgatcacatgaacattactgaaaatacggagtgagaaatcatttctgcttactaattaattaaacatgtttgaaaattattttaattaattaaataaaaataaaaatttaatagataaattttctacgaaaagataaaataacaccacacccaccaacttgacacaatcaaacaacagcagcgcgcatatggtggtccgatatgtgagtacttacccatacgcacaaaattgagtactccttgggattccaacccaaattctagatttacatattatatacacttctaatgaaatattcctatccatgtgaaactcaatatactcacacaattcacatctcattttgtattaattttgtaaactttcactattccaacaataccagtgaaaatccatcacaagtgaaaacacatgaaatgggtaaagaaagggagactttttttttatttaaggttaacagtgaattttccatccaaatgaaaaattaatgattttctaggagaacatgaaaatgaggttgaataattaaactaataataatgccaaatagactaagaatgtgatagagatttagacaaatcattgaaaagaccctgtaatgataattaaagaaaactgattagattgcaagttgttagactattatagtaagccaaagaaactaaaaaagtggattgtgttgtaggccttgactatgtttaacgttacttacgtagtagtgcgttacaaacatattattacttagaaaaaatatacaatccaattgtaataataataatcagttgttgctaatccaaagaaaaagtagaaaataattgaccaaaactcaagatacactcaagcacatagtaaaagaaattccttttaagtgcaaaagttctggattttgcagcaaagtcagatacggcaaaaacccaccaccattggaatatttcagagtctgcatagcataggtttgctctttttcaacacactgcctgcttataaatcagactcagagcatagctacaagaacaataaatattctcatcatagtcatacaaaagttgatagctagctaattcacaatgtcaatccaaacctactttatgactgttataattattaaattaggtcttgcaaccaagatgggaaccatcagagataatggtaaagatatgatgattagagagagagagaga

SEQ ID NO: 1333 - DNA, 2048 bp, Cannabis sativa
acctcctagattttgagaaaagatcttagtgaggatatcttttaacctagaacatatcagttttgttacaattttatataatacattgtaacaagctatggggtgatagtcactcacagtgttagggcattttagcttagggtgagagtgagaactgtcgaattgatccccttcggtattaaaccaggctagaagaaagatataacaacttcgtagacatcaagtttaattagctcgcaattatcttgaaaaaaaaagagttgatgtagccatcaggaccaggagccttaattcaaagtatactaaatacagcaagcctaacttcttccaatgtgaaattagctttcaacaactaaccatgggagttggatattccttcaggactgattgtttattttctaaccgagatcccaataggattttgtaataggacaggaaagcttcagtagcctcattaggatcatcaattcttcttccttcactattagttataaacaaaattttattttgaattcttctctgcttaatagagatatggaataactctatgtttgaattaccttctttgatccagcttatttttgctttttgctgcataaaagagcagtaggttttatgaacatcaatatactcattccttgcttccaactcttgagcaactagggattcaaaggatctttgtgcaatctatcttggcttttatctagatttctcctatcttgtacatttgcattttgtcttagccttctcaaagaatctcaattcttacaggctaagacaaatctcaaggtttataaacttggcaaacacttgtgtaatactcaaaggtttttttagccaaataatattgactcgtggactatagtttgttaatacttaaatcacataaaaatctcttatcttgttctttatttttgatctatttatttagcattaaaataattataatattggtttctaaaaaactcaataaatattttgatactttcatttggagttgaagaaagagttgataccaaagttatagagtccaacaatggtagtcactagaaccactatcgaaaaattaatttggtcctcctaatgggacactcccatggattacgaaatgggttttaatgtatctgataaagaagatgagctacacagtccaagtactagcaataaatttcaacttttagaaaaggttagcaatcccatcataaataaatgggtaaatcattttcatgaaagcaatccctactgtaacaagttttctttttcttttcaaacaaaatatatttatatttatatgtaatcctttatttatgtatttttaattctaaactttcaattttatatccagttttctgatgacagcaatggtattagccaggcctctgttccgtgaaggctacagtcaggtgtgtgggaggacaaaaaagtcagtataagtttttttctttttaattttttctctgtatataacactatagcatgcaatttaaaatcgtcggctatgtttaaaattgcatgttatagtataaccaatgatatcaaaccgtaggctatagtttttactattgtcgacggttttctatcattgcctattctacccaattttatgacagttgaatacgcgatggttatagagaccaaaggcaatatattagccaactatttaaaactgtcgggaaaactaaattttttagtagtggcatatgttgtggacatcgtcccaacaattgtgagtagaattgtaaggaatgagttcgatctcaaaatctgcgattatggtgtttcttaaagccttaggggacatgcaaatgaagaacataaagttgtggggatgactagaaaattaataagggtggattccagcaatctgagcaactttcttgaaagcacaatgtgtttgctctgaacataaacgactagctttccaatatttatcgtttctaatgattttgagaattctgttttgggtagcgacaagcatacacaagatggcctcaccagtggccccttgtagaacatgttcattatatagcaaactaattagagtatca

SEQ ID NO: 1334 - DNA, 5124 bp, Cannabis sativa
tgttaatgaaatttcagctgatctacataaaggaggacaagtgaaagaagataaatgtcatgaattaatcaaagctgattcaaatgtcaccaaaaccagaaaaacatcaaatgtagaagctattgattcttccaagcagaaatctaaaaaggccccatccaaagaacaagataatacgagattacttcatggaacagagaatctagttcttgctgagaaaaagaaattgaagggcagtcatggctcctcatctgtacaggctccaaaagaaagcttgaaggctggttcttcgatgcctaaaactaaaaaaggtactaacatggctacttcggtgtctaatagtgatggggaaaatgtgaaatcacgcaaggatattgggaaagccatggatacatacaaagacttgtttggagatttagatgaggaagataactcattacctgcaaatccttatgaagacaagccgagggaatctgttggatttgcaaagagcactcctgcaatcgatggattattaaaggagagagtaagtggtaagaaaactgagaagccatcaacgtcggaggcatttcttctaactgcttcaagtccaaaatctgggaatggattctctactgatgtgacgcttcccacggggcctgctgaggtgataaaagaaaattgggttgcttgtgacaagtgtcaaaaatggcggcttcttcctttgggtacgaatccagaggacctacctgagaagtggttatgtagcatgcttaactggctgtaagtgttttcatttcagtcaaccttttttttgtcactcatttctattactcataataagacaacttttttattgggtcaactcatatggtaatatttatgtaaccatctgtttcccctctctctctctctctaaaacttgatatttatgtacaatcgtaggcctggaatgaatcgatgcagtgttactgaggaggaaacaaacaaacctcttattgcacagttccagcagcctcctgctcttcagagtcaagccaatcttaacagtaattctggtgtcacagaagccacactggctaattttaggcaccctgatccaaatccacgtgatatcaatggaaagaagaaacatagtttaaagttaatgtccagttcagctaataaagatagccccactcagctgccaaactctatgaagaaaagtatgcagctgtccctgaaaagtagaagtttaaatgatgtacacaattctcctctagccagtgatcctgattttccactgctaagcaaggctaacgacttgataccaggtgataaaaaacgtaagtacaaagtaaagaacacagtctgcgagccccatgcttttggaggtagtctattatatgcagtctttctttcgtaaaacctcttaattttttatttttatttactgtctaatttatgacttgttattaggcgatccaaaaaatttaaagcttaaaagcagaagagaatctgatcaagattcttctagagcttccaagaaaatgaagactcaggctaggaatggtgttgatgaaggttgggcatcagaccatagtggggcgattgggaaggttggtcctagctcaagtggtggtttcccaacttcttcagcagggagggatcgaaataaccgctcttcctctagagattcaaaatttgatgtgaaagatcggccacaagttcccatagtgaaatcaaatggtaaagttgaagttgccccggagaatggctctctagaaagagggaggactgaaagtagagagaatatgaagaaaaggaagagtaaggaatttccaaatggatcctgcccaagtacaggacgtcttcctgatagcacgccttttgtgaaggattttagtgataatgactataggaaggaaaagaagccaagaatatctatatctgatggaaaagagtccagtgcaagcaaaggcaaggatagaacagacaagaaacgtagccattcaaagaatcacctgcattcacgggatcttggcatcactcagccaaatttggataatatggatttattaaaaagggatttaggacctatacagccttctttagctgccacttctagttcttccaaggtttctggttcccataaatccaaatccagttttcaggaagtgaaaggctcacctgtagaatcagtatcatcttcacctatgagaatttcaaatccagataagatttcatccatcactagggatgtcttagttaaagaagagtttccacatgctggtaattatgccttacgtagtccaaaaagaagctctaatggtgaagattgtggtgggcgtgatcacactcgtgtaggaagaaaggataatgcatccaatggggctaatcacaggtctcaagagtcttctttgcatggttcacaggaaagggattttaatcatatgtcagggacaaagaatatgatacaggttgtgtctggtgttacaaaccacatttctgcaaatggtcctttggataatttaggccaagatgctgaatatcctaataagccactgggtttgtgtaacttttcttatgaagagaaacagaatgaaagccattatgatgcgaatgggtcccactcaaggaagtctgccaaggggtcttcttcaaggtcagagaagaatcggagtcttaaatctgagtttgatacagtcaaggtaaaaagttctgatgctgttggtgagctgcatggtcgctcggcatctggggacataaaatctagggatggtaaaaacaaattgcaggagaagtatggggtcaagtctgataaagttgatgagaagattttgaacaacaaaagaaatgtaacaggaaaaccatcaactgagagctgtaagagggagactgagctaaatgttggagggtgtgacaatgtagatttaaaagtagatgcaatttgtcgaaaagatgctgtgtcaaccccacatcagaatgtgttgctggacagcaaggatgatagatcttcgaagaggttggtttctgataaaactgataaagtggaaacagtttccagtggagagaggtcaataatcctaccaccctctggaggacctcaaggtgatatactgaattctttcccccagccaggtactgggttgcacaaaggaaatggtgtggacacatcacatgctgacacctctgaaggtagcaatgtactgaaagtgcaaaaacagatgagaaaggcagataaatcccagcagtccagttcaagaaatccatcaaagaatggacacagggtcagagatcttgatgtgccatccagcaatgccgccgctagcaatgctttgaaagaagcaataaatctaaaacacatggccgatcgtttcaaggttataatacttaaatagttatatatttttctgatgttacatggctgcttttgtttattctttgtactatcaatcttttggcagagtgctggctctacccatgagaggacaggactttactttgaagcagcccttaagtttctttatggggcatctctgttggagtctggctgcagcgagagtacaagccacagtgagatgcttcggtcactaaaaacttatagtgatactgctaagatgtgcgagtaagttgaaacataagctggccttttgagtctttggatatattttcatgagtctttattatttttttagttgacatgaggatgtagagtttggtacttccattgcctttcaggagaatgcacaaatatgtacttatattatctcatgttgttttttctttttcttttttcaatttaaaactactaattggatcaagttcttaattggtttagcaatgctattgataatttaatgccaatttactaatagattttctatgaacccatcttgactatacctgttctcacagtgaatcttttttctgtacaagtttgaaaaactgctaggtcttttcccgggttctttactcatctcttttacgttaataggtttattgctcttgagtacgagaaatcgaaagacatggcctctgctgctctcgcatacaaatgctcagaggtggcatacatgagggtagtttattctttgcatcccagtgcaggtagagatcgacatgagttgcaggcagctctccaagtgcctcctctgggtaattttcatatgatctagaaatatggtctttttatgatatcactgtacttgctgtattatttcatgtcttttgattttcttaaccttccccgactttctgacagttgtacttctagttatttctatcaatagacctgataatataggggcacatttctataataatagaaggttatgttttcactcataaattgaagggagtggttgtatataaacattctggcatttagtatggccatgtgaattattagttaattattattttttggttgtttataataataattttaatgcactttctgtgtgttagctttttaacctttacccttttggtacatagactacagcctacaccaccaatctatcatagtaactaatgtaatttattttgctaaattcctcaaagagagttttttgattcgagggaaggaatgcttttctccataaaaatgttttgggaaaaatgttcctactttttattgctcattttcttttctcatctaatccatttttgttttttcattttatcaggtgaatcaccatcttcttctgcttctgatgttgacaacttaaacaaccacgcaactgttgataaagtttccttgcttaagggtgctagctccccactagttgctgctaaccatgttgttattgctgctcgaaatcgttccagttttgataaagtccttcattttgtgagtacaaactgtctaagagcttttaatgttgaattcctgatttaggttatatttggtaggaaggatggggagtgggatggatgaagaacctagagaggatggagagtaggacgcatggaaaagatagttgctctcctttctgttatttggtattagtgtgaagttggaaggatggagagaaaattaatcagtagaattacaatattggaatttttaaacaataatatttatcactttttaaaaggatattattgtatttaacaaaatctattttttcttttactacaatcctcccaaaattggaggga

SEQ ID NO: 1335 - DNA, 3565 bp, Cannabis sativa
taatatatcataacgctaaccttcttttggaatattaaaaaaaatgaaagaatacatttttagaaaaatctaaatgtgttaaatttgatgaaattttataaaatttagaattgttataaatatatttaataagataatttattaaaaaaataaaaaaacttgtcataaaattttaggattataatgaataaaatccatacgaagttttcctccattattttcgctcataaaattattccatatatatacttaaatcttattaccttggttccaggaggaagtagtgatctgagcgattgaaagctttcgttaagcttctcacgcctcttccgctctgatatcatatggtgcaactgagtactcgtagtcggacgacacgtcgttccagtgttgccggccgcagcagcattagcagccgcttcttgcagacgctgacgtgtcctcataaaattcaagcttcgaaagaaagaaactgatcgcttgaacatatttttattcagatcactcaatcgaggatgaggatgatgatgatggtgaacatgatgagtagtagtactatagcttttgaaagcacttgatttctggtttatcaattggccgtgatgatgatgatgatgatgatcactgctgtaaagagaagaggaagaagaagaagtaggatcaggcgaattcgaggtcagaactgctagaattgcttttgtcatggcggcgtcttcgctctccgagcttggaaactgggcttgtctgaggctagcaaaggcttgcattgcttgttgatgaggcatggtgaggagtggtggtggtgtagtagtagaagtagtggtagtggtggtagtacatggttgtaataacaattgagagttatttgggttattgttaattatactaagtatttgagaagaagtagtattggtagttgtagttgaaggggttggattattgttaatactgaagagaagagatgaatattcagggctgttagtatccatagataatgaccttaaagaggatgaattagaagaagaagcagctgcaagtggattttgattagaagtagtatcggttggcggcttaataataattggattatttaactgttctacaatttgggtttgactcgatataataatttgacgatctacttggtctctccccgcaacttggctttgacttgaaaattcttccggaaaccaatttcttaaatccattttcatcttcatctaaagaaatataatatagattaagttttgtttagtcttataataattttaaattgttatgtatatattaaacaacaaacatatgtttattaattaattaaatgtaagagcaaatattataatgggaaatcaagtgcattaattttatatatgtacatacctgaggctcaattggaagaccaatttcaatctctccagtcctgcaacccatgaaaactgcagtctgtgtgtacatgaatttttaaagagggaattaaatctaaaaaaaagtgggaaatagtgtattataatatatatataatgctcaatttctctactcaatttttgttgaagagtctgtacgtacccttatcccagcttcctgtcaagacaaaacaaacaattagtcgttaatacctaattagaagtaaatcaataattacaatgtttaatgacaattattaatctattataataattaccacgtagaatcgcctttgtgagtcgtttgaagccaatctccgaagctcaatatcttgcagctccaagtacggagagttattcctaaaagctgatcctggaacttggctaattaatgatcatcacaacagacagaaaaagaaaatataaaatcacgtcaattgttatatattagaaaactcataaattaatttttagctcatatatatatataatcttactcatttgcagagaccccaagtataattgactggcaatactcatcgaaaagtgtccgagcaagacttcgagatgatgatgatgatgaggatgagctaggcaactgggtatttaaatcttcgtaatacaaaccatctaggtagaagaaaacgtaactgcatacacacatgtatatatatatatataaatattagaaaaacagagagaagcagaagaagaggaaggtgttattgatgatcgatcgtacttttcagggttatatttccataaacaaacgtaagtgcagcccacagattgcatcaaaaaccgaacgaaatttgctcggtagttaccgtcgtgactaaacgcagaatccatggccgttgattctgttctttttctaattgaatcaatataaataagaaatatattttaaataatgatgagaggaaatgataataataataatagttgatgatgaataattaatatcatttcgatctgcgacgtcgtcgtttcgctatgctgtgtttctgttgcttttggtatactttgtcacgatcatcatctgtagcagagctttcattttgaaaaataatatggtgaacgggtacatgttcttctagagggaatttaatatatagaatcagtctttgaagaaatctagtatagtattagctagtactatactaattctaccttttattattattatatatatatgtatatgtatgtgttgtgtatatgaattaagaattgtatattttaatttaactttaatttgtgacattagttatttgtgtgggaatacattaatttgtgacatgtatatattatgggttggtgcaaaaaatagatgtgaagggttgataagtatgacataacgtaggaaagagagagatttgaaaagtattttgtaggacagagataagaaaattggctggctattaaaggatttgatatgtgggagggaaaaatatatgttgtttaaatatttgtgtatataaataaaaaaggaaagcttcaaataaagaagcacttgaaaagtagtatagaagtagctataagttagtgagaaatgtagagagagagagatgagcagccaaccatagaaaagaatgagaataagaaaataagggaagaatatggaaaagtagtgagtcaaagtcaattaatttgcatggattttgaaaagagtcaaaggaggaaggcagagtgtccctttccaacatttctttttttttttttagtattgctactaggtgtatttatgtacttagttgaggtattttataattaattagcaatttttataatatttattaaaataaaataaataggatccgatattaaattacatcaataatgatattatacctcataagaatactaatcactatatataccctttaacattttctaaactaaataggtgtgcaatacataccatcatattgtcaattaatttttattatttaaagtgtaataacatcatttgacatttggagtttgtgtatagttgaaacttgaaataatagctaaagatttgagaataggaaaaaaattaaaatcttttctctttctggggtgttctagtaggtatgcgatgtgtccttggtcccgtcaataaaggttctcgtccaccctaaccagtcaagtggtggtttgtccttttctttcctttgctg

SEQ ID NO: 1336 - DNA, 2583 bp, Cannabis sativa
cagttgcattggtttttattaccaaatcagtcagagtcaggtatggagtatgagtattgtattgtgaattggattaggataggattcttgtagcaagaagatatttctgtatgtgtatttttgaactgtttaaactgactagttggataattatagatgtgaatgagaatgaaacaagatactgatcattaatggaggcactttcgttctccatctaacgatcttgttcaaaattattgtaattaatttcatctttgggattttagcaagctgaaattcatcaaagcctatgagttttttttggtgatttgagtatggagattcctttgcaaagggttcttattagacggaattggaagaaattacactttttaaggttaggaaagaatgagaatgaataaaaaaaaatgaatggtaaaactaatttctcagttgtgcaagtaaacataacatacatgttttattgatattgttttcacttttgattcgtttgtaagtcatatgtaaacttcttagaagatgaagaaatctgaagtactctttcctgcattgcagacttgtaatggaaattgcatccagccagtcatttgattcagacgaaggagaacagtgtctgcccatcgaaagccatggtgaaaccgaacacatggctgatgatgagattgcagaacatgttgaccagtttgaagaaagtttacccatgacaggcaatgttatagagccgtacattggcatggagttcaaatcaagggacgatgctcgagaattttttattgtttatggaaggcatactggatttactgtacgtattcatcataacaggcggtcacggataaacaacatggtgataggtcaggattttgtttgttcgaaagaaggttttcgtgaaaagaaatatgcgagcaggaaagatagagttcttcctcctccacctgttaccagagaaggatgtcctgtaatgctgagggtggctttaagagatggagagaagtgggccgtcaccaaatttataaaaaagcataatcacacgttaatgtctccaagtaaagttccatggcgagggtctagcaagcacatgatcactgaggtttgttttcttgttctgtttaactggcgttaagttgagatttacttcataattcaaaattaggctactcaagacttgttatctgttgattgagaaaggaaaaacttttataccaaaatcaaaagtcctcatctgtgtctaatgtttttgttatgtttcaccatttttgtacctgtttgcaggatgagaaggatcggagaataggtgaactgacacttgaactaagcaaagaaagacagagatgtaaacgtagatgtgcagtttaccgggaacaattgcatatgatcttgaaagacatagagcaccatactgatcacttgtccaaaagagttcaagatattgttcaaaacatacaggagtttgagaatgaagattcataattttagttctctgtctacaagttccattttacttttgataatgtactattttcaaagttatcaatactaatttagtaaggtacacacaatacaagacagggctccatcttctacatgttaattttgggtgttatgagctttaaaccaagaatgtaaatcttccgttcaagttgcttgacatttctatgttcaactactcaaatttgtggaaggattagatgtaaattttgagtagtggggatggaaaacaagaggccatgcaatatgacatcagaagatgcaattaattttatgtgcaattgcatttaaagcaggcatctactttcaagaagtatagggctgatttaagcaggagctgaaaggaaatactggttgaaacaaaaactgaacctttgttgaaaaaatatcaatgaaattgattatggtagctaaatattttacaaaactatcttctattcttcaaacgaaaagcagcacgaataaacaacttgtcaacctcgtcgaaattctgcaaatccacatcttcactggatgatttagcattcttggaatcttgtgatatttgacgcaagtgatcctgaaaatcttcaggttcttcatagtttttcactggaaacttttcgaactcttccaaataaagtggtcgttctcctttctcctcagcctccctctcggagtcagtttcgaaaatgtctgatagatcttcagaatcagaagccagtgcagctttcatcacaagatcacgcgctgaacattgtttgctctcatctgccattttctcccactggagttttgaataactttcagagtctgtactctgtaaaacagtttcatcggttttttcaacaacatcagtgatatttgcaggcttgcttttagcctgagactgcaacaatacaagatcctgctggagcttgggaagatacttcctcacagcacggaggccatctctatacttggatttatccaaagcctaaacagatgagataacagccagtgaaaagtattagctgcgcaagttcaaagccaaacacaaatctccatggtacaatacaactagtggtaataacaaacataactaaatctaagcctattcagcaaaactcaacattaaca

SEQ ID NO: 1337 - DNA, 4530 bp, Cannabis sativa
  modified_base (1804)..(1806): a, c, t, g, unknown or other
aaataatttccaacaaaaatatctagagagctctaagacaaaattagagtagttcttaatctcccaacacaacgacacgtggttgagagagttgatcacgatcctagagtcactttccacgatgacgaacttgcgacctttgagcttcgcagaatccaggggtaaggaataagtcgttgcctcaccacaaagagcatttgcatagtccaatctagtcgaagtaacctagaccacctcacccaaatggtttctagcgaccaccgtgatacaaaaactttccaagccaactctgacatcacaatgaagcttgagccaatcctgaggaggatggcgccagccttccctctagacttgggtcgcaacgagtaaaagagcaactgtcagatcttcaaaagcacaatgggtagagtcaatacattttttttacatcatgtaaataattattatggaccttttcattcctgacacgctagatagtatccaccacaattgaagcataaataatgacctcctctgcatttatgcctttggaactgagtccccacgaaaactcaacccaatcctaaacacgtatactagatcaaaaaataggataaatcccccacgtggaagatctccataagtgaaaaataaagtcacaagaaggaaacaaatgctccatagattcctcctccatcccacataaggggcagttcacatcatcaacatggaatctcttcttaatgatggccctaagaggaagagcatcagacagaatgctccaccaaaagactttgagtctctccatgattttactattccgaagcctgttctaaagcgatggagctacctcacaattaggagctctttgtaaagcttaaacaagatggctgacttgcaagagaactggccattacgttctttggcccaaatccaattatcaaaaccttaaccagagggatcgcccccttgcagaatagcagaagtcgtttctttatcaaatatgctcatcagtttcggaatgtcccattttccattaatagttaaaaggttagccaccttgtgtaaactagaatcaaatcatccgcaaagaaaatgtgtgatagagtatggcctcccttggaaagacatattcctttaatgttaccccttttctgagtcccatctaaaagccttgacaaaatctcagccgcccaataaaaaggtaaggagataacggatccccttaccgaagcccacaagacggattgattcacttcacaagtaatcgattctttaaatttatttttggcaacaaaactcgtattttgtaaccattaagctactttcatctattttttacaattaactactatataagactattaatgcatacatagatgttgttcatgtgaacacaatttacatatgacataatttaatatctaatctctttaaaaataaacacaaaaaataacaagaaaaaaaaacaaattatatttatcggttcctctccttctctctaatatctaatctctttcactctctctttataatttaggggtgtacgtcgatcagttcggtcagtttatgttatattttatttaacccaacgtaaaggttacaaaaatctaagtgtaacttgaccaattaagaaaaaaatcaacccgcccaatgaattggtctgtttggttgggttaacccattcaaactgagcactaatgtttatttttttacattcaattattatattttagttaattgtgatattgagataaatatatagattgaattcatagtttaaatcaactaccatgaaagaaatatagtagtttgaactttctannntttataaatatgtatataaattatattatgtatagattatatacaataaaaatatatattttaaaaaatcctcttaaggtcaggttagtcccggttaattaggcgggttagtattattttcaacccgcccaatataaagattgggcgagttatattttcgtcgagtttttttatttgtatttttcgttgggttatctcatttggacaggttgttcgaattgagcggtttacaaaaatttatgtacaaccctactctatatctctctctccctctaatattctgatctcaccatgccgacaacctctctctctttctctctctctctctctcttgtttcttctcgtgccagactcagatgacacctccaccctcgcgagccccgtcctcacattcctaatgttgatatttttaagaccaatgttccaaatttggcacttttctgtaaaattctctagattttgggtaaaggccgaactagctattgaaaaagcccaaagattttggaaaggccaggcccattataaagtcgtaactgtagtagtgccgaccctcgtttttgattctttgcttcacgtcattgaattcaatacgtgacttaccaacccaatcccagaaacgaaggaattcccactcgactcgattccattcatattttctcgctgaattttctagataaagaaaagaaaaaggaaaaggaaaagagaacgtaaaaggttggtgagtaattttccatattactactagtactactctctactgtgtgtgtgtgtgtgtatgtatgcgatgtttgataaatgaaagcttttttaggattttgaagagacattagagagagtttgagatgaagggtctttcttcgaggaccaaggtcgttatcaggcacttgcctccttctctctcgcagtccgatctctttcaacaaattgatgatcgattctctggccgctacaaatggtcttgcttccgtcccggaaagattaggtttgctttgccccttttctttcatttttttttaaatataagaaagttgaatgctggaaaattttagctagatttttttgtcggacattaggggtttttaatttctgtaacaccttctttagcataaaaaagaatcgcaacgaatgatatactgattgttaattaagctcaaaatcactaattatttgagtaaagttggttttttttttttttaagtgacggaaagattaggtgctaatcttttttttttggttaaattaaattattgatcgtcagttagggtttttatatgttcttttcatttacagtgtttatgtattgaattgatattgcagcctaaagcatcagagatattctcgagcatacatagatttcaccagagctgaagatgttttagagtttgctgaattttttgacggtcatgtctttgttaacgagaagggtaattaaacgaataagtatcttattctttagctgtgatatatggatggaatatgatgtttccttgcgttgcgttgtaaaaaaactatcttttttatttgagtatcttatatttttcagagctccctaattaatgtattacggtgatcttaaaagttaaaagagaacgtcagaaaatagtttattattacaaacagagagagtaaattgttctgacactgttttcatattgatagcaatttttctgaaagtatttttctgaagcttaaactattgttgtctcaggcgttcagtataagactatagtcgaatatgctccttcccagcgtgttccaaaactttctagcaggagggatggtcgtgaggggaccattattaaaggtaccgaatttgttgttaattgttactccggaatgttcttagctgtaaatataacacatgatatattattctttatgatgtagatcctgattatttggagttcctcaaaatcattgcgaagcctgctgagcatttaccaagtgccgaaatacaattggaaagaaaagaagcagaacaagctggttggtttttacacatgtttatgaatctgctagtgcactgtagtaattataagtagtttaggtttggaaaagatgactatttgctaatctcttaattacgcagaaagaatctgcaacatttacatttgcttgcgggcacccttttatgggcttgttattgaattaacttgagggttgtcttggaaagtttacgatagaattgtccattgtcacgaagaaaatatctaccaaaataatatatcagcgcatgctaggttttttctagtattgacagtctgtgccatttatttctcaggtgctgcaaaagaaacccctatcattaccccccttatggaatatgttcgtcagaaacgtgcagttggaaatggagctcaggtagggactgaatctttctgtttatgttcacaagttttgaataaacaccagacccttgggcaaaacgtggtccaaaattttgaagaatcggttttatgttttagtcttcattgattctacttatttgacttgaattctctttgattatttctttccaatttcaattgatttttttatttggtacttttggggtgaatgttgattgtggtttttttatttcgtacttttggggcgaatgttgattgtggtttttttatttccagtgcatagcacactcaacttagttactgtatgattgtttctctttagtatctgatgtaccctgctgctatgaaatagtaataaattgcagtaacaatggaa

SEQ ID NO: 1338 - DNA, 3235 bp, Cannabis sativa
ctaaaaagagtatacgctctcgtttttcttaaacataaacgaggccaataacactagtcagtctgatagtgcaccttgtacagataaaggaaaatattttaaacgcactaacagtttctatacttttgacaaagctacacacaacagaaaaagaaaataaaggaatctccatcaatagtgtatttttctcttatcaaaattctttataatttaatttctagtctaataaagctatgcgagaaataaggaatcaaaattgactaaccacaattaaccagaaagaataatttgagcttctcagattgggccacctccagcatcatattggcatgatcagaaataataagttcattcattataaactatattctaaatgcactacctcctgatatctgatgttgcttcttgaagtctcttcttaaatgaattaaaactactctggctcttgttgctccaatgaaacgaagtacttcgtttcagaaagtctgatataaaaggcgatggggatgttgaatcctttaatagattgtcctcgtactctgcacaaaaaatgcacattagaaaataatcagctgattgcacttggtgatcgagtgcataaaactagttttgttgtttttccagtcctggaaaatcagaaatgtggttacagcctctccattaccactactgctactcagactaccatgatatcaatatgagaaaagaaaggtcaaacacctgaggacatagggagattatattgtgtcttcaaaaatttggaggcttctctatctttcttgtggcataaaactcgcattaatgtgtggacatttagtatattactacgatcattatcatgagaatctaagcccatggagatctgctcactcgcagtcataagcatttggatcacagtttcagtctgcagaaataataatccatcacgctgccagtttcagccactaatcaaaagtaaaaagttttcaatcacaagtcatcaaacctgaactgagtacaagcccagtattcgctcagcaaactttgcttcttgttctactaatgaacagtcaaggccttcaccattagctacaaaaagttcctacaaagttcagcaacattatcatttgtcagttaaaaatatttaaatcaacattgtacatataagcatacgtgttcaaacttcaaatcacatgatgaaatttgaatttggttttaatatatgtagcagtgccactctacaaactcatgtcaataaagtggctattaaggacctaggtctatctactgaacccaaaatcttttacccattgaaaatcctgacaaaacaaatctcgtatttaggacaagcgtaaacacatcaccaatttaggaagtttaataagtaacagtatgctcagaattaacatgcacgctaggctataaaaatacttttgttctgtagttcttaaacctcttaggtgttagcccttgggaattatgtaatgtacaaggctactcaactgtcacgtcaaaggagatttgaaaaagtttctatgatttacaaaaaaaaaaaatagtttctatgatttaagttcatacttgcaagcacataattgttagggatccagatatcaagcatttcagagttaagaattagacagaacttttagtccggatttattaatagctcttagtttgtttcattttgtttaagtgacctggaatattcaataacaattgtgtgcctcaattctctgctagatgaaaaattttaagaaccttcaacatggcaaggtcatcctccataaatataatatctgaatctgaaaatgcacgggaaggaccaccatcaagcagcacccatacaaaaccttcctggatcacagatcaatgcaaagctaaattatttgaaaacagcctcataaaacataagcttccaaggatgagatcataccagtgatgctcgatatatggttaaaatcacgcaatctctcaaagtatcatcaattaagccacatacacgatcaaggacctacattgtgcctcttagattaaaacccaacaaaacaattccagtgaaggaaaaatgtaaccttaattaaacccatcatgtaatgcaaatacaagtacaagtacagcattatgtggagagggaaaaatgtatatttttatcagcttacagtgtcaagatgtggaagtacactgtccaaacgagcaacttcaacactaccactatacaaagaagagataaagccatccctgagatcccagaacacaacttttggacctgaacattgagtttaagtaacataaatcaggctgaatgttttcatacccatccaaagcgagacagttgaaaattatgtgtaaataagttattgtaatttagttgaatgatgcaccaacatcgttgcaatgtatggagatatgaagaaatttggtaacaataggaactattatactgcaaatttgacttacctataaactcgcaaattttcttgataccattcaatgaagtgtccttgataatgtcaaaggtattggcaaacagttcatcaacctcttcaccactagtaatttcatgaggctcactctcagctaattcaaataaaaaatacaagttaaacatgaaaacatcaacaacaaaaattcaactgttaagggaatttggacattaaaactgcaacgctcgtcaaagaaaatccacccttaatgattgtgtaaaaggaaaaagaatgtcattttcacctcattcaactaaaccgcttacggtacagttaaaagttatttttgtttacttaaaacagccatcactatttgttcataaaattctaatgcctctgaattatactttacgaaccctgtagaaaatatagtttggacaacggagttcataaaaacctgaaattttgtcaaagctaaagcatatatgccgaaaagattacaattgcctaaacaaccaggtttaagaatttcttagtcactctactatcataaatagggttaacaaggtaacttgcaggaaaattctaaacaggcttagcaaggctttgtttatctcaatacttttttggagaagaaagtgaatccttgtggagtagggatgagaaaagagactgctacgtacattttgtgactattgatgaataaagcaacacaatcttatatgttgcatgtcataattgtgagcttagataccagttaacgttgttacttgttacagtagaattcgaagaaacaaacgggccattaaaataacaagttcatatttgta

SEQ ID NO: 1339 - DNA, 2668 bp, Cannabis sativa
gcattagaattcttctttctcctatagcaaatatcaatttatcaatgcgaagggagacaagctttattaatgatccaaacacataaaactaatgattagtaatacatatagcacattttgaaatttcagaaaaactacagctaagctaagtcttctgataaaaataaaaattaaacaggacatgattacaactctcacaatttaagcctttggacaaagcagaaaatggcctagcgaggaggcaagtctttaattgtaactgagataacagaacaaactgcttgtataatggtaagaatgataagaagaacagctgcaatgacagaaacaattgcccaaggagtgtggaaatagttctgtttcaagtttgccctccatttatgccaggaggtcttgcaataggcacgtagttgttcagaaatttgagcaaaataaaaatcatcagagtccaaagtaaccccatctgcaagcttgtttatcaaagtagccccctggctgctgtcccctaatctattctcaacgatcccatacttcacaagtaaatctacatctttgggagtattaacaagccggtctataatcacgacataatcgttcaagtaattctccctgcaatggcattcttcaaacgcaagtaagtttctgaatgtaagttccatctcatcacttattgtcagcttcggaatttccaaaattccttcagagaaatgtatgtcaaacaaatttttgctcgacctcatcttgaacttaactccagctcggtgtagctctgttatgcttgggatgttcatagatgtcagcctctttacttctggtttttgttccagtgggacatatacatttctaaggatatcaacaaaatgttcaattcttggagaagatattcgctccaaattttctgttccctttaactgcatcagccctttgaaaaacatatgagaaagcttaatgattgaaagcctctcatcattagaagaagggactgaaattctttctgggttaaaaagatgttcaagaatgaagaagggcagctgattctcaagcaaccgcacatcacgccagatgtcctgcagcatccatggcttgttaaagatacgatcatgctcgtcttgaagctcgtgaaaacagtaccttaatagaacctcaataatgaatgcagcatctactaaaacaatctttgtaaattcatcacttgagaatcttataggttctgcataacagctgcgcaattcttcttctttatcttttatgatttttatgtagtattccaagcctaaacttgtgtgcttaagataatcacataaatacctctttttgtgctcttccattgctcttaatctttccttgccatgatgaagaggaccaatggaaactacctggggtgtgtaggcattttcattgacaagccgcagccgttcagaaaccctgtagatagagcacttggaagataagggagacaagctttccaactccaatctcagcgaagtcgccaaagaaactgatggattctcgatgtcatttggagaatgatctccatatctgtttgccatgtgtgccttctccttgttaagaatgataaccaacaccagaataaaactagcaaacagattagtgcagagaaaaggagctgggctgattcttttctactgtttggttgcccagaaaatgtagcagaagaacaatatttttaaaatgtccgagagaaaaaaaatgctttgctgaagagtagaagcaattaagatgtgaaaagtaagctacacctgtatcaaagaactgttcgtagcttcggcaggctataggcaaagcataactgaaagactatgaaatacaaattgaataatctagaatttcaatacaaacaatgtgttgtatgaacgtaaacaaaagtatatatacatctgtaaatgtgagaaaactatagcaaaagtcaagtcaactaagtaaattaccaggaaaatgacaagctggttcgtcataattaggaggcacctactgtgtcatggaacaaaagtttcagaaaagtcataattaaattacaaggtcgggtcgtccttcttgttgagtttgaccgttagtctaaccatcacaatctcatgcctcattgcacattacactaagcaacacagcatgtttaaggaccataatgcaaaatatgtaatgggactcctattttaataaagcatcaacaagatatcctcagcaaatattgatctcaactttctgaattcacgtactaagtttaaaatggagatattttcagaaacaataatgttaccaatgaaaataataattgctaagttaaaacagcaaatagtttatgttcataaacaataagaacttctaacaagaaacttatttcagtttagattttgtagagctccgaagaggcttcgcaactggtctagcaggggcacttctagcagccttcttgatatcatacttcacagacgagaacgcacagataagagcaagcaccattgtcgggtaaacatacactgctttagtgggatccgtgtttgcaggctttccaagtatcccttccttgacaaggccccagattattagaagtgtcccaaacatggtcatccttcctggtttcagaaggcacacaaaggctccagccacagaaaagtagcttccagcaagaacctgaaggaagaaccataag

SEQ ID NO: 1340 - DNA, 2166 bp, Cannabis sativa
tttagagcaattacttacgagtgatccaaactaactgaactcgtcttcagttcccttttgcggtgtggattcacgcttactgaaagaaatattaaatctgatgcgtaggcaacaacacatctgaagaggtaccaataatgagaaatcaaagtgcatacaaatatttgttcaaaaaagggcataaaaatattaccaatcaaagaataaaaaaccagtatgctttccaacacaatttgcaattcagttatgttattttctaagatcagtttcagctataaagacccctaaacatatcctaggcataacaaaaattcatcacgtcattgactcattatctgatagactccacaataccaacgacagcaataggcagaatttagatagaaagatggggtcttttattgagtataatagcataaataaaaatactcaagtattcgatagacctggttcacgtagtcacttaaagaaactgtgtctaagaacaaccattatcaacaagaaaactggatgaatattcaatactcagagcaagttgcgtaccgatgcaaggcttggtcctctgaaagttttcctcttgctctaaaccagtacttcaaactacaatacagttagtgaaaggtgccaataaaagagtaaataaatgccaattttctcctcaaaaagataagttaaggaaattaaactaacaaacaaccccttaaatgagaagcgattgtaggcttcaaccagagatgaacttatacagcactgtaaagaaagcaaaccttggaggagattttgtctgattggttgaagtattcggttcacaaaaacgtatctctatgggccaagggacaaagcttttagtagccaccttgtttcgatatgtcctgaatcaattcattctcacaaatcatataacaaaaaattgacatctttatatcagaaatgaaacttcagtgtgcattgtaactccctttcaaaagcacatgcggctaacgaggcaagcatggaaaagtcagttgcttaatacatctcaacatatcaaaatagtgttcaacaaaattactctttaatggacaatacatgaataatataaatcttcaaatttaacagtggattttttgttttaaggttgacctaacatttgttgtcacaataataaagttatgcaaaagctagagctagtgtcatggaatattccagttaatgtttgatgcagaaactaatataaaagaattagaaagacctttaaaacatgaaaagaaatctaccttggaagacgagtatccataatccgctcatttcgtagttcttccatattaaggagctgtaacagataagagttcaaatattagcaaagcaattacacataaatatatatatcagcaagcactgttactcaccgtctctggatcagacactgatggcattagtgattcctggtgatcaaaaccttcctcatctttctgtaaaatcagctcaagaaaatattattagaaatctgagatgttgaaacagcatggagcataatgcaagaaaaaacacacgctaaagagctcacaaagtaaatgcaggaccaacataaaaattagcagtcaattaatttgagatgtataagcatactgtaccataatctcacaagtataattgctataataaaactagaagtaaatgctatccaaattcaagtcacaaaaaaaattcttaataaaactccaatgattaagtgtgtacttgaaatgaagcaagcaacgtgaatatgatgattcctttctgtattgcatctactcttcgggtagcaaagcttctcccttcacgcagtcggtgtacttgatatataattggtactgcagaattttcaaatgaactttagttcccaaaattattcatcgaagtgtttaaaaataaaaaataaattaaaaacaaaaccaagccaattaaagcataaatggaaaaaagaatttaaaagattataaatttcatcttccatgcaaatcatgcaaatttgtggcagcaactacattatgttacggaagttttgtaagaatccaaaaatggcaatctacttgggtgtgtaaaaacctagaagctcaatacatttttcaatacaaacataaatttgccaatggagaagcttactgttacttaatatctatatctcattacacacacacacacaca

SEQ ID NO: 1341 - DNA, 2875 bp, Cannabis sativa
ttaacctaaaaaagaaataaggagactttataagcctttaattgataatttatcaacttaattggcatttaatagttcaataattctattaaatacaagaaagtaaaatgcaccaatatattagcaaaatagataagggaaatgctaaaaaatacttgtggtatcctaacacttgcatgagatatcatatttctactaatataatttaacatcgagtcgtatttattttactttaataataattcacgagttgactcaaaaagaaagtaaaatgcaccaatatttagacgaaatagatcaaaaaaatgctataatacatctattatactagtataatttaatatcaggtctcacttattttcttttaataatgattaacaaaaactgttaaccatttataagatatcatctcaatgatctcataatagtgttagatatcataatgcctaataacaatagtcaataaacaatattgacccaaaaagaaaccgagagacttaataagcctgtaactgcagatttcccaaacaaaattaaagtggcattttttcaagccaatgatcactattaataaaatttaagctagtcatttggttcaaagagcccttgtctaatttcttcatccatctcactcgtgtagaaagattagatcctggtccagaacaaccctcttcagaaaaactcaattggcccctataatccataaaaaaataatattaaataaataaataaataagaatgagtattcaaacttggaatatttgtaaaaaaaaattaagaagaagaagaggaagagaaatcttttatttttgaaaaaacacatacattttattgcataatattgttttttaaaagaaaaaaaaaacaaaaagtaaagcataaataattttttattttacattgagagagcagtattagaatttggaatcttggtaataaaagatgcattagtataactaaattgacaaatataagaaatgtactaactcataaatatttatgttaacaaaagataatgaatttttaattcaaatttaattgtcaaactaatgatttatcacttaagtagtaatattgagagtattataaatatatgtacgattctaaattacaaaatactaaataaacatcattaaaatataagttactaactctatatttgataaaacacatggtaccaaaagataataaaaaactcgagaaaacttactcgtaaccagtagatttccaagcattccaaccttgggggactacaacgttcgataaatacgaattgtaaaagagtaccctagaatagggtcgccatggcctccctaaaaagaccgaaccggtaccaataacattgcaattcttgaacacaaatccactcccatcattattgtttgttcttccttgtgcagttatgaaccccacaaaaccagtcccaagtgatcctcctattacagatattgtacaatgctatacacaaatataaagatttaattagtaacaataattaatagtgttttgtaaaaataattattattaaaaaaacaaaattcaagaaaattttattaataaaaacaacaaagttactctaaaattgtagtgccataatgatgtgtaaatttaatgtggttattgttttctttttcttaaagaaatattatagttatttaaacacaagaaaataaactaaaatttttactataaataaaaaaataatttgtggtataaatacttaaacttaactgctcgttgtaaataaatacctaagtttaatttttttaacggtaataatacttaagttatatttttgaaacttccgtatgaaactggccgtcaatggatcgtgtgacagtctttgattggtccaaatcattcaatttttatttttatttaaaaattaaattaaatatataccaataaaaaaatgacacgtacataatgactacatttaatggttagataaagaaattacaaaaatataacttttattaccgtcaaaaatttaatttaagtatttatctacaaccaaaagttaaacaaaattatttaagctacaaattactctaaataaaatgtgatataacatgtgacttgtgaggtatgttcaattaaattattatattgataaatttcataaataaaatatcgtgtacaaaatgtaacacaatgtagaatttttaagaaaataataaattacaaaactgaaatttaaattattaataaaaaaaaaaaaaatggtacctcaaaaatagattggccactaccaaaaataaagtctacagctccttctatgaggcaattttgatagtaatgtcttccttgttgatcccacaaggtgtcctgcaacccataaaacccacaattattgaacttgatcatgtcgcccgtcactagcaccgccactgccggagctctcgggttccctttctcgttgttgagaacggcgtggttgtatgaattctgtttaaaaaaaaattaattaattagtgacatagattttcaaattagtattcatagaaagagatgctatgaaaaaatatattgaaatgatttgatttgatttgttttggtgatatttagggtaataaaaccctaatagataatttaaaagaaaatttaaacaatacaattttttttttacaattttacataattttatctttttttatattttaaaaaatttcgtactgtaaagaaaaatctaagttgttttctcgtattagtaataagaaaataaaactccgtactaaaaaacagtaagttgaagataaatcttaagattttgtttttttttttcgaaagaaaatcgagcaatagaattatgttttattattattattaacatgaaaataataaatgaattaatataatttcttactatgaagga

SEQ ID NO: 1342 - DNA, 4712 bp, Cannabis sativa
aataaataaacaagagaagatactagattggttgattcttgatcaaagtgttcgaaaacggtaatgttattttatgtaatgtagtggtgagcgttactgaacctctattttgtctcggtttgaacctctcatttatttcgatatggttgagcaagtcagcatgtattaagtgaattcacatgatctgaatttacttaaataacctattaatattaagtgaacatggtttatgctactgggatcagtgatgttaatatatagatcaacttacgttaacaaaaaatatgaataagttaaaagttagcattattattataccaaaaaaatgtggctcctttagttcatttgttcaaatagtgggattttttttgtaaaccgctcttatgaaatacttcttatatattttcacttcccttagaatagggcgtataattttacatatattatatttatatataatgaagaaaaaaaaaatagaagagagacaaggttggcagaactagttatgtgagagatgttctttagtttatgcagagtcagagccactgcaactgaaaccatgaggcagacgtgcttatgaagtaaaccatggcttgaaatcactccaaaatcagacataataatacggttccacaaatttaattggtccaactttcgcctgatataatatgtttcaatttaaagttgaataaccttataaaatacagcacattacttattgttcaacattgtcatactataggggcatttaactttaatatgattttcattatgatattcttttagctataagttttgattaagagtaatgatatgttcacattagctaatattaacaattatctaatgttaataacaccataaaatcattcacgctcttgaataatcactgtgataatccaatatgccacctttttggggccacactttaaaaaactatcaacaatgaaagatggcttattctcttttagagatatgataatttccaaaaagttagtgcatgagagctacgtatgtgatatgttaatctaaacagaaaaagtttatacataataatacatgttatatagagggaactcgtaatatggtgaattatttattagaaaaatcaaatatacatagtgacactggttaggtttgaactttagaaatttagacagtaatagtatgatgattagatcatctgatgatctagattatgataactcacatttgtgtcatttgatatgggattaaggtagaaactatgaacaaaataatttaaatgcaaaactactatattgtgataaatgctccctacatttgtcttgccaaataataattttttgccttcttccaacacttctccctcttatttttctccacccttctaaaaatctctctggccaaacgtaatgggaaaataaaaatgatagcaaagaaaagcataaagaacaatcaaaacgggtagtttgacaatctaaagaaaatggtttcagagtaaaaaatataaattcaatagggcaagtaaatgatgaaaccaaaagagatttccataaaagacgaacaatatttgctgtaggtggggttgtaaaatgaaggcgtgcaccagctatgtttgcaatgattcatatatggaagactatgtctaataaaaagcatagcaataaaagcccatatccttttattcacctttctacactatttaagcattgcaattacaaaagagaataaaatgaaaaacaattataacaaagatatagattgcactggctgccatagctataatgttaagccaagttaagatatgcctttcatggttactgaaagtgactgtcaagagtcagcatttgtttacatgtttcattgattcaaggcaagtcattacagttggtccctctgattcaaggcagatctttacaaatacatataaagttaggccagcaattgtattgcactacctgccaatgacatggattttcattaaaactaaaaataatcagagctttattaaacagaatcagaaagttgatagataaaaagtaagataaagtgactatacataaacagaaaagagaacagttagttgttgttctaatgggatttggactataagggcaagggcaagagcatgtgagcttatattctcagtccaatgccatgatttctgtaagggtcacattgaccgaaaagaaaagaaactctatcgtaaagactaaagagaaacttacgtttatagagaggtaaaaatcaaaagagggaggttaaagcctcctcccaacattggctcatattgaataattacttccccaacaccttatcatcactagtccatgttagaagaatcatgaaagctgacaaacataatacacctacccaaacccttttctgtgttcctccaatcaaaatttttatgcatcactataaatagaaagaaaacagcaatattatcatgttcactcacttaagtagtactcactaacacttaagctgatctatcttcttaaacttcccaactctgtttttcctctggaaaaatgaccaactttgccactactcgcatacttctgctctggttcagcttgttattactctacgtttctaatgcacatgttatggctcaatggcctgttggaagatcaaccaagttttttgatttcaaggtcacttatttttctttttcaatttatacacacacacccgtgtgtatgtgcattcatatataaaaacttttgtcacatttgtcaggttcaaacgaaaagagttagtaaactctgtaagagcaaggacattgtgacaataaatggaaagtttccaggaccagttgtttatgctcaagaaggtgatgcagtcacagtaaaagtaacaaacgaatctccattcaatatgacaatccactggtaaatttacacaactttatttctttgtagaaatatgtttctgggttcttaacatgtactgcatgcatcatgcaattattccctttgtttaccagtcaattttcttttcaggcatggtgttcggcaaatactatcctgttggtatgacgggccttcctacattactcaatgtccgattcaatccgggcagagttttacacacaaatttacgttggtgaagcaaaagggcacttttttctggcatgcccatgtttcttggctaagagcaactgtttatggcgcccttattgtctaccccagaacaggagtaccttacccctttaagcacccctttcaggagcacatcatcatactaggtataataactgactttatgacaaccaaagtacgaaatttaactccacatttcaataaatataatggaacattattatatactgaattaggaaagtatttgttggcaggagaatactggcttaaggatgttgtacaacttgatcacaccaccatagccagtgggggaagtcctccaccaccagatgcttttactatcaacggccacccaggccccaactataactgctcaaacaatggtagctctaaatgcagttttgcttaatctaaagttttaatatggttctgttaagttgtgaactgaatttgttgtgaagtgaaaatctagccatatatctaaaggttgaatttttttcagatgtctacacaattaatgtgactccaggaaagacatacttgttgaggcttatacatgcaggccttaacacagagagctttttcgccatagctaatcacaaattgactattgtagaagctgatgcagagtatacaaaaccattcaccacagaccgtgtgatgcttggaccaggtcaaaccatgaatgtccttgtcaccgctgatcagccaagaggaagatactctatggccatgggaccttacatgtcagcaacaggtgtccaattccaaaatatctcatccattgcctactttcaatacacaggggctgttcttaatagcttatctgtaaccactaaattaccaagttttaacgataatcttgtggttcagacaattatggacggactaaagagcctaaccagtgttaatctttcgaaacaaattgatgccaatctttttgccactgttggattaaatgtccaaaagtgtcactccaagacacccagacaaaattgtcaaggccctaataatggggttatggcagcatcaatgaataatataagctttgtaaagcctaaaatttcagtgctggaagcttactataagaagattaacggtacctttacagaggatttccctgaagtacctcttcaattctatgatttcgtaaatggggcacctaataatattcctaacaacacgcagtccttgaatgggactaggaccattgtccttgaatatggaaccagggttcaacttatttttcaggacactggaactgtctccactgagaatcacccaatccatctccatggctatagcttctacgttgttggatatggcaatggtaactatgatgaaaaaacagcaaaattcaatttggtggatccaccttatatgaacacgattggagttcccgttggcggatgggctgctatccgatttgttgctgacaatcccggtaagcatgacatttctcttagttctggagcaccactaggtacatgcttccgcatagtatgaaacgagtctcataccgtgccagcgttgagcactgtaaagtaaaacttgtagcattgtcctcatcacacatttgaataaccaaatatattatgtgtttagtataattggtagtttagt

SEQ ID NO: 1343 - DNA, 4787 bp, Cannabis sativa
ccaacggtacgtttaatctcatttaagactgcataaactatgtttaattagtacactaatcaagaaattaacatgagtggttcttgtcttgttttgagaattatagtgaagagtatagaaagtagttgttgcttgttgacaacctattaatatttttggtttgttattttccttttgggcaaattattcatgatggcattttaagtacatactctagtagtaggccaaatcagtctaatatgttatcattatgtgttatctttggaagttttttactttatcttcttgttaaccaaatttagtattatcttaaattattttctttgttgtaataggcactcactttctacaacagcaagaatttggtagtgaaagatttgaatatccaagattcacaacaaattcatttgtcttttgagaaatgtgtcaatgttcaagcttccaatcttaaaataactgcaccagaaaaaagcccaaatactgatggaattcatgttacaagatctcaaaacattcagatttcgaactctgttataggaactggtatgtcttgcttttgctccctataccaaaaaataaactaaaaaattaaatatactaattagtttataaatgtgattaaggtgatgattgcatttcaattgtaactggctcccaaaatgtacaagccacagacataacctgtggacctggccatggaatcaggttcaaattttgaccaataacttacttaatttctttttgatatattatcaattttaacattgtgtcattcttgaattttcatttgtgagctcagtattggaagtttgggagcaaaatcttcagaagcttatgtctctggtattacagtcaacagagctaagcttattggtactacaaatggggttagaatcaaaacatggcaggtatgtatataatttgaaaaatttataagaaaataaatatgggtaattgtcattttagacgttgtgttttgtaaagttagcaattgatgaactctctatttcgttaaataataattttgatcctgtattttttaaaatagtacaaaatagacatttaatttccattaaattaaagctttataataatttgacctggaagtgtaatgacaaaaatagttacattttttgtatttatttgtactaaaaattagtttcaagttagttatattgaggaaaaaaatgacgaaaattaagctcagcgtctattttatatattattttgacaaaaataaggtctgaattgttatttaacaaaataaagggttcaatctttaacttttgcaaaatacttagtttaaaatattattatttatccaataaacaaatctcatatcataaatttttcaaaattttagtatgaattcactaattaattaatctttttgtttttttcatattcagggtggttcaggaactgcaaccaacataacatttgagaatatagaaatggaaaatgtagctaatcccattataatagaccaaaactattgtgaccaacataaaccatgcaaagaacaggtaagagtaactaacaataaaaaaaaaaacaagtttcataatcatttcaatttctttaccattcatttccttaatcaagtcttgatttggttcaatcagaaaagtgctgttcaagttaaaaatgtgatctacaagagcataagcgggacaagcgcgaccgaagaggcaataaaattcgattgcagtgaggtgtctccatgtcaagggattgtgttacaagacattgatctgaaattggaaggtaaagaaggtgaagaagaacaagtcaaagctgtgtgcaccaatgttaaagtgtccaatattggaacagtttctccacaatgttattgagaggaaataaatggtttcaaaattaacacaattcagatagtgatttgtatgttcttacattcattattattcatggttatgtagtttcagtttggtttttggctagctgctgagacttcatggaccattatttctcatattgtaataatagcttaggctgactttggtgaatgctataccaaaataagaacaaattaatcatctattatttgattgtatcagaaataattaataaataaatttgtttgtgaagttttctttcgcagatatttcatatgggtttttttttatttatttttcattatagttttaagacatattttaagttattatattatatagtacttatgtatctaatttactttttagcagtaaaatatcaatttcactacaaatattttttaagaataattgttatgattattatgatcaaataaataatttacgtcataaatatttaagttttaactcttcattgtaaataaaaattaaaatttattttttagcaataataatatataaaagttatattttgtaggtatgtgttcgttaaatatcaagtaattattcacatgtcattttcttattagtatatttaaactaattttttttaaaaaaaaaaatattatgacatgggtcaattaaggattgccatattgtaatttacttaatacttaataaaaattctaaaattataacaaagtattattaccgtcaaatattaaacttaaatctttatttgtaatcaaaaattaaacttagatatatttatgtcgcaaattacttttattaaatttatagtttgttctggttgctacagaagtactactaaataatttttattgtattttttaaatatctgttggaactgtttttggattctattttttttcaatccattatgtttctttatgtggatatacatttgtggtatatatttatcaagatatgcagatatatatattataaaattttgaaaccaaagagaaaaatgaataaaggcaagaaatttgtaataattctaattaaaataataaactaattgtctcagacaaactttcctagtaacactagggcccatactaaagacttgcactttatcttctttacaaaaagaaaattaaaactagtaacggttagtgagtgttgtggcaagaagcccttgaagatgaagctttcaaaagcttttttttgcttttggaaaagcaacggtctgatgttgtttggtaaataaatatgtaaaagaattgctttgtgttatgatattccaaagctataattaaaagagagtagttgagttgagttgagtagtagtaaaacattatgactaggaaacttttggtcatatgccaattaaagaagatccaatattggatacttgcctaaaaatatgccaaaaagtacctaacatagtgccatggtatgctcaaaatgtaatgatatattatgatggctaatgtccctttgaggaactatatcatgtgattttcttggcttggaaagtatcaacattgctatttgatactttacagtgtcgtttttagggtaggacggtcaagactgttgtccaagacccttcagccgaagaggcccgttttaaaaattttgccctaggccatataaaaactaaagatgaccatattaacatgtgagactcgatattaaattgtatcaagtgtattttatcatattagcaatacttcaagagaaagtatatcatgtgataaaacaataaagattaaaaacataatacataatccattttttttgcattgattaagctagatttgcttgtatcaaaagaggtagattttcatatatgcaaaacaaacaaagatatcaatattgttaaactaattagaaatctaatgtgggctaaaaaaaacagaacatttcagaaatcatataaaagaagtttgtcacaagaggaggacacataaatcagttttatattttaattaatactacattacaataaggtacatagaaacaatatcatcaaatgggatttctcacttcaatattgaccatattctatatctaataaaagtactaactaaaaaaataaaccatattcaacactactactacttttgcttttcattcaatactcttttttttttacaccaattaagtatattgtccattttttttacctcacttcttttgctcttcagccaccggtttcgattcttccacagcgggaggtggcggcggtggtggtggaggtggtggcggtggtggtggaatcccgccatcaatgcaactcttgcacttcctctcaacccatccttctatgtcatgctccccattgccaccaaagtgtcttccaccgcataatcgcgctatgattccagccacaacacccaaaatggttatcacagctaaaaccaccaccaatgtctctatggaccgatgagcatagcgattcgagtcaaccatttcgggtggtggtccttccattattggttgaagttgattgtccatataatatatggctatgtagaatgagtagtttcaactaaggaaaagacagagaacataataagagtttagcttagaacttagagagaatgagacttgaacaaaagtgaaagtatttatagtacaaactataatgtatttgtgtgtgtttaggtgagagaattacattaattttgaaaatgaaaagtgtttttagcaaatgcaacttttgatgctttggatcttctaagtgtgattatttcacttgtagctttttgttacaacttttttactctttttgaattttattttttttctttcatacaataagatggtgatgtttttaaggtaaaaaattataaatgaagaccagaccaaaccaaacactcatcagagaaataactctgttttaatgaataaataaatttctgagagtactttcaacatgtcagtaagtaatatatatat

SEQ ID NO: 1344 - DNA, 1111 bp, Cannabis sativa
acaagaacaagatacatgtcccgaaatatgttggcgaactaaaagatttgttgagattgaataatttgagaggtaaattggaagttgtaaatgtgagcaatgccatagaagaatatgggagttcgagcttaaagaaaaacaataccttcaatcattgagtttggagtgggaaaatacaaatgttgaaattggtgaaatgtcaatggatgtccttcaaccacacccaaatcttcaggaattgaagttaacatgttatgagggtgtcaaattgtcaagttggctgtcatcacttacaaacttagtcaacttaacagtatcctattgtcaaaaatgtgagtatctagttccattgaatcaattacacagtctcaaatttttgaaacttaagagcttgatgtctttagattacatatccaacaatgatttacatcaagacttacttggttcaacttcaacaacaacaacaacaacaacaacattacttccatctctgcagagacttgagttagataatttgcctaatctaaaaggatggtggaaagaagttgatcatttttcttgtactgcaaatgaagacaaacacatctccttgccttatttcccttgtcttttttctttatgtataaaagattgtcctaagctgagttgcatgccactttacccacatttggaaaaagagttgtatctatcccatactagctggaagcctttggaagacacattaaaaatggttatattccctacaacatcttctttttctcctctctccaaattaaaaagactaagtttatatggcattgaggatttaaaatgtcttccagtggagtttaagagccttacaactcttaatgaattgacttattttagttgcagcaagtttaaggatctgtgtcctggtattctacatctctcatcacttagagatttgacagtgtcaataagtggaaatggtgataatgatggtgatgatgatgatgatggtgaccaaattatgtggaaagccttaactgaaagaatccacaaattagcactatggtcattttcgaatcttcctaagggtatccaacatcttaaaagtctacaacgactttatattaggtattgtgatagt

SEQ ID NO: 1345 - DNA, 1055 bp, Cannabis sativa
gaatgaaaactaatcatatcccacactgattgattcctccatctaccacaactagaccaaagttattaaaatgtaaatattacaagaaattggagtgtcactcttgacatttccattattatacaaaacttgctgcgggactctttacatttctctaaacaacaaattagatcaagaaagaagaagcttgtattggtcattttccactcgatcctcgaatagggtcccaatctcttctaagctcttacctttggtttcaggtaaaaagaagtaaaagaaaacggtaccaactaccattattgcagacaaagcaaaaaatgttcccccaaacgatatctccctagagatgcttaaaaatgtcatggacacaaccccacttaccaatctgttcacagaaattgccaagctagaaccttgggctcgaaacttcattggaaagatctccgacgagtacacccatgttatgggcccaaggccaatagaaaagaacgaaaccgctgagcaaacagctacaacgcaaagaactatagcccaaatgggcttctcatctgaatactggagatacttagaacccaggcccaacccagctaatgacaaggccatcccaattgagcccaataacaaaagcggtcgtcgaccaaacttgtccaagtaaaaggctgaaattaaaacgaatgaggtcttggcaaggcccattatgacggtcactcctacttgctgtcttctgttcgcgatgccagcgtctctgaaaacctcggggctgtaatacacaacggcgtcgtttcctgaagcttgcatgaagaaattgactccaatggcggcaattaggatccgtcgaagctgtctcgaaggtctgaaaatcatctccttccaaactccttctccttgccatgcactgcttgaagaagcaccgccgagggaaaacaacgccgcttcgacgatctccttcaatctcagttcggcttcctctttcgtctccgaggttttgattaggaccttcctcgcctcgtctctccttcctcgcattaccagccaccgaggcgattctggcatcg

SEQ ID NO: 1346 - DNA, 1249 bp, Cannabis sativa
gcagccacagctgcagccacggctaaaggtattgctcctgcccaagcaaactctcaacagcatccacagtctaattcagcttcttctgttgctgcctcaacaaaggttacaactaagtctaaaggcattgctcccgtgggttcttagcacggtggagacaggttagggagtcatcctttttccaagtaagctatataatcggcttgaatgtgcatattagtaaatttaccagcctcttcgggtggtttactttgattgactggatattgtagaagaagagttgaattggcgggtagtagtaaaaaattgtagcgagttttaaattaatcccgtcgggaaaacattatttttcctcttatattcttggccgcgttttgttatttttgatccatgttacgttggtatacggtggaagcccgaaaatagaataatatgagccttagaattgttgattctattaactgttggccaaatttgtctaatatacaagtcatttgccatgcattgattctttcttgtaatttgttgggtttgtgtagagtttttctaacaatatgtttttgtgtgttttttatttttgatccttttaaggtttaaagaaataaaagttgattaaaccaacaacaattacaaaggattaggcgagtctcaccaaatacgtgacttgcacaaagagaattaattcaaatccacatgtcactaatttaaacttgttacaatgaaaaatgggttataaattacttttaatcaagggtaaaaatctttacaaatatcttaaaaaataatttattatggtgcttgagttattcctctaattcaactgaattagtaataaaataaaataaatcaaaagtccatttcaagttatggaattactatatatgagaaaaaggttagaacaaaattactaaatagaatataagattttttaccttggttatttttattattgtaaagaaacttttttttaaaaaaaaaacaaagaatataagaactttttcttttttataactatttatatttttatttttaaatttttttaatcattaacatgaaaaaaggttaaatatatttatcaaatattatccaccgcattatttattttatgaaaaaatttaatagagtaagatagaatgaccacaataatgtaaaagttgcttttgagagttattgatgtattattaacatgagaaatttctctagtagatcccctaaaggatcgttctggtagattttttttttttttttt

SEQ ID NO: 1347 - DNA, 1225 bp, Cannabis sativa
acatgcacatttcaagataatatgattttagcttagtttaaaatatcataaaaatatttatatgtacattattatattatgtatattcattttcttacttgaacatcgatacagcttttaaagctgtgctggcacatgcagctcataaatgcatatatgtgatatatatgtaccctaactggctcatattgaaagtagctacccagcccgaatttggatttgaagaaaattgaaagttgtatttaatttgaagtcataaatgtttggaagtgggtagtttggggagatgtagcagatgaaccaatatgtgcataaatctttactccttgacatggactcttcatctggtggtcacctgcaattatataaatattcttaaaaggaagtaatattgtagtaattattcaagaactatctaattcataatcataaataaactcacctttcatttacctatataagtttattatgatattctaactgaagtatttttagaagccaaggaaaactttatttttgtattggttatcttttaactcaaaagtgttttaacatgtataggatttatgcttggtatattaactaattatagttccctgcatttagccccgtaattagtctggtttgcctgagataaattttcattgctcgattgcttcagattgttgagaaaaagtcaatttgtacatttatagcaacatatccccacatttagatgagttccgattcttttaatggattttgaatatactaaaaccaaattattgtgtcctattagttgtagctggttctttttgttcttaaggccacttgatttgtagtcatgtgtcttattaaatcagagtttgaagttattgttgtgtcaatttttaataatggaaattaaatttgaatggctttaactaaatataagagcatcttatgtaaacaaactcccacacggccggccagaggggggacctgggcctaggtcccaagcactacaattttggaggcccaaaaaaaattaaaattaatatatatacatataaaaataaaacttataataacactaaaaattaccttagtcctagggtttctctctcttcgaaggaaacacgataggcttaatccctttagagaaagggttcagtgaacgacgacgattgcataaatcagagtgggtgtgttgataaatccactctgtgctaacatgtccaaacagattaacaaacacttaatagaa

SEQ ID NO: 1348 - DNA, 12328 bp, Cannabis sativa
ccaatcgtcgaagatgactcgggaaacggtaggtcctccctctctcgatctcatgcgtctctctccatatcgttctctcttgttaagtttgtgctcttatactatttttttttatttcaggtaaaagaaacgacgccaagccaacagtggtgatgatggaggctcccagtcgtgtaggtcacatgttctcttcgatccaatctcattgtattttgtattgtgattcaggttttttttggaattttcttttgtgaatagggtttgtttatggatttgtgtattgtaacgtactaatttatttttattaaatttgttactaagtctgtttctcgaggtggtgtgtcactagagtcagagtttttcggggtggggtcttgagggttggttgggtttctcgtgttcaggtctttgaattatttattaattattctttttttttttaaaaaaaacataaatatccataatattgattttatataattttgagaaaaagtagtgttaatgcatattttcattaacaaataaataagttttttttttttttttgtaataaatggactcaaaaattaaataaataataataataaatgagaaaaggatttttaacgtggttttgaagttaatatttcataatctacgagtccatcttattctataattttataaatggtatacagagtacaataaaatatcggtatgattctctctttttcttaaattggtcatcttttgttctttaagttttgtccttatttataagagttttagagtgacaattattctctttggatcttatccttataatcgttcatgaaacgtaaaaatccccacgtttcacatttacattacatgctaatggcaaataactgtttataagcgttctttagctttatctataagtgacatgactatgccttttccttcccacaatgcaagtaatctcctcaagatgctttattttgtagaggattgtaagattctaagtatatttcaagtaatattttttgcgttcttctataaatgttgagtgaagcagaagcaagacgcttgccacagtatgacaattgtgagatgagccatgctgtactcacgagtctgtcggtgtatgagctgcgaactctttgaataatacattatcttccatttctaaacaatcattctattatgtatactgtgtatcccgagatggaccttctttgtttcactacaagaaatgtcacttttgcttgcacatttcgctactacgtacgctggtaaaagtaacttttatcagcgcatttcgcaaattgcactggcaaaaggtcaaagtttaccagtgcacatttacagtggctaaaatctaacttttaccaacgtatttatgcatttgaaaaagttatttttgccaacgctttttatttagtgctggtaaaagttttaagaccaatattgatttgccaacacatgaagtaagtttcatttaccagcgcaataccaaatttttactagcacaaaaatgtactggcaaatgtgacatttcttgtaatgtttgttgttcatctcgctggtctcatcaatccgtatttattattcataactcgcccttatctttaaaaaggtgagttcgaatatttctactaactgtacttttcgaggcgagttgtttggacacatttagtgctttataatttgggtgttagtttatttttcaatttctttacatgtgtcaataccaaattattgctcaaaatataggtataacaagtagtacataaattattgtgtaattaattaataaataaataaaattaaattttagatcatttaaaaataaagattgctagacatgaaaaaaagtaacaataataaattattatatttcacattgctggaattttcatgtccacagatataatgtccagcgcaaaatggagaactaaaacttatcatctcatctttaatgacatagaaaagatttttcatagcatgaaatttgaatgcatatttttatcttatcaaaatcactatagagaactgacacatcaatgatattaattatatatatatatatatatgtttacatttgaaatttgagaagcaatgttatgatatatgaaaatagaaatccaatgaaattcaacaattaatcatattcttcttaagcttcaaattaagttaccataataattttcgatcgttaatgtgcaaaacacttgaatagagcaaagtaaatattttgtcaagtttggacaagctaggcaaacaagtgtttaattttgtgtaacgtatgttttctgcattgtgtgtccacgtacataaagattcgaatcgatctatgaatgttaaaataataattttttaatttacatttttgttttgtttagaaatgtagtatatatctagtctgtatattgatacttattaacttttggctatgtgtgggggtgccttcaatttgtttttattaattaattacaaaaggcctagatagaagatagatgcaattgccacgtataagtgccaataggccatttgtgaggtgaggaggtagctagcttatcagttttttaaagggcatcgaccaccagacttactactgtgtctataacatggacaaaaatcaaatgtatatatttttattcatggaaaaaaggggagcagggggctaccagctttggctcctctgccctaaccctgagactgtgagaagtctatttacattcttagactaacagaggatatatatgccctctctttgaaaataaatattgtctaaccattttctttttattacattaatatccttattcttattattttttttttcactttgcaattttttaccttaatttgtttttttttttgaagtaatttttacctttgttgaatatcatttggaatcataccatttataagttgatatgatacgtctagaacaaatttgaatttaattttcagtttattaattaattagttttacacgtgaagataacccgcaaaaagaggctataaaaataagtattataaaaaaatttcttccagaaacgtgaaagttgaggtgcgggctagtctctgaagtttaatttataacagattgctcagccaaaaaatctatatctaaacggttgcacaataattatatataagaaacaaagttaataataataaaatataggaaaataatagagattttttaaaacagttgaccatgaggaatgaaatggaaacaatgcatttgattatatcttttataatcaaatgtatattctagtttagaaatgctttttcatgttcacgtaggttgctaattattaatgtacttttttttaaggcttctcgccaaattaagagttaaaattgcgtacgttttgtgaggtgttggagttcaattcagtcctcacaacatgagtatcgatataagcatgatactcctaatttagagggatatttgcctaagaatatcctaaatatctataattattatatatatgacccattattttaataaaaaacgtagttgtacttgtaaaagtattttgacgattttgttacagtcgtattttaattgactgttaagtgataatttaaaaacatttaacaaaattataagatgagatacttttacagcaatttttttatgtgaaaagttgaagactatttttttttttttttcatatacattaactaaatttacttttaaataaaatttaatttaaatatacatctttttataagtattgtacatatattgtacataccttcacataactaaacataatttcaaacataatagatttgtattctttggagataaatatttaagtttgtgggaatgttggagcaaaattttagttagagaagaatggagactattgtgaagtgataagggtaaatagaatgattgaaaaaagaggtaaatataatacattaattttgaaagagatggtaaaaattaaaggcatcaatttaaaagagatatgtagtgtgaattttttttttttttttattaagatcatatgaagagtcggtcctaagcttaggtagactaagcctgtgtctaaaacccacccattttagggacctaaataaaaaaatatttttagaaaatatacaattttttaataatttttaaaaatactatttattcttataataagagtctagtttttttattctaaggcagttttcaactcagggccgacccctcatgtatatgtggttcaataataagtcatcacgtatttttaagttggcacgtaagaactaaaaatatacagttgcaacaaaattgtaagataagatacttttgccgcaatatttttttattagggtcatacagaaggctcatgaatctaggcaaaggcgagctagacccgcgcctaaggctcatccgttttaggggcctaaataaaaaaaaattagaaaatatacatattttttaaatatttttaaaaatactatttattcttataataagggctaatttttttttatgcccatttcaactcaaggtcgggcctatatgtgtaacaattatgaatattaagaaaatatcgccgcaaatacaataaaaaaaattagaaaaatacggtgtatacagaatttttaatatttttacggttttttaaatttaatttacataaaataaaattttttagtttatttttatgttgtattcttgttattttattgttaattttttattatttctatattatttttttgtatttatataaaatacttaaaaaatataaaaaattaatttttaaaaaaattaatattttaggtaattatccctttatctctttaactaatgatcctcatccacgtggcttttttttctttcctgaagctgctaatacacgtgcatgattttatctgtacagtaaaatacctgtatgggaaatttttaaaaaaattcctttatttgctaagaaaataatatgagcaacaaaatgtcagaagtgggatttgaacccacgccctctttcgaagaccagaacttgagtctggcgccttagaccactcggccatcctgactctttgttagtaatattcttaaacaatatataatttataacttgagtttgtaagtatgtctatcatttcaacaagaatgaggtcaatagttttttttttttttgaaagaagaatgaggtcaatagttgaaataaaaaaaaaaagataaaaacttccaattaatattttttatatcattgtttgatattatatttttattacataaacaactattttttttttttcatcatttaaattgcttgatttgaaaaagattttgaccatttgaaattttgttggatctgctaattgttttttttttttttaagtgttggataatctgcttataaaattaattctcatgagaatttataatgtctaaaaattgaggatggaacatgcttggccattatatatggtcattttttttttagtggagttgatgtgtcaatatctttttaagaaataaaatttagtttatttggtttgattgtttgtgttctattagatccctagttaaagttttccctaagatttttttttcagtaaaaatatgatttgttatttaatttcttttttatttttatactttaaaaaagctttttttggttgtattttttaacagaattttacataaaaatctctatagaaactaataagcaacctaaatggcaataaaaaaaaaattattgcaagcaaacatgcattagcttcactaataagaggatctaaaaaaggaaatcttttttacaataacccacacagctgaacccaaatgatcacgaatcacaactaccatacacatagtctccctccctcccatttcttatatcatagtccccatcatagtcaattgatggggactaaggagacacaacatgggatataggggaaaggaggatagataaggtgtactctgcataacaattgtaataaagttaatataatactttatgccaaacaaattattagtgtacattattattattattattacgagctctccaaatcatatcaaccaagaatggatatgcacaaaaaaatcttaataacattgattcctctcgaattaagacctacagaaacttaacccaatcctacatccttactctataatcatgcattgaaatgagacctcaggggaacgagccccaaagatagtaaaccaaattacaatgaagaaataagtactccatgactcctcatctccgccatgaataggggaagtagtatcttcaatagttatgtgctgcctaagaagcttgcaaatggagagagcattagtgactatatactccacctcatcattttatggccgttcaaaaattttgttgttccacaacctttctaataggaaggagaaaccttatactggagtagggccggcccaaacattgtgcagcttgggccattgcacaaggcctctatttttttaaggaccattttttttttcttattatatatacataaataaaaaatttagaattgaaaatttatgaacgaatcttaaaaaaaaaaattagtaatagaattgttgttttaatttacacggttttttaaagagctcaattttaaaattttgcacaaaagcctccaaaatgcttgggccgaccctgtattggaggctcggtttaacgctatgatcatttaagcagatttggtagagaaatgaccattagctttcttagtccaaacccaatggtccttatactgcccactaggtccaatttatccaatttaaagattgaagtttttgttgttaacccaaattttaaggtattcgatagtgttgtaggaaggtatagatagagtttcccaatcagatgtcagcaataatagaaatcttttataagtaatatagcatgcaattaagtaaacaattccttaaacatgtactcgtaaaccataagcattattagttttacacgtaaattttccagcttattatgaccattagccatcatctgctgttctctatgaaaaaagaatataatccttctatatataatgttgttactatacagaaatccacttaaagcttatatttccttgaaatggaaaaattaattctgaaaacacacaataaatataaactatatatagtatttttatgttggtatatatgcaattgaactggatcccacttgtcatctcctctggaagttgaaagcttttattgcaaaggcaaaaatcaatgcaaagaacgcacagaaaccaaccaccataatacctgccacgcccaagtaatcgtgtctgaaaccaaacacttctttgagtaatgtttttatagctaccttgtgaactccatctgatagtttaacaagcccattatcatctccatattgcgaagcgagcagcccataaagactccaggctacagggttcgcccagtagtaccatctccaccatatgggaattctctgaagaagtaaaacaagtcattgcagtttataaatatattgtaccttttgaaaaggaaatgggcatatataacatgttttgcatatgtaatatttttttataaaacccacacatcttgttgtgatttgtttaaagagtcagtataggtggttttattagatttgttttattgtaagaatcaagatatggcatgcttggttagtttgtgtgtggctcatctcatgtatactttgaactagattgtcctgtaatgattcggcataaaaaatgtgttttacaaaagagccagaagttataagcaggactatttaccttgtgaggaatcataaagccgctgaaaagattccacagcatataaaatggagcagcaatgatggcagcaacattgtggtttggcgtgatagcagtagtcatcattccataaaatgtaaagtacagcatcgtaaaatacatgaagaatatgtaccagataaatttcaagaaagtccagtcaaactgagccatggagtagaaaactgtgctatagatcattgattgtgcaaatacgtaggggaactcaattgcaacctgcacatattcattagttaaatgtacatgattagcttacagttcggaccaccatggtaatcagtaatcactaaaagaaggatatttttatcagaaaaacctgagccattgcaaatggtaaagccgagtacatccctgcagccctttctctgtaagagacgaatctttcaacagaaacaacaggttgaactgcagtggcattagtaattccaacaaataggatagctgcatacatggatcccatggcattaaatatatcctgctgggtctccctgtaaggaaacatgacagtttagagaactcctagaagacacaaatagacagcaagattaattaaacattggtttagattaagttattggcactaatgatgtacaactttggcattggtctagtttgctgcaattacttcaaggataatgcttttcatttgaatatgaccattttttgttaatgtgtgacactcagaaagaggacgctatatagtactctcccctactagtcatacacactacttgatctcggccataaatagcattatgcttcagagaaaacaagctacaactaatgttgtacatgaaccagataacctgcaatgactacctcatgatcaactatgattgtgcgtgtgtgagatttctgatagtctctagttgttgaacaatgtccaacccacatggagtgtcaattgagtactttaagaacttatagcaggcagtaaaactatcaaatgattaagaaagtgaaaaaaagaaaaccttctagcaccaaatctccagcatattgtcccaaacatcaatgagatgatgacagtgtaaaagaaacgaacagcagtatattgggggtttctccaatacgacaagttttgcttccaaagacaagtgataaattgttcaaaactggattgggaatacttggttgggaagtttagttcttttgcattagaactaggcctgcttaggttttcaaccaaatctctgttacgtctggaacaggaaaagagcagagtcagatgaagaaacagataacggaatataaatctaaaagataagtccatggaaaacagtcatactgaaataaacttgatcgtcggtatatttctgcaaagtctacttccaaacggctttcttcagctgaagaagtaacatcaagcatccatgtagcaggattatatccaggcctaatcggtgtcaccccttcaattgcctagagaaagagattttatgaggttgagttttgcatttaaagacattaactgttatataaaatataattctttacttactgacctcaaaatacttgatgagctcacatgaccttggaccaagaggaccagcatatatgagctctcctccacgcttcataaacaaaagctgtaaagagagatgagatttagaactcagtacaagttaaggtgttttagtacacttgtcaaatgaatattacaagaggggataaggacaactaacaatagatgcaggaaatcattggaaagcataatgcatagatagaattcaacagcagggtgatgagtgctatagtaaaatactttaatttggagtgaacatactcaaactagtatacaatacctcatcaaaagattcaaatatgtctatgctaggctgatggattgtgcaaactattgtgcgaccagtgttaacaatattcctcacagttctcatcacaatggctgctgatcttgcatctaaccctgatgtgggctcatccataaatacgattgaagggttggtaactagctctactgctattgttagcctttttctttgttcagttgacaagccatctaccccaggtagaccaaccaatgccccactcagcgaagatagttccacaagttccatcacttcatccacaaaagcctgaaaaatatatcaccttaaaagttattcccatgctaagattgacaaaaagtgaaaaacaatacaaataccttctgtgtctccaagtcaacatccgatggcaaccgaagccaagcagagaataatagtgattccataatggtcaagcaaggagaatgaatgtcactctgctcacagtaacctgatactcttgcaaatgtttcttgccttttgggataaccagatatatatatgtccccttctacaatcccgccagtttttctaccagctaggacatccatgagtgtggtttttccagcgccactcaccccaactaaggcagtaagaataccaggcctaaatgccccagtaacattaaccaacagttgcaatctgtcttctacaactccttgttgcttcagttcctgcattgaaacttgaatcagataaacatatataataaaaaagtttctcaaagtaaatgacaccaataaatggagtaataactcaccaaaggaacatcgacatagtaattgatattactgaaagccatggaaagtggttgaaatggtagaaccatgcctctttgcttaaaatgtttacctgcaatgaagtttaggggaactgaatttaggaatttgtcttgagatatcacatattagaaagaccaatgtaagaatagcattaacaatagcatgtcatttacgaaccattcaaagaccccgagtgctccaagtagtgtctaagctcaataacaacaggttctccttttcttcttttctctctttctcgtaactcttgcttagagactacagcctgttgtcttcccaaagctgtatatataataaaaagtgcataatcagctttaattccttttaataatcttgtttgtttgaatgtactataggaatcagcatttagtccaattttaactgaatgagattgcttacggttaaggtaagaaaggaagaatgtgaacatcaaattgaagaggagtgtataaccaagcaaagcaccaacaccaatccaataccagtagctctcagaaaacaaactgcgagcttttagcaatgcctctcctaatgtagaagagctggtagcatttccaactacctacatatatatgggaacaaagagccataattaagttaggactatgcggaaaatgcaactagtgcctccatatatacacatattactttaaagaaatgaagaatgagtaactaattgcttgtgttactaagtttactttcaaaaatgtatgaacaatatcatttcaaagttttaccttatcccaggaatgtccaaggaattcattcacagaagctgcattttgtgcatacatcaaaggagaaaaccagaaaccccatatccaccaacttggaacacgatctgtgttcagaaattaaatcaactcatgaacatcaagaaaagttattgagatcgaggctttgtcccctgaattgatttagttttattacctcttgagatgatgtaccctccaagtgccatcacaactagcattgcaaaagatccaaatgtgttagcaactatcatatttcggcccaaggatcccataagacgaaagagagctatcgacatttggtgcagagagaaatacagcaaaaactgcttaagaaatctgcatatgaaaatcacaataacaaactccattgtaactcaatcactcataatgataaaagtaataacagaagagagtagaagattatatacctagtgactgctggatcatatccaatcacataatatgtgacggcaacccaaaacccagactccataagtgatgttgggatactcagaacccaagaagggagtgtgtagacccagcttgggtagaaccgcaagtccctatgcttgtaaagaactggaagcttggccaccaacattgatacctctgtaaagccattgaaaagaataataaccattgaaaagtatagagccccgagatataagccaccatcatcgattgtatcgtggtgcaatgtcgttcgaaagaagacactcatcgttatcagagcaacgaaaagtagctggagcacaacaaatggtacttataaaccagagtcgaatagcatgatacttccaaagaagaaaataaacaaataagaggtacctgagagaaacaatacctgaataaatttgaagacatatataaatgagttacgcttcatcaacagcttctgccagttataacttgtcttaagaagctcaagtctcggcataccataacgagaggttgacaaggctgctgggtggttatagcgtctatcaaaaggaagggctagttctgaagcaagatttttgccagtgtgaaatgaacgaaaagcatcagcgaattttctcactggtatataacggtaagggaggtcgaaattcgaccagtactgttcttgatccttctttgatatcacctgcatggggaaattttgaataaagaaatccaaatatatatataaatatat

SEQ ID NO: 1349 - DNA, 1815 bp, Cannabis sativa
ctataatttctaatttgatgttaatttgttttcatttttagtttcaattgtttgcatttttaatgtgagttgtttctctttttttatgatattttttctattttaaattatagttttattccgaagttaaattatttttattttcaatttgcatcgtttcaatttttaatttgaagtagtttctcttttttatcatatttttttatttcaaattatagtttatatttcgaggttaaattatttacattttttaatttgtgttgttttcatttcacactcacacagtcgtatatatatgtatgggtatataagattaaattatttctattttttactattaattgttcgctttttgaaccaaaattatttttatttttaatttgagttatttgaggttaaaaattattgtcttaagagcattatttatttatttattttgcttgaggaggcgtggttatcatgaaccttcgtatttttagaaaacaataagtaaatgtggttagttttctataataccgtattttgaacataaattaaattataaatagataactgaaaacttcccttttaattattggtccatttaacacaaattgctactctcttggtggaaccaaaatacctcacccatctcctatctctagatcatgctggctctgcccaagtaactcacgtgcgtgcttaggaaacgatgaagcagaaagcgggaatgatactacctaggaacattattctatattttccatgttaatttcacaagtcaaaattacatatagtcaaaaaggtttgtaagctacactaggagttagtaccgaagcaccagaaattaaggagaagaaaaagaaaaatataattcaacaccccccacaaacaccaaggcaccaaaagtagttactcgaaagacttctaacttacaaaactcgaagctaaaatgtacaatcagtcaaacaatgaagtgagctttataataagattcttaagctaaaacgcggccacattcttgttggttccctcttaatttacgtgccccttctaatgccgtgactcttgattcaccactaccgcgtagatttgccacaagtaattttctcgttttcattcacctttttcgatttaccatatattaaaaactaaacttcctttttcccttttttctatgtttttgatcagcttcaatttacaacatctccatatcttacagtgaatttcatttcatggacgaaactcaaatcttttgctgccttgttcgctactattgttactgccattgtcacaagaggtactagtggtgatgctggcggtctcttttttggttgccaatgtccttgatttcctcggtatgcatttggctcgaactcctccaacttcttcttcggccaattccaacctcgaactcctgtaatacgatactcttttagaattgtttttactataaaactataattcagatcgataaaagtaagtcaactcgttcaaattaaaatttaaggcatactatacacgagtctctcgagcaacatgaaaaagaaatattcaattctatacttttggctaaaagaccccaccagctgccccaaccgataaatatttaatcatcatctgctaggtaaagagattttctagacttaaattcccagctgggagatctttaacttcagggtcccacacattattaatacagaataaggtcagctattcaaatcaatatgatcattataactacggttgcaaaaagctgcttcagctacgtaccgcagtacagtgtaaaaatattactatgtttgtgctacaaagtaaataaagccagctggcttt

SEQ ID NO: 1350 - DNA, 1995 bp, Cannabis sativa
tttgcggcagatgcaagtcattgttctttaaccgtcggaccagaaactgaagattgtcatgcaggtccagttctgagtgcatggtctaaatcagcaatcagatcattcacatcttcaatcccaacagatatacgaacaagatcttccgttagacctcgggcctggcgcacttcggctggtatgcttgcatgagacatgaagcagggcaggcttatgagagacttcacactacctgttaacagatggcaactacattgtaagcactgaaggtcagcaaaattttcaagaaattagcatatatcaaactcaaagccgaaattttattcatctttaagtaattgctcattaaattttgaaaacatagtttgaccttaaataaacataggttcatatatgagcaagagcaagagctaaattttaaaaaataaatgaagtattgtgcttggaatggaactatagacagtataaattgttatatccactattttcaaacacgcctcgtctccccgctctgtctcaatcatgtcaagcacctcgactaaagtgtgtgccgcagcaaaattgttctaaaatgcataagttgggtttcaaattagtgttttagtttttccataaactgaacctgaggaatttgccctattccacacgatgaaaatgccttgaacctgaatcaatctcaaaccttaactattatccttagctcaaccataattttgttttacggaatgatacttgtactgatggaataacaatacaaggaaagtgtggtacccttgaatcgcatgaggattagacatttacgaaaagaaaaaataaagaaataaatgttcctttgctccaccatatgtgacaaaagggatacataccaaaactgacagctatgctgaagtacttggtggtttcaacaatatgctttgatagtgcaactgagccagtcaagaagctcaacacagatcctgcacccgtagcctgaaaaacatgtccaattaagtattggactaaattagtttgatatattgcagaaacaatttcaggttacatctgatgctactacctgagaaaaatgcaaagcatgtccaggatgatcaacaaggcctgcatagttaactttcttcacccgtggatgggatgccagaaactcagcaatcctttgtgcattactctgccaaaggaacaaatgcattaaaatataaagtagagtactccacaaaactattaatattacaacttaaaaattaatgtaagaaagagcacagatggtacagcagatatttgcatccgaagaatctcatgtcaagttagaagtaaaaagcatcaacaactaacgcaattcaaacttacacaagatgcactgcacaaattcttgtacacatttaacagagttacaaatatcattttgaataagttaagtgaattcaagatactgtatatcattaatgaggctgtacctcataactacaagaaccaaacattaattagttatgatcttaataagtcagaaaagcgtgaagattattagaaaattatagtgtcaaaagcatgaagtgtttacctgctgcttctcaattcgtaatgccattgtcttaattcctcgtaagcagagccagcaatcaaatggagccaacccagacccttctgcattttgtagaaagtacagctcttttgctaatctgaaaaagaaaaaaattataataacgatttggggacatgttaaaacatatcataaagttaacagtaaagaatgtccatgcataacctttcccctcttacagctagtacacctgccatcacatcactgtgcccagcaatgaacttggtagctgaatgcataacaatgtctgaaggaaagatgaatgcatcaggattgagcaattttaaagaggaaaagaaaaaagagtaatttgtagaatctaaagttcacagtttgtattggtaccagctccaagtttcagaggttgtgacagtacaggggacattatactattatccaccaag

SEQ ID NO: 1351 - DNA, 7526 bp, Cannabis sativa
cctgtacatcatgaccgaactaagaatgtagaggtggattgtcatttcattaaagaaaaaattgatggagagattatcagcattaaatctgtgcatacaaatcaacagctagccgatattctcacaaaggagttatctgaacgagtatttgatttcccagttaacaagcttaaactcatcaatatctatagttcagcttgaggggagtgttgacagaaaggaaatcgaatcacattaattagtttcctaattttgtgtcgtttcctattttaagggattttttctatatattctttattctattttattctgtattaaagaaatttgatttgtaaatactctatatagtatcaactctaggttgtaaaaaacaccaaaaataataatacaaatattatttctcttcatcgtattctttataaaattattaatgtattttaaaaatatataaatataatttgatgatcattagatgataattggatcggttcaattctattatccattggaccagatgtcccatccaacaaccgatccgatccaattatgattggatatccaattctattgaatcggttagaattggatcgatcggttgtaattggatcggatgactttctacacacccctaagcagaacacttccaaaggtgcacttcaaacatatctagttgctgccaaaatcaactaatagtataatattgggtgacatccaaatctccctttttgagatcaaacaacttggtttcagtttcaaaaatttctaaggtgtttcaaaaattgagtatgtatcacgagctgcatcccaaatatctagggcaatccaacagagaagaaaattccctccaatttcaggaagctaaggcattgctattgttctcgctttgccatggatgataggagggatccgtttctttgggctccacaactccaccaatgaattattcatccttacctttaccagagaagtacatgatgacagattgagaccattgaagaaagttcttactgctaagtttgtgatatgtgattgggggaagaaagctgtcaagaacttgagaatgattcaaggcatgggactgaggaggagcaaatcaattggaggaatcggtagtgatggttgaggttgagtcgactggagggtttatctttgcctatgatgatttggtagtcaaaagatagaaagaatgataaaaaaattaaggtttttatcttttaagaacgagggtttttttatactaggatgtcggctctaatagagtgataccatgtggaaatttctaaatattctcattgattgataaaatatgagttacaacctatttatttatacacaagaaaaagatattccctctaattttgttgtgaatagaattagctacaaacaagaaaaaaagactaaaactaataaaactatacaagaaaataataataaaataaaaaaggataacaataatagaaaatacgtatcattcctatttttgatatttctacatttcccaagaggtaaaaccggcaataataataagaaaatttgtgtagagaatgggagagctaagggtgttcataagatagtcgatccaatccaatctgtacgatctaatccaatccaatccgctaagtgttggattgaaaattttaaaattcgcacttgtgtgaattggatgttatttatcatgtaatcgatccaatccaagccacgcttaattatatttattttaaaaattacaaatatattactaatattttaatgtaataaaagaaaactaatacatggtaaatttatttttcaaaacttaatatataaaatgtatatattgtatacaaaagaaaacatattctaaaactataaccaatctttcttttcatataatgcttttctcttccttgttatttttttgattaattattttaatttgttattagagacatagatcaacaacttatttgattttgttgttaaagaattagaaatgaatattttatgttttatatttaaatgattttggtgatgtcaaaaaaacaaattttaattattattaaataatttaatattaaaaaataaccgatccaatttacactattgtagattggattagattcgaactattatgcgaattggattagatcgaaaatatgaaatccgcaattagtgagaattggaaacaatataagcaaagtaaggctgattgttggatcggatgaacatccctagtcagagctactatactagtcttcatgtgttttgctttgttgggggcttgtaactaaggaaaactcatttttagctttgagccattagcgtttttgtttttgttttttccaagttctcccttccccccttttttttttgtgaaaagaaacagaagtcacacttgtgatctatttatgactaacctcctcccatatattgagagcccttcgcttataccggaggaagaatggttacaaaaactgggtatcactaaaaccatactgataccaagaagaaaaaagaactagagattaaaaagaagttacaagaaaatattcctctctagttaagacagaaaaggaatatctttaaatctgtttacatcatgaagccaaagagctacccactatacaatacaaccttgtctatatattttttgtactatcgttttcctccaccattagcaaggactctcaataaacttgggaggaggtcaatcctagattttgatctctctttttcaaaacaattaataatagcaaaatcaagcatacatgacatcaagtcaaaatcttagaattttggtgatgctaattacacaatttaagagaaagctatgaaacaagtaaattgatttacataccacatatgtgcacattcaaaaggggggcaaggtgggttcatcgcataacctcggtgcacaataaaaagggatatctgaaatcaaaatttcttgataaataataaagatcattctgaaaacacattttacttatttgtaacattgttcagataatctggatatagaagaatgtacctggcgagccttttgccttgtcaagacactgaagttactgctcgcaggcacctgatgaaggagaaaatagagaaaatgcctacgctgcttctcgtgttccccatcttgcaaagcctcaagagactgtcatagtttaacttgtagcaagtaagcatgctaaaggaacccatctaggatatacagatgcagaggaattttaaataataaaaatgaaaaattctcaaaacatgcctgcagaaaaggctgaaaaagatcaaaaatgtccttatggcttttctcatttcttgaatgaaaacactgacccaaaagagtattgcgcatcacacttggagacaatgtagacctcagccaaagtttacaaccttaagcaagccagaacaaggaataaaaacaaaatgtgtgaaggaacagcaataaaagatagttatgttagaatcatgaaatatatattcacatacatacatatacttaccaagaatttcaaagagtagcctcaagcatgtaactgcatgagagaaatctactgaatcaccactaatatggttaagtacgatatcaagaaaaataggatagcgctctaatatgccttcttcaaaagctggaggttctaggaatccaagccttcagtaaaataaatacacaagtaaataaatagccagaaaagtggtaaacgtaactttaaagcaatcaaatgtcattatccaccagttcctacagtgatttgatgccaagccaaatggatacacgatccagctctgctcttggtcttgaagtcttcgtggcagatggcaaagcttctgcctctagaaagctgataaatttcttgatcaaaggctgtaaaggttccacgtctgttgctctcctacgcacaaggagaagaacaatttagaaatgatcaatgttgtaaaagtacattctacatacaggtaatcaaaagtattatgacactctcaatgcaacagtgaataaagaatagtagtatcaaccaaaacattcagttgactgaatcagcaacaccaagaaccactagaatatttaaacaaccccttctcctatcccaacaaaaaacaacagcaacaataataattggcctcaaaacatgccagaaaagagaccgtcaaaaagcagcaacttcaacacaaattaattgtaaatattaagcctcaaggaagacccacacaataagaatactattattaataacaatacgaaaacagtacctcaattttcccatggatccagctaaccgatgaccaaccgagcgtacccttcttttaaaaaaaaacaatgcataaacaccctgacaaaaaaagtattactctgtaaaccacagggtaaaggaacatccaataaaaaatgagcaaaaaaactaactaaataccggaaattgttgctgcccgtccaaagcaagttcatgtacattatcaatggcttcaataaattgttcaaattctgtaaataatgactgatcatctaatagaatagggaacatcaaaacctgtaaaaaaaatgacaaccagtgagctgaatagcatcaactcctactcacaggtaaaaaaaccaacggttgtgcacttatgcaacaaaatgttatgtcaaaataattttggagaatatagcaaagaatggcacagcaaaaataccaaaaaatcttgctaagagttgatatactgaaggaaaaatacattagactgtacttacaggtaaaaaatgacaaccaatgagctgaatagcatcaactcctactcacaggtaaaaaaaaaagcaattgttgtgcacttatgcaacaaaatgttatgtcaaaataattttggagaatacagcaaagaacggcacagcaaaaataccaaaagatcctgctaagagttctgtactgaaagaaaaatacattagactgtacattcaaaaaaattaaagtaaaaaccaactgaggtcaactcagatggtaagggagggctgtgtgtgagttggggggaaggggttcgatccccgcttgtatcaaaaaaataaatgaaactaaaagaccatacttccgcacaacaaattaagtcattcttaatctaagtatttataatcaaatataagtatgggtggctctttatatacacaattgacatgtcctctagaataatgtgtgttactgaaccaaaatttcattacaattaccgtcttgggcatgcttctcaaaaaatttacagtacacagacactctatacatgagtttttcccttgttttatgaattcaaaaacccgtaattttcttttaaagtggaatacaattcaataaggaagataaatgaaatggtcaaagtacttcacacgtgacactaacaacatcatagctatcacaagctggaccataacatcttacactaaatttagcttcacaaaaattttaagatacaacgacgctccaaacatgacttttgctcaaggagaatacaattgattagggaaaaaaagaaaaaggtacctcatacatgacgctaacaacttcatagttatcacaagctggattgtaatcttctcgcactaatttagcatttatctcccttaagtgcatagtcactctttcctcatcgagacttctcaacacatcgagaaggggactaatagagctaaattcatactccatgttatacatttcttgggcttggtgatgctgagtaatacactgaacacactgccccatttcctcagagattctcttccataggcgttttagaggagaatcatcacgctcatctttatggtagttgtagaatgtctccaaaagtggccccattaaatcccaagaaccacaccaaatgtgattttcttttggtaaagacatcaaataagaaaatgcatctacaaacctgaagaacaaaaatgtagtggcatatgctatgtattaaattcatctcccaaaagcatctcttcttctttctttttttatttctttttctttttcctcataacaaagaattaaattaagacttgaaatgcacacggattggagaggagatttcttccatccaaaaatgttcatcgtctaacctaagggtatgtctagtcaatccatggacagcaatactaatataagaaagagacgcaccagaatgctagacaataaagtttttatatcataaaacataactcctagttcattttagcacacagtagtactctccaaggccaggaccaaagacaataaatcagagaaaaaggctttgattgggtgaagagtaggtaaaaaagaaataatgatattcaacctcttaaagtgaaggaaaagaaatattaaaaaactatttgcaaatattatgatctataaagcaactactgggatgatagacccaaaaaaaaaataaccttaacgagctcgtcgtgattcgaaaagggatagaaatgtgaagtaagagttataatcatacaccattgtcctcaagttgatttcttaatatttatagtgtaacagaataagttccaacaagatagccttcagtttgtcagactaaattgctctatcatactttttgtaagtacaatataagttgcgagtggcaagatgtgattttaacaaaagaaagctaaacaagtcaaattgttacaagaatatcaacccaatacagtaaagaaatgtaagagataacctaagagattgagttcaaactcagaaaatatagctagctggccatgttgaactcagttaaatatttcaaaacaccgatagtcaaacctcaaaaccataataactaaaaactactcttaatatatgattaaacaaccagagcaacaatgcatataataatccatagctagcaacttaaaatggttcatattcatttcatcgactcaataacccattcaatttatttatcagtttttattttatttgccgagcaatcaagaagaatgaacaaaaatatttcttagagatttggtatattgttttcaacgaagaattatatttgatgagaagaagaagaacattaccattgttctttgctctggtgaagagaacggcatttagagggatcattattacgaccatcgtcatcgtcttcttcttcctcctcaatacatctccatcggtccagtagttctcttctggatgccatatttttgggcattgatcattcaaattctcaggccccaactattcggtagggtttccctcttgctgggattttaacatggaagccgaaaagaggaaaagagggagaaagaaacgatattatttaataataaaatcaaaattagtgcgaccttgccctttatttaattaggaaattcctttctttctctttttcttaaaatgatttagattgtactaaaaaaaaatatacatagaatgatttagaaaattccttaaaaaatacattaaataaataattagtaaattcccgccaacttcaggaatgcggtcacaaaagttgtaagtgaaccaacttcaggaatgcggtcacgaaagacataaactcttcctttggaagtgcgtcaaagagtgtctccctttaagctctcggttggg

SEQ ID NO: 1352 - DNA, 961 bp, Cannabis sativa
caataacaaaacaaatttgcatccccaaataaagggaaagcaaatgttcatgaagctgtcatacactagcaaaatagacactgcttgaacacacaataaaccatcggaagcataggactaccaccgatttagaccatctgcaagaaaagctccacacccagaccaaaaccaaatatcaaggtagcggtttaagtgataaaaatgacgtctgtaattgttagaaaaagagttgttaatcacaacctgctaaacaaagaccaacaaaacatacacatataagcaaagaaacaaagacctccctctcggccgaagcatttcttaagacaagggtcaaagcccctagtcaaaaggaacaaaaaaaactaaaggcggtaattaacttcaaggaataaaatttaattgtacaattcagactagaatgagaataaatctcttataatattaaaagggcttcatttatgtaaaaaagtatcctctggggtcgtgatctttagaaaaaaaggatgtcagtggctgatgggtaatggcaataatattagcattcgaaatgatctttggattcctaaagagcatgtgggtcgttcttaatcctttcaaggtaatgttggactacagaaggtgagtgatcttaaagttgacggggctagaatacgtctctcatcttgtcgattttttatgaagtggaggctaaagtaattttgtctattccctcctcctcttttgatagacaagatcacttggtttatcacttcactgataacaggtcatatacagtgaagagtgactattggagtattatttctaggctcgacttggaatttgagcattcctctcaaaattaaaaactttttttggaaagctttcattactacctatgagaaccttactcgtcatggtatcaaagctttcaaccatccatgctctatgatcttgccattcacttaaaacttcgtaaacaata

SEQ ID NO: 1353 - DNA, 4592 bp, Cannabis sativa
  modified_base (2317)..(2319): a, c, t, g, unknown or other
aggtacaacttatcaacatactcatacgctttgttatcatttgaaagatcattttggatgtttatttatactttgacacccttttgttcggttctgctctttaacttcagccaccaattggaaaagctagagttaaagagctcgggcagtgggtgagaaaggagtttcgcgtctgtggcaatagctgggactctagctctgttgatatctcagctgctggtctcggttggtttgctattggactcaaaggagaagctcaactaggcgtgtggacttacgatggaattgatgttgttcttcgcaattcattaattcctcaaagatcacagtattttgaagtttcgggttttactgtgtccaaaatcgtttccaaggctgatcagtcttcaaataaggcgttgcgccagagtgagaagaagaaaccaaacaaccgaaaggaaactacaccagctaatgcagagcctgtttcttaataacattcttattcttattcccatttctattcctatattttcattcctcccaaccaaatgccaccttaaataaaatggcataagtgtaattgtaatgggggtaatagcattatatataggaaagaatagtgaaagaaagggtgtgaagaatttggtttagtttgtaacagttatggggagagaactaggttctcgaaatcctgagtattaatgagaggcattctgccatttttattcaaaaactattgttctttctctattttctgcaattgactaatcttgataggaaaattcctatcagtatactataagattcaattttattctgtaattagtgaatttctttgtaatccagttggtgatcagtaaagtgatgatgatgtgttgtgaaaatttcctttcatatcaaagctagaaataaaacaatgtcccaaaatcaagacatttgttagctttcccacaattgaccatagaggagagaaccaacttgtatatatcaacacaatcttttttatttttttggcagaagagttgaaaagtactatttatctgtgttgcatttgccctctttaagaggaaaaaaaaaaaaaactacacttgttatgatgctcaacttcatttataatggattgcttgggaataatataagtctttgttttctctttccttttttttttttttttgaaaaggattaaactcttttagaaatatcaaagtcgttggtcagtcatctttgaattgatctaattttgaagataattattgagtcaagtgtggggacaagagcattccctaccactaccacatgcatttttcctactaaggttttttccacaaactagccactaaactaatcacccttatatccttttacactttaacaaagtattaaaccaaaatattaataaatatgcattgtggtgaactaaaaaattaatagaatatggagttgctttcttttttggttagttgttttgagacttttttctgtttctacaacaacttttgcagaggttgataccattagaccttgagaagttttgaaaagacacagctttagtggtatccaaataaggaaggtttgcacttggattcagtggatattatcaaaataattatctgggaatttggtataacaacaatgatgttaaattgttttaataattagtgtatacattattatttgctgtatttgcgtattggtgtggattaaaagagtattcagtaccacatagactgaccaatattttgaaaaatgtctaaagctacttaaaccaattaatataataaatttgcatcattttcaaaataataataataataataataaattttcacatatacttttatttaattaaattataggtatttttgcttaaatagattatagactatagcggttacaaatatcccaaatatcatctatagtattgaatttgattaaaaaaaataattgttattatgttataatatcttaaaatgtaaattagtataaacaaaataaataattaattgacaatattctaattaaaatatttgtgttaaagcttcaatgatttatgacaaaaaaaaataatataatttgttacattgttctatctaatatcaaatttaaaacttttaaaaaactacttactattggaaaactaatatttcaaaaatccattagagataatcttagctattaataaaaaaattaagataatatggaataaagaagtaaatcttgtgttttgcaaaaattattaattggatcctctttattgttaaatgataaaatgtactctatatttttcaaaatggtacaaataggaccatttactgattttttgtcaaaataaaannnaataataatccgatctaaaggtgtgtatgataaaattgtttacattttttgaatttgttcgtgttaggaattgtcttcaaattggttatattaaataaaatttgtccaaaattaagcttatggtcatatttttaccattttggaaaatatagggtccattttgttatttaacaaaacagaagatccaatcggtaacttttgcaaaacacagaatccaaaataatatttacccgataaataacaaaacaataaagtttctactactacatgagcaagtgtatattgaccaagacttttccacaaacaagacagaaaaacagatcgccctgtttttagcttaataaactactaaaccaaatactaatatgcattaatggagagtggtgcaatcgtgaaatagaaaattaataatacatggagttggtttcttttctggttaccttattacttgttttgagtcttttttctgtgtctacaactacttttgctgtggttcataatgatacaattagaccattagatattctcagacataattacagcaataattctttcttggtatccaaagaaggaaggtttgtactgaaattctttactttaagaaataagggattccaaggctatctgggaattttgtgcaacgacattgattatgtagtttgtgttgcaaatccatgtaaaccaatggaatattcataaaaaaaatattaattttacccattcaaataccaagcaaaacaataaagtttctcttagagcaagttagtgtatatattgagctttcattgccatgtgtatttttccacaatgaccaagacttttccacaactattcaaaaaaaaaactaataacttaataaactactaaagcatattatatattaatatgcacaatggtgaactagaaaattattaatataaatggagttggtttcttttttggttaccttattattagttgttttgagacttttttgtgtgtctacaaaaacttttgctgtggttcataatgataccattagatctacagatgttcttagagatcataacagcattaatgctttattggtatccaaagaaggaaggtttgcattgggattctttaatcaacaggtggtttcttcaaccatctttatcttggaatttggtataacaacataacaagctattcagatgtagtttgggttgcaaaccgatgtgaagcaatcattgtaacatctggtttgttgagtatagacaacagaggaaatcttgtgcttttttcagaagaaaataatagtaagagagaaattgtttggtctacaaactcgtccaaacaagccgcgaaaccattggttcagcttttggataatggtaacttggttttgagagatgagaaagatgataacacaacaaattacttgtgggaaagttttgattatcctactgattcattgttgccaggaatgaaattgggatgggacttgaggagaggtctcaataggcgattatcgtcgtggaagagctctgatgatccttgtcatggaaatttcactaatgggattgagtttgatgaagaactccatacatatccccaactaatagctcgtaatggaactgcaatattttatcgtcaagggatgtgggatagcataagttcaagccaaaattctggctatgaatttgtttacaatgatgatgaagttttttacatacaaaataataagtcaatgatctcaagaattgtcatgagagatgatggaagaattgaacaccaggattggagagaaaacttttacagcttaatctgcccaggagaccaatgtgattcctatggattttgtggagctaattcacaatgtaatgtcacaactgtaacacaggattatggaatatgttattgcttaaaagggtttaagcaaaagaatcaagaacaatggtcagaagggtgtgaaagattatacagtcccgcgagttgccatgatgaagagaaagaagaatttcgggaatatttaggcatgagagtgcctgatactaaaaatagtttggtgagtaagagtaacaatgcaagtgaatgtgagagtaaatgcttgaccaattgctcttgtatggcttatagctttacatactctgagtctaatgtctttgtagcagacactgtttgtgtcctctggtttggagatctgtttgatattagacaacttccttctggtggtggtggaggacaaactacacacattcgaataccaaattcgaaaataggttcgttttacatgtgttcttgttttggtttgt

SEQ ID NO: 1354 - DNA, 1942 bp, Cannabis sativa
tgttctggtagttggccggtacttatgagtttgggatgggataatgaatgtgtggaaaaataaaacaaataattgtttaattatattatcctatatatatatattcttaaatacttatatgtatatacaatattaatttcaaatctattaataattaagaagatcttgcatgcaaacacttccaatatttacttcaacattaataaatattatttcatgcatgatgagtcatgctcaatattgataaatcaattagtattataaaataatataaaatagagaaagaaataaaaaagaacgcatagagaagaagagaatgagagaatgaatgagatttttctcagtagtttattttaatagggtgaactcctatttatacaaaaatatgactagaataataaaaaatacaatcaataaaataaaataaaaaatacaatcaaacatttatgatgataattaattttgtgatttggacatccatatataatatttcataacactcttctttggatgtccataaaaaccatctaattatgttaaaaacctagctaaaaaatttggtcaaagagaaaagagtgccacatgaattaactccctctcatttaggcgtttgtggagctcttctaatcattgaatttcaatcttatatgttgccttctcaaatattggtgttggtaatagctttgtgaataaatctacaagattgacacttgattgaatatgttggacactaatatgcaatctcttgaaatgtataaagaagaatttcataaaatatgttttaattctatttccttcaatataccctgcttttagttgagcgatgcaaatagtatattatctttatatactactgcttgtgttgatacttctttattcagtataatccatatgcttcccgaatatgttatgtcaatgatctcgcccccacacattttttactcacttcatattcataatcatttgcaagttgtctcattaaaaaccttgtcaggaaaactcagtatgacaaaacctgaactaagggaaaaagaacgcaatattaatatgtctccccctcatgatagggtctcaagcatggaaaataggttgtgccaaaagtttttagaaattgataatccggctttcaagagtagaatatttcaaagggtgattttccttttgacactggtgttgggagtatttatgagatagatagtagattgaaaagcatccacccaatattttaggggcatgcttgcttaagctaaaagtgttagacccatttcaataatgtgtctgtgctttctttcagcacgaccattttgtactgaggtgtaaggacaggaaagttgtaaaggaattccatgctctcaaaggaatgatgtgaatgaatggtatgcacccctgaatcagtttgcagcctcttcatttttcattcaaattggtttttcaaccaagattttcaactgaacaaatgcactaagagcatctgacttgactttcaaaggaaaaatccaagtgtatctagtgtgatcatcaatgaaatgtatatagtattttaaatttgcgttagacataatgggggctggaccccaaatgttagtgtgaattaaatcacaaacatttggctctaaaaattgacagtttaaaaggtaaggaatgagatttgccaaattggcatgcttcacaaaagtgttgttgttcattcattgaaattcttacattagcactagataacacttgatttagggctctagtggaaggatgacccaatctactatgccacaaatcccttaggaaaacacaagacagatctgaatttaaactagactcagtaatagcagtaaagggagcaccgcaaaaactgattctattttgactggtttgtggtagatggttaaaggttgaatgagtgttggggatgtcgatctgatacaagccatttctaagccttccctcc

SEQ ID NO: 1355 - DNA, 1237 bp, Cannabis sativa
cattgtattttctgtgttatccttttataaagtttacatgcagagattgatatcaaccgaagcaagacaattacctctgttcttccttgaagaataggttttcccatgagtagttctgcaaaaacacacccaacactccagaggtccactgcagctccataatctgttgaccccagcaaaagctccggtggacggtaccataaagtgacaacacggctagttaatggttgtctatgcccataattgcagaagtttgccaatccaaaatccgccacctttaaaattccatcgttccccactagaagatttgatccttttatgtctcgatgcattacacccctcgagtgacaatgttcaatcccagataataactgcttcatgtagcatttcatctgaaaatataaccaacttcaaagatttactgcgattgcagaaattaaagataacatattgaggacgcagtcggacacaatactaaaacaaaactactagtaggtagccatggcataaattgatgaaacaactctggtttagtccggaactcaaaaggtttaatacattaatgtgatcccgaaatgtttaagtatacctgtgactcgttgaacttgatgtcagggcaagataagagtccagtaatatcatgttccatgtactcaaacacaaggtacaagctacatgatagtcgagaagtaattaagccctccaatttaatgacatttggatggtcaagcctgcgaagaatagtgatttctcgtgccatgaaccttacactctcaggttcaaaattatcaaaccgcaccttctttaaagcaactatcttcccagtttcaaggtctcttgctcgaaatacagtactgtatgtaccctgtccaatctgttaaaagtagtaaaaaattaacaagatcacataagaaaaggaaatttaactgtcacgatcaagatattgaaccaacatatgtaaaacgaaaatgagagggcagcaagcatcagctctgatcaagtcaagaagaaacacagaacgatcaggttgagtaaagaatgtggaaactttgcagcctcttagggactttttacagaatcataaaacagagctgacaaaaaagaagcatatctcaaaagcttaagcaagtaaaactttcatctttttaactttccctagatagtaattataaatcaacacaggaagaatcaaccaaagatcactgtttttgttgctctgttaatgaaatagaagaca

SEQ ID NO: 1356 - DNA, 1527 bp, Cannabis sativa
tgaggcacgaggtcaagggttcgaacatgagtggctccctccaaagagtcgtgataatgcctagaggggagccacaccggtagcccccctcctcccctttcttctactgaagaagaaagcttaaattgttgttaattatgtctatgcagattgatgaacaaattcttcaaaaggtgattgataaggggtttgacaagaatcaactgattcagtctcttctcaatagagttcaaaacaaggtttggttcttgaaaatcacagttctttcttatataaaataaactacaattcttgtgtcattgtctcaacgtatcatatcatcaggccactgttgcatactacttgctattggatcatcaatactgcaattcaagtccatatcttaaagctgaatttcaggtctttttttcttcttttttaatgcttggagttagtacaatttatacagaacttgatcaattgccttctgtttgtttgaattaggaaagtggtttcaaccaaataccattaccaagatatatgaattatcaagaaataggccaaaggccagagtttcccctagaaagaaaatggtctcttggacttcaggttaagtaattttgtactatttttgggcggtgtttggacgaaagtaatgaaatagaataaaacgaaatgtattgaaatgttatttcaatggaataatttttctatcattctatttcgaaatggaaggaaaaacgatttcaatgcatgatgagaaaaaatttaataattttttttatgcgttttaaatttgattctattctcattctcgttccttccaaccaaatatcaccttatagtaattagttacttacttctaagctatgaagtgatttaataacgtttttattatttatttccttgaatttcaacagtttcaagccaatcctcacgaaataatgacagacgtgcttaaaactttgcaagaattgggagtttgctggaaaaagatcggttactataacatgaagtgtagatggatacctagaatccatgccactgccatgaagccatccaatgtggtcaagtttgaagttcaagtaactctctcttatacacttcttcttgcctaatttacaattttacaaacactacactcaacttttggacccaatgttatataatatgttgttataatgtacaagttttgttttgatatgttttctaatttggaaagatgttatgatgttgactgtatacagctctacaaaactcgagaggagaagaatctactagatttgcaacgagtccaaggttcacagtttttgttcttggatctttgtgctgctatttttgcccaactgtgtgtgctgtgaaggaatggaaattgtttagtgtgacaatggtgaataaaaaaaatgaaagaaataagaatatttgatgagctccaattgcaattggggttccaacattttgtacataggcactggttagctcatagttgggcttttaaaggttgtttttgagtattttaagctccaaaagtatttttgctactcgtta

SEQ ID NO: 1357 - DNA, 1180 bp, Cannabis sativa
cagtaattaattggagccatagaactgtctctccatcacttcataaaccgagttcatcgtcaatggtaaggtaaagaatagttcacacacaacccaactgcaccagtgtgttgtctcttagtggaaaggacatatccgcagctatctacagcagaagcttgggagaaggacaaggttatagagtgcctgaaaattatgtgaatgcaatagcacagtgttgtaatcacatgtgacaacaatattttcttatatataactaagggcattcatgttggacccctctttcttcttaactttcccaattatattgttaccgagtgtaattagacttctctggaaatagtttcttatagaaaactttagccattcatgttggaccactctcttcttaacttctccaattatattggttatcaagtttaattagacttactaatggcttgtgcttggattttcaagtcaatttataaacatttaaaaataacaaaggcctgtgtgcatgtaatgttacaaataaatggtatttcttactcttgctggaacttttatggacatgtgagttacgctagagcatgtgttttttattaaagttattttcctgtagttttgtactttcttttttatttccacagctatatggttcctgagattgacaagagatctacattattttttggcatgtctgaggctgctgaagaaattgcagaggagcaatcttctatgtttgtattacggtaatagatacatacttttttgtttttttactgttagttgtaggaatggtatggtattatctgtccttttatattaaataattatagtagtatagtataaaaaaaaattaaattgctggaaaagataaattttaacatgaaaatatttttataccaagggtgcatgaataattgtatcagcaatgattcatacagaaggcatgcttctacatctattagatgtcgatactcacaatatttacaattttatcatggcctgagataaagaaatttagtttaagagatttgaatatattttcagtattaatccaagaatatattgtattagttcaaaaaaaaagtccttcgttcttttatatgtgcatgagatgtttcttatgggttttaaactaagataatataatcccctttgtattgtcctcagattcctacttagaaaatatgat

SEQ ID NO: 1358 - DNA, 2974 bp, Cannabis sativa
aaaaatatacggaaacagtgacttaaacctacaaaattgtagaaactttttattaaaaaatgtaaactggggccagttggaagtaaaccagttaaaaaaaatagttctctttttttttttttttttgagagagaataatcaagatgcttgaaatacaaatttaaaaagaaaaagtcagaaagaatgatgctgacaaagtaacccaagcttcagatcgtgcaacaaatgatgaaaaactggcctaagtaatatagggtacacagtactgaaaatcatttgaactaagacaaccatgaaaacaatcaaccattttcaatagccaaaaaaaacccataagtggatctgctgacccaataaaaaggaagagtaagagcccagataattttttttttggataaaaaagagcccagataatttgaactcaacaataatcataaaaaattccaccccttattcactttttataacactaaaacaaaaaagggaaaaaaatacccaccaaacaaaacaaaaacgttacactatggtcagaaactatcctagtcaagatgtctgtagaaacctcccactaaacaacaaaactgaaataaagtaaaactactatatgggttgaatttttcttctcttacgtgctaaacttaacaaagcttctaaagcttaagatcttaagatccatggagcctgatagtgtacagtagtaaaccatctgttcaagataacaaagacaggaccacaataattaattccccgctgaacacttatagtttgggttgacctaacctaccatcaaaataatgcaattaaaagcaggcatgaacctcaaaaaccctaataaagtcttctttcaaaatcaaattcaataagataagtgtaccaattcaatcctctttttggaaactttaaagaatatacttaacaaaattatgaacaaatctgaattatcactgttaaaaaatcgaatctccttcaattttttttccttcaacacatatgaaatttcgtatataatttcttaaaagaccagatctgaaataataataataatagcagttgaagaacaagtaacaagaaataaaaatcacaaatatattgtaaataaaagttgagctctttacctcttcggggtcgacttcttcttcatcatcatcgtcgcttccgtcatcgtcatcatcgtctccatcaccttcaccatcatcatcttcatcgtcgtcctcatcgtcatcatcatcgtcttcatcgtcatctactgagtgaaccggaggaccaccggaggattgtacaacctcctgaacatcgtcatcgtcgtcatcttcatcctcatcatcatcgtcgtcgtcttcatcctcatcctcgtcctcgtccacatcgtcgtcatcgtcctcctcctcatcgggactaatgtcttcgtcagttgataatatgctgtcagccgtgacatcatcctcatcatcataaagaactacgttttcgtcaacaacttcctcggtaatcttcatcttcaaaccctagcaagaattttgcagaccaaattttgaatttcacagggaaaatcaaagcacagaagatagagaagcaagagagaaagaagcttcttcgttcgctctaccagtagctctgcgtcctgtgatctcagccgtagaaacaagcattcacgcggattgctgatgtggcagtaaatcgaacggctgtggtttgagaatttgtattttttgcgatttcaagagtcattgcggcgctctattctgcctctttcgagtcagctgcttgtcacgtgctacttagggatgtttgggtatctatctagggttagggtacttctttcaggaatattctattgggctcagtccattaacaaaaatctggcccaaatattagtaccttgttctgggctcaaggaatatagttttgggctttcttttcaaacatgaaaactagtctagacacatatattttttgaaaattctaccatattgatatactcttatttattttagtgttcgaaaagaatcttttaatctaatttttttaatagttatatacattatagttatttaagatacattgaaaatttttgagatattcaaagaaatttaacacgccaaaaataagatttaaacagtctgttgcacgcttgactcttttattttatatgcgtgtgaaagagattgtttgaatattgttttctatattataaattattttgagaattatggctgcatgcaggcttcgtgggcgtgaaatctcggttaggggctcgttcacatagcctcatgttcgagaaatctcagacaatggttgtctgaagctgtgtcatgaccgagtgatgtccttgtctccgcacgcgtaagggtgaaaccctaacccctgattttaatattcttttactattttttacaattataaatgttattaataagaagtttaggtaaagagtcaaaaactagagaggtttcattttggttgactctatcataaaaacactctctccatagtaatagtattggtagaatttgtgacaatgtaacaagttgataaccattaatgtatgtacttcatagttcatactttcatgtctcaatcattttctgtgacaactcaataatgctttccaataacaagaacaaatatcaagaatataagtttcaatttttgattaattatcaagtaccataatttgttttattgcttgattacatcaaatggatcaattattgcttgattacatcaaaatccaaaatggattgatatgatgatgaataatgtagcttattacaaagaaaatccttcaacctctaattaatatcttattttaagaaaaggctccaacaagatatgagtagttgaagagctatgaagccctatttgcaatgctttggttattctttctgttaacctcgaaacaacctgagagttatggttaaaattgttgcaattgttaaaatcccaatctttaaattgaaaaatgtattcaaac

SEQ ID NO: 1359 - DNA, 2995 bp, Cannabis sativa
tatatatatataaatatacaaatacttataccaatgtataaagctaagtaaaccaaacaagtgacataccagcttcacagcaacctcctctcctgtttgaacattaacacctacccgagaaaaaggagcaatttttcagaatgataataaatcaacaaacaaacacaatgcagtaaacaaaaatcaaaaccccaaaaagaaattgagtaactttaccacatcattgacaagcatacctagataaagctctccaaatgaaccgctaccaattttccttccaagcttaaacctgttaccaatcacatgctccatgatcaatccaacctcaacaacacctcgatccaaagcctaataatggctaactttttcaatgatttatgcccaatctagtctttatttgagcataacctcatatccagccaacaacaatgccccaaatctatccaaagaaaaaaaatcctatctttttgagccaaaaaaatcgccaaaagaactaaatacacatcccaaaccaagcatcagatcaaaatcaaccgaagtagatggaaaatccgaaatacccaattcgaaatcagaaaaaaaaaaaattcaatcttttttcaacgcaatcctccaaaaatgaggttacagaaaatttcaacgaaagcaaatcaaccttcttccaacaacaacaaaccccaaatccccaatttcagatgaggaatcaaaaccctaatcggaacaacattgacctacattgaccattaatgatcggacaaaacccccccaagagaaaaaaacgctgcaaaatcaactgaagtccaccgaatcagcaggtttccccctaatcagagattttctcaggaaccaaacagaaaaacacagtaccctaattgggaaaaacgtaaagatgaaaactttgaagagagacgagaaaggaaaagcgatgaaacgataaagaaagaaagaaagaaagaaaaaaaaatggagaaagaaagaaagaagaagaagaagaaaaagaaggttggaaatataataatataataataattaaaaaatataatatatataaataattgtaataagttaataataataataataattaatttatcttaatattaatcttctttgtaataataattaataataaaaatgtttgtctttgttttgtttttttgtgttttgggcaaacaatttatcttttattaattaattttaaattattttcttttaattaattaataatggtcttaataagtttgggttgtcaaagttgagaaatttagttacacttttacaaaacgtgccaactcctcctttttctctaattagatagattttcaatgtatcttccaagctggttctatctaacttcacaacacaatttttttaaaaaaattatttaaaaataaatgaatggataatgggatattctctattcttttcatctagttatattactattacattttgtgtttaaaaataaaattgggaattgggtaaattagtgtttgtccttatctaactttgtcataaaattttgaggacttttgtttgtggtccactttgttgaatagtcattatccttattatttgagctaatatagttagtgattgttttttcttaaattggtctcttatacaaaacaaactattcttttcacttttgtgtaaagaattaaacttttttttttgcttgtgtaaagaaactaaagccttataaaaggaaggatttgattttatagggtatcaaatgttaagatagaagctattaaagcctatataataaaacaatatatgtcttatatatgaataataatttgactattcttgagaggacttgagaaccacttctcataatcccaaatgttgcataacatggaaaaaaaaaatgtgtgtatgtatgcacgttttaacaaagaataaatcttttatttatttatttttgagaaaaatgaccaaatcctcattgaaagagagttatgaatacataggtcaaaaactcttgtgaaaaaaattacaaccaagtaatctcattttttatttgtagtgtacaaagataaattatttctttatctaatataaattaacattttgtttaaaaaaaaataagtaaatggggtcattttgttttttcatttttagttagattagatgtaaatatttatgactcgttatgaatttaacgatgttttaatcttgcaatgttaagaactcgacaaaattttaattaggaatttataattattttaaaaaatataggactcttgatctaaagagtcaagcttaatgaatttagctcatttctttttcttttttgacaattgaactaaggagggacataatttagtccctatataatatagtcttatctatatatgatgtctatgtcctaagaaaataagataaaatcatattttcaatatattgtttttaagttctaacatttttttcaacatttattgattacatttgggcctcttttagattcattgagatctatatgtgtcacttttcatatcaaagtacttatgactcacatgagagaatccaaagctatactctaacatggtatagtgtctctatgctcaatatatgatgttatatctctagggtttttaattaattaatttaatttctatatatctaaattattgcactcaatatgtatgttttttttttttttgacaaatgatcaatatgtaagtttaaccattcacatgtgtgtcataacaatattgttgttggcagatctctatagctttttatatcttttattttatttggtttcataatattgatttatttattttttgcctttaagcccctagttcaacaccacttttaagaatctaatggagtttagcaccatttttaagaacttatgtaattggtgaaatggaaaaaggccaattgtttggtgataaagtacaccaagtaccaagggttatttcatctatctaaagaaagtgagacacacacttaaccttattaccattagtagaaatcaact

SEQ ID NO: 1360 - DNA, 3072 bp, Cannabis sativa
atattcgtgcggcggcggctaaggcagccgagtctaaacaaccccaacagcaagccgagcctaagccgataccgaataagcaggataaaaactgtggggatcaggagagttcgaaagctgtagacgattgggtgatcaatggggaaagttgttcgagtactactgcaaataatagtgagttgagttcaggtgggggtgagtttatggatgaggaagcccttttgaatatgccgaatttgctagtgaatatggctgagggaatgctagtaagtccaccaaggatcaatacgccgtcgtctgatgactcacctggaaattcagatggagaatgtttatggagctatacttaataaatatatcgcacaaaatcattatatattctgatggatggtggtgatgatacatatatattttatatatttatggatcatcatccagttaaatgatccagattcaaggcatcaatatattaaatatgatgcaaaatgatggtattgaaagaccaaaaaggtacgggtatgttttttctttttctttttctggtacttttgtatttttgcttattctctgtgtgtttctctgatttttgctacccttaattgccttttttttggaattgggtatttgttttttgggagaaggggttcttctattattaccttctttgcccaccactggatttttgcagctgattataatgtatgtggaatccgtacgtgtaaagctgggcagctacacgtgcaggagattttgctgctaaccttttatgatttagtagctgtatgtatatatatatttatatattatatacatatatgtttatgaaagaagaagtactagtactctttctactcatgtttatgccttatattcttgttttggaaatagatcatcagtcgggaggaagatttttaataaatatatatatatatatgatgagagagatattttatgtatactttctatatattggatctctacttataattatggatctttaccattttcaatcaaaacatactactccttaattacttacgctcatgattacttacatagttgttctagattttgaccaggtttacctattacaaggggcattataaagtcttagtatatgaatgatcaactagctagcctttttagtaagtctcagaattaataataagtgataaattcttctcaaaagacaaataataataataagtgatcaatcaataataatgactctgaaattttgaatgatgctattttttgggttaagaacgaaccctcttctcacttctttgtgtctgatcgttcttattatactgtataagggaaagaagtaataaattaatttataataagatatggtttgatatgatatggatattataataaatataaatatattagtagcaacactatatgttttcatgtaaggccataagtcgtttattgttaaagtagcccagacaagaagcaacaatcgtgccgattgttaaggtcatgatttttagaaattctttcgtattccaaatgatttgcgaactccattaatctctttaatatccatgattagtacctacccagctttgaaaaaaagactcgaaattataatctgtttggactagtactttcgatccgaaagatatctctatagagcactacattaattctcagctatattggggctaacttctaagattttatgaagcaaatcaggtagatagctatttccaaatacgacattattgattggcagtataatcacatttgctatattacttgatttacactacatatatatgtgtgtatcattattttgtatattactgcagtacatcaaacatgcatggtatgcatgttattataattaactatatatcatatgcattccctacaaaagaactatatcgtcatatatatgcctcaaacttttgttaagtactatatatatatatttttatatgtatatcatgtgattatgtatgtatgtatgaagtaataaaagtagatcgatgagaggggaggatggggggcaaaactctagtatagtctgcaacgaaggtacaaagagaaaaaaaagttataggaggaatccgtgtgcaactaataggttagggggtcctatatatttacatatttatggcaaaaataaggaatggactggcctagctatggctcaacaacaactaccagactcactacaatcactgaaagtatatgaaaagatatatgtacagaagataataaattaagaattaatatatatatgtacatataggtggagtaaacccacaaaataattttggaaacatcccaaaaatagtgtaccgatgcatctttgtttcggcattcaggaaaatcttttaatttaatttattttatcatcgttcatattgtagttatttaagaaaggatataaatagcggcataagtacttaaagttttatgtttgtaagcggcataaacctgatgtttatttttagcggcataagtatccataatttgtaaaactataattttcttctagtttcgtcagtatagactctgttttgaatttgttaaaagaacatttggaagtaaataatactacatatttgtatttagatcctatgatcaagaatttacgccttatatagttatatgtgccctgtttaagacactaacagaatctgtactgataaaattagagaaaaattatagttttgccgctaaaaataaacattgagtttataccgcttacaaatataaaactttgggtacttatgctgctatttaccctttaagaaatcatgcaaaattttaagaaacttaaaaaaaatttaaaaacaagtctatataaaacaaagaaggtaggtatgcaacaaactgtttcaactttatttttgcaatattaaattttttgaatgttttaaaaaatttattacatgttttaaataattaaaatatatacgactattaaaaaaattatattaaaaatttttctaagataccaaaataaataaaaattttatatcggtgtaacctttgaattttagagaattaatgcattgaagcattctatatacactataaatatatata

SEQ ID NO: 1361 - DNA, 3436 bp, Cannabis sativa
aaagttatggcatgaggagactttggaagctcaattagtatcttgattaatatgttctttgaatgaaggtgtagcctttatgtattatattgtttactctttttttttttgacttacaatgtttttggtttacaaacttataatatgttttatatcttcaggaacctgttaaaagtgctattattgattcttgtattcgcgtcatggacaatggtcgggaaagcattcatcgaaaagtatggacttcatataatgtatttctttactggtgatgtatcatctatttgcttaagcttcctaatttagttagtatcactagtttcttattaagaaccaattcttaatacaactttcaggtcttcttcatattcactttgtacaatacctccaatcacaacgaccaacttaaggtacatgtttgagaaaaagtgtgttagcttgacaataagttttgttaatattttgagtactttatttcatagttgggagcaagttgtcccgaagaagcagcacggtggattcattcatttcaagaagcagctttaaaggtttatacctatcagttttgttagtttatagaaaatttgattaagcttatcactaatgcttaacaatgaaacttatatgcagggtggtccagaactagttgatgatgttttgaactgttcaaagagaagatggcaatcatttaggtgtatagcttcttgtccactattcttttttaacacacctgtaactcactattcctttttcttatttcaccaatcttctagatctccctttgtgcccgatatgtttttattcacattattctcagtgaagttgatgtgttattacccagtgcatagtaaattctatagttgttttgcgataaataactaaaaacaacatttttctgcacatagattgggtggaccgagcaagactagtcctattaatgcgatagattggactatttgttctacacatacagatcctatgacatcagatgttatcgcgccttctccatggacaattttcggatgtcaaaatggtgagaatgagcttttgtggggtagttgaagctttgtcgaaaatcaatggtttatgcaggtttatgaacttcttcttttgtttttctattttcaggtttacgattgtttaaagaagcaaaggatagagactctcatggaaaggttggttgataacttggtatttttgtcttgaatataaataaatgtttattccccattaattgggttctaaaagacctttttattatccatgttgctctcttggccagtgggacgatcatcctgctataatggcggtgggtgttgttgatggaacttcagaagccatctttcaaacacttatgtctcttggtccctcaagatcacagtaagtttgatgagcacacttatgtctctttgatgtgattaaattgtctaaaatgaaccatgagttttgaagataaaataccgaggaacatggtacttaaacagagaatgaaaattgtatgactttgatttatatattgtacattgctttgtccacagatatttagtactatatttctttcagttatttatatatgtatccaaagttcctaatctaacttaaaaaaaaggttcctatggaagcaatttcgtatttaatgtctaactaggactctgcacatttaaatttagaaaccagaactattaagaaaattgataaatctgttggaaaatcgggttgcaacgctaggaaggagggaacgggattgagggatttgaggtccaatcttttgtttattatataaattgtatggaaagctctacttgataatttctgtatcaatttttgagtagtactttgttaatgcttcaatcttattcatatataagttgcaaattcgattcttgccaaaagttaaagttttcatatcgacttgtaggtgggatttctgtttccacaagggcagtgtggttgaacaccttgatggccataccgatattattcacaagcagttgtatagtgattggttgccatggtcagtcccgtcccacagtttattgtacatgatctaattttctaagttttatctccttttagcaagtgtatcttttcatgttattcattactttctcaaattttgcaggggaatgcaacggagagatctattattgcggcgttattggagaagggaagaggatggaacatacggtaatatcatgtttgaggaaatattcgcgttttgatcaatcttattgtatcgatacagaaattttacatattttgattattcttgtcacagttattctctatcattccgtatatcacaagaaatgtccgcctcagaaaggctacgttcgtgcctgccttaaaagtaatgtacgctttagaagttgaaactataaattataactatataatatttctcacaaatttttgtttcaataattgttgtttgtattcgaagtgttattgtattgacataattttatgcctaacactttctttaggtggaggatatgttatatcgccggtgaatcaagggaaacaatcagttgtaaaacacatgcttgctattgattggaaattctggaaatcgtatattcgtagctcttcagctagatccataaccatccaaatgctcgggagagttgccggtaaagttttcagctattaaagaattttacacgccaatgtaactgcaaacgtcccatatcttatggagtttgtttgtttttttttttcttttcaaattatagcgttgcgcgagttatttagagctaagcaaggatattcttcatctgaattttcatctggagagttgacaatgaataacgggtcatgtcaaaatgagatggagaacagatttgatgttcaaacaacgactagagatggaagcaataagggaaatatagccgaagaagtagataaagcaccatcggaacatgctagccttgttagcctgaatgatgctgctgatgaattttttgatgttccagaaccttcggattatgatcagtcagaaaatgattgggtgcctgatttcgttccagagacaaattcgcaggtaatagcagctacatatactctttcactaccattattagaaagggggtttagattttcatttgaaggatcttgaatggccatataaggggatcatcaatccataaacttgcatgagttgaaccgagtcttctaagaaaaaagtccgaaatgacatgattgtggttctagtgatgttgaaattggtttcacatgataatattatgtgtatgaatacatgatttcaaatgattatttgtggactaaacttataattgactatcaaatttcgatgaggctctaatgtgttcgggatttaatgtacctttagttcggccagattgcctctgggcattattttttccatgacatatttttgctgggcatgatctctatcggtttctcttatgttttt

SEQ ID NO: 1362 - DNA, 2962 bp, Cannabis sativa
aaaatcttagtcccagtaatgaccatagggaaaatagatatagtttaggagaaagaagggtattcaggtaaatccacttctgctggggctagtaggcgggaaagagcttaggaacactgaaacagagcccatttggttctaacgaacaacctccaccctccaacagaattgaaaaacagttaaaaccaaaaaagtagtaacaagtgagcttcaaaactctctttctctccgtctatcatataaggtccgatcttgatgaaagaagagaggtgatctgacaatgtcggttccaatactcgaagcttgcaagaagagaaaaagaagaccaaagctgtttgggttccatacgttcggagattccattcaagcaagaggtcctttcagagagagcattcgattgtttcttcaagaatgtgcagaaatcgaagactataatcttgaaggtatgcccgtgtggtgtacgcttctcgtccttgaaaacagaagcctcgtactccctctctacaccattgaagaagacgttaaaacctctccactaccatattgcgatcactgcagatcaaccggtaattcgtctgctcatcattttagtttcctacgcggtatcgtttgttttttttgattctttcatagcttttttatcaactttcatggcgtcttgtgtttcaattaaggctggagcaagcacttcgttgctaagaggaaataccactttttgatcccaatagacgattcgtggaacaagcccttggacgatggtgttcttgatacccatgagtcgcatcttttgtacggattgatacactctaatggcttcggccacttgcttagtataaatggacttgagggaggttcaaagtacctgtttggaagggaaataatggacctctgggatcgattatgcactagtcttcaagcaaggtaagaaaaataagataattgcgtaattaagttttctatcaaattcaagtttttagggttaattttgttagttaatttacaggaagattacggtggcagatacgtcgaagaaacgatcaatggatcttcgccttctccacggggtcgcttatggacatccctggtttggaagatggggttaccgcttctgccatgggagttttggggtgaaggattacaactacgaccgagctattgagattctctgtacattggagctagaaacgataataaacgatttcagcgacacggaaagattccaagacatcaggcaaattattcgtctttacagagatttgagcgaaactcaattgataacgctcaaagatctgttgaaattcatgctcacagtaaagtctagagcctcggcacatggaaaagtgatcatagcatcttctagtattcctgttatctcgtccttttcgatctcaaaacctttcaccagaacatctttacagagcaataataacaagtcgcatgggagagacaatattaagcctgtaaagtacaaaaagttcagcactgtagtggctaacatggacagccggtggcctcctagacgactagaattcgcagccgatgtgattgtgaaagccctcaaggagaagaaagagagcaattttggtagtggcgggatgaccaggcaagacgtgcgcgatgctgctaggttacatataggcgacactggtttacttgactacgtactaaaatctcttaacaatgtcattgtgggaaatcagatcgttcgccgagctgttaatccctctacgagaatattggaatacactatccatgaagttcgtgaaaatcctagtaaggctgtttctcagccctccgatcaggaaatcatgtttaatcaaactcagaaattcatatctactaatactccaccttcaactctggttcctgggaatgacgtgtacaccgacgtcatatacttgtataggcacgtacttctggattacccagcttcggagattgttgagttagctacgcaaaccgttctagacaccaagcactttgtgaaggagtggccattcaaagacgaggaagagcaaatgttgacattcatttgcagatttataccgagtttaagcgatgaaagtgagtgtggaatgagtgagattgtgtctgtaccattacatgccacggttggtgagcttaagaacgcggtggagactgctctaagggacacttattgcgtgacagagcaaatagtggtgacggatatagacgggttggaggagattgatgatggagaaatattgtttgggagacttgaatctggcgtcgagataagagtgagggggaataatggtattagtaatattggggggtactccaagagtcccgagggagggcttttgaggcgccaaggtggatgtgacatgtggatggtgaaatgcgagtgtggggcccgggatgatgacggagagcggatggtggcctgcgacatctgtgaggtgtggcagcacactcgctgcatcgcgatcgacgatgccgagaacgtgccaccactatttgtgtgctcttcatgttgtgactcccttgtgccgcccagagttgctcatcgtgaggaggcagcatccggaaaaatggagtattgtgaggatttgttgctgccgacccattcatttgatcaatacggcttggccataggatactgataaattggagctgtgtcattgcaccattaagttctttcttttgcttaatttcctttttcttttcttctcacaatgtgcaattttgcagaagaacatttcacttcgtaaagtaataagcttccgtaaattttgaaactaaacaaagtctactatcactcactcaccacatctatctctataaatatatacatatattactacattagttggtacccatttggagttctttcaaaaacaataaataatcacaacatgtcgaatttttattttcaataattactatttttttgcaaattgaattttttattctactaacttgtacctctttagtatag

SEQ ID NO: 1363 - DNA, 4361 bp, Cannabis sativa
gattgttggcgatgtgtatagcagactggttatcacagtaagcaaaggcgggactggtttgaggtatgtggaagtcttgaagaaggtactgtagccaagttaactcgctgcaggtggcagcaagagcacgatattcagcttcggctgagctgcgagaaatggtgggttgtttctttgtgcgccagaatacaagacagtcgccaatgaagacacagaagcctgttgtggaacgacgtgtggtggggcatgctgcccagtcggagtcagaaaatgcccgaaggtggagagtcgattgggtggaatacaaaagtccttggccggggcttcttttcagatatcgtagcaaatgatgagcagcctgcaaatgagttgttcttggatttgtcatgaattgactcaaggtgttcacggcatatgtgatatctggtctggaaagagtgaggtacaacaacttccccaccaattgtcgatattgtgaaggattatcaaggggaaggccttattcatcatcaagttttagcttaggatccataggtgttttggttggtttgctacctatgaatccattgtcttcgagtaagttgatagtatatttgcgttgagatagaaacagcccttctgtgccacgcgctatttcaaatccaagaaaatattttagaggactaagagcctttaaagaaaagcgtttgtgaagattgtcttgaagttgttgcagtagggagatgtttgatccagcaagtatgatgtcatcgacatacacgagcaacacaatgaaagagtcatttgttcccttggtaaataaggtgtagtcagcccttgattgagtgaatccttcttgaaacaaggcgtcagaaagcttgcggtaccattgccgtgaggattgcttcagcccgtaaatagatttgttcaatttacaaactatgttggatcctttttctacagaatctggtagagtaagacctttgggaagttccatgtgcacttcttcattgaggtcgccattgaggaaggcgttgtcgacgtctatttgcagaatatgccattgtttaatggcagcaatagcaagtaatagtttgaatgtcaccattttggccacgggtgaaaaagtatcaaaaaaatccaacccttcttgttgcgtgtaaccttgtgcaactaatctagctttgcaccgttctacagatctgtcactgttatattttatcttgtagacccatctacaacctatggcacgtttgtttcgaggaagttgaacatatgtccatgtcttattttttagaagagcaaagagttcacgctgcatagcctgattccacactcgatgttgcactgcttgattgtagttgctaggttcaaaataggctgtcaaggcaagaacaaaagttttataagcaggagaaagatgttcataagatatgtgtttatgtaagggatgaggtgtagaactcttgtcctgaataatagagtggcactcatagtcacgaaggtatgaaggaggtcttgaaattcgattcgtgcgccttatagtagtggctggaacatcctgttgcagagaaggatctgaagctactgcacttgaatctgaagtggatgttgcagcagaacccggttctgtaggagtatcattttgaggtgaatcaaggcaatctgcattgtaattttcttgtataggaaaatcttcaacatttgtgttagtaatatcatgagaaggaaaaacaaatgtagaaaaagggtcagtatgcttactgtcattatttaatttgtggaatgggtaaatattctcatggaaaacaacatttcttgaaataaagaattgtttgttgtttatatcatacaacctgtagcctttaacaccttgtgggtaccccatgaagacacatgtccgagttcttggttcaaatttagttctttgagctgtgagagttgaagcaaaggcaagacaaccaaaatttctgagatgttcatatttaggaaccttttcaaacaacaactcatagggagaactattatgcagattgggagttggtgttcggtttatgagataggcactagtcaagatacattcactccaatatttaataggcatattggcttgaaataataaggcacgagcaacattcaaaagatgttggtgttttctttcggcaacagtattttgttcgggagtttccacgcaagtgaaatcatgtagaatgcctaatttagcaaaaagatccttaaagactaactcgggggcattatcggatctaaaacacttaaacatgcaattgaattgagtttgaatgtaagaaaggaattgagggataataaaagaaacatccgatttttgcttcattaagtaaagccaagtaaatctagttttatcatcaacaagagtaagaaaatatctatgattagaatgagagggaatatgatatggcccccaaatatcacagtgaatcaaatcaaatttgctttcagcaaagttgtttttattaacaaaaggaagtttcttttgtttggctttaggacaaatgtaacatggttcatctttatgaatattactcatattacattgtagtttattactaagtaaagcaagcctcttgtgagaaggttgtcccattctggtgtgccacacatcagctgaaatagcacagttgaaggcttgaatgtcaactttgtccagaatgtacaaaccattgtcttccttacctctgccaatcactctcttgctgagagtttcctggacataaaactcattagtgcagaatttaatatcaacatgattatcattagtcatgcagcttacggacatgatattgaatttgaaattgggaacaaataaaacattttgaagtacaatgtctttggaaacagtaacatttccactttgctgcacaactaaagagttgttgttaggtaaaatgagtttaattgtaggaatattacaaataaactgaaagagtttggcatcattacaaatgtgcctagtagcacccgagtcaacaatccaacaattttcttttatgatggcagagttgtaagtgagaattgtacctgtattacctgtggaggtgcttgcatcagtggtggaagtgtttagctgctggtttgctaacaggttaagtagttgttgatattggacagcatttaattgaggaagaagggtgttactttcttcagtagcaccattgttatcattcgaggtttgaatttgtttagccgtggcctctttggacttgttctgtttattgaatcccggtggatagccatgtattttataacacctttctatagtatgaccatgaatattacaatgagtacaaaaaggccttcctttcttgggagggtaagatttgcttccttgattttcattcttgttctgaccatttttgtccctttggaaagcaaaggccataccagagttgggttcattagttccagcagaattccctttctggttttcttcttgagacaccagatggaaaacccgatttatttcaggatgaggttccatcaatagaatactactacggacttgagagtatgaatcggttaaccccatcgagaacaatattatgtattccatgtgctgaaattattgaattttcttcattcatccacatgtacaaccattgcaagtgcaagtaggtttgtaatttgaaaattcttcccaaattgattttaatttggtgaagtacatacccacagattgagtatcctgcctgagattcatcagaccctttttaagattgtatatatgaggtccattcctttgatggaatcgaaccttgagatcagcccatatggtggctgcgaattcatcatataagatgctagatgatatttcctttgaaaccgagttcaagatccaagaaattacgatattattgttacgaatccacgcattgtacaatatttgatcagtaacagggggcttaggaatagatccatcaagaaaaccaagcttatttttgactgaaatggataattgcatagctctactccaagaaacgtaattatcttgcccagtaaggagttgggaaacaaggatattacatgggttatcaccgtgatggaggaagtaaagatttgaggggtcttccataggatttctcgaattgttgatttggaaattctgatttccatgctgaatcggaacttgaggagtttcaagagctccagcagattgattatcagtatctgagtgtgtggaagtatgatcgtccattgctatggagagaagaaaagaagcagaagcaaaaacgcagaaaacagagaagatacacgatacgtcgaggtcagagaagatgaccggagaagacgatcggagaagatcaggatcgatcgggaaaagctcctttttcccgctctgataccat

SEQ ID NO: 1364 - DNA, 945 bp, Cannabis sativa
cttttttattatttttttttatcatgagttaataaaatgtaatcatttaatatatattaaataatataatataatataatattatttaataatttttacaaatgaatatttttagaacaaagattgttaaaaataatgtaaatgaaagaaaagaaaatattatattttgatagtatgtgaagattttaagcattgattggagttactaccattaaagatgagatgctcttagcatttctctatgatactaatacaaatcatgtgtagacaatagacatagagtgtcccattatgtttcaagatttccatattaaacttctctaatttctaaaagtactaacaaattctaaggataatggcaaagtatcccaatcttttgcacataaaaagaccttgtcccacaattaaatatttttctatttgaacagctattatctttctttttcaaagcaaattagtatccataaccgtcgactatattaacatccctaccgaaatcgagatcacaaaatctctcttcaaaagtacatttaccctaatcctcccaatttctccaatctttttcaatggaaaaattatgtcaaaacatccaaaaagtccaaaaaaaaattgtagtaacattatacaaagcaaaattgggttactagttactagttactagttactagttactagttactaaacacgagaaaagaagtttaaaatactactctttttactatctaaactattggaactactattctttagtgtcttaatagctccccctttcttttttccaacactcatcttatttttcatgccactattattatttatctttaacttaacactttcttgggattcaaaaacctctgaattctccacttgggtcaccccagaaatttcttcactgataattacacaacatggggttgtttcttctagttttcttttcctacaagc

SEQ ID NO: 1365 - DNA, 3975 bp, Cannabis sativa
atatatatatattatatgtttatataaactagttactagtgttattagtcccagttggagtttgatcccccaggctttccactcacaacacccacgcaaactacttgagctagactcggatggcatttatgtagtttttcttttttattggattttcacaaattagattcgcagatgtgggtatattatcatgttatgtttgtagtcttgcttctttcaattctctaacccttttttgttttttgttttgttcttgtcatatataatattcactttcaggatttccaattcttgggattgagtggcagaagatggaaaatcctgatttgcgcaagtctatgggcatgaaacctgatcaaaaaggtgttcgcattaaaagaattgatcctacaactccagaagctcaagttttaaagccatctgatataattctcagctttgatagtgttcatattgccaatgatggaacaggttagtatagatttgatgcatctatgtttgttattcatatataataataagataaaccgtgggtgttgttgctgtcattattccccatgaaagaaaattaatagttatagaatatttttcaacctgtactgtttattattttgtggggcttatttttccttttaaattactgagggaatcttttttgttttttttttgggggctttaacctgtatgctttggacattgaatttggattaataaccaaagcatacaagtcaatgagttacaacttacaagtacatgtgttccgagaagatatggaaattgtgaattcggaggaaagcatgtatgagttacaacttacaagtcttattcttgtcttctgcttaatgtgtaatgtcacttcaaatccctttcttttgttgatttttcagttccttttcgacatggagagcgcataggttttagttaccttatctcccagaagtacactggagataatgctgctatcagggttttgcgcaactctgagattctcaattttgatattgaacttgtaacccacaaaaggctaataccagcacacaatagaggaagacctccatcatattatatcattgctggatttgtttttacgaccgtgtctgttccttatctccgatctgaggtgtgtaattcactttcaattccattcaatcttttttctttttcctgcatggcaatttgttttctgtatgagctctgttctatactgctgaataagcctcagctttcgtagttaggtttgtgtacaagtttttgtaatgtttcggtgcatctagaagttgatttacaattcctattttagaatcaactacaaaaataattccatttctgtttctatattatctagataactgtaccaataatcatcactagtgtttctcatattttgtttttatggtttttagaactaatatagttcctttttcatgtgtcttggctcatgaagaacgccagtagtttattttcagaatatttaaacgaacttggatattaatttccctgcttgtgttttacagtacggaaaagattacgaatatgaagccccagtgaagctattggataagctgttgcattctttaccagaatctcccaatgaacagcttgttgtggtttctcaggttcactttctttttctctgaagttatgcactgtgttacaatggcagactcatttttgtgatggtattttctaacatttatttctggatttggaaaatctttttaaggtgcttgtggctgatatcaacattgggtatgaggacattgttaacacccaggttagggttgacaccaatataaatatgaatgcagtttagtagcttaaattgctttacagagtgaggtattgaaattatttatttatttttctaatgcatgcataggttctggctttcaatggtaaacctgtaaagaatctgaggaatctggccaacatggttgagagctgtaatgatgaatttttaagatttgatttggaataccaacaggtactcggctcatgtcgactttgtgtttgcacttgtctgttcggttggtgcatattgcactttcttaaattcttacccttgtgcagatagtggtcctccgtacaaagacagcaaatgatgctactctggacattttggcaacacattgcataccatcagccatgtctgatgatctcaagacataaaattcaattgggcatactagatactaccctgagttgctgcttcttgtaggcactagataaggaattttggattctttttggtgaacatgtagctgtttgtataccatagtaaattattcgttaacctcagcttaagcctgtgcattctccggtcaaaacatgtaggcctagaatcttcattgaagctgatggaaaatatggtaggtgtaaaatctagaggcaatcctcaaattttgatagggcattcaaattttgaaagtggtggcctaactaattttatgctgtcaagatcttcaggttgaggacatgtttcatgcaagatgaggttgggcccaatcaagaagaaaaaagtgcttttgctcttatattgcatatatttattctaaaagaagcatttgctatatgattatttagtaatttacaaagagcatcaaccatgcgcattgcctggttcagacaaaattaacaaattcaactctggttttgaagtaatgttagtaccttgacatctttgacttttatttaaatggggatgtggttagctttctaaaagtggggactgtggggagactgactgcaacccatcaacaagtccatgggtctcatcctttccctctactgattgcgaccatattactccatagaagcctataacgattaaaacagctccaataacactgtcagaaaagaaagaaaaaaaaaagatcagaagtcagtcaaaacatagtcgaagagtttattataatggataaatcatgtgctttagttgctgatatggaaggcagtattaccttccaatgtaaagtgcctcgccgagaaaaatggagcttagaaaggcagcaatagcaatccctaaaggctggaacatggcagtaaaaactgggcctttcttttttatgcaccatgttatcacagaaaagggaaccacacttccaaaaataccctaccaaaaaagtttagtttagcaaatgactactacagaactactcatattctgatcacattagtggaattgacaattagaaaatgttgtgcttactgaatagaggacagagatgagctcaatattaggtgttagtgcccagacacttgaaccttctcccacaattaaagtaagtaatgcacactgaatggttccaaagaagaaataatagaagagtatggttatctctgatgggtacctttcaagaattgctgccttcaaacataaaccagtttcataaaagtttttggataagaaaaaatgaagagaattagataagaacatacatgaatccaacccaagaagtttttatttaattgaatttacctggccaatattccatatggaaaaacataaactaccaactacaagtataagacctccaaatacccaattattagttgctcccaaaatcatggagactgaagctgagtttgttgaataagtattttgaccagactgcgacaatagggccaaaattgctggacctttgtatatggtgatgatcagtgctcctgcgattgaaaccacagtgcccatgactttcatcatcccttttcgatttctcaaatccaacttttccattctacaccaaacaaaacaaattataagtcatatgattgggagagaaggactttccgatctctttcttttctcttaatctttctcctataagcaataaataagtacttgaagaaaacagctagaatgaaagtgaaggccggagccaggctactcaaagctgattcaagtgttggggagctatagcttataccagcaaatgcacaattttgcacgagagttatcctgaaattttaacaata

SEQ ID NO: 1366 - DNA, 2551 bp, Cannabis sativa
tatcctctactagaatacactagaacaactagggttaaatttaaaggacttaaagccatgcacgacctccatcccctaggtataattgagctacccctcaccatgggagagcgaccctgacaagtgacagtaatggccacgttcattttagtggactaccccacaaccttcaatgtggtactcagaatactgttgctctaccgattgaaagtcgtcatgtccacctatcacttggccgtgaagttcccaactttgggaggagtcgcgatagtaagaggagagtagaaagatgtaagggagtgttgcaacacatttcttagaattgccacaaagcccagcgagtccatggccattaccgtgcatagcaaagaggctcccccacaaagggtagacgtagacttagacacgagggtgaaggaagaggttcatgtagaacccgatgaagaaattgaacaagtagtgatattcaagcacctactgaaagtgctcaagattagaacaggactctacaaagccctcaaacgtaagctgagataataattcaatgggacagccaatgtcttcgcttgagggcatgaagatatagtggggataacttccacaattatgtctcaccctttgaacattgaccctcaggaaaaacccgtaaggtgaaaaaggcgagccctcgacttagtacaacacacgacattgaaagaagaagtggataagcttgacctgttttgattcatacgggaaaccttttaccatgtttgggtgtctaaccccgtcctggtcataaagctaaatggaaagtggagggtctgtgttgacttcacaaacttaaataaagcatgcccgaaagatagcttcccgctcccttgcatagatcagctcgtggatgccacaaccacgattggggtgctgtgttttatggatgcataccgggatacaatcaagtccctatgaactgacgaagaacacacatccttcatcacagatagagggctttactgctatcaagtcatgccttttggactcaaaaatgttggggccacagatcagagatttatcaacaagatattctccaaccaaatagggcgtaatatggtggtgtacgtagatgatatgctggtgaagaccaagaaagtagcagacttgatcaaagatttagatgaaagattcaccaccctaaggaagtatcaaatgaagtttaaccccactaagtgcgtctttggggtgttgtcgggccagttcctgggctttatggtcaatgaaaaagagataaaggcaaacctagagaacatacaagcattaatagacatggaatcactaaagaaccgaaaggaggtgcagtgtctcaggggagggtggcagccctcaataggtttatctcgtgatcaatagacaaatgtttactgttccttgacgtgttaagaggaaacaagcaatttatttggaatgagggctgtgaggaggcctttaggaaactcaaagagcacatagggaagccgccccggttggttgaaccagagaaacgagaaacattatttctttatttgggtgtgtcaaggcacgtcctcagtgtgtccttagtaagaggggagggaaagtaacaacaaccactgtattacgttagtaaaagattggtagaaactaagactcagtaccctaaaatggaaaagttggcttatgcgtttgtgatggcctcgaggaagctaaaaacatacttccgtggtcactccattattgtgttgaccaaccacccctacgccaagtcctacacaagcctgaaacattgggatgccttctgaagtggacaattgaactcaaccaatttgacatttcttatgtaccgtgaacagtggtcaatgggcaaatactcaccgaatttacagctgaattcacttattaagctaatggagaaagaagttaaggagtattgcagaaaagcacacaggacggggaggagaggaagtttcatatagatggggcatcaaatgacggaggagcttgggtaggagtagtgatgaccgcattcgggggaaaaaatgtattgtgtggtgcgatttaggttcaaggcttctaataatgaagttgaatatgaagctttgttgactagcctgcgtttggaagggagttgaaaatcaccaacatagacatctttagtgattcacaactagttgtgttccaaatcaaaggaaaataccaggccaaggggagtagaatgatggcatacttggctagggtgaaaagctacatggaacaactacaaaattatactgtagaataaataccttgagataacaatgccaatgtcgatgcattagaaaaattggcataaactagggatatcgataccctagaatcaatatccatggaagatctcgaaaggtcgaccatagaggaggagccggcatacatagtgactgacggagacttttggatggcctcataccttagctacatctagaaaggggagctaccattagataaaaaggaggctaagagaatagtgtataaggcaaaccgttatgtggtgattgatggagtgttatacaaaaaaggattt

SEQ ID NO: 1367 - DNA, 520 bp, Cannabis sativa
tttttttttgaaatgaacaactttcttgtttatataatttatctttattattatattgttatagctgcccatgtgattctattacacatatacaacacacttttatataattttcttatttgatcttagtccaatgttaaagtttaaactcaattcactttcaagaaagtattattatataattatttattaattacaggggtttattatttatatgtggccaaagaccaagagtactagatctatagagtgcctatagtcagttattttaggtggtcatgataaaatattcacatgggcagctctctaattattttgttttgacagaaattttttctttattattaaatttgcaaatctgctaacaaaatagttagaaaatcagtcaggacaaattttcaaccgaattgacaacctaaaataaaaaaaaaaaaaattaaatagtatgagctaaataattggtttcctaacaaaaacaataaaaatattgtttgaaaaaaaaagtagacacttataataa

SEQ ID NO: 1368 - DNA, 1459 bp, Cannabis sativa
tgttctccgcaagatgaggtaattgtaaattttgataactaagaggaaacatagattcatagacatttatggggcttcacttaccttattttttgtgatttggcttgcagggctggaggaactacagagaagaagaaatgagacatcttttcatgaatttgttagtattttgcaaattacttgttgcctagtatccaacttttagatgagtctatgactatattttagtttgtgcaatgttgtttatttcaaatgttttgcttgtgtttaaaacagtggtagggattgactaatgggaaatcttcaaattcccgtaatcatatttttgatttttctatttcaaggtttcatgtctgatagtagctactgaattttaattaaattatcctccattttgcaagtctcattgatatggttagatattttctaggcaaccgaattctaaacgtttctgggtttgccaaatattagtatcattattagttatgaattgccatgggttatgatattactcaaaatgtggaatttatggcaagtgtactacgaattcaaattttcttaagatagcaaagataaaattgaaataatagcttcctcctcattaagcaagcaaatctaatgaatgatcttgtttacgatgaggtaaaattatcttttaaaggaccaataaaaaatccttcttttgtatgtggatggaagtaaaatttggaaatgattgttagaattttgatttagaacactataatactaattacttttacaataaactcagtaagtgcaccaagtcaaaaaattagctaacaactcatcttcctctattccctttctgttttgacaagctttcgttttagtgtcttattttccttccttggctctacgttggttttttgaagcgtttcattatgcacatctgaagtcagatttggttgctgcttaacaatctttgatctgcaaatccacacttcatgaaacaagtaacatttttagttatatttttaagttatggtataacataacgatgaaccaaatatgtttttgtaaacgtaagtacatatttgtttaacatagccaacaactaattaaagactacaattgtattatggaataagaaatttctgtttatcaaacaagtattagcaactaacaatatttagttcgggagccaaaacaggcatcatcaacgataagcaataaacattataaaaatcgtgggcaaagcaacactcacattccctttccaattgttggagcttattgttcaactcccttttctcctcttgttcattagttatacagtccctcaaaccccgaatttcaatctcatctgtaacagaatcattacaaaccatagttaaagttttgatatgacggaacctggatttttcaaatgacgaagttacttgagacttcacattttgattcgacgtttaaatttactcgttccaatctgccagctaga

SEQ ID NO: 1369 - DNA, 1711 bp, Cannabis sativa
attatatgcttgactacactgtaacttcaaaaaggatgaagcaccttagtacctttgactaaacagaacttgaatttccttgttaattatttctagtttgactaacacatcatttaaggataggaagaaaatatagagttcaaattccaattccctacttaagaaacatctaaagtcttatatctatttaagtcttgaaagggtctgagcagaaataaaagtattattaaaaatggagctgtttaagcccaaagatttgccaaaacttgtgtcttaattgtgtaagcaaacacgtgaatgggtgcaagaaaaagagatacttgtccttgtccttttgtagtccaggtgggaatttgtgctacgcacatttgaatcaggtatggatgtgtatatatagacttccaaagtgaaagaaaagtcagaaaagcctgatggggcacactctgaagtctgaactgtatcatagatagttcttgctacattacttctcttgagttttttagcaattctataccaagacaaaggcacaaataacaatatatttctgtgccaatttttgtggtccctcatctctaagcaataacagtctaataatggtcactaactgcttctaattcattaccccatttcagggtgaattattttcttgtagatttcgataccttcatgttatataaaatcaataccattagctgagttcctgtgcattgactacttcttgaatgtttccactgtcgtttgctgtctctttttgcagaatgcaagacctccattgccttctgcttgccccatggcattcagtcatcttgttaatagatgctggtcaagtaatccggataaacggccccattttgacgagattgtttcgatcctcgaaggttatgcagaggccctcgaacaggatccagattttttttcaacttataaaccgtcctctggttttaccattctcaaatgcttgccaaagttcgttttgtgcaatagatcatcatcatcatcctcttcttcttccatgtctaggaacttgaattaagtacgagtgtaaaattgtaacatatgaaatcttgtcttggttctatagtttgctcagtgatgatgtttatgaacatttgtttttattatcttttcatcttttagaatatagtggaactaaagcaagttccctttatatgcttgtaatttgatccttatcttactacatatccattctcctttttgttttaatcaaaatttgatatgagataattgacatgtgaggatttttgtccatatacaaacaataacatatagaggaaataaatcacttgactttctaaacattattgtaaggcaacaaatttttcatggaaaaaaaaaaaaataaagtttaacttgttgataggttgtattttgtcctttgtgcaattaaaatcttatgttatactcacgggctctttagaatgattattgttgggctagaaaaaaaaaaaacaaagagtgattattagaaagtaaagattaaatcgtttatgaacttttaaataaaataattttctcattaatttgttagggaagcaatttaaaattttaatgtaattagaattagatgcactaagaaattgatacctagataaatatgtaacaagaaaaagtgttaaacatgataactatgtttaatagtttctatttttttccctattaatgaggctggttttatatatttattttgtag

SEQ ID NO: 1370 - DNA, 2010 bp, Cannabis sativa
gaagacaacacgggatttctgtcccccagataactttgcaataggagtaagatggttatggctaggaagtccaaactttcccagctttgcacgaacggcttcctgcttgctaagaccctcttggtctggatggagacggagaaggtactggactggtgtttcatccattgtcaagaggtctacaaaatgctgagaataccttccaatccttaacttttgactcctacgtacttcaccctcactaggaaccaaatcaccagcaaggaggttgagcaatgtagattttccagctccattgggccccacaatagcaacacgggtccccatgtcaataccaacatcaacatccgacagcctaaaatctttccggtttggataactaaagctgacgtcgataagttgcaagagtggaggagtaagctcagtaggttcaggaaagtggaactccacactataatctcgccacttctgtggggcctcagtaggagcatcatcttcatcaaccttaactttgcccttgcctttacttttcgatgcctccttagctgcggcaaactttgctcgatccttgaccttgtccagctgagcacgattaccactcctttttgcagctctcatctgtttgtcataaatctcaaatttcttgttcatctctttgcgccgttgctcatacccagtttcaaaatcatcaaaatttccacgataaaagtggagcttaaggtcatgtagatgaataatttccgtgcaaactgtgttaaggaaatctcgatcatgagaaacaaccaccaaagttttcttccacctgcacaggtactcttccaaccataaaacagctctcaggtcaagatgattagtgggttcgtcaagtaacaaaagagtaggctgcacaaacagtgccctagctaatgaaattctcattctccaaccaccactaaacgatcgtgtaggacgaccttgcatatcctttgtgaatcctagcccagcaagaatttttgatgcttgagcttcagccgcatctgaccccattatctgcaacatctcatacatttcactaagcttctcccctacatcatcagcttcatcattttcgttgcttgcatcattccctgtacctgaagataagttttgcaatgcttcaacctcttttcggagggtgacaagttcaacattggctgaaacaacagcttccaatgcagttttttcatcaccaataacttcctgctcgactaggagaacatcaatgttttttggcaccggaattttcctccaagcaataagcttcaatagagtagatttgcccataccatttggtcccaccaaaccatacctctttccgtgagatattttcactgatgcattcttcaagagttcctttcctcgggcagaaacagaaaaattttcaattgttatgtccttgacattagcatcaaggtcattttctccatcgagaaccgaagcccgacttccaatgacaacagtgaaagcatcatggtcatctctaagagcttcttttcttgcctgctcaacagcgtaggcagcaagaaggtccttcttctcccgttttttcaactctttgtcagtaattgatgcttcgattagtttggaatcgggccttttcttttgtgcgtcatcttgttgtatctcatctcctgaaacgtactcatcttcatcttcatcagagggaggaagatcaatatcatcagtataagaagtaggtttgggagcttttttagcctttgtacttgtggaagatcccttaggcttttcgggtctctggtccatgttagccagcatggcagatacagagagtttttttccatctttagagcttccagccttaccaccctttgtggctccaccagcatcctctgtcttcttcttccccattgcaaatagtgatctgatagagacaaaaatcatattacaggttagccatgccttgtgatcaacgtcaatcgtattacttcctaaaatagaatatcggcacaattggggtttcaaccccccccc

SEQ ID NO: 1371 - DNA, 4574 bp, Cannabis sativa
ggaggcagagaaaaaccatggtaaccaaacaagtaaaacagtttttttttctgtttctgaaaattgaaagtgaaaggagtcatcgaagtgatacatgaaaatatgtgcacatacaccaaaagaagagagagggaaaaaagagaagaaaaagttgtgaaatttatcatcttacaaaagaagtgctttcatcatagggcaaatttcacaactttttcttctcttttttaccttgagagattatcttgtctatgaaagctttttctttacatttttccttcttaattttagatttaatttttcagctctctctctctctccctctctccctccctccctccctctcaataattattattaatattttatcattttgaacagtgtcaagccaccaagatgagttcttaatggattttcctcctgaggtttttcagttgaagattataggcttttctaaagatattggaagttcaatttttctgttaccttcttttatgcatcgcttggaaaaccttttagttgccattgaactgaagaatcagttatctctttcattccctgaggcatctgaagttacttctcgcagagtaaggagttactggctgatacttacagtaaacgaacatgtttcattacactgctcaccttgtattgtgacatttagctagacacgaacctactaaatgtggtaaatcttcatgttaggttcttgaagcgctaaccacagagaaatgccaggagtgtttttctcttgagaggcttgaagtacttggtgatgcttttctcaaatttgttgttggaaggagtgtttttatcttgcatggtactcttgatgaaggtcaactttcaaacaaacggtccaacatagtaaacaatttgaatttatgcaagctagcgtgtaagaggaacttacaggtaagattaagatctctctggttatgttctttgtttcctagaatttatctaaattatttatacatcaaatcatccatctcctttccccactccactcttgatgtaaagtctctatgtttcataactttagtacgacttaaagtagattgtcttgtccgtaattttttgttttgttttgttttttttatttaatttttttagtaagtgatgtcaattttaaaccctggtatgctactttgaaaacactgaaaaactagtttgatgttgtcagccctctcgcaggcccgcaggggtattgcatgtaatttcttctttgtgtcgatagtagtaaagacttattcgcatttttttgcattcttatttaaggtgtacatacgtgatcaaaaatttgacaccagtgagtttttcgcattgggccgcccttccccaacaatatgtaccaaggaaaaggaggaaagtatccattctcaatatttgaatagcaatagcacagtcaataagacaaatgctattgaggtcagatgtagcaaaggtcaccactggttgcgcaagaaaactgtcgcagatgttgttgaagctcttgttggagcatttcttgtagacagtggctttaaggctgcaattgcatttcttagatggattggcatacaagtggactttagagcctcacaagttactgatattttccgcgcaagcgagaaatacagcacacttgctgctgaaatcaactctaaagctctggagagttcattaggataccagtttctccataggggtcttcttctacaggcttttatacatccttcgtacaacaagcttggaggaggctgctaccaggtatgaacttggtaccctattatgttacgaaatagatgataatatcatctcttattgatgagctttccagactaactagaatttgtgacatatgactttgagggtcttatgggtgagctttccagactaactagaacttgtggcatttaaagctgagggatttaaatgatttcttttgaccagaggttggagtttcttggagatgctgtcttggattatttaatcacatcctacctgtattcagtttatccagaactgaatcccggtcaattgacagatttgagatcagagtatgtgaataatgaagcctttgcaagtgttgcaattgaacggtgtctccacaagtttcttatctgtgactccagcagccttacccaagacattaaagtttatgtgaactcaacaagtaaaaatgggctaaaatgccctaaggtatacatttatatattctattgttttccttgtcttcttaataaagtttcttttttaattaattctctgaaggatcaggctgcatttttaaagtttgtgtgtattgatttcaggctttaggtgacgtggttgaatcctgtgttggtgccattctactagacacgggtttcgatttgaaccgtgtttggagtataatgttatcctttctggatcgaattataagcttctccactttgcagcttaatcctttaagggaattgctagaacttttccaatcttcttctgatcatggggataatctttatacagtgacaaagaaagatgatctttatgtagttgaagcaaaagtgaaggtcaaagataatgtctatgcaactgcttctgcaaccaacaagagcatgaaggaagcaaagaaaactgctgctgaacaaataattgcagaattgaaggtaaattttctttctttacttaagctatggaatgggtgttcctttatcttccttcttttaatgtgaatcttgtgtggtcttgattaacttgttcagtcaaaattttggcctcaatttatgatttttttttttttttttaaaaaaaagaacaaataaattcttttatgaggcctctgcacctcttacatacaaatacaaccatccaatcacttgaagctggttcaagcatgttatcatgtagtagataatttggtggattagataatgttagataataagtatacaccattaggatttatttatggtattatatttgcaccccaagtaatatatgtatatatatatatttatattggcaccattaggttaagtatacaccattaggtttatactaacaatttatgaccacctaaatgagccaatgcccaaaataaaaattagtttttgaagaaagattaaattaaatttgtttttggaaaaacaaattgctcaaaataataatacacaaaattcagaaataataatataatatataattacattgaaataattaaaactgaacccaccttgctgaattagagttttttatccccaatattttcacttgataacttgagcataagtcatatgagactttgattccatagtttggtggtaatttgattttttaacttgctttgtgtaaacaatctagctcctcataaagccagtgacactttgttgattggccagtctttgtatttatttgtttaaaatctcatattgcatggtacttcatgtattaaacagccgatcaagtttgtttttacatttgttatagtttattggggaatttttcttgatgtgcaggctcaaggcatcatttccaagtctagatccttggagaaagtcttacagtcaagctctaagaaggaagctaagctcattggatatgacgaaataccgatagatgtaacaccatccactgattctgttaaagctgacaatctgactatagaagaacctgtaatctacaagtttgtttccgaagatcgttccaataatgaactgaaaactaactcaatatgcaagagtcctaacaaaaagctccccctaactaatggccaagctagtaaaaccgatgacttagacactgactcacaaacttcaggtacagttaatatatattttatatacttattttgtgcaggtcttctagtcgtcaagttgttaagttttgagcaatcttaaaaatatttttcaggtggttcacagagtgaaaaagcggcaacagcaagatcccgattgtatgaagtttgcgctgctaattcttggaagcctccttcatttgaatgttgcaaagatgagggacctggccacttaaaattgtaagtctagtgatgtgtgtgtacatttctttgagcagaatttgcttctcttgtttttatggcatttttatatgagaaatgtttttgaatcattttttttttctgttcagatttacttacaaggttttagtagagatagaagaagcttctgatatggttttggaatgctttagtggagaacatcccaagaagaaagcagcagctgaacatgctgcagaaggggctctgtggttcttgaaaaaacaggggtatttatgaagaaaaaaaaaactttccaataatttaacataattttttttttctcactagatattggagggcatccttctcagtgaaaattatatatgtacttgagtaatcacaaaagtccttgattgaaactgagatcaacctgaagttgttctatgtactctacccccgttgtatatagtatatttttattacatttttccattgaaggtggttttgaaaaatcacattctaattggaagtagatgtaaccagtggtaactactaggaaaattgctttttttttggaaagttttggccttataaaaactttcagaataacatataa

SEQ ID NO: 1372 - DNA, 1677 bp, Cannabis sativa
tactagtaggctctgctccttctgtaaatgggctatcaccaggatgcaagctcctggaatattgacacctagagctagagaggctaccggagtactctccacaatgcgcgtatcgaaatgagtctgaacattccttaaaagcttggtgtgtgttgagttgctgcacaaaaagtgcctgaactattaagcgcagtggcatcaattcattttgaactgcttcaatgcaagcctcttgtgataacttctggcaactgaggtatttgcatactgcagctttctcatcttgggacacgtttggatgtgcctgaaaaacatttgcagcataatttcagattaaggctactgattctagttcagttcactctcaggactgaggggtcaaatattgtttttaacatcctattttcaagtatctgactcgattatctataattcatcttcaaatttgaataaaatgttggaatttaaatagagcttaccagcaagaaggtgttcgttgccctatagagttgatcatggttttgtctgtgaagtattggaactctttcaatgagttccatgaatcttttaggcctcaggtcagggtctgaagctatgtatagtgagatatatgagtcccataggtctgcaacgattgagttgcttgctgagggagtatgatctgagtccgagtttaacaaaacatatctagaaattatgttctccattgtaaccaactccatactagaagaaattggctctttcccactatgcggaaccaaaaaatcttccacttgggcaaaacgcaacaacgatacaattttctcttgcaacttagctttactatcatctttcaaaccaacttcaagggatctagaaagtaaggcaaagtaaaacccaactgggatagctctactggccttctccctcaaacgcagtaactcaagaataccttgtaatattactgaaactctgtgattcatattgttatccacaaacttttcaccagagttcttggagagaacccatttgtttgcatagaaaacaatgatggggctaacatatctttccttcatgccttgtcttctcaaagacccaataatccttttgaagaatccgaattggagagcaataagatctttgatccagagctcttgaccaacaatttccttcattgtttcacagctccagcttcgcttggcaagtgtctccagtgtgactactggttggtcccttctcctttctggatcaagaatctccatacaagccatgaaagctagtgattcaatgcagcggctcacaatcagaagctcctcagaccagggaagcaaagtttgacacttttggaggactattagtgtgtcatcccaactctgcagtacaacttggttcatatagagatcaaagcgttcacagaggtttccatgacagtattcttcagtcatttcgagaaactcagccgcgcaacgaagggctgccacattaaaagggtcaaccaatgtggatgagccatagatgaagagtgcaatcatctcaaagctacctggccctccggggaagtcttcaggtagctcaatttcagttgattcattcaatattttcttgaagtatccactttttgagtacaacggatgctgcaaaaatcaataaacaaataaaagacttaaggattaagctaattcttgtgatttggttgaa

SEQ ID NO: 1373 - DNA, 3405 bp, Cannabis sativa
gaaatgggtattgaacgtgggctttatacatagtattagtagtagcaccataagtaagataagccaaacatagctctagcagtgaaggaaaatgaaatggaaatggtggctttgagtttgggtggtcactttctctctcctactttccattctttcacctcagttttgcgacaatcgcgggagatggcggacaaagatttttattaagaagacactctctcttctcttctcctctcttcacaacccatttttttttctcatttctttttatttaataaaaaaaaattaagtagttgcgaaatcaacgggagcataataaataataaaaatataataataataataattataataactggatatgagtttttgtatgtgaaaatttttattctctgtttttggacttttccctgttccaaaatctacgagagatgtcttttgtggtgtggttgtacagaaagtgagggaggtccatgtcccttactatgtgggtcccattttcattgcctttccccccaattcctccgaatgaatgagaatgtgagagagagattcacataaaaaaagaatgagagacattgggtaggaagaaagagtaatatattgttattattttcgacgatggatatatttgtgttttaatagatttcaataattaatttaattaccaaaattttattctaaaattaagacttggtagctatgactggatgataagtatatttgcttgttgcagtttaatttttttaaactatttggaaattctgctttatagaaagaagatatattaagtttgctcatattattctctaacctagaagtaaaatagggatgagaacaattagagagagttaggaggaaattgtattaattaaataaatagaaattaattaaataaatgaagaaatgaggaaaagggaatgggaaaactatcatagcctcacttttgctttctctgctaaccttttgttgcctctagtgttctcacccctctgacattttcgtagcaaaattcattactattatggtcccacatgttgagctttcttcttttagttggtaattggggccacccttaataataagccaggcatccctatgcttatgtatacattatttattcattaaagtgggttgatgatggcagctcaaaataaaatatctaattagtaatttcttttttgtggtatgacatgatctctaatttttttttatatatctttgaaaatttagtggcaatgccattgactaatattgtttatctttcttagctgaaaacttttgaagatgagtgcaacttttttctcttcttttatttatattatataagatgttacttcgttaatgtgatgtgctcttcaccctaataatgcctgacaattttttacaataatagttgaggtttttacaattattttatatatattatttacaactataaaacaatttacaatttctaaaaacttacttaaatctctcttttttaaaataaaaaagttcaaaccataaaataaaatcttcttaatactaacgtatttttgtaactattttaaaattgtggcctattatgtaaaaatttctttaattattcactcttagtatcacttgttccttcaaatgggataagagtgtattatagtggatttatgtgtgtcaaaaagagtaaaacataagtaagaaaattttgataaagtttattagttgggttgatatgacatattaaggtttaattgctcagcaaggaacattcaaacgtttttctacaaaagagatagggatgtgtgttgatttggtttcaagagttgaagttgacactactttttattttttatattatcagtatgcaaattttggctcaagcagaagttgtagacccactaaaatattaagctcaagtcaagctcacattaaatggaagaaacttaatgaaggtgcccctactttcttaatcctttaacccattgaaatttttgatcaatcacttattttattagaaaaaagaaagtatatataaaggtttagtgaggagtagtctttaaaagaatttttttttggaaaccagtctttaaaagatttcaactatttacagctccatgcattaaatgaggttgtctatattacctaatgacaaaaatctttcttcatcaatttacggatacaaacacacaactttcctccacacacacataagaaatggataacatttatttataagagtggccttggaaatattttggggatcttttaatgaatatgtataatattcaaagggaaatttgatttgttattcatttattgggccaaaattgatttgttaaacataagtgtatcaaaatttgtagaatatattttttatgaataaaaaatttgtagaatatgttaattttttattaaatctaaaaatactttttccatttgtcaatacctgtctttctcttcctctcttttgtctctcgctctctgaacagaccactactgcggccacgacccacaacaacccaccatcgcggccactaccaccgcatctatctctttaacccacgaccaaccaccgcccatcttggactatcgcaacatctctcaatcacggccacaagtttgcaatgtcgaaggtaagatttcgtttcctccctttttcatttatattcattgtatttttacatgatttaggattaaatgtatgacattattgataggtttattgatttagggttaaaatgtatgtgtttctatatgatctgtgagtttaggttagatttagggttggatttggtcggatgtatgttttgggcaagaaactgatttttaagccaggtccgatataggtatcatagtattatctcgatttttttccacttgacatggcatgtctacgtggccaatattagagccacatggcagtacagctcaccaacaaaaggccaagtcatctactcagcacttcaataaacggggagtcccgacactcaaacgggataacaaatgacagactagccacctcacaaaagttggtcggccacccctggtcgaccctatggccaacataggtcggctagcttctggacagcacaaggtcggccagcctacatcctgcaaatgcatggtcagctagacattggtctggcaggactttagtgtacagcctcatgcatggtcagtaagctagactacgaaccgggccttaacaacccacaaaaatagaggaaaaatatctatttttaaagaatattttagtcatttgtattttactaatttaatatgtaaatatctacttattttacatgataaaagggttttaagctctcatatataaagggcctttactaaaccataaaaccctaagtactaagtgaagtctgaagttgtaagctaaactctaagtctgacctctctctctctctctct

SEQ ID NO: 1374 - DNA, 1480 bp, Cannabis sativa
gtatcacattatttgtataatttagtatgagattgcacaatttaatttaaaatataatatgtaactcttgatatttttttaagaaaaaaagaaacggcctcattaaaacctcaagagtaaacctcaaaaggaaaaagagtatcagacaatactattaatcataacaatctatttcaaagcatcagtaatacaatcagaatagccagaccaccattatttaacgaaaaagctaccttagctaaaacataagccacaatacattatgaaaattttagtgtataccaattctaatgtttttactaattagtttttgatggccacactatgtaagactagtgtctcaactgtcaagcccgggccaaacccaaaaagaacaccccactcaaacccatccccagtggtggatttcccttccttcaacgatctctttctcaattcatccattataaaaaacacacatgagcttgacatgtttccatactcacttagcacataacgtgaaatttccaacttctctttcttcaactgaagttcagcttccactgcattcagaatagttggtccacctggatgtgtaatccaaaataaggagttccaatcactaatcccaattggagtgaatgcctctatcaaactcttctcaatgttgttagaaatcaacaaatgaacatctttacgtaagtcaaatgtcaaccccatttccctaacatttccaatgatggctctgtctgagtttggcaagatcgtttgcgcagctgatactaactcaaatacgggtctttccccattgactcattgggttcagcaccaacaataactgctgaagctccatctccaaacaaagcttgtcccaccatggaagctaaatgagactcagtaggcccacgaaacatgaaagccattatatcagaacacacagcgagaactcgagcacctttgttattctctgctaaatcctttgcgaggcgtagaacggttccgccgccgtgacaaccgtgttgatacaacatcacacgctttacggttggttcgagttcgagaagctttgcgcaatggtagtcggcaccgggcatatcgataccggacatggtgcaaaagattagatgtgtgatcttagatttgttgggttgtccccattctttgatggccttcatggcagcttcttttccaagcttgggaacctctgtgaccaacattgattgacgtgcatttagggatggtgccatgtactcacacatgtttgggttttgctttaaatactcttcatctaagtgtgtgtaacgttttcttattgtcgtgttattacctgcaacaccattaattcaaatatgttatcaaagtaaaaaacagataataaataaagtcttattttttttttaaagactagttttttctaagaaaaatggtaacttttctaaacataagctttaaaagattagcacgggtattactctcgctgaaaatacaatttgaatataaa

SEQ ID NO: 1375 - DNA, 3369 bp, Cannabis sativa
tagttcttatcatagctgaactgcatttggtgtcgtatgcatgaatcatgatacgaggaaatagagcaccaaaatgtgtactttactagtagtgagtgaatgtttcagaactgttaatttttcatcaaatgcttttgatttctatattgttttagtttgctttcatttaaataggtatctatcatgataaccactctgcattatctttgtaatgtcatgttaactgttaagatagtctctgcattatctttgtaatgacatgttaagctagtctatgcattatcttgttgcaagctatgtcaaaacaggtgtaaatagttacatttgttcatgcttcttcattaaatcaaccaaatttctctttctgtttgttgatttagatcaattctgctttcaatgggaaacggaagatgttgcgaaaatcacttcagcatatatgctcatcaactgagatcgagaatgctctagaaagcattggtcttccagctacggtatccaatcatagtattctcacacgtaaatcaattttatgttctcatcctctaacttataccttaaaatttcaaacatttcatgttacagtcgagaccgggagagcttactgtggatgattttgtgaagcttcataatttgattatggagacctaattctaactctggttcgttctacgaaagctaaactagagaaatgactatgcatacactcaactatggctaaagatggatggaaaattagattgacaatccaatcctgaattttccagctgcagaagggatttggcactcggctgcattgcttggaatcaaagaattttcttgcccccaaatcaaagaggctcaattagttatgttgcatcacttatcttgtattcaaatttttggcaaacagaaatggagaaatgcaacttcttgtttgctgagacagacagacagtgtaaacatcatcaccatataagaaaataaaatgaaataaaaaatgcagttgatgtatctgtaaaattgtttcgactcagtacaagaaaataatattttatcattcaaaggttgaagtcaaaaactttcctaggaaagtaaaagagcaagtttctcattgtaacgtagtgtacatttgttcagctctgaatcacaatcttttttctttctacaaatctcttctccataaacaaaaaatgaatatcagaaatgactataatttagccacaatatctcatccatgaaactgatagacaaggttcaaagctctcaacctcgtggcataaggatcaaaaccctcagtgaccccataagacccatcatcatttaaccttctctcctccgccaaggccaccgccgaaggcgaaagcggccgcttggtacgcttattttttatgaagcagtccctcatcttctcctccacactgtccacgctgcctcggtaactatcctgttcgacatcgtcgtcttcgtcttcctcacccacttgcatcggctcattaccattgacgacggtgtctgcggcggcggtgaggggttgggggaattggggttttgagaggaaggtggaaaggtgggtatgagcttggcggagggaggagtatatttggagaaggtgggtggggttggcggtgacggggagctgtttggctgcgaggatagcttgctccatggagagtatgaggtctggtaaagatggttgggcttcttcctccatgattgagtccgattacgagttagattgatggtgattcgagttcggacatttaatacataaattaaatcaactttttctttttctttctttttttttttcatcagaaaaaaatcaacttcaacgattttttttttcactttgatttttttttttttttttgattgagcaaaaaaataaaaaatcaactttttttatttttatttatttatttattatgagtaatgttgctttgtgcacttgcttttttatattattttttccaagattatgtttctcacaaaaatattcatgtaaaaatatgctgaaaatgatgtcaaaagtggcaatggtaataagcttcataaacgtgaagttatttgtaaatttggaaatgatttgtgtgatgtgagaatttgtgatggtttaaaattaaaatgcatttagtgtgtgttggtgttatattttgcttttaaaagttattaggtccaaagaacttggtcaacattcagagttaaagttcttggtagttccgggctcccctttctgggtatcaaaatccagcctcaaaaaatataatatatatatatatatgaccctaattaaatataaatctagatcatgataatcttttcaaagttattatataaatctagatcatgatatttaaagttattgtaaataacatttgaatattgagattctgttataaatatatgaataattagtagtaaaataattttgtgttaattttttacacatttaaacctcttatttttttgatgataaaatctcttacatttaatttaatgatatctagctgttacttcaaatttacaaagaaaaataaatataagtgtatacaaaaatttcaccccaaataatcctaaatatatttatcaaatggctgtttttttgccattaaaaaccatttttgttaatcaatttaacattttaaccaaaggcaataatgcaacaaaaacaaagttcaacctaacgtagttaaatactaatttgacaagcaacatcatatagatacaatatacattgaaattgtacttggtcaccaaaaaaagagaaaaaaggaggaaagtctaggcttttagaatccgtagatagtcatctattatggacatggcagaagaacgatagccagaaccaaaaagattgtaatgattcaagtaatgatacaacaaatacagatccgttctcttctcaaaccctggttgtttgggcatcacctggagagagaaaatagcacacattatgatggaacacagaacaattgcgagtttgtacttagaatattaggcaagcttgagttagcttttgcttgggattcccaattggtttaagaaaatcctgagagatttatatcaatattacgatttctctagtctctacagacatcagaagaaactgttttcttttcagggtctggactggagattaaaattacctcaaaataggcactgtaaaatgatcctccaaaaccagcacaccatgacattccaaactcggcttcattgtgtccatctataagaggaagaaaagaacatgaaagtgaaactaagttttacttctaaaataccattactgattcatgagtcatgaacaaacatattataggatactaaactcaaaagtagtgtgttttaaaagttgtaatcatcaagttacacgagtattgtcgttgtgctttt

SEQ ID NO: 1376 - DNA, 2356 bp, Cannabis sativa
acctatttagttttaagtttatggcaagttgtacttaccaaattctgtaaggtttcccttctttcttgagaaaccacagcgcattccaaatcaacttggaaagataattgtacagatttgttcttttttattattattattattggataaatttttcaatcaagatagatagaggataacaaaacggccattttgaatctgatagcaccacataaacattacaagcctacaatatatgaaacaaagaagctgactgacatagaacttgtttcggtcagtaaccaactttttattgaataacgaaatctaaatgtatcattgcatataaatggatgctggtgaagattagctacaacacatagctaagcctaaaacatgtacacgggcttctcttattggggaaatgaattgaaatgtatggtctagctaaaaacacctaaagaaacttgtatgagtcgtcgatcaccaattactccacagtttctcaaatgattatccactcttcttgtacaacaaaatcccttgagctaataggttgattaagattaactctacgttctttgtacaaacagttccgagacccccatttcaaattctaggggccattgccgtctcaatttaatctgacggcaagccaaaaattatcttagaactactactctaacctaacctagtattcacttgggctgaaagtagccatcgtaaatagaaagtcggtcaaatgcatcgaaatttgcctttagtccaacaaattggctgccaagctgagcacatccggcatctggccacttgcagcctccttctcgagtgcgaagagggcataatgtttcacacattcgaccaatttgattgttgggagcattttcatctgacataactgtgattgaaacagagaggtctgacttttcatcattctgtgtgatactgtccgattctctctttgaaggagaataagaaaatttctgtggagtaccaatcaagctattttcaatgtcaacagtgcaatcaccacttcctgagaaatggaccttgcatcctagggattgaatggctcgattaaaagcctcgttttccttgctggctcttttggccaggctcatagctgaaattctggcactctgttcatttctcaactctgcacttaaagattccatagaagtaaccatgtccttagctttgttctctgcagcttcttttgcctgttaacatataacacataaaacagaaaattagacctttctatcggaagaatagctacacattaccctacctcgaaatggagacataaactatagaaccatttttttatcatctcatcacgtgttgtcaaactcaagtcaaagggctgtatcaatatttggctgccccacagctgaactcagttttctacactcactcctaatctctttttctttcttttatgatatatgatacgtttatgtgaacttaaacccacccaaccacaaaactagcttcaagtcttttaatctaattatcatcgtgttcattctgcaaccatggcctactagtacatgataattatttataaaactgtaattttcttctagtaggagacatataagattcaaattctaaattattgagtctggacaaaaacatgtagtatcagtttttctaatttttttttcaataaattcaaaacaaagtctctactgataaaattagagaaaaattataattttataaacattaggtactaatacccctaaaataaatcattgagtttatgctgctaaaataaatcattgggtttatgctgtttacaaactcaaaactttgagtactcatgtcactatttacccattgattaataaaggtagaattactggtccgtgacgtcagagtaaattaactagccaatcactaaatgactattgactactaatcaatatgatggaagaagacaaacgtagaaagaagttaggatcatgttggtgaacttgacaaatagcaaagcttaagagcagggttaatacaatatgatattcatactcacctcatctatctaagaagtcacaacccttccactgactaaacccaagtaaatatgatgaagcaaagaatgataagagaatagtcttttggcaaaaggccgtagaatgcaagaaaaaatcaattgaatcagaagtatggaaattcatagatatatgagtattaattaccttctgcaattcggagaatttaaaagccatcttccgacattcagcctccacctccccagcttgggcttcggtgggacaggaccaacgaagatgaaattgaggccacagagtcggtgctaaagctgctgctggaggtaatattggaccattgtgtttcagagggtcctaaaaaa

SEQ ID NO: 1377 - DNA, 5198 bp, Cannabis sativa
ttcatatttgattatggtagcccagtagcaagatgggtgagctgaaataagcacaaatataaatataatatgacaaaaattgtaattaaaaaaagaagaatgaaaacttactggaaatgaatgtatcataagctacatatgagagtgtacttgacctccaaataaccagaaacttcttcaacaagttaacactattgttacccaaacctcaaaatgatgacaatgatggcttttgttacaagatatgttagcacaaactcatttaccacaccataggatgtgaagaaagagttgtacaaagttacaattctcacagattcagtacttctcatttacaacaacacatatatacaaaattgccatgtgtctgttgcatatgcaaatttctgtttctttttttcatttaatgtttcatccacgagtcaagtcgatgccggtgtggtggggagttctcagatcgacccccgctcgtgaacccggccaaattccactagcagagggtgtataattctgatgagtagatggaggagcactagatggtgtagctaatttatcaatactcatgctacggtgatgaggctcggaactctcgtcactcttggggccactggcttcttgcttaccaccactcttgaacttggcactaccatgtacaaaactgcatactactacctgttgtagaaacaaagcaacaacatcaagagttagactagttagtgttttcgtttgttctcctatcatcagcgctacaccaaaatcctgcaagaattgaaaatggaggagacaggtttgaaagaaaatacctggacagggctagctgccataagcaccgccacaccaccaccaacgacttgaccatctggactagcaagggaaacgcttacaccaccagttcgatggcggggaccaccatcctcagaaactaagtaagaacctgacaagcaaagtatttgaaaacgaccctgcaatgttgtggaaacaacatgctatggttaagttggtctagaaactaaacagagtcaatgacaatggcgtctcaaggtttatttaccatcacaatgtaatgtaagctttagatattttatcaaagggagaggtatgaacttgaaaagggaatgagaaaaactaataatttatgaatttaaatgtgaattttgtaagcatattggactaaataaaaaaataaacactgctagtaagaaagttgaaacataacagttatcaccacccccacaacattgaaaatgtgacccatcttttgtataccttcattcaaaggaatcaaattttggcatatatcatgaaagaacaacttttattgattaacctagtgcataagaaaggttctcatactccataacaatcttctttgattaactgaatgctacttagctctggcataaagttatccaatcgcctttcttttatactaccaattaaaatcagccatgctaattcatcagcacattacttaccaagaattttgatcataagacagatcaaaatttcattttttgttccttttcattagtaacacaacaacaatttccaaatgaccaactaaaaccaactactaagacattaaaagaagcaaaatccacaacttaacttcacctccacaaaccaacgaaattcaaaacaatctactttaataagcatgatgacagacaaaagactcgaaaccatttaacagtcaactaaaaatgtaattacaagagacaaaggcagaaatattggaacctcatatgtgatactgacaccagtagaagcaggttgacgtagtgaaactgaagacactataccactgcctgacaatatgcacagagctcttggcctctgttgtgcaaacgaaagaagtttagcaacaacatcctgcaggaataagcaagtaaagactttaagtatctcacccagcaaattgatcaacagaacaccataagtttctcaaaatatagttttggccaagcatcatagttaagtccattagactcatcagctgaaatgcggtcgagcacaaaatactaaatgaaaacaagagtattaggcacttttcatctcttgtttttttgttctttcttcaactagattttcccgatacagaaaattattgataatccataagtctcattgtcattgcatcagactggtgaggacaatatgtctctgcataatagtttcattcttatgaaagagacataacatacctctccaactccaatggtgataacatgtggtgcaaaagcaactcctgctgagttgttcatccattcacctatcaagcaaacttatcataagtacaagaatattgacaagtcgttaacaaatattagtgatacagatataagatttaacaaggaaagcaaaccaaaaacactataccaaaaggacttttcatacgtgcttaaacatatgaaggtggaaagcaatataaagagaacccaaaacaatgaaatcgaaaacaaatcattacaacttcgaaacttaattaaaaatggcataagatcaccaaaacccaactttgaaagagaataaaaagctaaacagttaagtataaaaatgcagtgacaatgtagtagtatcaaaaatagtaacaaaaaatgaactatcagaaataatgacaaagttatcatcactggagatagttaccaagactagctagctgttgtttcctcccagtccctcggggccgtcctctactccgcttggggccagagggtgccgagcctggtgaaagattttgagttgcagacatggaagaaagtctcaaagaaacaggcccatcagggccatattttcgaggcctccctctctttttctttacaggctcactggaaggcattccaggattgacaatcattctggtgccatgaggaaaattggcacgagaaggctctactgagaatgagggtcccattgagttgttgttgttgttgttggtcctaacattggattggtttggaatgccagtatttgacaagggtctgaacccagatggggcatgttgtagacctggaggttgtgatccagacccagaaccaccaagccctcccctatgtaagtagtatgaagctgacccagcagacaatgccatggcttctctcccatccatgcatttagtgagaaaatagtcactgaaaaaagcctataatgttttaaatctaattcgctaaaaagttaagtcttgaaaacaccctctcctcaaagttcaaaactttaactctctaccaaaactttgaacagcttccaagcaaagagtccagtcgtatatggatgaaactttcaaactatcagtctgaaagaaaaagctttagaaagcaacgaactttggaaatctgatcctataaatcaactaaaaaaatttaaccctaaaagaactacagtgagaaagtgcagggaaatcaaagaacaatgggttttacatgggtttctctcaagtaacgaaaaatctagcaaagcccaaagcaattttgatcttttaccccaaaaaaaaaaaaaacaatagcaggtaagaaagaaaaaaaaaaactgatgccaaggcttaaaactaaaactaaaactaccctaaaatcaccaaaaatcagagagtacccagaagaaatgtggaaaaatcagaagctcacagagtgacagcaaagcaagcaccaaaacccaggcagctcttcaatcatgcccttaaacacaacaagaaaaacaaaaccctagatttgaaatctagggttttgacagagaaaaaaaatgcaggagggaggtggaaaggaggaaaggcaaaaataaacaaaaaaagaaattacaataaaataaaataaaaataaaagaagcgagaaaaagacaaggagagtagagggagaggtatgaagaaaaaaaaaatgaattgaaaatttgagcttttgaattaaaggtggtatgtgtgtctgtgcaagtgtgtgtatgtgtgaactgtgaggtgtgagctactatcaagacaagacatttctttcttttccttttttttctttctctctctttacttctcttttttctttattgtatataagagttaggaggggtgtggtctttgtatctgactataagaaaggaaagaccaatgtcattggctggacaggctgtggcctaccaaagtaccaactttcatgtccttatcagattgccattgtttagaccagtgagcccttttcctttctcactatttctctctctaaaaaactcacctcttctggtatgagagctttgccatattactattctgatgtaaacagagttcagaaagaagaaaagggttctcctttctttttctttttaagctgaaagggatgaagttttgatgaggtgaggtgagagggaagatgggggtccctgattagtcaaagaaacaaacaagattcaatttttatttgtttattaatttccttttcttcattaaattattagttacaaatattacatatttgtttgtgattataaaatagcttttttgtctgtgttttttgttttctagttgagaataaaaagagaatatttattaaaaataaacccaacaatcatattaataatattaataatttaaacaaatcaatgtgatgttggtttgtgtttggtctgaaaaatccatgtgatggttacatggaaagtttgttgttcagtgttacagaaaatgacatattctagacttagtactgagaatgtgaaccaaaaaaaaaatacatatgaaactatgtcgttttacatataatacaataaattgttccaatgaaggattagtcattactgaatttaactcaaataaacattttcttctttcttgtaaaaataaaatatatatatatatattttcttcttcttttttatttatttattagtatggtcaaatgtattagtagtacggtcaatggaggtctgtttaaatacagtctctgaagagttagataataaatgaatgaaaatgctttgggtcagaggagtaaatacaaaaacttggcctacctttgcacttttcaaattgtcacattactaccctacaacacaccaaatgtcatatacttacttactcatactattttactaaattataaattcttaactaaaaatatggattgaattatttatcaaaatttgcttttttttccccttatttttaaagttgtgtagtctcatttcagccgcaaattttatcgattgtagttgggtcttgggtgcttcct

SEQ ID NO: 1378 - DNA, 1572 bp, Cannabis sativa
taccgtaaggcacggtttaaaacagtgccttattcggtttgttttgcaacgatggtatataagtaataattatagaaacccgattatttaaaaatattaggaaaaattatttttgtagtagtataatttagtttaatacactagataattgtaaagaaaagtatcttcatagaaccaaaaatctcatgcttgtatattatgatttttctaactttaatttatgtacgtgtttgtgtaaatttatctccgaaaaccttttctttttgttgttaattagttttgttgaaatctatgtaatgtgtattgccaatataagttagcatattccacttaattacataatattgtatttaattcaactagaaatttgggattaattcgccgaaacgtacgtatatgtgttaacaaaataaactaaagcataatgacatgttttgaaaacatatgcaaaggttgcaaggacaactttttcatagaataaccaaaaaaattaaagaccaacttcacatgcataaatttgtgttaacgtttgataagttttaccaaattcaccatttagtaatcataattcaagggcattttggagtttttctttaaaattaagaaagtttttgactaataatgagatcaatttgcctacttattattattattgtaattattggttgtaaatttttcaatatctctaatgcatatatataatgataaatcctgtttatatgtacgttaatttaaataaaaattgaaaagaaggcactaatcaaacccaagatgattatatattagccagatgcacacattaatattattcgaatacatatggttcagaagactacagattatacatactttacataaaaatacgtaggtaattaaacattcttattacacgactaattattgtacactcatctctgtttattatttttgcttttattaacgctcaaacaatttataattattctttatagcttattgatttttctagttaaattaactagtctagtcgtgaagccaatccatgtcaactgggtcagtgagctggagagaggctgaagccgaatctaaatccacgccaaacatcatatcttgagagaagaagaaagtttcactattattatgatcagtataagattgatccgagctacacgcgcctcctttttgattggacgaactgattacctgactacccacgtcatcattattaataaatccaaagtcaacgtcaaggaattccgacaagtaatctccaggatcattggatttctcaaactcaatattattattattattattatcatcatcatcattaatcatactgatgaggtgggagtaaccaggaactacagaggaatcgagccccgtggtttgatcacagccgttgactaattgttcatcgtaatcaaccactgagggcaaccagcaatcgtcaaccgtaggatcagaattactgcagtagtcctgatgatgatgatgatgttcgggtggtagtgctttgttttgtgcttctgtttgggaaaggagtacaactttggtgcaccttgtggctacggttcgaactacatttgaatt

SEQ ID NO: 1379 - DNA, 1070 bp, Cannabis sativa
ttagtaaacgtagctaaatgtcccattcccactcctagtaagtgtaacctatagctaaaagccacgtcattagctagacacagattccatttttaatgcttcaataatgaatatgttctgtgtattattttctataattggggaaataaactgcaaaattcatgccccactaaaataaaaataataatattatttataaattattaatagccaagtattcaataacctaaaaacaaataaaaaaacaaactcaatcagaagaaggcattttcacaaaatatccctaatttagtcggtcgaaaaataattttaataaataaataaaagtcttacaataaaaaatatcctcaaaccaaagaccgttagttgattacttaattacgtcactacgtgcgtaatggaccttgaactccaagttaacaagatgggcccccaatactctggaggcccatttactaactctataaatactattctctttgcatcaaactattcgattcccatttccacgtttctttctctactttttttcattttcacttctcagaagaaaaaccagaactaaaagacgtaacaatgtgcccttccggacgaaccctagccacggcgacgacggcgaacaccgcaaccggaactggtttccgatcagctttcgaagtcctcgacacagaccgcgacggaaagatcagccgcgaagatctccgtgctttttacgcaggattctcgagctccggcgccgacgagagcaaaatcatttcgatgatgaaggccgcagactcaaacgatgacggattcgttgagtacgacgagttcgagcgagtcctcggttgcacgacgaaccgattgcgcggcggcggtggaggagtaatggaagaagctttcaaggttatggataaggacggcgacgggtggctgagccatcaagacttgaagagctatatggaaattgcgggttttcctactggagatgaagaaatcaaggccatgattgctttgggcggaggtaatgaaaatcaaggtgtttcttatcatggttggcttaagatcttggccgttgattaagctttgac

SEQ ID NO: 1380 - DNA, 2070 bp, Cannabis sativa
gctattagattacgcagtaaaagctttaagcttagagttagcaaaggcgtgattagtagctcagtctcggagcaggagcaggaccagaacctgaagcagcaattgaatttggggataaggagggcctacccttttcatgaaatagagcccaagtggcagcggttttgggaggacaattccacttttcaaatcccagatgaagttgatacgtccaagcccaaatattacgttcttgacatgttcccttatcccaggtctgtccatttctctcatcatgcttttcttcgcaagcgagataaataaagaagaattttttaaatggtatggaagacaccagttataagaaaccaacggataaaaatgcacaaagcttgggttttaaattatgcttatatagtgaagcacttggtaaattgtgaatagtgcatgggggtatatgggctattctttgtgtgtttttgttaatcatttgggtcaatggttgcagtggagctggtttacatgttggtcatccactaggatacactgccacagacattcttgcaagattcaaacgcatgcaggggtacaatgtgttgcatcctatgggatgggacgcttttgggttgcctgcggagcagtatgcgattgaggtttatattctagtcccaaacccaatgatatatgtttaccatgatttttagttattggagtacatgtgcattatcagctggttgccatttgtgttttgtagacaggaactcacccaaagatcacaacccagaagaacattaatcgtttccgtacccaggtaatagatacataatattttaccaggccatcttatgcttcatgttttgaatcattttgttgaattcacttcagttctcataatatttagtagtctttgaaaacatttgactttcaatgttaagtgatatttcgttttagtggctgaaaatcccagaaaatgataattgattacaattttttttatcttctaacgtatgagctcaacaacatggttaagtttcctaataagttaaccaaaataagttccaccgaccagttagattcaaaataaactctgttgctttgtacgagtatatgtatattatagtgttgatttacacaggttatgaccatcctaattttattggagcatcaaaattggccccatttgatacagaagtttcttcaaatttggcttttgtattgattggatagaaactgaatgtatttgaattcagctcttggtaggagtggtaggctaggatggacttgtatcacttttattatttgagcgattgtaatagtcactgagaaagattttatattgcatgttgatgttatttctgttcttctttatttgacattttctttgtagcttaaatcattaggtttctcatatgactggaatcgtgaaatttctacaactgaaccggattattataaatggacccaatggatctttcttcagctgttaaagagaggattggcatatcaggtttaagtaatttctggcctgcagatgcatccagccacatgccaatttgttatacacaaaaataaatgtagtctacttatgtttttaggctgaagtgccagtgaattggtgccctgctcttggcaccgtgttagcaaacgaggaggtggtggatggtgtgagtgagcgtgggggtcatcctgttataagaaaggtatatatcgtcttctgcatgccatttatatattcaatcaaagtcacaagatttctatagcttaattcccaatttcggatggtttataattttacagtgtcattgtttattaccaagcagccaatgcggcaatggatgctcaggataactgaatatgctgaccgtcttcttgaagatttagatgaccttgactggcctgaaagtgtaaaggacatgcagagaaattggatagggaagtcagaaggggctgagatggaattttctgttcttgacagtgatgggcaggaaaaagacataaagatcaaaatctacactacaaggcctgacacaatatttggagcaacgtaatgaatcactcccttcctacgctgtctaaattgataaacttcat

SEQ ID NO: 1381 - DNA, 1998 bp, Cannabis sativa
gtgtctggtgatgctaagttaactgcatcttcaaattcatcgtctgagaaatccataatcatccttctttttctagtggcttcaccattggatgctctcttgaatttcatatcttggccatcatcatcatcatcactattgacaccctctaccgctactgcttctcgagcactaatctgagcatctgcacaagctcctgcaacaaaaaaacatttctccgaaactcatctattaaggtcaaggaaagaaaagaaaattaacttattatatataactccatagcataaacagaaagtgaactaaccattagtagtttccgatggacaactaggcttggattttgctgatgctcggctccaaaaattagccagtgaaccatctgtaccagaagagcttttactgttctgagctttctttttgttggcaggaacatgaggatctttatctttacttatagttggtttgttagcaagatcgtgaactcccgtcccagtagtttcgcttttaacttcttttaccacattgggagatggaataccaacttttgagccacgttgttctgtcttttcttgcacggattgtcgagctgcaccattttgacgagccaaatcactttttgatggattaaggcctcctccactttgaggcttgggagttgaaacaatggatggagttccatctacattacgcttaataaagtcactgctaattgcacaaaacctgaagaagcgcggaaatgagcatggaaagaaacatgggacatatgacattatatacaaagcaaatcaatcgaaagatttaacttgggataactttaatagaatgagcacagataaaaatgacccccaaagtcgaaaatataggttctccctggaaaactctatatgcattcccaaaaaaatgaagcatggtttagctttgtacaatttcctacatttcttgagtttcaatgcaatttccttagcatggcaaagatcttactgtttaatttcaacaaagatgttgtattaatgtaattaaatgacaaaagataagaatttagaagatttaagagaaaacgtgtcgagtaccaatgcaattacttcaatgtagttataagttttggtatcaagcaaaaatttcttagttaacatagaaaattaaataatctttgaacgcatttatatcatttaatacagtatgagttaacagaatcatccgaaatctcattccgctacaagatttaactactaactctaagctattgataactaaaaggaatttaatgtccaaactaaggcatcactcttttaatgcataacttaaaccactgtcttacggtatggagaaataccacgagttcaatagtttgttatctcaagactcgatgagcatatacctgttatccctcaagcaattgtcaaccgttgaaggctgcttaaagagctcttctgcttgtacaaattcagcattccaaagtacagctgcatcctttgggatgcaagcttgcacgctataaacctgaactgaacacgtgccatcaaattcttgtttcgcttctgcataaaaagtcaagaggaaaagagtccaaaattacattatttctccctaaataaaaggaaccattcaaatatatgcaagaaaacaaacgatagctcataacaaacacatttgtgtcctcttgaagtgtcaacaatcttattctgaccgagaaaagaaaaacagcttgaaaattcaaaattctactgtctctagtgcagacataccagaaaataaccttaataagaaaaacaatacctgcaagtttaggccccgaaacaagctttatatgatagatttgaggattactcttcaaccagccagacaaggcatacaccacttccaattcatttccatgtttttccacaaattcttcaagcagcctagagacaaactaactttcaataacatggggtaaaaagatacagaagaaaaaaggcttataatagatacttctctacctttttgcagcatttgatg

SEQ ID NO: 1382 - DNA, 4426 bp, Cannabis sativa
actcaagtcttgacaccacctctcaaacgctggggtgattgtgtcactccaagtttggaaatcagcagctgaaatctagatggtgatagagcttttgtgagacagtctgcaacctgatttgatgaagggatatatctgacttcaagttctttcttcagtatcttgtctcttacaaagtgaatatctatttcgatgtgtttagtgcgtgcatgataaacgagattcgaagctaacgcaccagcacttacattatcgcaccaggtcacagatgtttgtggcagaggaaacttgagttcttttagcaaggactcaatccatgttatttcagcagtgacatgagcaagggctctatattctaattccgtgctagaccttgagaccacggattgcttctttgatgaccaagacacaagtgtgtctccaagataaacacagtagcctccaacagatcttctgtcatcagtccaacatccccaatcggcatccgagtagcctgtgatagcaagcttatcactgtatcctatatgcaagccatgatttgttgtgcccttcaaatatctaagaattcgtttggctgcactccaatgaactgtggtaggtgctttgagaaactgacttagtttatttacaacaaaactaatgtcaggtcttgtatggcatagatattggagggcaccaatgaggcttcggtaaatggttgggttatgcattgcttctccatctgtcaaagagatagtctttccagtaacaataggagtgggacacggtttgatattaaccatgtcatacttcctcagtagctcttcaacatatttcctttgattcaaatataaccttgtgtcatctcttgttacttcaatacctaagaagtaatgaagtgcccccaggtttttgagagaaaataacttgttgagttgcatgataaactcattgagctttgtttcattattccctgtaacaataatgtcatctacatagatgagcaccaaaataatgattttttcatctttgtaaaagaatagagaagtgtcagcttgtgaattctgaaatttccaacttagcagggtgcctttcaatctatcaaaccaagcccgtggggcttgtttcaaaccataaagagacttgagcaacttgcacacatggtttggtttggttggatcttcaaacccctcgggttgtagcatgtacacatcctcttccaaatagccattcaagaatgcattatttatgtcaagttgttgaattgaccatcctctgttcacggcaatggttaggacaatccgaacagtagatgccttgatgacgggactgaaagtttcaccaaagtctaaaccaggcctttggtgaaaacctttagcaacgagtcttgctttacatctctgaaacgaaccatcagcattaagtttttctcgaaagacccacttgcagcccacaagattatatgaggcagaatagggaacaaccacccaagttttgtttcgtttaagagcacctatttcatcatccatggccattttccacctcttaatcttgagggcatcagcaacacaggtgggttcactaatagtggatgatggttgagttgtactggtatatgccttcggcttaaaaattccagctttggcacgggttatcatgggatgagattcttgttgtggagctgttggaggtgctggaacagtaggtatagcagatgaacattctgttggtgagggaggagaatcaggagcagcagttcctgatgcttcagggacaatattcacatgatcagtagcatcaaaactcatgttatcaagagaggaagatcgaacctgattgcttgacagtggggacagatctggtgtagaagatgctgcagcaggtgatgcttgaggagtaggagaagttgctgcaggagagtaattagtggaaaaatgaagattagggagttgagaccatgcttcattttgaacaataacagtttgttcagaagcataggtgttgagaaaaccatttttaaatggaaactccttttcattaaaaacaacatgtctagaaatatagactccctgtggtactcaagcatttgtaacccttaaaggactcactataaccaagattaacacatttgagtgagtgaaattgaaacttgtgagtttgatagggtcttaaacaaggaaaacatgcagcaccaaaagtcctaagcaaatggtaatctggttttttgtgatagactatttcaaaaggtgatttgttgcttagaacaggtgtaggtagcctatttatgagatacacagatgtttgaaatgcatctacccaaaactttagtggcatgcttgcttgagctagtaaagttaaacccatttccactatgtgcctatgttttctttcagctcttccattttgagctgaagtgtgggggcatgaatggtgaaattgaattccatgagctattaaaaactgattaaaagcctgaaactctccttcccaatcagttctaatgaacttaatctttgtttcaaactgattttcagccattgttttgaattgagtgaaggcattaagggcatccgatttttgctttaatggatacaaccatgtgaagcggctgtaatcatcaagaaagtggatataaaatttgaaattagtgttggagttgattggggcaggaccccacaaatctgtatgaattaattctaacattttggttgctctactattagacaatttaaagggcaatgcatgagactttccatattgacaagcatcacaaaagctttcattgttgttaaaagaaactggtacattgctaaaatttaaaacaagtttaagaattctagatgataaattgcctagtctcctatgccaaacatctttcttggaaagaaaattagactatctattaatactagcagggcaaacaaaagcatgagtagatggggctgactgagttggttgacacacaggctttgacagtggggaatttagttggtatagcccatccttaagcttccctgtgagcagcaccttccttgtgaccttgtccttggcaaagcaaaaatcagaatcaaattcaataaggatgtcattatctgttgttagcttggaaatacttataagctttttggccatttcaggaacaagtaaaacatcttttagaacaagagttttggatggaacatttgtagataaaataccagatccaatgtgagtgattgccaagggatgaccatcaccaacaacaagtttatccttaccaccatagctgctcttttgactcatattgctgccttctggtgtgacgtggttgctggctccactatcagcataccacacttcactgtccacgacttcaggagtagtaacaaaggcagcaggtccttgttttccttgagattgattctggtgtggatcagcacccatataggtatcatcatacctattatagcacactacagccgagtgaccatacttgccacacacttggcaagtaggtttcgagttgttgctaaatctaccacgtcccctgcctcgagagccaccaccacgactgctgttgggatagtttccacgatcagtagctgagttttgttgtgtgttactgcctcttcctcgaccagtattctgagatctgttagcaaggttggcagttggctgtgatgtacttttaggcattccattcaagttttgcaagcgttcgatcttgctaccaaagctaagtaatagctcctgcagttcctgccatgtagtactagggcgtgcctcaatttgcaaaataataggcaggtaagtagcatctaaaccagataaaatattagcattcaagtgattttcagggtagggatcccctgcaagtgctaggctatcaacccaagccttcttctgtctaagataatcaaccatagtcatattaccttttcttactgtttgaatggctgttcgagtgtcatccattttggattttgagtgagctccgtagagattttccaaggctttccaaagtgcagctgaagtgctacatcccataacttctgtggctatggattctgtcatggaactgtataaccagccatcaagagttgataactaacaacccaatgttcataatccggattgatttgaacagtgagcccgactccttcttcttctgaggaaacagcagcaggtatgaattccatgggacaaggacgagtgccattgacaaaaccgtcgagtctatggccacgaataatggtggagaccatagtcttccacaaagtgtagttgcttctgtcgagttttaagggaaagggctggttcaaggtgttgaaaggttgtgtgaaattagagacatagctcgattgagcagagggagtatttgttatagtagggttactggagattggaactccactgttgttggcaggggctcctgctggagtctgagactgatttgtagacattggcg

SEQ ID NO: 1383 - DNA, 1909 bp, Cannabis sativa
atatatatgcatatcatcaatcattgtctcagtatttctataataatgatgcatatggatgctaaaaagcactctcctataaccaaagttaattaaagttgtgagacagaagtgaaagaattagcgctacattgagtaaaatgatcacctgaagctccaacggcaagggatcaaatccaagccgatttccgaatcccaataagtgaacaactcgattgcgcaaaaggagggggagaacgattttcagataatcagcaggcttcgcctctttcacaagatcttcatcagttatctgaattgaggagcatgaaaggttaaaaaaattataccaagggaaaatgattccttcatttcgaaattttaaattgctaaatggagatagtcacatacaagactgccaattgcttcaatgtccactgatttcaaatcaggggggagctcctttactatatctactccatccttcataatgtcaataaaatgattttcttggtatatatcaccaaattgactgtcatgtaatcaagttaattagtacattttggcagtatatttttagccatgttactagtcgtataaaaacttaactatttatttgtcatggtaaagaaatatataacatctttgaaattgaaaactatttgacttagacaacatgataggaccatttccatttccagtttcacatattaatgatcccaattggtgcgtattgtccttataaaacccctttttgtagtaatgattgttttgttcaataattactatttctcaatttaattaatgtatttaatttattaaggagtatatgttaaagacaatgtttcataccttggatccttccatacactgctgtaaaggaaccttggaataacaagagttgcatttagaagtgacgccacagcaacagcattgcaaatctgcaagcagttgcaatatcttggtcaacctattagtggaaaatgtattacaattaataagaaaatcattacaataagatcagagaatagcaaatgattactggatactattacgatgtaactaaggcctgtttatattacgggcatgttactggttggtatgggggctagagttggtggggatgagaatataaaactcaaacctatgtgtaatgtgtggtaaattaaacattaatgaccacacttgagtatcatatttccagcgccctctaactctactccatctaagttcaacacacacacgtaataaataccccatcatagtattaatgctcaattctcaaagaaaaactcccaacagtaaaataatttagggaaataagagaaactcctaacaattaggttgagtttactttgaaggaataaaaatatagaaaaggaatagaatagaatagaataaattttaaaatgtatcaaatattaatataaaatattattattattttattatttcgtattagaatggtatcttctcctatttcaaaataaaatagtgatattttaatactttaaaatgcaattaaacaaaataattaacataaaaattatttcatttcaatttatgttacatcccattttattatctccaagcaaatgaaaaagattttccacatgctacacaattactcaaataaaaggaggtgcattaccagtgaagtgacccataatgcttttgaaatgtagacaaaagtttagttagaagaaataaaaatacaaaattaaagatgagaatgagactagaaattaaaatagaatagtataaaattttaaatacattgcaaacattgttaaaaaaaaaaattacaatttcctcatattgtactagaatgattctttcatctaaaaatgtaatattttatcaaaatggtaaaaattatttcattataatactttaaaatgcaattaaaaaaataatgtttctattctat

SEQ ID NO: 1384 - DNA, 2816 bp, Cannabis sativa
caaaaaatttctaagatttctcaaggtcatagtctcacaaataccacgctagcttttctgaagaaattttattagcagttcaatgcaattaaaatttgttgctcaaacactgattaagctttaaaatgaaccttaggagtaaagatatatatagcaaacaagtaaaaattgaaaatctaatgatctaattggaatgtgatgattttgcagtgataagcttactaaggtcaaaatacaaaccaatcggaaaatgaatatccaagcgcttgtgacaaaatctttcctacagttgttttcccagagcccatcattcctacatttgacaaatcacaatttttatcaaacaacaatgactactaaataaccttctcggagagaaaaaattgagagaaactcaccgactaaatatatacagcgcccctctaaatatggcttaatcttttctgacttaacctgcaatagtttcaattacacttaagtaagccaaatcaaatgccaaatgtcatttgtcaaaagctgtttatggtgagaaacaaaacatctacctcttcttctttaaataaaattttaataaataaataaataaaatagtgaacttatgttatagaacaaaataacaaaagtatatccttcaatataaattactaaaagaaacaaaagtggtcgcatcaacagtttccatgacccaaataaactaaatagggtacctttaaaagtagagattcatcaaatggagcctgataatttccagattccacaactgaacctataacaagcaagattcaagcattaattcaataaagttatacacattatttaagaagtaatatctttgcgtggaagtgtggtagggtataatagcatttacttaacaaacactatctgcaaaattatcattatcaaatgatctagaaactattctcaaatagattatcactccactaaatcttctttaagcggccagttaggtaatctaaaggaatacaaattggttgggaggacaatttcgtgttgaagaagctgcttccttaaccagaaggtaaacacatggagaggacacccaagtagcctcagaaaaattactgacaaaacaagtaacagaaagaggaaggagagagtgagaagattataaaatattacttgcaaaacagatggtctcaaacacaaaggagacccaacttaacaataagaagggtcgggtggtaaatccccctaatttcacggattcctaaaagcttatttaaacttattagccttttccagtatgaagtctcaagtatgactattaactacgcctaattattcaatatgataatattacattcagaaataaacaaccaatctacatcaggtgttgaaaggagctgtttatgacaaaaacaagacactgcataggttgcagaatgacgataaggatggacaatctccattatgacaggttgaccccacagttgacgaaactatgttcatctttgctaaacctagtggattgtaacaagaacaaaaataagaaaagtatttttcttattcatattctttacatgctattccctataacagcaccgtgaaaataaaaattcaaatcattatttcacgcaatttgaacgatttggtttggaagcatccaaaataagtatatgtagaaaataaattagggaaaacaaaactgaaatcaaatctgtcacaaattaaaggatttcatagccaacagagagaaagaatgacttgtaaactacctggaacgctcttgtaagagcatgaaacttccatatccacatttctacgccgattcgaagctccgttagccggaaatcgagctgaaacaagcaccggaaaccttttccggtccttcagtgtctgagaaacagggaacgacctgcctggtctattcgtaaacttgtcggagtaaatccagttggtaaattgtaccgtttgtggtactagggcctccattctcaccttaatcggaaaaatacttgcaattattacagccaaatcctgtttttcgccttccttctctttattctagtaaaaaagaagatagcctttatatgtaaatactaagataaattttatgggttcaaaagattcagaataacagaactttctttcagattctgagaaacatgcaagcattaaccaaagaaaaagaattgaaatgacaaaaatctaaattccagattacgtttactaatacaaaatttttgtggagaaacatacctcagaatgagaggaggatagaaagagaacaataaagaaaatgtaattgtttttttttttttttttttttggaaggaaagactataaatttatggtcttctcttaagtatttataaatctaatatagtacacttatgcttctattgtactgttgtgcttcgtaatgcgattgtgattactgattaggtgaaatattatagttgaaacaataattattgctgagtgatgatacgtgaacaaacaaaatacacacaagtaacaaaaaattaattaatcatataataataaaataaataaataaataaacgtgatgaatggtattggaatttaaaaatataataataaaaaaaaaaagtagtaaatggtggtggggaaacaaatccaccaactaccgagtgtccaattggattggtaggtagagtttatggtggctggagtagatgttatgggtcagaggttttttcgtcattttaaatataaactttgaattgaatatccaaaaagttttcctcatttaattggaataaattaatgaataataaaattgtttggaaataaaatctatatatctatgtatgtgtattggtatgctaaat

SEQ ID NO: 1385 - DNA, 2458 bp, Cannabis sativa
ataagtccaacttacttgaacatagttccaagaattataaccccaaaaagattgagtccacccagcccaatgaccaatgctctctctgaagagctagttttgctgcagaaaacaagacccgaataatagagagagagagagagaatatacatttaatccatacaatagttcaccatataaatgaaaaatgcatgaagaattcagaacctgaattgcagtttcttctccttgaaaaatttctcaacccctccaacccaatcagtccatttcctgcctacatattcctttcttccactcctttgagaagaagccgtacgctggagagatggaaatctatacagaatatttccctgcataatatgcaatatatgctagtcaataagtttttattttgccacctaaatcataagtgacagttgtacaagtgcaggacctataatatcaagaaatgcaagagttccataaatttgaagagattgattcattatttatatgaatctattatcaggaagagttaataaattaaaaaaaaaatagattgttcatcctcccgagcgcattaatttacctcttcatcaatttcaggttgaccatcaaaccgtaaaagaacaggtaagatgtacgaatcatcatcctgaacaagtaacaaaggagatcattttaagcagcacaacaaaatatacaaataaccagcatggatatgcaataagaaactggaaaaataaaatataatataaggaagtaactaactaacagcgcaatctatgttaactcaaaaataaacttactgcagatcttcctgaagtttctacatcaagatatggagcaagttcctcggctgcaaccacaccaccattagatgttatgtactggccaatctgcatcacagctcaagaaatctgagtgccattacattgtgatgataatctttcctttaatgaagtcaaaagaggactctacattacaatcaagcatcactctcgagggaaaaatgaaagacaatacgcacacccttaaaaaacaaatttacaatcaacttaattgaaaattgaaattatatgttaatagcaacggaccactgaactcagtgctcaagtattaccaacttccatctctcttcttcaattccttgatttggatcaccatccccaaatacaaatgagaaaatctgaaaaacagtagtcacaaaataaattatttgatcccaacaaatggctattagagtagtaaaatgagattcattatgtcacgtacagattcaatgaagttcatcttgttgtcatcatctacttgtattcttcgccttctatagtaatttggatcccaataccttataaagtaattaaagaaacaggttacaaagagttatttccaagttttaagtgtctaattaaatttgaaactagagacaagaaatgatgattatacattttttcgttgtaatatgtcaagtagagtattagatgaaaataataatttcagtggcatataaccaaatgttcctgagtaaaaatgaaagcaacatgggaaaagacatggggttgaataagaagaaaattgcaaacattaccgctatattgagagacctacatatcttagccaacatggttttcttttgttacaatagatacatgaatgatatgtaatgtaatacatataaatgctcacaaattttaagggattatatacctacaaaatcatcattagatcaagttcatatgcgtttccatgagatgagacaaattagaaaatacttccccaggattaataggagatggtatatatgagatattgtatataagtgagtaaagggatagttgtaggtgtgcaagagctaagagattgtaatctgcatcatgggagagccaaggcctctataattgcctagggacttctcactgtaaccctttgatactagcaatatcaatgttgatcaattttcacctattacctatattcgttttcttgctattttgcaatattttggagttgtttaacagcgggtgatattaaattcttaataaaacaacacaagcaaacttcacccatttctctaaggaatttacaaaaagcacacaaatgtgaaagaaaaccattatggattcccaagcgaagaagatattaccaaaagagatccgtcggactgaagtaaaaagtaaatcccgaatcatatgatcttcctcgtcttcctcgattatcttcttcactgtaaccaaaattacataatcaaactcataatgttaaaacaaactattaacaaccaaattctaaagatcatcatggttaagaatcagaaatatcaaatacatttgaatcaagtttaaaaaaaataccgactactagaaagaatggcaatgattgtagtataaacaataacaacagacgcaattagagcagttccaaatgacaccctgactacatactcagctccagcctgccaaacattatgcatatcaca

SEQ ID NO: 1386 - DNA, 3438 bp, Cannabis sativa
gtggtggttatgggtctgattgggttagtagagactataataataataataatagtagtaatacaatttccagaagtggttcttttcaggaccaagatagattgagtaatgatattggggattattattatgaacatgatgatgatgatgttgttgtttctgagcaacaacaacaacaacaacaacccattaacgatttagttccaaagtctgaaactttagatgattctaagcccaatgaatcatctgagattgagaaagaagaaggagaagaagaagaagaagaagaagaaggagattgttctaacaatacctcatcaactgatttgttaacaaagtgtaagtttgctaaggttccaactagaatccgttcttcattgtcatcatcatcattattatcatcatctaaaagtccaaagcttgattcaactccaacaacacaactccaacaacaacaacaacaacaacagcaacaacaattgaggtggaagaacaagaaactaattctgcaacttgctctgatatacaaagagctcagtctgctgaaaatgtgggagaatcaagtcatattcaacacattaagtgtgagaggtcagtgtctatgcccaatagagcttttgtgtatgatgataatgaagagaaggaaagggttgacaaaagaggttttgaagaagatgatgttaaggaaggagtcaaaagaccaagagaaacaagtgatagaattattgtggatattgatgataatgataacgataatgataaagatgatggtgatggtgttggtggtggtgatttttctcaagagaaacagctctttccaagttcattcaaaatctgtgatcttaatcttatgcaagtttcagagacacatgagaatcatgattgtgatgctgcaacagttaacatgtaccaatctatttctgaaaggagaagagaagcaaagccaatggatattggcttgtcaatgagtaactgtaataataataataataataacaacaatgttgtatctggtgagagcagcaaaagaccacaaagtgaccatcataaggagattgaagtaatcgatttagaaaacgattctgctcaagaagacaaggatttagttatggaagatagaaagtaagttttcctttgccatgataatggtaatgattaatgatatgatacatgtttttagtgttataatgttgttcaactatgcaggacagaaacggtttatactgatctagacgaaattcataaccatgctcagaacactggcggtattcctgatacacaagacggttatgggcttatgatctcggagttgcttgggaatgattttccaaattgttctgcagtaccagaacacatcaatcctatgcataatgacattggtctccctaatgaagaggtaaccatgttcttgatgcttatatgatctgaatttgttatgcaattcagccttgagtttttttgattgattcgagtattcgtaacagaaaaccaacttgtatcaaccaattgaatttgttgcataagtagtatcactaatcggtagtattaaccatagaacttagaatatttgaaccacaaggcggttattttgttgcagggagctattggcgatgatgattcgatatacatgtcacttggagaaataccactaagtatgttagatctttaatctaatttggtcttgtggttctgttggtagtttctttattcgatttttcctaagcggtttgtaaattatgtgtagcttttttaaggccgtgggagcagccaccgccacaggagtatgaaaagcctttttgaagaataaaaagaagaagataataagagaagagaagagtgtcttttgagacataaagaaaatttggtatgtttaattatttgatcattggggtcttgttaactctattatgttacaaaacatatctatctatctatgatatctattcaaaaagcaaagaatgctttgcttttttattgcttgtttgatctttgcttatcaaggctgcaagtaaatatgtcttttttgggcagaggttgaaagatattgataagaatcttcccttcttttccttttcttatgagattccattgttccacatagttgttcttaacttgtgtaggtagaaatgattgtctcatggaatccaattcctcaatggcctgtcttacaaaacaaatgatgtgttacttaaaccatagatatttatagcttctaaatctttgtttgcatcgattaatattcgttctcgtaaaaaagtggatccatctaacgagtaatgatgtatgtacacacaaaatatgcaccagagtattacatacaatttttatttttgaccgatcccaattcaaattattttgaattacatcactagtgcctacatgttatatcattattagtgtaattaagtatcaggtcccatataatctaatataatagcttttagagagtattgttaaccaatcttaaagtattttttgtaaaaagtgttggacaccactggtgcttaatagcaatgctgaaaaacatctaccatgtatgtaatatttgacatgaatattctagtctagtgtagaatatgcttggtgttatagaatcttagcaaagaagagttgagcctattgtcaaagcacataaaatttgggcctaattccacttcattgttagatcttatgaatagtaccaaaaccaaattcttaattttctttattgatgaaatcacaactttacattgactacctctctctctctctctatttctctttattgaaagaaagaagggaaaaaaagtgatgatgttgatatgtgataagaagaagaataagaaggaaaatggtgaaaggtagcttgcactaaactgtggtgtttgtttgtccaatttatgctattgaagtttgtatgggaatgaagtaataagaaaatcatgtataggactttaagatggattggatggatcatggatggatgagctgaatttaaggttaaagacaattaagctcatatgtatatggggtcccccaccacccatcattcatacttagtttcccttttcattttctttctttatattttgaatagcattttaggaagggttggagaggggatattgatcaaatatcattaagattaataattgaagataacataatagtagtagtagtagtaggtaaggtataagggggtatatatatgaatgaatgtgttactataattaacaaaatccaaacctctctctccttacacaagacacaattgatctatacatatacccttaatgctatattataattatttagaaccacttataaatttaaaaaataaaaaataaaatagttgacagtgctgaagataaaatttacatattttcacttgcaattatttctttcttatacgcgtgataagattgtttaactctaatttttaatattataaactattta

SEQ ID NO: 1387 - DNA, 989 bp, Cannabis sativa
taggaaaatggtgcaagtgggccaatcccaacagccagcttcgagaaaggctttatccatgatttcttttgaggagataacccaaagggttgtggagactgttaccgtgtttaatggcagtttggacggtttggtctttacaaagaaggttattgctgcagctgctaaatgttccaaccttcctcaccaatttgtgaggaaagccaagaaagctatactgactttggagaggtagcggtctccaagaggagaaggaaacttccgaggatttatcacccctcgtcaacaagatccaagaaaaataacaccaccaccatcatcatcacaataacaacaacaatcccaacaacaacaacaataaagacaacaataacagacacaacaacaaccacctcaacaacgacaaacccaacaacaacaacaacttcaaccactaaaccaagaaaaactacaacaataactacccaagtcgacactgcataaccaacctaaggttctccagccaaccctgtcaaaatccattcagccatactagccctaaccgtggaagggaaatccaacttcatcaagctagtagccagggctttaggcccttaactgctttgtctaagattctaaccttaaaatttaggctgtcgttgaagcccactgctctaagcactgaaattctaaaaaaaagtaaaagatgtagagtggtctctttggaggtgccatgggaaggagtggataacgcttcaaaagagggttgatttcctttcttccctaaaaaggctaagataacagaggggtacgtactgccattcttggaccagtgattgatttcgtggcatttgggaaataaatggtacctaaggttcggatagacttggctccctttgctgcaaagcttctggaccaagtgagaaacattgtgtgtgaactaacttttgagaattgggtagtctctaacagcactgacccttttatgctggcttaagcagctaagcaat

SEQ ID NO: 1388 - DNA, 2489 bp, Cannabis sativa
ttttgttgtcatgggtaatggataattcatgatttgactctttagagtgagttattggctatttggctttcctctctacatcactaccaaactttggaaaggtagttatgaacaatccatgccccccaaaccactagtggtactggcattcaccctctcaataaaactacgaagaataactcgacccacatcaatggtttttccttccattattgcataaaccagttaaatgtgatccatttgaatatcagagaaatgagcagaggggtataaactggcgttggcaaactcaagctttggcaactctattaagttgacaaaagaacaaattctcattgtcattcccattaaaagtaaaccgggctcccttagtaaagaccgtttgaacaaaatccaactaaatagagatgatcaaaattcattaactcaaaacgcatcttcttcaacatcaaaagtaatgggtaccattttctttcttacaaaacatttaccatctcttgactccagaaagttagcataaaattcttgtatcatttgagtagttgagtttaagaacattacggtcatcaaattttcaccaccccctttgaacaatattagctcagatataccacaggctcaaattatagataggaaaccacatattgaagtcatagctgcaattgaagttcaagtaagccaatataacttgaaacttacgattttcactcaattactttacatgagaaaagcaaataaacttgaaatcaaaataaactttcatttaattaaaacgaaacttcttgcaactaaataacccaagaaccaaaaaaatgaaaaaataaaaatccataatgagaagcatgaaaatactgacctgtgtgaggctgggcgtggtgttgcagagaccaaggtgagtgcgtactgtagtgagatgaggtactgagagagagtgagaaataaagggtttaatggttgagggttattattgtaaatttattcattttgctctacggcccttttactttatccataactgcacccaccctgatacttctcacggcaactgaacactgtagacacaagacctgtaaaggaagcctttttattttccttccttcaacttcaagtgcttggtctcaatatttcagggaagatggattagtttaattgggttgttgggaattcgcggggtgatagcatgagtaggagtgggattatggtgggtttatctcccacatttagacaaaccagttttccctcaatgggtttaaagggatttagcttcaggtttaagcattgggcttgtaacggctatacaagaatggttacctctgcttcttgctctgaccaactccaactccaactccaagacaagcaattaagtagtccggaacttgtagccttggaatatgctgaccttaaccttcctcttcctgacaaggtccctcctttattaaattatctcactctttcatattcattcattgtccacttcagttctcaattttaattttctttctatgtatgtaggaactgggtaatgtcagaatcaggcaacatgtcaatcctctcaagactactttttctgtatgttcccttttcctttttcattcatttctacaacatttaatacctaaacatttagtagaaaccattttcatgtttctttttgtaggtgccagtacaagtgccccattggaatcgagtctttagagatccaacattgccactaatggtggatattggaagtggtatgatcaacacttaaaacatctttatttggatatgcacaaatcaaatcgaacaattgagtttgcaatagaatactagaattactttgtttggtattttctttgcactattcaattccttgttatgttgtaatttaatttatcttttatgatcagaataattggtttttgttcttcctgcattcagttcaaatcaacttgccattattctattaaaacagaaaaaacaaaaagacaacctttgctaattatcccaagtcatagtttttgcaagctataaattgcagtcataatctaaaggatgaatatttcaggtagcggcagatttctcatgtggttgggcaaaaaaaatgctggtgtaagaaattatttgggattggaaataagagagaaagtaaggaaaaactctttggtttagttttattgtagtagaaagcttcatctgtgtaatttgataaatcatctttggcccttctcttcttatttttttcctttctctcatctaaatcatgaggtattaattcacttgttttttcatacagctggtgaaccgtgctcagtactgggttaaggagataaatcttgataatgtgtaagggttaatgaattcatattagttcgtgaaaggtcttgtaccaatgaactgatattatatatatataattacagacatttcatctatgcaaatgccacaaattctttcaaacaagtagtctctaactatcctggacctttgatgctggtttcaatcctggt

SEQ ID NO: 1389 - DNA, 2066 bp, Cannabis sativa
ttctccctttgaatttctgatgctactccagttatcccaaccaaagactttgaacttgtaagatgaacacttaaaacactgcaaagaaagtataattataaaaatatacatatctaagcttttgataagaaaaaaattacatctatctgcaatgactgctttaaagaattacacatcaacatatagttaaagctcatccaagatatttgggctagttcaaacaaatatatcgtcagaataatcccagcaactccttttacattagtatgcaaaaagaagtgtaacaaaatgcctaatgacttacttaagcttcttctttgttgtagcctctacaacccaatcaccaaggcagtttaaattggttccttttggaagaagatcaatctgatatgagaacatacataattaaacatccatttcatacaaaaaactgagaattcgaaaacaccaccaatctgaatatgattacctttgtaacaactaatataataggatttgcaccagccaaatcacgaacatgagctaaaaagctaccattgaagtccacgatatcaacctaaatgtacttagttgataaagtgagaaagagttatttactgtcaatgagtccttaaagaaattaaccaacattcaaaagcaatctgattctactaaagaagaaacaaaaggataaaagtaatactcaccaatttaacaatcagggctttctcataacgcaagtgagataacttctctctgagctgatcagccgtgatgaactgtttcccgccagaataacctccatttccgccaacagcagttatcatgtgtccatgggacagaagcttacaccttccacagagaacacttctaagctggcggtgtttcttcttctgcacaaaattcatttcacatgtaatgttaatttatgttgtggaaactagaattgaccgattttgcaaaaccatttgagtgcaaaattgagtttgaacatccaaaaccctacagccaaaacaagaagaaaatatatcccacaaagaaaagcttcgagattttataccaatgcatatgtatctgcatccacgtaacccggagcatcaagctccgaggtctgcaacggagctccacagccataacaagaagctacggcagtagagaccttaaatggcttctctttcttcttcttcttcttattctctttcttaacaagcttcgcagcctcaattgagcgatgtctttccagagagcggtcgcccggtgtcggagcggcggcgccggttccgtcaggtccgggagtagggtccgataaatcgaccttagaaatgggtgagttattgtagccctgttgtgggtgcgataatctacagaggacgagagaacgctttgagtggagtttgggaagcttggaactaaaaagggtgggattgtaggggaaagagagaggagatagaatggaggagagggttttgagcgccattaatgggcgttttgaaggtttagatgtaaaaaaggggtcttggggtgggttcccgttgagctgggagtgggaagaccgaacaccgaagaggatattggacattaatgtagtagccaaaaagaaaaaagattatggaaatgtagttatgtagtatatctactaatcactaaaatgtacaatggcgccaaataatacattattcttttttggatttaattaaatttcatctagttgtattagttggttaattctttaagtaagtatttttgttaaagtcgactatggctccggccttctttcccctccagagtctgttgggactcaggcttggtctccgctgccggaagattaggttaaaatcaactgcgatgtcaaagtcggaggtgaaactacgtgtgttgtggtgattgcgagagaccataacgaatcagttttgtgggtggcggcaaaaaggctacaattctttgacccactcactggagaagctgcggcttgtcttttagctatggatacggcgatctctttgcatcatccttttgttttggtggagagtgattcaaagattgttatcaataacctaaaaatgagtgactctatttgggggattgag

SEQ ID NO: 1390 - DNA, 3758 bp, Cannabis sativa
aaagaaatttgtgggacaatcaatcccgaaacaattgccctacagccgagttaacattggaacactcttaagtcttgactcttgcagcagttaagtctggtaggtactgagacacattcagaaagagaaagacggaggcagaaatggacactgtcgaggactctaccaccaccgccgccgagatcgacaccgataaattggacggacttggcgagagcggtgacgacgctgcgaaggccggagacgatgatggtggcagtgggaaagctggaagagacagagtaaaagggccttggtctcctgaagaagacgccattttgagtagactagtcagcaagtttggggccaggaattggagcctcatcgcccgaggaatctctggccgatccggcaagtcttgccgccttcgatggtgcaatcagctcgacccggctgttaagcgcaagcccttttctggtaaaattctcccttcaacttctcttactaccttttttatgtccttgagtttagggtttttcgtaatttgatataaatgcttttcagtttgaaaattttactatcgattctagtatcgaactttgataagataatgcacaaatatcctatttttaaaccgaaagatcagtgctttgcgagaattgtaagaacagtattttcttgatgtgaatgtgtgtgtttgtaagtttgaacttaaagtttgtgttgcttttatgatctgtgaagtcctgatttcagatttttcctagataaatggaaggggatttcaaagcaccattcgaaaacattgcaatcaataattaaaagtacagtgtaaattgccaaattcttggttcttcacttgcttcttgtttggtttgaagtttttgtatgacttgatgtatattttgtcactttggtaatgtgggttgctttaactctgttagtgattaacattttcatgtttacactttgaaggctttgtttgagtgtctcatactctttttattattattattattatatgggggttttactttaatgaattatcgtagggcaatgagcttccactcgagtggactcaaaatttcacattgcacaaatcatgagcagtttttgtatgtatcagcatcgtcgatcattctgttactgttgtgaaatgctgttttttataccaaagaacatgtcagttcttagaatttgtgagagttctgtttacttccaaagtcaatctttctgtgaggtggcccctttcaatcctattgcattttcccttataaaataattgtataacctctgagcatttggccaactttaattatgtaagagaagcagagagtataattagaaagctaaggttacttgcttactttgtaatacataggcatagcttagcaattggcaagtctagatgcagatatcttaaaaaaaaaaaaaaacactcaccatgaaattggtagcatatattttactactctgatattctttatttgaactatgattaatcggtatagaattattcatttgttatcattttatagctcccatgtaattcctttccagcaaaggctttatatttattcattggcagtacattcttacataatgcgtgttagtctttcatatcgtctaggctaatattgctgttctttcagatgaggaggacaagatcatagttgcagcccatgaaattcatggaaacaaatgggcagctattgctaggctcctttcaggaagaacagacaatgctataaaaaatcattggaattccaccctaaggcgcagatgtttggagcgtgataaagtaaagttggaacctggcaatgctgtagaagatgttagctttgacagaaccaaagcctcatctgaagaaaccatgtcatgtggtgatgtcaattcattcaagtccatggaaggaagagatccctcctatgtggagcatacagttgatcataatgaagtcaagttgcaagaaggttatcttagtcacgaagtactagaaccacctacactatttcggcctgtgccacgtgttagtgcattcagtgtatataatacattagatggacaacaaccactatcatccaatcaaaggcccattccaatgcaaggaccactggttcaactagcaaaatcagatgttcaaattttcaaattgcttgaagcagaacatggtgggaactcagtgcctcatcaatgtggctatggttgttgcaagatgaaaaatggtataaattcggaaaactcgttgttgggcccagattttgtcgatttttcagagcctccagcaatttcaagttttgatctggctgcaattgctaccgacatcagcaaccttgcttggcttaaaagtgggttggagaatagtagtgttagagcaatggatgatgcagcgggtagaattatatctaatggatctcaaacacaaatggaacgctttgaagagagtagaaccagtgatcacttgcttttcgaagaaagaagggggaacttgatgggcatgaaaaccaatgtgctatcaacttaggactggtaaataattcctttacgagcaaaaaaaggttgaaagtcatgactttatgattgaataaccggatgttcgagggagttggaattttgaagatgcaggaagacctaaaacctttttataaggtatcgagactcatacttaattgccaagagtttaggaaggttttgaccaagcctgaataactaaatattagtgtttggcctacttttttcaagataaagaacataggattaatggttccctgatgtgttgtggtggtcagtctgatgactatgaacatgtatagttacccaaaaaaaaaataaaaaaaaatcataatctacattagttagcttttcagttgtaaggtctggtattgaatattgattctgtgttttaattaattatttttgcatgtatgtataaactttcttcattccataagacttgaatgtttttgttcaactgagtaaagttagatgagattcttacacacacaatacaaatattaaacaatgtcgttggttttttttttctttgtcgttttttagtcctttggctgcaattatttgagcaaaattgctacatcctatgacaaattttagtatgtcttctgaaagtaaagtaatattatatttcaaaacaattctgaggcaccaaattaataagggaatctttttctctttcctttcttgattcacgtagtagatgttattgctctcaattaaattatcttgttagaatatagaccaataatatcattactcataacagtcaaattggtatttgctaaggtttccttacatattgccaaaaaagttaggagttaaacgtatttaaaagaaaaaaaaaaaaaaaaagaaaaataagaagattcaaccgcaaattactctaaaagttatattagagaaagtgttgttatttttttaaaaaaaaattacattacaatttaaatttaaactcaatacaaatttaataaaaaatatttttctaatttctattatcattttttactcaatccacatatctaaaacaaatatcttattattattatttttattataaataatattaagtattagatactgagagtactacttttgctctcacaagtgaaggcatttttatagcttttgaattttaatcagatagtaataattaatttagttataatgaggtatctcataccaaattaataactcttttgtcgtatgtttgttaaaaaataataataataatcaacccactcacctaaggcagtaaggcaattgcc

SEQ ID NO: 1391 - DNA, 2066 bp, Cannabis sativa
caagtacaagtgaatgggataagatatgataaagtatcccaatccaataatgtgtaaaggcaactaaatatttggtccaaatcctcatggttctaacaaggctatctcaacacatgaaaataataataaaaaataaataaaacaccatagcaaagctgactactgttacaagactaacaaacaaactcaatccctaatattaaagttttgtcctgatttttttttttttttaaaaaaaaaactacttttgaattatacaaattattgtaaatagttcatttatattctgtttatttttaaaataatttactaatatagtcgtgagttataagtattgttacaaaaacctattaaacaactataaactatttaaaatttaatactaaattaacaaattatttaaagaaatgagcataatataattttatagttcatctacaatgtcatgatacagcagcaaccaagtaggtgcaattgttaaaaacacacgaaatctgatatcaaatccactctttggtaccagaaactatcaagttacaatctcagtgagtttaacaaagtataaaatttaatcaaactatgcaccactcttcattgggcagaaaatataatataactataataactttctgtattcgttattcaacatatgtttctacaagtcctgttttcttcctaaaagggtgaaaaaagaaaagaaaaaaaactatcaacatgtgcgtctaaataaaataaaaatgccccccaaaaagacatttgtgcaacaactgagatcatagtcaaggcacaaaagacattctttgagaatgacctccagcatgatacagattaaggtgatatattgcctttggtaccaaatctttcaacttggaatgttgcataattagtgtacgatcagaagttaaagaaccttcaagagcaatcaaaactctggactgatccaaagaatcattgttgccagcatgtaatgcaaggtagcaaagaagaattagtccatgcaactgtgactgttcactggctctaagcagtttcaacaatggtgggataccattgaattcgattatagacttcgaatgctccatgtgaagaaaattatccgggcaagcaaacttcccaagtgaaatggtggcctctgtagccacatccaagtctctatggctaagttgattcactaaaggaccaataacccgagtctccctaaccgggaaagtcctagccaatgaaccaattgatctaataccagggatttgcaatgttggactatccacctctgtaaccaacctcaagagttgatcaacaacagcttttgcagcatgagaattagtcttgaaagcggctcgtctgaggtcggaattcaattcagctgcagctgttatctctgttagagtcatcaaacaattgaactgcaactctccaacttcactctcaacagatttggccaagcaaagaaggcctttcgtctcagttattttcctactattggccacactacctttagcaagcatccacaaggcctcagcacaactaatcttaagctcaagtttcaactcaggtttctcactctccctctctttcctatgattcccagctctattatgacccccctccatatacaaataagaatacgaatttgtgagtgaattcaaattcttataagaattattcttgctatttggaacacccaaatgttttttctcccattccttattaatctgaacaattgaatgaatactatgcttaccaggaagaagcttggaatcgtcaacataagtctcaaatgataacaatgtcacaagtggtctaatcacattttctctagcaaaatcatcttgggcaacaggatcatgcttagccatcctagccaccaatcttgccacccgagcctgaactctcataggtgaatccccaagaacctgcacaataactggaatcccaacctcactcacaatactcctaaccctttcttgctcattcgccaaattacaaagcgctgtagcggcggcgatttgagcctctggcgaagaactctccttcaaaagcttcaacaatggcgaaaccccatcttc

SEQ ID NO: 1392 - DNA, 2133 bp, Cannabis sativa
tttataattatgttgtggcatgtttttaaaacgattctttagattttttaatattgctctattgtagaaaagcttttgtgaattctctgaagctgctcaaaaaaatttacttatatcaaattaaaaaaaaaaaaacattatttacttatatttgcatgtgtttttagattactcaaaacaataatgcagtggttaaacttaaaatgtatgccatcttatgaaacaagatcaaacttgaagaggcgggcataaaccattaagcatggtaacatgatgaggttttttcaatcaagaggtgtgattattctctcttatcattttacattacacggggctatagtcaactactattaggacaacaagtacacaatgaatttaaaatcagtaaaagggttgtgctaactatacattcttccatagtaattgaagaaaaaatgcatatgtgcataagaaaatcaagttttggcaagtgaaaaagaagactaccagtaccaatactacttgaaatgcataccattttaatcacccaactagctaacctttaccatcttcatatcatatgacatcatttctcaatagatgagtcaaacaagcatatgtttttcagggtctaaacattagcacccttttaggtaataagtacaagctacctttcacatttcagaataacaacaaaatacaaagaacaacccatccaccatcagaagttctacctaagaaaacacaacacccagataccaaaagtttctccaagtccggttttaagaagatttgacaaaatgtagagacagcaatctagcaatctccccaaatccaaccttgtctttcccagcaaagatagtcttcagtttctcatcacaaaagatctccttcttattagctgggttctgcaagtaatccaaagcacggccattgagaaacaagctattggtaaaatcaaattggctacacttaatgtgtttgtccccccacagccgttgattgctgtggtttggaccaagtaacggcattgatcgaacaaacatgttttagcataaataccctcataataacattatcaaagctcttgaaaccaaaatcacacaaatatacatacatacatacatatgagtgtgtgtgtgcaagaacaacccaagagagcaatctcaactaaagagaaatgaactacactaacatagaccatttgtactgtgtagttccttagacatagtgaaccaacacactgtcccataagagaaaacaaaaacccttttgttctcctgtgtacacaaatcacctaaatggtaaaaccacatttcagagtacctaaactagaggttcaaaatgaaatctttctcagttatttgtcaagtgataaaggaaaaaaaaaaaagatcataacccttaagcatgaaaactaaaaccctttttttctttcgttggggttttagggtgagagaaagaaagagtacctgcaggtcatgaagcttgacatattcccaaactttcttaacggcgtcgcttcgagaggcttctttagagccaaggaagctgccgagctcagtagagactgggaccaacttcatcaagcccacgttggagcgagcaggctttggagcagtagccgaagcaggagacgatgccgttttcaaagcggcctccttggctgcttacattagcatcctgcatcttcctcctaatgttctggctgccatgactatcagtctctctctctcgtttcttccccaaatgaatattcaaccctgaatttttttgcagtttcacagtgtgagctcaggctcggtagagaatcaaatgcattttattggaattttgcataatatttctagggcttctcttttgggcctaagatcgtttgggcccaggctctaatttctatgttgggtttgaactgttaacttcatatgtggttcagcaacaaaaatacatgaaaatattatgaaatatgaaatttaataataaagttataaaaatatgatatttataagtttatttttcttttatggaattttattacatattttattatttttgtttctagtccaattaattttaaagccttacaactagattgttggagttcataaagtcatcattcatcttccatctttttctatttatttattttgcatt

SEQ ID NO: 1393 - DNA, 890 bp, Cannabis sativa
ctggtaaaataattcccaacatggtcttccccaaattaatcttctctctatgggttctcactcaattaatgggaatggaggagaagagtggttgagattagtcttggggaccaaaccttaatgttctttatataacaaactaattagagtcccataaactctaattaggtttactattgggtattacacattacaaagcccataccaaataagatgtttatttggctcattttattaatttacttatttagccaaatttaaaatattaactcaaataaattgtcttaatttaaaagtacacatattgaattattaaaaataatctaataaattttgcgccaacaaaatgaaaattgtctaacaatgatttgacaattttgttttgacaaagtctcacaattattttttatcatatatattttaactacttatttctcatttttgatactctaaattatttagaatttctccaaaaaaattatgagaagttttacatatatacattgtacactaaatttggaattgtaacctatccatttgtggaaaatacgaaattaagttttgaagaattatgaaacaaattattttgaaacaaatctactaacaaaaatatacgctataatatacacatatatgtataattaagttataatttctccatatgaaagtggggaaaaattcatgccctaccaaataatttttctatgtatacatataatatgagttgtgttgtggcattattaaaacaaacaagaagaaattaaacgcatggaaattcattttaaataatatagttgattgtgatagtccaaaatggaacattgaacttaagatccaacttacacaataatatggtctgcatatggggatgatcttcatattttcagttc

SEQ ID NO: 1394 - DNA, 1983 bp, Cannabis sativa
atatgaagcttacagctcacaattaatgaacggcaacgcctccaaatgtcaacgcctgctggagatgctaaaggaactgactttcatgggagttgctataaccagtggagcctcaggtgagtcagtgactgcgtatttttcgtgcataaagcgactttccacaatggaatcatccttgagaactatcttgtagcagtaacagctcttcaggccctcctggttgcggtagcactcgtgtgatccatccttcacctgttggaagttccagattacactaaacttgcccacagtcgccaccaaatgacgctcttgcttcccggtctcagtgacccatgaaaactgagcattgtgaaatttattattaagtccagctaaatgtgaatccaaaggagtcagcttcaacaatcttggagcagatattctgttccccattcgaccattgaaccctgtcttggtctttccatctttatcaatgaaaagggtgcagataagtaccaaataagtatcagttgtacccaaaatccacttgccatcaaaagttacatccacatgagtgacaggagagccaaggcctggaaaagctgttcttgcctgcctcatagagttgatcgaatacaatcgaatctttccatcaagagacccaacaacaatagacccatcacctgtggttgcaaaacactgaaagttggtccctctggaaaactgatgtccttgtgtccagctcagagtagggtcactacaattggcaagattctgaacaaccccattcttgtcacgcatatcccacctgcacagcctattatcatccaatcccaagaatgtagaaccagttggatcaagctgagctcccttaccgtcatttgtaatatccctcattgagatatcagtcccatccttagcaaacttccactcagtaacaatcttcccagtttcgatatcaagatggtgaagccccttaccatgaggcttcccttcagtgataggactcatcaggagcatgttagtctcagccctcattagcaaagcttttttgggggttgagtgtgtcaaactcgaaccaccactataatttccatttccatgatcaaagttgacataaacacctttcccatgtattccatgagtgaaattcttaacaacttgaatgccagaatcacccaccaaaaagctgttgtctaaagcacccaatgccaagctctgaatgcctccatttgaagcctcttcaaattcctccctcaaatcctgattcgtcctcaatggtgtaacagagcctgggctcttcaagaaatcctccgcatcttcccatatcgaatcatccgcagcttctgggttcgcccacccaatgaaatctttgccataaaccttaagcttattggcgtcagtcgcctcaactcggtgtgtgttctcaaacaaacactcctgatatttggtaacaaaaaccttataatcttcgtcattgaagaacttcattgcccaaacacctttggccacaaaatcaacgcgacgctggtcagcgaaggtcttcaactgcaactcagaagagaccttctgtcgaatcttcgaactaacctttaaagcccaccaagaatctttaccttcgtcgtcgtcatcttcctcgtcttcatcgccttcctcgccatctccaatccttgaggtcttaacaaaagagtaagaagtgagtttttcagaagttacccatttggctttaggcgtattcccaccaatgtggaggtagagtttgaccgcatttctgagattcgggttatggggcgtcgagtacttgagcttgagggccttaagcttggcctccacatcgtctatagaagatggggttttgggtcggcgctccgaagatctctcgccctcggcgtcttcgtagttgtcttcctcttcggtttgataatcttcgtcttcttcttctgagtctgaaatttcgagatcctcgcgacgactgtgagaagcacccatctgagtttggtttgt

SEQ ID NO: 1395 - DNA, 3483 bp, Cannabis sativa
tagtttgaccttatactcagccacatcatgattaagcatcgcatttgtctccaacagctctcggccctccttttcggactgagcatatttactttgtatctcctcggcactgctttcaatactttgtagtttcaggagagtttcctcgagctctaactttttggtttcagcaaccgttgatgcttcacgagcctgttcttccaacaattttagctggacttctagctcacttagcttctgagacatttcactggcttccaaatctctctgactgaacttctgaatgacttcttgtaattgtgtttctgtttccttgaaacgagtttcagtagtagagtgaagctcaatggctcttgaatgctgatctgataattctgcaatagtacttttgtgagattcaagctgttgggcagctgtttctttctctgaaagagtagagttaaataattcctgaagttcgtcaatcttgcttttgagttgaacgttcgtttcaaccaatagttcactttctgaggaagattgagaaatttgtttttctgcttctaagatctgtttccttagttctgcattttcactctccaatgaagccagtttctttgaagtctgatctaattcttctgtcaaggaagcagattttccagctgtttcagcaatctgctcttggtaaaccttcacttgatcttcaaaaatattcagcttctcaaacagagattttacttcagtatccctgtctgtaaaatttgctattgcttcttgaattttaatctctgactcttttttcagggactcatgtagcctttcaagttcagcattcttttcagttgtttgctctattagtcttctttgttgctccagttgctcctctgcagatttgaccttctctgctatctcagtttctctcagtccgccggccttgaggctgttttcgacactctctaatttctcttgtgtcagactcaattcattcctcaagacttccactagattttctgcttcagcaaacttctcccttgtactacttgatgcttcttcaaactttttcttctcatccgtagctaaattcaaggattcaattaactcattttccttttgattggctgcttgcaatgcaatttcaagactttctgttcttacttgaaatgcctcaagttcagattgaagatcagctaccctgtcagaatatttctttgaatctgcttcggtattctgacactttttctccattgtgcttatctgttcttcaagttcctgaattctatacttttctgcttcaagtaacaactccaactcacttacttttttaccggcatcctccacttttgaatgagatgtctgatacaagtcttctagttcaatacttctttgatggttcatacttgctctgtcctcatgttcggaaccttttgccacggcaatcttcaactcctcctgaagctctaaattcttcgaagatgacatatttaaggcagattccagctcggctatcttgtcttgatattcttgcatttgactactcagctgtgtcttttcttcctcaacctctcgcaatgaagcatcgagttgcaatgctttttcagagaattctttcattcctctctcagcatcgttgctcttaagttctaccaagtttagctgttgttcaagctctgcattctttttttctgcttcaagaaaacgtgtttcaatctctctcagttgtgattttgcttcttctactgctgcatttgcagactggacaatatcctcaagctcaaggctcctttgagtagctgttgcagcagcagaacttgattcagtgtgaagatcttcaatagacttcagtttctgttcaagctctgcattgcttgacacagcttgagaaataagagtattggcttttgagatttcttcatctgattgcttaactcgctcctcaaaatctttacacaactcctttaagttctcttgactagctgtcaactcaaccacagaaataccaagatcattcttctcatcaagcacttgagccaattccttttgaatattagagacttgtgtttcatatgatttgactgaagattcaatcaactctttggcagccaattcctcttgcagcttcaatttagtttcttccagttcagaaactgttgtttgaagatgttcttttgtcgaagaagccaaattttcaagacctgaaatctcttccttcatctgagattccagagttcttttctgttccaactcctggctcatttcattgataactgcttcctttgaagaaagtctttgctccaagtccagcaattgcgatttcgaaagtgtcagctcctcatggacagtagaaagctctgctgctgttgacttcaatgcttcttcaaccttctcattttcagtgatctttccatacaagcccttgagttcctcttgcatagaagcgacctgatcttccacctcttttgcactcaatttcgacacttcaagcaatctctcaagctccaacactctctttgtctccgattcagcatgtaggccactttgcttgtgaagctcctcaaacttttgagcctcaccagctgaagtctgtagatcctgctccaactcctgcattctctttctagaactttcaagctcaaggttaataccatcaaatgcttctttaacctcaaccaactccttgtgcttattttcttgtccttggattgcttcttgtaacacattgagctgtgaactgtacttctcctcaacttcaacgatttgctcttgcaacttcctatgactgagctcaagctccacatacttgtgtccactttcttccagcttctccttcgtaacagaaacgtcattcttcagctgtgaattctcggactctgagtgcttcagtatgccagctaatctttcgatctcactctcgagttctctcaccttctcttgggcttctagtatttctctactggaattacttgagctcctttcaataacaatagatttttctactgcagaagatgtttcaacagtatgagaatcatccttgacatccagtgattccttctcaactttaatgaattcaccatcatccatactttcctcctcttctttcttcacttctttctctactgatttcaggtccccatttagtccctgcaaaatttgatcatattaatcaatattcaacttcctattaattttgataatatctttgtatcccccaattcacaatttcagatgatggattccaaattttgatttgaaggctttcagatagactacatcaacagatttagtattataacaactaaagagtggctgaagaattagcatgtgctcaccttaatagcgtcaacatttgcatcagcaccatcaacagactttgtcaccggaatttctgaactcactagtgtttcttcttccattttactgtgattatgattaaaattgtatgttatgaattaccaacaaataatgctgcacaaggaatatatacacatatgttggttgttggggggg

SEQ ID NO: 1396 - DNA, 3428 bp, Cannabis sativa
tagataagatcaaaaagaataacggtcgtagttaatccaaataaaaaaaaaaaaaatattgtaaaggggatgaccaattctctctttactgagagaaaatacgctaagttgtatcttgtaatcagaaaactcataaataagagtgacttgtggagtatgttgatttaactacaaaatcacgtaaaatttcatggtttttatagatatataataatttccttaaagtatttattagagaattataaattgtcaagaaccttgtttatgttaacgaaattctgatttaacattttggtgattttattgagaacttcttgaaaattaaactctaaaaaacacttgtccccctgaaaaagtttgctaaatattttcctaccatggaaattaattcacaaaataacaatgtcgaactagaagagacggtgcaccgccctggaaaagggcctcaggggactaacccccagaagagcgaaatgttggaagaggtcctactgaatgggactttgaaaggaatgaaaacgaataggaaattcaagggagaagagattgtggagcctatgaccctactcgttatgtctcgctggtagaactgaaaaattgacaacttcatcaaagattggtcaacgcgaaccgaagaaatgcagaattggaacgcgaggctgcaatggctaggatggctcaaggtggcgcaccaccgacaaaaattgatccacccataaggcatctacaagggaggcctcgtgggtctagtgcaaggaagaatgctgatgcccctgttgaagggaataatcaggaaaaccctacaaatccttaaaagcaacaaccagggaaattcttgtggacaagaaaatccctcaaaacctcaggaatgtgaatgtcagacaaacgtggcctgagacaccagaaccttctcacaggaatgagatgactccatgagaacaaaaatttggtcaaccgcataatcattctagtccaccgcgaggaccacaaaggactggtaagggtcgtatgtcaacctagaaaggagtcgcatgtcaaacttgtttgaacaacgacaacccaggcaagaagcccattctgagaggactcaatcaaacactgttgtgagtgaattgaggagaagccaaacacaaagccaatcctcacaatcttgaacaaaggaagttttatagcataagaggcgtaatacttgagatagtaatcgagatgcacatgccagtgtcagtgactttcaaagttatcaatctgaaagtatcttacatacgagattgatgagcaattatgatacaaggagagggcgacaccgagaacaacgtgatctaatcttttagaacattttaatcgtagataacatgatttacgtgaacatctgtatcgtaatactccaaaccttcacgagtcgttgaatataaacgttctagatttgcgtgagtagcagaataatcaaattccaaatgaccctcacagggtcatacaattggatgaaaaaattaggaaatatcaagatggtgaacatgggaagttgctcgaatatgaatctgacaaggaacctgaaccacaatccatccaaacataacaaaatcaattttttcaaaagcatccaaaaatctcccaagtcactccatacgatagaaccacagtccttgtcaggcacttgagtaatttaacaccatcgtgcgagccaaaaatgttggactcaactttagatgtatgctattcgctacctccttaataagagcaaccaagagtttgtttgaaaagtttactcgacgttctataacttcacgggaacaattatcacaagaattcaaaagatagtttaggttgcgagaactaggagacctaaagttccttcattgaaaaatgtgaaacaacaacctagggagtcattaaaagcattcttaagacgctttaccacaacaacaacaaagataaaaaatctgaataatagcattcagttaacttcctctcaggttgggatcacgataagaggtgagctttgggatgatttataaggtcgacctgttaggtcaatgaataattttaacgagaggacactcgtatacatatgaaaataagaagctcacttagaatttaaactactaaaggctagttctgagtcaacaaccagcttgagtaacgcaagcgcagacaagtcaaacgaaagtagtgagcccaatgggaaaaggaaggacgaatcaaaagattcaataaaagataaaaagaagcaaaataaacatgaaaagtatgtaccaataaactcagtttgcacaaagttaaacgagacccgagaaaatattttcattgcaaatgaaaatcgggtcgcatttcgaaggcctgatcctatgagaaatgcgaaaaataagcatgatccgaacaaatattgtccacttcataaagatataaggcacacaaccgaagaatgccatcaactcaaggacaaaatcgagagcttaatatcctgatgatatttttggcaatatgggaaaaatagggaaaataatcgcaatcaacccaataacgagaatcaaaaccaaaatatccaaccaccttcaaacgacgacaatgatatatttgtgaaattacttgggaccccatctgtccgggcacagatttcttatatctctgatggttgtaagacccatctctctgtataatctttgtccattatctcgttggacttttgaaactgaccttaatctattaattttgtactggaaatatcacgtgtctttcttccaaaaatatgaataacgattatgatttagcttaaaacccgttttatatttacaaatcaaattaaacaatgtattttctccctcaaaaaaaaaaaaataaaaaaatatgaactaaaacttttttattttttatttctacgtaaatatatttgaatcttagtacattatcataattattttgtttaaagtgaaataattttggcgggcagttgtggaaggtgaaagtgatcccaccaaattccattttccctccaaattataatttatttgtccttataaaaatctcactaccaaattcatacgttttgtttcacagcaccaaaaaaaatcaaaattatccttttgcttccttcaatcaaccgagtcactgagttggctcactgagtcacctccgcactagttactttattttcttttataataatcatttaatactttttgtatattaaagaaagcatattaggtgtgactataattggcctaagacttgtgatgagttatgattgcatgaggatggtactataataactattttgtgtacttgttgctttaattgacttttgacttttgttttctttgtgttaattgatttaatcaaaacttaaatttgttattaaatcaaattaattttgttggtgggtggtccttaattttttattatacttaaatttttaaaagtgtttttttttt

SEQ ID NO: 1397 - DNA, 1475 bp, Cannabis sativa
ttgaacatgccttcgatggaggaggaaaaatggaggcgaaaatcccagttgactggtgcttagatggagactctttgccaccaaaaagctcagcagtaaatgatgaagacgagttagcttgcttcttaccctccattgactttactaagcaaaactatctgcagagaaaaacccaattgaaataatctgataaagattttttcttttaactgtaaaaccggagctttaacccaactgaaataaacacacaatggagaaaaaagaaaagaaagattaagaaagagtgaggaaaaatatcacaaactcatgcaaaacttatagtaagaaaatctcttttatagaagaacggcactagtgagagagtgccgcccatgtgccaccatcagccaaatattatagaaataattattattttttttcgttaatattccttctctcctctttttgattaccaaaaaggagctgggaaatttccttcacactgtcctttacattctattctctgcatttttagcaatataatatcatgttaaccaaccatcatcatcgttttccacgacacgttaaacggataagtgccacgtgggatccacatgtcgtcccaagggacgaacactctagtgccacgtgtacccaaatggataatttccactctttcatagctaacgcatatatctctgctatgccatgttcattgctcctttctgattctttcatctttgtttttcaaaattatttaattcatagtcaagtgattgtctttactaaacaagttgaaaggtcatttattaattaatcacaaaaaaccaaaaattaatcttttcttctgatcccaccagttctaaattagataaggttgcatcttttccttccaatatagtggtggactccaatttcattggttgtcttcctttaaaattcaaaagaggaccatatactaatactacgtctctctcagctctctataaatatatatatatatatatgtatacagatatatgtgtatatataaagctaccaaaccatatcttcatagctcatatgtatgaaaagttggttgtatacgtatagaacatagagacaggacatgagaatttaaaactagtaaaaattgtcgacagaaaagaacaatttctgtgtcaatgtctttttgctgatatagtttttgataggatttttctttggattgtagtgaagaaagctctagagcaaaaaaaaaatcattttggtgaaaataattactggtttgaattgaattgatccatgaaatttaaaactttctgagccttagagactacagagctcgatcctttcagactatttgcagcacttcggtagatataatttgacttttggatatgagacaaaatacaattatttgttgtgtcgtgcattttgagaaatgaaaaattgtaaaagattctgttttctcatggattgtaacataaaaaattaagaatttcttttctagaaaa

SEQ ID NO: 1398 - DNA, 2531 bp, Cannabis sativa
  modified_base (1157)..(1157): a, c, t, g, unknown or other
tcattaaagaagtacagtagttttatgattcatcatcaatctatcctactttctgtcttgatagagttctaagacattatcatcttcgtaatgtttttctagtgacatgatagttttattcctttttatgaaacaaaattagagaaaatgagcacagctgattttagcagtaaaagttttttacatttgacttattttcttaatgcagttttgctatgaaacaaacatatttgtcaattagtgatgatttttactgactgtttgattctatatcttggaatctttaatagggatgactccacttctcggcaccgggttttggaggacaagttaatgcggcaaaaggcccagctgttgcttgatgaggctgcttcctggtccctcctgtggtatctttatggaaaaggaaataacctttacctttgtagatttatgttagaactgacatccttatgccatgtgcatgcattgacacacacacagaaacagaaatacacagacatgcatatacatgtaggcaaaaatatggcacgggcattgttcatttgccaatacagtaatatggctttcagtacttaacacttacgttgcttttgatgcccaccctcatcaagtgtcccatttttcaaaagaaaaacatataaatgcctatgtttattagtctacaaatggaaagtgtaatatgagcaagctatttttgggatgtctaaagtagaaatgtcatgtgaagttgtcagtttatatcatagctatgaattacggtatcaattatactaatttgatgtaaagcatctatgattgcttccattggtcaagctttgcatatttataattgttgtgaaattgttctttattatgacgatggattttgagagggtctcaagaaaatctcaggctataggtaactcatttgcacacaaacattgcctctagaccactatctgtatttgttttggttaattttggctgctgtgaatcacaaaatacgagctttgtacttttcatctaacagtgtttcttcttcttgcaggaactgaagatatccccagagatctcgtcctggtaatgcttaacacacacacaacacagcaaacccattgttttattggaagaatatttccagttttcttgttttttgttttcttcttcttcttctncttcttcttcttcttctttttagtgtgaaaatacttgaaaattgttgaataaattgctctaaattaaattcactattaacagttgcccccaacatcacatttggaggcttgtcagtttgtggcagaggaccatacagcacagttgtgcttgcggattgttcaatggttagaaggtttagcctccaatgcacttgactcagaatgcaaggttgtcatttttgctttacttttttgttcagtttaatctaatttttttttggtaaatgtaattatctatgcttatttttctttcattttgttggataccaacctatttcttcaccctcctgtatgcttgcagaaagatttattttgctggcacgtatctactaaataatctgataatctattgtgtaaatcttctgtcatataatttttgttacttcttaatgcggcccaatcatattattaatttccttcctcttgggcaaagattgccatgatagaagttttattatattactagagtttttgacttggaagtatatctataatttttgggtgcagggatcatatattggtacatatcttccaacttctggtatttggcgtcagacccaaaagtatcttaaaaaaggagtttccaattcaagcactatacatcacttagattttgatgctcctacacgagaacatgctcatcaactacctgatgacaaggtactctctaagttagataattttgcaatttggggccacaaggcaacatcaccatttgcctcaaacttttggtgtacatatgtgtatttctatatagtggttatttttcccttccattttcagtacacaaaactatgcaaattttgaaattagtttgattttcagcaatctatgacgtgtgctgaattattttgaacaacaccagtaggagtaggactagtattatcagtggttagtgaatgtgatgcttattttctcatttttacattgcggtagattgtgcaaatttggctcttttgcaatcttgtctggctcctttgctggaagtattggaaatgaaaattatatataggacactactgattcagaattattatattttatgtaagtatgacaaaacaaagtcatgattttatgtaagcaacataattgctggatgtttctctctaaccatcaaaagaataaaaaatgtatattttttttaataaaaagctcaattgtgtttttttttcttttcaaatcaaacacatcaaaggttcggaccaagaatctaatcgtgttaatggtacacatagtgaacatattatatggagtgaactgaaagagaccaaaagatatctggaacaaaattatatgaatgtaacttgtaagtttatttactgttgttgaaataat

SEQ ID NO: 1399 - DNA, 4219 bp, Cannabis sativa
tttttttttttttttctcactattttagtgtttaatcatcaacttaaaagtaaaataattaatttttgaattagtagattttcgtagattttcttcttttttcttcttcttcttcttctttcttcttcttcttcttgatttttttttttttttttgttgttgttcgtgagggctacagccccaccctaacacctaggtctgtcgtccctgaccacgttataaatcttcttttaaataaagaggaaagaaaaactaaattccttcaaaattactttttgacttttataaaaagataaaggattttaaagattttatatttagagtattgttattaagtattagtagtacctaacccttcttcaatatgttgcgttgtgattggttagtgatattctttaaaagttattacattaaattacataggacccgatacttaattgaaccaattaaaaatattaacacatagaaaaatgctagacaccacgagtctcttttaacatttcactattttaaaaacaccctaagaaattattacaagtaaatatatataatatgctataaaaaaataaaaaaaaaaagtaaatatatataatatttttatttgcatttgctgtgtaatttatagtcattttctacttttggttgcagcattttaggtggagcttttttgatcgtaggtctttacagcgttttgtggggaaaaagcatagagcaaaagaccaatagtgttgttgagaactgccagcaagctgataaaaaagaaggttcagaattgaaagaaatagtgttacaataagctttgcctagtgtttagcatatatagatacataatgtatttattttgaaggaatataatttcttgtggaaaaataacaaatatatatatagataaataaagctgagttgtggtaaaaaaattgtatgtaactacttttctactatttaaaaactacctttatagtatttaaatgtgtaagtaaattttttgatagtaacatttataatattagtttcttttttttttttttgctatcacaatattttttttaataactttttttttttttttaagaataagatctgtaacaatagataaaacaatgtagtataggttacaaagatctaacaagaatttgaaatacattattctagataacctctttataaattcgtaatgctaactgggcaaaattatgaaccaaaacaaatgagtttctaagaacaaattgaatggaaacaataggataaaacaaagaggactctatcttctgaaccagatctctgaacaagaatatttgtctctccatttgcttgtaatctttttaattaaaacttgacagtcagagacaatgatatcaagaggaaattgcactgccaagctataattaatagctctaagggggagattagtgatggttgaagagtaacatcctgcaataattgcaccttgatagtcttgaatcacagcttcgtagccatgcctacaactttaatctctgacagaagcatccacacttatactttccaggagaaggcaataaggtatctaggtttgatgaagcattggatccttcaccttgattggaatcagaattagagatgatcttgacttgagcttcaatataatcctgcaggtaagaagtaacataggattctatttttctgaaaagggcttttgagctgtaaagagagatttgttgcggtaattccaaattaatggtccacataataccgaaaaaatacaggcaaatcatccttatttaacaattcaaaccttcttaaaagaaattccttggtgtgacaacgtttattcttattgtaaaagctaaaaaacctagtgttctttaaacacttaccagctctggaacactcaaggagtgaatgagagttagagtcaatcttatgagcacaaagagagcaatagggattatcaagcaccttcttatagaaatgattgtgacttgaaggaagaaggtgattaaaggccttccaaaaaaaatgcttgatctttgggggaattttcaatgaccaaacagctgtccatcaaggtttaaggaggtttggattgaaagaactaggagaaaattgaagagagttttccaggtgataagctgaacaacggtaagaataccaaaaggatgatgtccccagatgagataatccttcttagtcgggtcaatagggactttaagcacagaattaaccacatcatcagtaaaaaaaatgagttataagcttacttaaatcccaacttccatcctccctgttaaagtaagagacaatattcataggaggagacgtgtcatttttgaaagagagaaatttatggcaaggaatccatttagggctaaggatctggatagactcgccatcccccactttcgagacaaaacccttacaaagaaggtccctagcccagagaagggttctccatgaaaaggaatgataatgacctaaagatgcacgaagaaagtcattgttttggaaatattgggctagctttatgtagataagcaacaagggaatcagagttagtaaaaatccaccaagcttgtttagcaagcatagcttagttatggtgagcaataactcgaaaatctagaccccaaaaaaattttgatttgcacaaaagagtctattttttccaatgaattctatactagttgtttctcataaacatccactagaaattagccataagcttttcaaagtgtttacaatatagataaaggaagcctagtaagacataacatatgaaggaataacttggataaccgctttaaggaaaatctctttaccaactctagagaaaagcttactgttccaaacaaataacttactgctagctttttgaagcagaaaaagacaggaatcttttttggaatgaagaggcactaaagaacacctaggtatttattaatgaaaggtttatattcatggcctaagacctgaagaaaagaggctttatcctaagagctagtattaggagaaaaccaacagaagacttagaaaagttgatagattagccagggctttattatagattctaaggatatcctgatgcccattaatagaagtgaaaagtaaagctatcatatgcaaaaagaagatggaaaatggaaagagtagaacgataaatagagatacccttgaaatcatttatatgagtttcagtatgaatgacagtatagagaccttcaactactagcagaaagaggtaaggagataaatgatcaccttgcttaatgcctctactagactcttaatacgatttttaaaattattcttattattactccaagtcctcatgaactgaatataaatgaacattgccattaacactactataagtagtccaactatctttaatgagtttggaaaagtcaggctccgtaagccaataattctcgaagaaaaatctattattatgaccattaatatggtgattagtattatagacaagcttaatagccttatgattcttaccaagaaagagagatgaaataaattggcagcaagaaacatgtcattccatgccttattaagaatactccagtcaagtctttcaagaacattaccatacttcaaagtcaaatgattatcgtcaaaaggtaagggagacaaattaaatttattaaaaaaaatttaaaaattatagatagcataagaaaggggaaaactagtactattatgatcattaaagcccaaataaacattaaaatcccttataattaaccaatggaaaatgggagcaacatgaaataagtgattcaataaaatccaagagttactttaactactaagataaggggaaccataaaaatacaataagtggtagattacataatcattaatagagacataaagttaatatgatacatagagtacgataagatattagcattaatatcatcatttcaaaaaagaaataaatcattccctaaactatttctaggaacctcaaaagcattatcaaaagacaatctagccttaaacatactactagaattagcagtcagcttggtccccattacaaaaattatttgaggttgatgttgcttaaccagaagggagtggttacggaatgcttagggactacctaacatacaagcattccagctgatgatgttcattttgcctaacgaggttgttgaacaacactcgactggtcatcagaatcagacaaagagcaaaccaaagaaaactcatagttggagct

SEQ ID NO: 1400 - DNA, 1530 bp, Cannabis sativa
ttgaagatgatattgattttgttgttgttgtagtagctgttctgttctttgataatgatattgttgctgttgaggtggtactactaatcttgatgcttctgctctttgatgatgaaattggtgactgctgctagtctttgaagatatctgtctagtactctttcactgttgttttcataatgttggtgcagttgaattagtgcttggtttggtgctactgctggttcaggtgcacgtgcttctgtgcgtgtggttgcagttgcttgttctattgcaggtgccagtgctcgtgcagccgctggcactcttgctaatgcagacgccaattcaagtgtttgaattggcgatgctgctgattcgggtgcttgtactaatccaacattattataatgatcagacaattaataaaacattatgattagatcaatgtatccatatataaatatatagtgtgatctcaccagttgagtaggaatattagcaggaattagtacttgtccaactccacccaccaaaaactatgaactttgattttggatcagacaatgaaacattcacagttatttcttcaccaccttccattgaacatgtcaaagatagaatctgaaacaaaccctgcaacaaaataattcattttatttatttataataacaaagaaatcaataataaaaaaaaaagataattgttgtcacatgcctggtgagcctcgacttgatcagagatattataaagaatgtttgcaaaagatactaagccataagcagaaagaatggtcaacgagtcaaaagtggaagccaatgttttaattttagtcacaatatcctacaaattaattaatacaaaaaaaaaataattacattgatgaaattataatttagaaaacaattaattaatgaaaccagattattacctcacccagatttacagttaccacttgaggacttaaaggtttcaaagctgtgtataaaatccacacaagaaaattaattaatatataaaagattaattaaagaagatataattattaggtgacaacttcttcttctattgctaattctttacctttagtacctttgtctttgggtaattgttcttcttcttccattggtttatctcttgaccaagaattcattatttcatcttcattaattctactactagaagaatccattttgattttcttggaatatattgttatcactacactcttttatatgtaatacttgtaaatctatttataatcctcggattgtatataatatatttatttatttttgttagtttgtggctagtgagttaatttagaaattaagtcaacttgttttcctggttgggactatttctcttttaattacctttttgtattgattagtcacaaataatatgataaaacagagtgagaaatatattagttctttctagtgatcatattaatttctgaaaatgttggtaaaattataaactatcgaaaagaaaaagagaacaaaaagaaaaaagaaatggtcttattaaggtcggcccagtgaatc

SEQ ID NO: 1401 - DNA, 1006 bp, Cannabis sativa
gattttacccttgctactagtcacctcgttgagatagaattgtttgtaacctatttttcttatatataatgatttttttttttaaaaaaaaaaatagaacttttaatttactcaattacttccaattcccttaaaatttgtttatataaatgagtgaagtgtgtgtatatacaacgattaaagtgagtgtaaaaattagaattacaaagtaattggccatcaaaagtgagctaaaatgataatgattggttgtctttagaggattaacatattgatgtaattagagacttaacatgccttattctttaaagggctaatcaattaatacataaaatacttaattaattttataaataaattatttcttagttaaatgtgagatagatgattacaaaataattttttattttttaaagcataataaaatattaatggattttgttgtacataaaaaataataaaataaaagatttaatttaatatttaatgaaaactaattatataatttatacagtggaagtccacaaacattctaacttttataattatagagattatagttaatatgtagtgatgtttgtgacttgttatttagatagtgttgttattcatgtcctcctagtcctagattgtgttagattatagggattgtttatagtaaggctcataataacatgtgtgtcctatattaattgtataattcattaattgtaacatgcatgtaatgtaatattctttacatgactatttattttaaaatgagggagttttagataatgatatgattgttaatttttatagataatatcaaattttattttcttattatctctttagccaatgttaatattaattagctaggttggtcttaattactttagaatttaattagataaatatcatatttaattagtttaattttattaaacttagaataattataaatattatacatatatacaaatcatttatatatcttgtaaaatatatttccttaaaaaaaaaa

SEQ ID NO: 1402 - DNA, 652 bp, Cannabis sativa
caaactggtattagagcttggttcttagaatcatggcagctgctaagtatgatgttgagaaatttaatggtttgaatgactttgggttattgaggatgagatgaaggtcatgctggtttattaggggttgtacgaggctctacttgggaaaaaatgcttgcctgagaatatgcctaaaaaggaaaagtgggagatgttagcaaaggctcataatgttataatcttgaatcttggtgataaggttttgagaaaaatttcaaaaaaacccctttgttgggatttggatgaaattggaagaattgtacatgaaaaaattgttggtgaacatgttgtacttgaagtaggctatttattcatctaagatgatggaggacaaatctgttgatgaacacatggataaattaaacaaaccgattcttgatcttgagaacattggtatcaccattgcgatgaagatcgggccttgttattgttgagttttttgccaaagccttttgggcattgcaaggatacaatggtgtatgaaagagaatccatttcacttgaaaatgtgcaattatctctgagttcaaatgaattgaatcggagaagtgaattaaggaacaatgggaatggaaaaggtttgtttaccaaaggaataagtgaaaagaga

SEQ ID NO: 1403 - DNA, 4517 bp, Cannabis sativa
aagagagaaaagaaggtaatttgttattgattaaagaaatattacaagaggagtttatatacagatacaactgaaccaaaacagagtcaaccaacaaataacagaaatacctaactaactaattgtcctaactaacctatatctgtaacagcccccttcaaactgggtgtgactttggacacaacacacagtttggttcgaaaattagagaacttggagcttgaaattggtttagtttggcagtcagcaacttaagctgtagcaggtacatgcttgacatgaatttgctgctgtagaaccttgtcacgaacaaagtatagatagatcaatttatttctatctatatgttttgtgcgtgcatgaagaacggggttagcagccagtggcacagtactttggttgtcacaccatacagaaggaatgacagtttgaggaatatgcaattcacgaagaagagattgtatccaagttacttcagcaactgtgcttgtgaggcttcgaaactctgcttcagaagatgatcaacttatggtggcttgcttttgagatttccaggcaacaagattgccaccaaagtagatacaatagcctgaggtagagcgtctatcatcgggatcagacgcccaatctgcatcacagaaggcatcaatggaaaaatccgaagtaggtttaagaagcaggccatgattgagagtgccaacaatgtatcttaggattctcttcacaactgtctagtgtgtatgcaagggattgtgcatgtattgacacactttattgacacaaaaagctagttctggtcttgtaattgtagcatactgcaatgcaacaacaatggacatgtataaagtggtatctttaacaggttcactcccataattggagagcttaaatccactgttcataggagtatgttgtgtgttgacattatgcatgttagcctttgtgagaagatcttgaagatactttgtttgagtgagtaaaatcccagcagaagtgtgagtgacctgactgcccaagaagtagtcaacagtactaagatctttgagagaaaatgtagaacttaaatcatgaatgagtttttctactaagttgttatcactacccatgatgagaatatcatcaacatatacaagaatgtagatgcaagattgagatgtgactctgatgaatagagattgatcagctttggaaaattaaaaaccatgctgaattagaactgcggacaacctctcaaaccaggcccttggtgcctgtttgagactatagagagccttgttgagcttacacgcataggttggataatctggatcaataaaccttagggttgttgcatatagatgtcttcctttaagtcaccattaaggatgacattgttcacatccaactgtcttatagcccaacctttggtaatagtcatagtaagaacaattcaaattgttattggcttcacaaaaggggtaaaagtttctgaaaaatcaaatccaacctattgatgaaatccctttgccactaatcttgctttacacttgttgaatgacccattagcattgtgttttatcctcatagcccacttgcagcctatacaagtttgattttcaggcaatggaacaagcacccaagtcttatttttcttcaaagctaccatctctgttgacattgcattaaaccagtggggctcctgtagagcagatttaacaaatttgggctcataaatggctaacagggcctttggttttctaatccctgctttgagttgagttgtcataggatgtgtggatgttgatgaaagtgaagcatctgcagataaactgttagtaatagtgggcataatattgacagcattgttggtagatgtcaaggatggattgacattgggagatagagtaacaggaacatcagtgagtgttgcagtggtattgtgcagactagaaagaatattagacataggggcaacaacctcatttttcctgactgacacaggttcaatagagacatgtgaaggttgagattgttcaaaaacacaggatcgtgtgcagctgagacaggaacagtttgactgttaagaggaatgacagttggtggtgttgggggattgttgacatttagaaaggaaaccaaagaaggaacaccagaagtggaatgaggaaaaggttcagtagaagaaggttaagtgctaggtttgggagaataagggaaagtgtgttcatcaaagacaacatctcttgagatatagagcctgttgtctttggacaggcacttgaaccctttgtgttccatactataacccaagaaattaaagggacaaacctatactgcaatttgtttttgttgtagggcctgagattgggatagcacaagcacccaaacaccttgagactagcatagtctgggacggttttgaacaacacctccagaggtgacgtgttcatgagtataggtgagggcattcaattaataagataggctgcagtcctaaatgactcatcccagtatttgagaggaaggttggcttgtgcaagaaaagtgagaccagtctcaacaacatgcctatgcttcctctcaacaaccccattctgttcatgggtgtgaggacatgctagtctatgaacaattccaaaactttcaaggaggttagtaaaggctctaaactcaccccccccaatttgattgtagtgtcttaattttatattccaactgtaactcaacttgagttttgaacttggtgaaagtaggcaaagcctcatctttagttctaagaaggtataacaaggtatacccagaatgagcatcaacaaagctgatgtaatatctgtagccatttactgaattgatgggtgcaggtcccataagtcagagtggagaagctgtagtggttcactataagtggtagtagagttagaaaaaggtgacttatgtgattttccaagacaacaagattggcaaacatcagaaacatttttattagacagagagatattacattttgagatagccatttttacaattttggcagcagtgtggccaagcctgctatgccataaggaaaaattagaaataaaactagacaaatgatgagtgtgacactaaggtgtaggctgtgatgcagggacagaggcagatggggatgaaagaatactcagctgacttgagtcaaatttgtacagtccattctcaaggttcccaaccaacaaagtcttctatgtagctcggtccttgacacaataaaagaaagggtgaaactcaaacataacattgttatcttgagcaaatttagacacactgagtaaattttttgttatggaaggcacatgaaaaagattattgagaattaattgttgagaagagaaaggagaatgggctatagacttaccaacgctttcaatattcaggccagcaccattaccaacaagaacttgttcattacctgcatatgaagtgcttgccccaagattggatgaatcaggtgtaagatgatgagaagcacctaactccgggtaccaattgtcatcttgaaccgtttctggtgtggtaaaggcagtaggcatctcagcaatgttggttgtgacaggaaagttggcaaaggactcaaggcctgtgaaagacttatcaaatcgataaaagcattgcttgaccaagtgaccaaatttgtgacacaattggcattgggccttttgattcatttcactgctacaaaaatgacattttgcgtcggtcaacgcgtctggtcaaagttgttgaccgacgcaaaagtcaacctttatctttttgcttcggttggtcaccgtcgcaaataataatgaatttgtgtcggtgatatctctgacactaaaaagtaaactgacactaaaaatgaactttctattttttaaaaaaattataaatttatccccaattcgtgagtcttccccattttgaaccaaagccattactctcttctctttctctaccctaatcccaaaccccatgaacggtgatcaaagcttgcctcaaaccccactgctcgcgccaaatgcactctgccctcttctctaagctcttgccattgacgcaccaccttactccgccccaatcgcatctcttttatctctctctgctccaaaccacaaaccccattgaagtcgaaaaaactctcctccgttgctcctccccctccccttctctcctccgttcaggccaagctctccccctaccattgtcatttttgtgcaggccaagttcgcacaaaattactctaacattgtcgttttcgttcaggtatatgtatatatatattttaaaattaaaaaacctagttgaaaaatattggattgaatcgagaaagtattctcattttcacgcttatttgaatcatttgagttctaatctctgtcgtgaagttcctaggttagaaatcatttgtttaactgatatgatagagtgatgtattcaccgagcatgatatttttgatctagttttgttgttaggtataatttttaatttatatgatcaaagatcaaatttggtattggtattgtca

SEQ ID NO: 1404 - DNA, 3288 bp, Cannabis sativa
tatatcgaacaataagctcaagatacaaactattaggaggctatagattgaaatctatgcaaatactgagctttaaatataattgaaattagagaaatgcgaaaagacagtactagtgatacatagcatttttctcagtgtttattattggtgcaattaagtatcgtattgcatataatttaaggtaataacttttagagaatatctctaaccgattgtaatgagaaagagatattattaccttaacaaagcaatcgtggaagtgcatacgaagtaaggcagcagtaatggaagagtctttggcaaatctttctttaacaacttgtttaataatgttaccaccattagggcaactacttttgtagaaattattaattaattgaccaaaaacacaacaaggactaataacaagaacaacaaagctcaaaatcactacacaattaatcttcatcatatatatatatttatgtataggctaataataagctatgtaattcatcaaatgttgtgagctcatgtatatatagtgaaagattttagggtttgaaaatggggtcaagtaaaaaaaaagtcaaagaaacaatacaaaatggctagctataataatattatatatagtattattattatggacacattcgaacgtggtttatgagaatatatataagtttggataaattcatgcatgtgatttcacttatttattaataattgttaggtacatatatgattaaaaaaattatttgaattattgaaattaattcatccaattcaaaatgaagtgaaaagatgctttctttttattttttttttaaaaaataataaaattgagaagaataattaagtgatcataatagtatttggatgttttgttaagttgtaatatatgtgctcaattatgttgtttggtttatataatataattatattaaattgtctattatacatatgaaatatttgtcatgatataattcataatatatccggccatggttttaacttttactccataaaaatatatatcattgaacctataatatatgtcaccttatgggaaatctgtaagaattaaaaaaacaattggaaaaaatatttactaaaatattcttttacccgtttagtacgtgcattgcattacattgtattgtattgtattatattgtattggattgtattgtgttagtattatttaatacaataatatatttcggatattgacttgtattaataaattctgtaaagttataatatatttttaatacactcgacctcaacaccgactacgagtagggtcctgggtctaggtctggagtttgggggtctgggtctagagtttgggatctgggtctagatttggttctgggtccggatccgactttgggttcggagtctgaattcggagtccagatctaaatctgggtttgactcaaattggttttggagtgtattttttgatagaataatgattgtgacactaattagttacatatattctattcacaataatatataataatgaatcatacaattaaaagtgatatgatttcacttaaaattatatatgacataagtaaataaatacagtcacaaaataataaaaatatattgttactgtttagtcacgatataattttttaaattttgacatatacattaatatcacttttaatcgctataaaaaaaattacatgaccctaaaaactattatttagatataaattatttctgatttaacttatttgttatactaaaaacacatttgattataataaattttaaattttgtgactaattaatacttttaacgcacgaatgctattatgaaattactcatactagtaaatattagtacatatagcataattttaaaatgcggcccaaaatctctcaattttctctttctcgtcatttggtttattaattaaaataacattataaaaaagagtaataattttttagtcacaacataaatttttgtgattaaatatgacttttagtcacaataaaaagtacatagtctatagatacaaattgtcactaatttagttttagtcacaattttttttatggggataattttaatcacaatttagttacaacaaaatattgtaatttttgtgactaataatgttagcaattatttttagttacaacatagatttttttatagtttaagtaaaacaagagtcattagtagtatatataaatggctcatttttatgtatagtaataatcatgttgttatcaatacaactcagttacatcaatgatacatttatttgttgtataaaacacaatatttttttggcaaaacacgaaaaagaaaaatagaagaccaaaatcaatgttaaacatttgaggagttctcttattttgagagcttaattggccgaaggagactaatattctcttcttagagcttagagagtggactttagtcttagactttatatacttattaattaatcaattagtcctttatgaacccttactcttgggagggttgaaagctccacacttcttcctaatctcaccagcttttcccacaagaacttcaattttgcccatcttaatcatagcatttgcgaaactttgagagaattggaaccgattcttagccaaagttgaaaccaatcgcgaagaagtagagtctgaagcaagttcttggtcaatctttagaacccctctcttcaaacgtatttgacggtagaactcgttatcgaaaacgttacttgtgttttgatccaaaaatgtctttgggttattgtttttcgcgcaaacacctctcaacttggacaccaacttaggatccatggtgggatcaggcttaccggtcccttgaaagtttgaaagtcggctagagaagaagttgcaatgagcgaatccaactgtgtgagcaccaagaagaaccaccatttcatttagggttagccctttcgctttgaaagattgaaaagctgatgtaacagactgacttggaccaggcaagttgacattattagggtttgagacaagtccgtctcttcttcctgttggaacagcatagtttggtccaccagcaagaactactgagtctcgagtggctacggtaataatgtcagcacatgagacttttgaagggcatgcagcttcaagccttctcttggcctcatcgattatctcataccctcgtacagtttggtttggtcctgctgttttttctgagggtcttttcgatgttgagttgattagtatggatgcatcacaaccctaaaaaaaacaaatgagtgaataatttaattaagcata

SEQ ID NO: 1405 - DNA, 2632 bp, Cannabis sativa
agagagagagagagagagttcaatgggagcttcaaaggcaagaaatgggatttcctcttttaattttcagaaatgaaacatatatttcattttactacatttcgatcaaatgatcattttgcccttagggctttaaaaatcaaaacaataagaagacaatggcataaaagtcattccaatcatatacaattccaattaaactcatatatcccatatcattattataatctcatacattcaatattttggactccgaatctagttcgagccaaaatacccgattatgactataccacactaacttgtcaaaatttacctgtaacacaataaagcaaacatactacataataatgtagtcaattatcacaaatataataaaataattattttactcctttcgggtcaaaattacaaaaatacccctaacacacatatgggatcttaaattcatatattctcaaataatatcatataattaattatattacaatataatcatacattagtatttaagtaaattaattaggattgctaattaatttttaaatttacggatattactaataaagtcatctctttatggactcaagcagtcccctagacagtggaacaagaggtttgatatatttatgaccaaacaaggctttaccagaagctactatgacacttatgtgtatttcaatgaaactaagattgaagatgtcatctacttcatgttttatgtagatgacatgctcatcacctgtaaggaaagagttaagattgatatcatgaaacaacttttaaacttagaatttgagatgaaggacctgggaacaattattaagatcttggaaatttctatcattagagacacatagaagagaatcataaagttgtgtcaagaagaatatataaagaagttgattgataaatttggtatgaaggaagctaagaggacaagctaacctatcactaatcaataagtttctaaaaaggattgccctacaaccaagacagagaaagagcagatgagtaaggtgccctattctaatattgtgggatcaataatgtacctaatggttagcactagaccaaacttaacttttgctataagtgttctaagcaggtatatggataatctaggcaaggtacactggttagccatgaaatggattttcaaatacttgattggaaccactaatactagattaatctacaaacagagcaagaatccaaccctagttaaaggattctgtgattcagactatggtggggatatggatactaggagaatcacttctacatattattttctagtaggggaaattgtgtgagtggaagagtacaattacaatctgttgttgcattctcaactactgaaagggtcatggataaactaaagctaactaaggaggtgcctacaatttttcagacaatcatagttccattcatatatggaagaatcttactttccatcatagaactaagcacatagagattaagtatcactttattcgagacaaagtgacacaaggagaggtgatagtagagaaagtccctactaaacacaacccagcagacatgggaaccaaagtcgtatccccgagcaagttaaaacactatatggacctgctagggattgataaagaaagttgaccttaagggtcagagagctaagaccctcaatgaagtacactatcatcgcttataaggacatttaggtggaattggttaaataaacatccttataagctcaagcatataagaaagacaattgaaaacagttatggactaagatcgactcaagcacaagttgctttcactactttacactctaacagaatctacaacaacctttaaaattcagttacactaatccagctcagttgtactgtcattaatcagaccatagagctataaaaccagaagaaaaaacccaaaaattatacgtgatataataaccatcttctccgagctagaagtaagtgagagagagtataatttgtagagagagcaggcgatccttgacattgttgaaacaagaggaagataagaaacggaaaagagagttagtactataaataaagttgtaaaagagtgagagaagcaaagattatcagccaatacttatctgtggctaggaatcttgagaatgaagactgcacctgatgtttgatgatagtggaatcgagtttcactgaggagagctcgaacaaggacgtagccctagcaattttgggtgaaccttgccaaaaatctctacgactacactctgtttgcatctcttactgaatctctttcatttttcttatattgaaatctcatattgtgtttgtgtgtgagatggaatctataaccctaatttttctcgctggtttttctcgcgtgtgtacgagagagatgaagtctcgaatgttttaatcaaacattcaagtttagcctagggttttcttaggttaacttggtattggattgggcggggtttgggttgttttactatttcttttagtggatgcattaaaagaacaaagatttgaaaaatactatactaactctaattttgcccatcctctttgtgttgagtggtttggtgtagaagttggtaaaatttcaacaataattcttggaaatatatataataataataata

SEQ ID NO: 1406 - DNA, 867 bp, Cannabis sativa
tgtcattgcataacttttttgagggtgtctttaaatcaaagtgctgtatctcacgcagagtaaatagcattggatctgataaaaaatagagaggaaaaagaaagaaaaaggggatcttaataaattattgtactagtatggtcttgaagactcaattatgtttgcaccagtccaaatcaaggacatgtacatacatataggaaatatatcaccaattggaacactaattagtgtgaaactaaagattttatagtttcaactaaagagagaaaaacatattaattttgttttttgtggtgtggtcatcatttgtacaaggcaatcaaggacggggtcgccctccagtctgttgtggggatgaccagttgattgtatcttaaccctttttctctgccaaatgtgtcttttagtattttggcctatagtttgggttctctcttttagagtaaaaactataaaattaccactccttcattttcttttgtacattttttttgtttttgttttgtcaaagattataatgtcaaggcaggcagctgatttttcaaaatttatttgctttttcatgctcttttgttttttgttttgtcaaaattaaactggagggcatccatataaattttgtttgtttgttttagtttttttgctttattaaaagaaggtagtataggaatgagagtagatatacaattatatcgatcgtcctatctcctaatcagtttttcttcataacttgcgttataagcctaggcagtggactgaaaaaagagaaaatctaagaaggcctgaagaacagcagcagcccaaggccacactaagaaggcttggcccacacttgagttagcttcttttttggatcatttacac

SEQ ID NO: 1407 - DNA, 1356 bp, Cannabis sativa
aaccgaaacagaatactcgactggttcaccgatttccttaaacaaaacccaaacaacaccgtgctcttgaaacgccccttcaatcaagtcaccattgaaaccgccaacccttcaaacatggagcactttgccaagaccaatttcgagaattaccccaaaggcgattatatcttatcactcttcggcgaattactcggcggagggatattcaactccgaccacgaacgctggaaggttcagcgaaaggcagtgagtcacgagttcagcactaagtcattgagaaactttgtcgttgaaagcgtcgtcttcgaaatcgaaactagattacttccgattctccaaaaggcttccgaaacaggggagattatagatttacaagacgttttggagagattcgcttttgataatatctgcaaattagctttcgatgtcgatcccggttgtctctccgccgtcgccggtgacggtggtggttccggcgatgaactgatgaaagcttttgcagaagccgtcgaaatcagctccaataggttcatggatttgatcccttttatatggaagatcaagagatttctgaacgttggatcagaaaaacgtctgaaacaattaatctcaaccgttcataaattcgcagatgagattataaaatcaagaaaagaagagaaaaacactaaaggagacttactgtcgcggtttatcgaagacgacgagttaaactcgcccgagtttttacgagatatcgtgactaacatgattctcgctggacgagataccacgtcagcagctctatcctggttcttctggctcatctcgtcaagaccaaaaatccaaaataatatattagaagaaatcaagtcaatccgagatcgaaccaccgacgattcaaatttcagaaacacttacagttttgatgaaattagagatatgcaatacttacacgcggcgataacggagagtatgagactgtacccacctttgccggtggattcgagagtgtgtaaaaacgacgacgtttggccagatggaactttggttaagaagggtagtttggtgtcgtttcatccgtacgcgatggggagaatggagagtatatggggtgagaattgctacgagtttcagccggagaggtggatggtcgacggagtatttcggccggagaatccatacaggtatcccgtgtttcatggaggtccgagaatgtgtctgggtaaggatatggcttatattcagatgaagtcgattgcagcttctgtgcttgggaggtttgaggtggacgtattggataaagacacgtgtcctgagcatttgcttgttgtgacttttagaatgaaaggcggtttacctgtgaggattagg

SEQ ID NO: 1408 - DNA, 2423 bp, Cannabis sativa
acagcctgctatatagtaaatacagggaatgtgctgctatgttgctctttatactttcacactctttttcttctttatattttggctttaatgaaccaggcggtgacaagtttatttcaatgtagttgctgtcaatttaaatctaatagaaaaaaagaacattgaaaaatattgtaacaaagctcaaaactatggttagtaacttaggccaagttgaagtccaagggcagcatgaacaagaaacagagtcatgatcccactccctaaaattccatgaacatttcgtaatccaggatttccctgcacaaaattagagtaaaaaacaaagaagtgtgaagaaaaaatgaaaaatatcggtggtcgtactcatatttgacaagggtaaaactatcacacagtagaaagtacctcaaataatgtaggtaatatggtttgaatagcaaggagagacaggccaattaaaccagtaacagcatgtggactgcaaacaataagatgagctatgatgtgttaggattataaatatatgaatgaaaagggatttagttttatagtttaatgtgatcattctcttggttgttctataaatggttaatattattttgtaaaagttattaattaaacctttgataaatgggatcttctatttcttaaaatcgtacaaaatagtgttttgtgtttagttttggataatttttttttaatataattaactttaagacaattttaatacgaacggatgttgaacatgtatctgattttgtaactctatatcgaattatcagtaaattttatttcaataaaaaatcagttcaaagtactattttataccattttaaaaaatacagaatccaaatcgtcattttacttaacagatggtccattcattaacttttacaaaacacatctatttacccttttgtaaatgatgattctaggtcttttacttggtgattctgaactgaataaaaattaggacactctttctatgtaactaataactttcactagatatatgatatgtgtacaagttaaatctaaattcaaccacacaaaaatgtgattttggctaagtgggggtgttatgctataacagcaattacctctccaagatgggtttgtctgaagtgagaagagatgttactccaccagttgctccaagagcaaagaagaaaaacatcccagccaaaagctttggatgcaaatctttggcctttgctttttcttcctaaaaattaaattatcataacaaatcatttattaataagtccaaggccattgttacccatatagttcgatgttaaagtagattacattagtgttctttatttctcttaccaaatcatcagagaaacgtattctgaagcccaaataggttccatagccacccatggcaaacagcacaactgcctgtttaatgaagcaaatggttcctaataacattacattacagtgaaaccatgatattaatggtgaaaaagagcattgcaaattaccatatttccaggatgaccccagtgaacaagccagtctggaagattccatgactttactagctcaacaaaaggtccaaatacagaccttaaagccccagctgttatccaaattcacattataaatgtaaatactaaatatttatacattaaaaaatcatacatgaattgagagactaaaaagaaagaatacctccaggtaaagcagccacaaacaagagaggcaaaggactaaaagaatacaaaagggtctcatgggtgtcattgagctcttccatttcttctccattatccttattagaatcaagtacaacctcacaaagtgtgtcgtttttgactaatagaggggaaagaagaggtcttctccttgtcgtttcaattacatgagagtccaatttaagacaggtggcggaggaggggttggcatggtttctggagaaaagtgagagcttgggaagatggagagaatgctgatgaagaagagcagtagtagaagcagtcacaaccatagccatttttgattgagctcacaaaaagtaatagataataagagaagtgaaagagagttgattgaattgaagatagagtaggctaggcttaaaggagtgggaatggcaaagaaagagacacgacaatatttttcagggttgaattactcgaaaactagggaagaaatgtgtttgatgtggtatcttctattaaggattcttgtccacgtgttctcaacacgaacccaaagacagccactagctattgttgtagtagcttttgctgaaaagttcactatgattgtcaattggtcacctttttaaaaagaaatttgtcgtatttgtcacgcccattctaatttctaatgaaagatatttgacaatcattaggccacgataatcgctattagattacatttttcagtaggccacctccaacgct

SEQ ID NO: 1409 - DNA, 2147 bp, Cannabis sativa
ggtcatgtatcgatcagactattgtggctgagatcaaccatgctataggagccaagggagtagtcagcacagaatgcaagttagttgtttcacaatatggagacatcatatggaatctactgatctctggggtgtgtatttcttgcttcttcaaatctttaaacttcatttaggcatatcaaaagattggcctaattcaatcataccctgatttgcaggtacgacctgataaagtttgtgctcagcttggtttgtgcttgttcaatggggctgagtatgtaaggtctgaaagtttctcattgcaaataatcttccgatgaagtttcattatattttctcataatgattgttatttttctctcaactcacttaaatgattgtaagtgacaagttaactgctgtggtgtgcagtaccgggatcgaaacaatggttgataaggagaatagggaggagggagtttcagcaaaagatcctgctttatgcacagtttgtgagatggctgttatttgggctcaaaatcagctaaaacagaagggaaccaaagaaaaagtgatccactacattaatgaggtaaaaggacttacttcaagactatgactactgcaattaaggcttctgatatgtactcaaagttgttgaataatataagattttgtatctttgatatcaacagctttgtgagagcttgccaagcccagctggggaatcagtaattaactgcaacagcatttcaaacatgcctaacattacattcacaataggaggaaaatctttccctatcactcctgaacaggttagtctactaagtcaaagctcaaaagaaaagacatgattttttaatatggggttacccttaaactactaaaggagtgactcatttcaattgttttggttttttcagtacattttgaagactggagaaggcatttcttcagtctgcatcagtgggttttcagcttttgatgtgcctcccccaactggtccactatggtattaatcatctttcttcaccccattttccaaataatgtttatgtgttttttttttatatataattatatgatttgtgttgcaggattcttggagatgtatttatgggagtgtatcacacagtgtttgactatggtgatctcaaagtgggttttgctgaagctgtttagcactatggtggtgatttctgggagctgctgcttctttttttttttatctcttttactatatcatttggagactcatatgttctgaggatcatcatcatgtaaatttttattttaataaacttataccatgtcttagaaaataaaaatgggcacctggagacatgttaaaagttataattacagttctacgtttaactttatttttaccctgaaggaaaaacgaataacaaacattcaccaggaacaatcccagtatgttaagaattttctacaaagcccaaatcatgagaatttcaactatacaatgtagccattagataataatagactgagcgtatttacttttataagatataacataggtaataaggtagaattttaaggtcctatgtcagtaaatttcatgatgactttccacatatttctaggaaattttcttaatctgtttgtgttggttttagacctaaaagtaaaaattaagcacctaatccaacttgtttcaaaatattttaattaaaatcaaggcctattttactctttatacaaaaaaaatcaaaactttaaaacacagaactcaaaggagtaatgttgtgaaatacaaaatctaaaaaaaaaaaaaactataatgttgccaacagtaattagatgttatttatttaagaaactttaacctgaatgcagtgtggcaattatatgcttatgttcagcacctgacctgagtgagagcttatgcttatgcatgatatgcttatattatcaatgcttgaaaagaaacaataaaaataaaacacaacaaagctacttccattccacaaaatacatatataaatataacaccctggttctgaacaaaaattattcaaaataatacaatccaagattaaaggacaaacaactgctgacataattttcataattttggcatacactgagcataaagtacaagccagtttagccaaagcgatacccagttgcaaaggccactc

SEQ ID NO: 1410 - DNA, 1760 bp, Cannabis sativa
ttttttcgctgatgatagtcttgttctttgtcgggctaataggagatctgccatggccattaaacgttcactagattgctactgccgagcctctggtcaatgcctcaatgaagataagtttgtgctttccttttctcccaatactctgcctgctatccaacacaactttcaggaaatattacatatggttattaaaccttgtcatgagagatacttggggttaccatcttattcaggtagggataagaaaatcttatttggtgaaattaagaagaaattatggaatttactctcagcttggcaagaatctctactttctattggtggtaaagagatcttactcaaagcagttgctcaagcgatttcgacatatgctatgagttgttttagattatcaaaatcgcttatcaactaaatagagatcatgtgcaataaattttggtggggatccaattcttcttcctcgggcattaactggaaaacatggaaagctcttactcaatcaaaagtcgaatggggaatgtgatttaaaagctttgttcatttcaatcaatcacttctagctaagcaagcttggatgattttttccaacactaatcctcttctcagccgaatcctaaaaccaagatacttcaagaattcctcatttctggatgccgatctgggttcctacccttctctaacttggagaggaatcatttggggaaaagagttgttgttgaagggcctacgttaggaagttggaaatggcattgatattaagtgtgctacggacccttggttgccaaggtctacttattttaaacctttggtttttagaggccatgaccgaaccatgacagttgcacaacttctcctggacaataggcaatggaatcctgagttgcttcagaccctatttttaaactcagatgtcatcaagattcaaagtctgcctttaactctttttgaacaacaagataaattgatctagcatcatgaatcaaatggcctctactcagtcaaatctagttacaatttagcaacatcacttgaagagcagcagcctactgctgcaatctcagctgtggtggaagaagttttgggcgttgaagctcccatctaaagttcgtatcttcttgtggcgtgctatccatgactgtctccctgttgctaacactctccatactcgacacattactgattcggaaagctgttctctatgcagccatggtgcagaaacggttactcacgctttgttcttctacaaactagctaaacagttgtggaaatcgactgactttgctatccaagaacttctcacaaacaacatgaatcataaataattccttcttcatgtgtcctctacttggtcatcattcagacttgagcaatttgcgactatactttggagtatttggacagaaagaaacaaagaacgacatggcacaaaaccaaaatcacatgaggtaattctttaccatgaattgtcgtatttggatgagtataaagctgctcaaacaacttcacctgctgttaactctgcaacaagtacatcttcttactctgctttcaaccgagatgctccttggttaaaccctcttcaggccggctgaagttgagcactgatgcagctgttaatgctactttgaagacttctagttttggagctgttcttcgggatagtaatggtaaaattgtggctgctatggccattccttatcgcgggttcttctctccacatgtgatggaagccttggcttgttggaaattattttacc

SEQ ID NO: 1411 - DNA, 2136 bp, Cannabis sativa
tttaagataaaagagtaagcaatttgaaccgactaccataaaaaataaaaggaagtggaagatctgactcaaagctaggttcatagtaacacgtaccttcgccggtctctgtaggagctcggatctgcgagtctgtgatcgtaggggttcatcgctttagggttttggctctgctagggtttcagaaacctttatatattttctttatttctttctctttcagcaagcaagttctacaaaaaaatttcttaatccccaattacgtaatcttatatgtaactagaaacaatgaaaatatatattacgaagaattgaagttaaatcgtattaaagataggtattttttggtgtgtttggttggccggaaaatagtttcccggctggagagaaacgagaaaaagaaaaagaaaaagaaaactaaagggaaggaaggctgttttttgcccgcgcatttggtgcttactgctactttactgttaatgggcctcgtacataagtcggttgcccaggtccggcccactcatcttcagtccagtccagatccttttgtcaaaatgacactgtctacattcggattggactacaaatttggtcacattaccacgtgtgttttagtagggtttatgaactagaaaaacccaatgcaaaccgaaaaacatgccaatttttttggaattatttcaaaaaatacataaaaataacaaaagaattacaaaaatacgattgtacgaaattttcaatatttttacggttttttagatttcatttatataaaatacgatcttttgatgtatttttgtgttgtactcttattattttgttattgtttttttttttgttatttgtatattattttttttaatgttgtttagatgttgttttcttgttatttttatgtagttttcttgttatttttataaacactgtaaaaaaattcgtaaaacagtaaatttttttattgaaaatattagtttatgtaaatttcccaatttttttacaaagacgaaatctgttcaaactaaaaaggaaaattgggagcaatagaggtgctccattctcttggaaaaacttggctagaccacttagcactcttagctaaaccatcaactaaatcattaaaacaacgactaacatacaccaaacgacaagttttaaagtacttaatcaaatttaaaacttttaaaaacaagttccaaaatctccaatcaggtggacatctagagttgttgagagccttcaccaccactttagcatccgaaaagagggttacttcttccatcatctcattctttgcccaaagaagagcttgaaaaatagtgtgagtctctgcttccatggtcgaggtcgtgttactcttaagcagcttaattgcccaatgaccgttatttctatcaataaagactgctgcaagaccagcaactctcttggaccatgagacatctgttatcaagaaaggcttaacaagattgatattaataacagttctaccattttctaaactcacaacaattgttgactccaaaaatttgagagaactcttagaacttagaatagaccctgttaataatgtcttttattatatcaaccttacatgataatcttaattggtttcattgaaactagatttcattaaaagcacaagatgcaaaatttagaaccttaattttcttcttaccactcaagccttctaaaatggcttcaaggaattcacacatgctataacctgggaattggtgtagaagataaggatatgaacctgagaaccaaagagccctaaccaaagaacattctttgaagatgcgtaaacaagtctcttcgacagcctcacagaagaaacactatttgttatttaagaaaggaagctttgacttcgacttgctagggataatctcattgattgagcaccaaagcatcatagccatacaaggatgaaaaccaggctttcaaatccatttctatttatccttaacctctttaaaacgatggttttggtctaagacatatgcattcttgacagaaaacggcccatttccattatttttctagataatgcagtcttttgaagataacagtgaggaatttcaagaattttgtttccatttttccccaaagactcttttgacaacatcttcattc

SEQ ID NO: 1412 - DNA, 4350 bp, Cannabis sativa
ggtagtttggctgcctcgttcccgaaattaggttgcacataagctctcaaagtgggtgtttagacatttttttttctggttttattgcaatagaggagtttgtccctcttgtgaccaattgaactggtttgtgttctggttttgttgttttaattgagtttttctccagcaaaaaaaagtgtttagtccagccacacaactattttagaaaatcatatcagaaaaaatctttaatgaaagctatttacgctaggactgaacattttgagcgggttcgacccgaacccgagcaacccgcccgaagccgaaccagtgaacccgtaaatttttttttaaaaaaaaagttttgggcgggtcgagttcaagccggtacccttcgggcgggttcgcgggttgagattttaagggtaccgggtttcgggttgaacccgagaacccgcccgccaacccggtacataaatatattatatatatatatattttttattgtagtttatatatatatatatattaaattattaattaaaaaaataaaaaaccctaaatcatttacatttcattagcccctaaaaactcatttcagcagcctctagtccacaccagacctcacgaacacgaacgagcctcccaccccatacccaacccaccacaccagccaccagcgtctagcaacagacctcacccacgccacggcggacgacgacccagggatgggatcgacgacgacctcggctcctcctcgtccttactccaggatcggtagctcctcctcctccacgactctgtccgctcgagtcgcccacagcccacgtcgtcgcaccactccgtcagtccgtcgtcgcccacagccccaccacacaccaccatggcaccacgataatctatctctctcagcttattattttttttttttataaaattattttctgttaaataatataaattaaatttatttttatgcataattttttattaaaaatttatatatattatataaaataatttatattaaaaaaaatataataattttttaataatatataaattttattttaatttattgttatttttattagttttgaatgaaaaattaatgttttttaaagagttgatcgagttgactgggtcaactcgctaaaccagtcaaccccgccaaccaaaacccgccaacccatgccatatttgggtccaggttctgtttcatttctttgaacccgaaatctgcgaactcaaaacccggtaaacccgcctgatgttcagccctaatttaaactttaaactgctttggatgaaaatttgatctatcatttaaattcttttctttctctttctacttttactttatgttaatttcatgtttatggatttttttgattataaacaatattttatttagagtttttgactgaatcttaaattttattatgaatttatacttttctttttctatttcttactgtgcaatatgaactgaaaaataagattttgatgttaaacaaaagtatcaaatttgtatatgtaatttaagattgagttcattgcttgatttgttgtttttatttattttgcaatttgttattttaattttttaaaatttcaattttgattatcaaataaaaataaaatagactattgatacttgagaatggtaatcggtcttttccaaaataaaccatataagcgaataattatggttacttagctataattattgcaacaccaacaagtgatggtgataagagccgacatagtaatataaaagatttaaaagtatccacagcttaagacgaaaacatgtaaaaagaacaccaagcaaaagatcaaatacaaaagaaaactgataaataagaaatagtaaaaaagaaatgcacatatgatatatctcttgtactctggctttggttgagcccctaaagagacagttttaacaaaatattaatatctacgttctcggttcttccctccactctctttgatccgaacaagaaaacccaaaaaaaggtcacatcttgcagagtagatttatttccactcgccatgtgcagggttgtttcaggaatcccatcaatgctacaaaagtacatagatttttaagtgttgataggtataaatgaactagtcaaataacccaaaaagattttaacttttaaaataaagaagccagaacttacctcgggatcagcgggtttggattcttcacctttgaagttctcttcacctgcatgagtgtatatttaaacaaaagctttgcaatcaaaattctgttctaacttctaaaatacactatacctccatcttcaggtaaatcagaagtccaaagagtaaggttgtctctcaacaactgcatgatgagagtgctgtctttgtatgactcttcactcaaagtatccaactctgcaattgcctcatcaaatgcttgtttagccaaatggcaggccctggaagtttaagaatcaacatcagatctacaagtactagcatgaaattggtctaacaagacttgagaagataagaataggattaagctatacctctcgggtgaattcataatctcatagtagaaaacagagaaattgagagccagaccaagacggatagggtgggttgatgggagatctgtatttgcagtgtttgatgcagcctaacaaaattatgttatgacaagaaaaggactgttagagattgaagaatcaaaacaacgaataagctcatttgccattaaattaaaaaattctctaaatcttagaagggctgttaaaacatgcctcgtatcccttcaatgattgctcagctgcctctttccggtcctggtcagtcttgaactcagcaagataacgataatagtcacctttcctgaattgggcaaaccaaaaaacataatagtttattataaccactaaaaaagaaaaaaagagagctaagttgtcacgtcagatctaagtacatgtgtttttatccaaatctctagaggatattaattattaatcagaaggaacaaaaagaaaatttcacccatcacatggacaccaattaaaaggaaaaaggtaactcatatacagacaactattccacagtaacatatattttggaatactaaatacataccaaaaaaagtataatagatggagaataatctctaggaaaggtaattttttttaaaaaaaaaaggaatgcagtttcaaggcaacatgactcacatcttgtagtagaaaacagtggcttctccagaggcagaagaggggatcagatgctcatctatgatagtcagaatgtcactgcaaatcttagaaagctcatcctctaccttctggcggtattccttaatcagtttgacattgttctcattccccttcgattcttccttttgttcaattgaagacataatgcgccaagacgcccgtctagcgcctatgacatttttgtatcccacagagagaaggttcctctcctccacagtcaattcaacatcaagttttgcaagtttcttcatacactcaaccatttctgagacaccatttcaaaactactaattttaaaagatgcccactttataatattaatggattgtgaaaacatataacattgctcttctccagattaaaaatatgaatcacataacttcatcagaagataaatgctgcatactagttaaacacaaggtaataaaaaaataataagtttgctcaaattgcattacccaaatatttgctactgcaataaacctggattattatcccaatgcaaaaacataataacatgctgccaatcaaagcaccaactagaaagtagaaagcaagccacttgatccacctctctaaaaaaagagcatttttccaaatctattgttcatttatattacacaaacaaaattacataatccgtgaatttcctaatgacccaaatctccaaaaaaaaataaataaataagaagaaattaagatcatattccattagatgaatcgcaatacagatgatccaagcatcaacatatctaggacgagagatcgatccaaagcaatacagcccagacgagtcaaaatacatacacccaaatttcacattttcacaaacacaagatcccaacacactacactaggtgcaaattttaagagaaaataagggacaagaatgcaaagcgagataccttcgtaacgctcggcctgctcggcgagcttggccaagtacacctgagtttctctctccttctcggccgacgacattgtttttggtttcagggattttatttctctcttttcttttcaaaaaagccacaaacttggtcaaaacttacagagttttagggttcctctcctttcttgcttatgtatatatgtaacttttttttttttt

SEQ ID NO: 1413 - DNA, 1934 bp, Cannabis sativa
cccagaccacttacaagtctcagaattcgatcactatttttcttcttcaaataatttatttaggattgttttaggcacaattgcaatcttctgatcttcgattttgtttgtgggtgtaatggagaatagtttgggtcttcttaaaattcacgtacagaggggtgtaaaccttgctatcagagactccgcaaccagtgacccatatgttgttctcaagctgggaaagcaggtaatatttgggactctcaatttgggcgttctcaattttgtgctgtgtctttttgctgtaaattgtaattctagtgtagaaatgtgttgaatggttttgttttcctggcttttattatgatctcacgaagatttatatttgtttttgaatcctcagtgttccaggtaagttctaataagtgcatctcttttacttcttcttctgtttattttttcagcagattagaaatcattgagaaaagtggatgattaatatataaatatatatttatatataaatgaatattgcgtgatataggtactaatggttttctttttatttaaaatcctttgaaataatctgaccgcagaaggtgaagacttgtgtggtaaagaaaaatgtgaacccggaatggaatgatcttctcactctgttagtttcagatccaaatactccagtcaagctggtaacaataatgataacttaaaatctcaagtcccattttcagtttttttccatgtgaatgctgatacaaatttttgtccattcctttggatcagtgtgtatatgacaaagacaccttcagctttgatgacaaaatgggtgatgcagagtttgaaataggtccatatattaaggccttaaagatgggcttaaagggcctcccaaatggaaccataatcacaaaagtccagccgaacaggcagaactgcctagctgaagagagccgaatttacttcaacaatggcaaagttgttcaggatatggttctgagactgaggaatgtagagtgtggtgaagttgaacttcaactgcagtgggttaatatctaaaattcatatgattcctaaagtgattgcatgtgggcatgtcatagataattaattaattactgtgtcccttctttttatctgtggttctgtaaaagctagaagacatatatattaggtagtatcctcccatgtaaatttgttattctgagtgggatgtgagaaaaccgagttaagtactgctttataattagcccttgcaatctagttattatttccatacaagataatagtctggtcttacatggtcattgtttgttatatgttctcttgcatattttatggctgaggactatataataatactcatcaaaggtaccgaaatgggacaacttatcttcacttcttgcaattcagacatttgtgtaattgtgttaatactagacaagacaaagttcgcttttgaaaactttcatgaggttattcatccaaaaatttatcaattgtcacaatttacccatctagctctcagtaatttgtaagcaagtgcgtaaataatgagtagaggattattttatttatttatttattttatgaagacagggatttgtgtccgaagagcgtacaaattgttagtttgtgtgacagttaatacagttatgatactgatagtatagtttagtagagttagtgtcctctggtcattttatgtcatgagcattgagccttggtgtcgattatgttagttagcttattaataggccctttgtaatcattcttcggcagccttgtactaaaacactttttagtgtaatacaatttaattcagaaccgaaaagcttccattgttttctctcgagtaaatttctatgattgtgtgatctaactgaacttaagttgaatgtgtatactagattgaaagacggcatcaacattaacaagtggtatcggagctc

SEQ ID NO: 1414 - DNA, 812 bp, Cannabis sativa
aagaagaagaagaaatttaaataatatgctgaaactgtgtagaaaagttaggttggttgagtgtgatggaagtacaatgatatcagcattaagagaattatgtgtggaagtgatatattggtaaataaaacaaaatatagggtataaagttatcttatccttatgaagataaatgtgtaataaaagttaagttatatattttttatttaaacatttcttaattgtttgatataaattataattttaccaaaaaaaaattaatatatatcaaattatatagagaaatttttataattatatatgtaattaaaaaataattaactaatataccgttcatcaattaaaaatttctaattaaatttttttaatttttgtatacaagcattagtattctatcgcgtatatcaaaaaagatatgtcaattttgttgtcgttagtgttagactcaagtgctatttttacttttttttttctcctctttatgtgtgaataatctttttttattataattttttccatttatctctatttcatatttttataattttaaaaaagaataacaactacactattaatcgttttgattaaaaaataataccactgcaagttactcttcaagttgatcattttaagatgtgtgaaacatatatttatttatcgtcaccaaataagatatttgaaatcaaaagtaacattttttttaagaatttttttttaaaaaaatctcaaataaaatgtaatatgtaccatactaaaattatttaatttattgtgactaatagtctctgtgatgatccccccccccccccccc

SEQ ID NO: 1415 - DNA, 4283 bp, Cannabis sativa
aaaccctcacttatggcagaagaagaccatggttacaaaaagctccaaagctgaacaaacaacagcagactacataaacaagcataatgttattacaataaagatttccactctctgcataaatctaagaaagacaattcctcaaagtgtttggttttgtataccaagttgcggtccaaaatttcactttttcccatatatctgatgtcgaactttcaatcccttcaaagatcctatcattactttccaaccaaacagcccgaacaatcgccaagatcgctgttctccacaattttgtgcttggtttgccactgcatagttcgctaactatcaatagtgttatgaagcctgaaataacccattttaactcaaattccttcagaaaattcaaccatagctgcctaacgaaggaacattccaaaaaaagatgtctcacatcctccccactgcctttacaacaaatgcaccagccaggtgaaatataaagaaaaggtttccttttctgtagcttgtcatggacgttcactttgccaagtgaaaccagccacccaaaagctttgactttcgacggaacggaacgcaacttttccataagctcttcgtccagaacaaccctccaagagacgggttcgacataaaccagcagaaggctgatttacaagggaataaccctgatagatcaggcttcgaaattcgactatcatctgcagtgttaagtactcttatatgttccaacttttgcatatgcaaagtgatacttggaacttcccactcaagcaaattccttctaaatttcaagtcccagctttctacccaaccacctggcaaaccctcatcgactataagctcccttatgcttccattcctagccttggaatcagtgctaattcaggaaactcaatactcagagaagaatcacctatccacacatcttcccagcttttttaatttttttaaacagggaaaggtttttattgttgtatgcttatttgtatttttagtaattatttgtcccaagcattacagtttctgtattaatagaggaccaaacctacagcaaggggtcatgctactctttcatgtgacaaacaatttgtccaaaaagctacttttagaaatcactacatctaaaatgaaaagttcatcaacttagttatattctccatccactcaataacataaattgcattccaaaaatgtatctctgctccatttgttttcttactcgacagataacccaacagtctaatgctatatcaaccttacaagctgacctgagcttcatatgttaatcttccagagcttttttcatctaaagtcctatatcaatggttctatacaatagttgagccactcagaattctgttataaattagttaatcttattttaacctagcacggattggtgaaatatttgccttacttattctcttgttgtgtcatttaaattattgtactttagttttacctgtatttttcctggtgtttttatagtagttcagttacatttccagcacttttatttgccacgcaatttacttccagtactttttctcacgcatttctatatttcagcaagcaattcataattcaagttttccatgaacagtgaacaagtgatctttaattgtttctaagtactagttgatgtttaatatacacactagagtgctaagtttaagattcaccatcaacaatacataaaaaggtctcaagaaatcctgatagattttctttcccccttccattattttatatgtgcgtgaacagctcttacatcatcaaagttaacttttaaataagagataattgctaccaaaaatacacaagcatcaataataacggttaatgtttctaaaattcaatttcttctacaaaaagtgaaacaatgatcacttcttgttttttactgccagaagctcatattccctgttcacataagaagtgccgtgtttgtattgactatactaatagttgactaaaagcaagagctaaatgttacctcaggtacataatgcatcaacatattctcaatgccagatttgagagtgactgaggagcttgggcagccactacacgctccttgcattctcaattttactattccagtatctctaaaagggacaacagaaaaggcaaataccaaatcaaaggcaaggacaaaaccaattaaataaccaaaacaggcaagaagcaaggtatataactcttatttattgaaaacgttattaacgcagtgaaaacgtacatatcaaatcctcgatactcaatgtctccgccatcatcttgcaccgctggtcgaatacgagtttccaacaattctttaatcattgctacagtttctgaatcatcctgcagttccagacattacaaataacagcatccatgaaactaattggcatgatcaagaagagaatcatctagcatttcttcacaatttccagattaagcagatgatgggttttaaaaatgtaagtcagcacgaagtcaacgaaaagcaacaaacttgcagtgaataagtggcatggatctttcaattgatcatataaattgatttcaatcatttatataaacaagaattccaatatcagaatgaatgcatcgattcaagataaagtcaactgaaaattcatgaagtgaaaggaagcgcatcaaaaaagggataagatgatactatatatctgggttcaagtaataaaaacaaagggaatgcattctcttttttacactaattatgaatataaaagtataaaacagcatccatctgtagaaaatgttggagggaaaaaactacataatgaaattgatagaataaatggtttgcataaaaaaaagttcatagctagatttaaccaaaactcaaaccatattccaagaacaattgaaacaaaacagaatcttaaggcatacttcatgaatagctgtatccttggccgcagcagtttgactgtctagaaagagtggctgtccagaagaataaaagtccattattgcagcaaagatttgaggcttcaaaagattccacgaagtatcttctgattttgtaacagtaacaaaatctgatccaaagaacaccctagtaatacctggattcaagatatccgacattttattcattagaaaacttacccaaaaaataaattaataaagtagaagaataaaacaggtaatcaaagcattgagaaagaaaaaaggaaccactttcaagttcaacaattagaatttgccaattacatggatacaaatttcagtgcaattaagtttaacactttccaatcatagtccccacaacaaagacagtggattactagttttaatctcaactcataaacggtaacgactgtatttcagattcaatggtaagctgggagaagtaaatggccaaaatgaaaacaaatcccggaataaaaaaacgaaaaagattagtacaaacacataagtagaactgaaaacaatcttaccatcaattccgtaaagggctttcgccaatggtgaattcaaggccgcccgtgcatttggaaagtctgcactaccaacctccattacaggcttcccaggataaaacatcaaagatgacggatttggtgtggactgagtctgaataaacatgcttctcttttgccctgagaaaatcacacccacaatctcaatatccaaatcaaaattcgatttcattgctattaagaaattacttaatctcccaagtcatcttttatgaatacaaaagtcgattaatttagatagaaatggtaaattgttgcaactaaacaccgaagagaccccatttcgctcatggtaaagaagaaaccacatatcagagtgaaagaatacaaaaatacgttaaaccactcataactaaatttatccttcaattatcgtaattttttcgattttcccagatgcaaagacgatcaactaaccggcgaagagaccccatttcggaaagggggaagaagtaagcggaggcgatttcaaggaagcgaaaccagagtgattaaaatatgagtttgatgctgctgaagtagcagatacaaaatctcggcgagaaaataaaaaatgtttggaaggagattccaagcttcgtcgtcggtatgaaatggctcgccgaaccagtctgcctaacaccttcatcgttcgtggcttctcttctaggctaaagccaataccccttacacataataaatgtatatacttaagaaacgacacgtcatttgtatgcgtttgatgtcgtctgagggcataattttaagaaggtaaaaggtgtgtgtttttttttttttttt

SEQ ID NO: 1416 - DNA, 1650 bp, Cannabis sativa
acccaaagttgatctcagagttcatccaagaaaatgggttacgtctccgtcaaactgcctcagagtagcttgatcttcactatgaacaacaggtaatacaagttttttttttttttttaaaaaaaaggaacctcggttcggatagattataaccaaaagagactgggattcacagggggaaatccctcccctttgtagttcaaggaaccgctcttagaatgtctagcactcttagcaagttcatcagcaaaagtaatagcatttcttctaataaaaacaacattgcacttaggacaagagtctataagttgtaacagtaaataaaacccactagcttgttgccaatcaggaagcttctttgcagcaatggcttccaccaggatctttgaatctgaggcaattgtgaaatcgtcccaaccaaagttctgcgcccactgaataccacgagacacagcttccatctccaccgcaagcgcactgccacatgaaccagcagctgtgttgtaactccaaatcaccgagtcacgactcaggaagatagtcgcacacccaaaaaggcccgcagagaaagacccatccatgaccaccaggttcttggaagaaatcttgagagattcttctaaggcctcggagacaacaggtctctgaaacagcgtagaagtagtcgtaacaagttcatgaaaccaattggaaatatcccttctggcctgatcaacactccaagaagcctccccattgtgaagaatcatgtttctgatgttccaaacagtctcaaaaataatggcatagcatcccagcatttgtcctcttaattcaacattaactccctcacaaagtttagacaacaactcagatatacttccaacccgtattgagttcattctcacagggaaggggcaactgaaccaaagcgccatagcaaaaggacaagtaacaaataaatggagagggtcctcaggacaggtttcacaaaagaaacacttacaagtatcagctgggttaaacaagtttgctgtaggaagggcattggcacaaaccctccaaagcatcatgcttaaccgaggatggatactagatttccaaatccaactccataacctgttaataccattgaatctgcttgattgggcaacccaataagcacccttgacagagaattgactcgtactcgagctcttccgaacaagaaaatcttctactcgatttctccaatcttggcacccagatcattaccaaaaagatatctcagaaaaccatgattccagcttcttgtgttgctatacattaagtccgccacacaaagtaagtaaggctcaatgcctctgatattttccatgaccgatctgaactcatcataggccaaccacggaatccatggtggccaccaaacatctatgttttcaccaattacaatgatagaacaagcaccttcagctacacaagatcgagctttcaaaatgcccttccaaacaaagttatccgagttcttttccaacacactccaaaagctatccctaggaaagtacttggcttccatggcttggcaccatgcatggttttcattaatagcaagctgccaggcaagtttagataggagggagtcattgatatcctcgaaacgacgaactcccaaccccccccccccccccc

SEQ ID NO: 1417 - DNA, 4385 bp, Cannabis sativa
atcaatgtaatgtggcttgtgagtgtattcatgaaagaaaggacgctgattgattttttttttaattattatttttggtgggttaaccagccatttcatatagaaatatcgatgaacggttttagaatcatccgttcattaatatacgagtagtttaaacatttgactggacaaaggttgaataatagctaggatttctttttatatttcatgatatatggatcattgcaaagttagcattttttatttggacgattataatactttagacattaggaggtcgagtcttcagtgctattattttaatatctactactatgactggtagcactctggaaggaaagaaagcatcttcacacttgatgttttgtgatggatgtgcaggtcttttccatgcttgatacacaaagcctttgttatgcagcggctacttgttctatgtttaacaaatgtgctatagatccctcttgctatgccaaccttgatctgacaactgatgtccccaaagttaacaatgcagtagtatccacaatgatccaccgagcagggaaatcccttaagtaagaattcctcactcagaaaccttagatctttccagagaattttgtcacaatttttatggtagtgggagtgatttgtgagcaactggatatctaattttcagtagatgtaattatgcattgagattggatggcatcttattatacttttttcattttctattgtatttattaaatggttatgcaggtctttaaagcttggtgtagttcaaggcccaaatgtattggctggatcctgtcagccattagtttatacaattagaaattctgtagaagtatctaacttttcatggaacgacaaacgatctagacaagggaaagagtcgtctattcttacccgatcttgtttaagccctttagttggtgacaatggtgctccagggtattactaaatttatgaaatttatcaattagatgtatacaaaaattaccttttcctgtttatttttatacttttctttgacttgttcttacaggacccttttgagaaggttgcacctttacaatattgaaagaatggataacacatcactttgtggggcattgacagcctgcccctctctccttgatttggaaatcgttggcctgtaagttactttgaaatgaatttcttttgtgcatcattttttttttcagagacttaaaaagtaattattttattatctaacatatgatgcaatattgttggcagcaatttgcatgtatagttatatggcttctgcagatagattttatctacatggttgttgtataaaaacatattgattttcattaacattttttgtttttgttttactatttagtcatgttgaattgaggcaaacattgatgtcagttagtgcaaactgtcatctgattgagcgtttgttctttgaatcttcaaaaacaggtataaaatccctctcattaggttcttaaattttaacccaaaatttttcttaaccaaactgtgtcttgaatgacaggtagagatgacagtttgaagtcgccaacctgcgttgaattcgtgaataattgccctaatctgaattcattggcccttaggggatttaagctgcatgattataaagttcgcatacttgttaaggtacaaccaagcatctcaagatttaatacacccaagattcatatatagatatgtatgttttggttgttaaacctttctttctatgtacttagatggatttattgtatggctctaaaatggctaaacttatgcaaacaatcagttgcttttacaaatgctaagacattttatattttgttctttgtagtattttcttctgatcccttaaatagtctttgtttgaaatttcagcagcataagatatgagtattatttggctaaaataaattgttttatggtaaaatgtaataatctaatactttatgggtgctcgtgcagggatttagaaaattaaaatatgttgacttttcaacttcctattctatcactggaacttttctgaggtcagttatcatatttataagtggatgaagtctcatagaaatctattgaacaattcccatattagacatgttccattgtttagtacatctgatacaatgaaaaacatttgtctttcaggaaccttggaagcagcattgggggaaatttgctagaattcttgattttacgggactgcatgcatctcaaagaggtgagaactattaatagccctacccatttgtccccattccaaattttctctttgttaatgatctaaattttcttttgcaggttgaagttgctcgacttttgactactattatcacaggggatttcaagtacctcagaactcttgtaggttttcatgttatttacttcttgttacaaagaccttcatataaagcttccacttagtgttacccttgcattattgatcttctgatacttgtagtgcagtttgatgtttgagttcaattctaattttttttttccatttgtactacctcgagcaggacatatccaatagggaaggtttggcttcagagagtgactggtatgatagatgttacacctctaggtaattcctctttgattttattggattgggaaggatgcttagaacattatttatttcacaatgaaaatatttgatctctgcctcctttgctttatcttcagactgttttcaaggctagtcttaccagtaataatatattttttccccttcaacatcatgcagtgtaatcccaataaagcagatgttggatgcaagacctgatatctgtttgttggctgagtttccatcagaaggaaggttggtttattcttcagtaattgttgttggttttggaactacaaaaatttcacttaggatgataaaaacaattagtagtaggagatatatttaccgatctcatattgggtgtggattgttttgcagttacattgagattgatcaaatgtttgagagtgagctaaatagtgatatcagtctgccatcacaactgagcagtcatacttcagatggatcaatgtttatgagtttttctgaaagcagttacaatagtgaccatggtagtggtaatgaggatggtcgagatgcaggttttgttgtttttgaggaaagctcagatgaggttgactttattgttgtgtgaaataagtatctagtatggcaaggattgaaatttgtggaacaattggattaggtactccctcacaccctcataattacaaacacatattcttgcaggttgcaggttgtttctactgattgcatcatcatgtggatttcagcttcataacttgtgtttgtgtcactttacattacatttgttgctaattgcacgtgcattacaaagactggtcaaagttttcaattcctattttctacacagataaacacagttttcagtacattcttatacccctaaaagaaagaagggaagaaggagcgtgctgcatttttcagaatatatagttaaattatctgttcataaacttgtattgctgcattttgtacaaggtaacagtactcttattaccctgtgcacatgttttgacaaacagcgtagaggtgctacagaatttggaggctctatctaacacagcttgatcaagtgtggttggcaaaattgagtcacataacagtgattatggcatctcatccttgcccctgtgccactttggaagctgtacaagcatttcagcttatggttgtttgagttctcatgcttgagagcaagatgtagtcatttgaagggccttccaaatgtttttctttggcttcatttccattgttaatcatatcattcagaggtcgatagttatctttttttaactccctttcaatttgcatcgaaagagctcttcacaaattcattatggtttgtcgttaatatcttagctcagaaacgggcaaaacatgttgcagggtcataacattatttacgaaccaaaaagaaaagaagacaataaaaggggacatcgcaagtgactgactacatgtatgtatagtactagtttttccttggtttttctggttaaatggaattttggcgttagattgtaagttttttgttatgattagtgttgttatataggcgggtaatccctgcatattttccattggagacgaggttgtgaatggggcgggtaatattcaaagtggacccatttatttaaaaataagataaataaaatcggtaaattacataaaaattcaatattacacatgataataatttgaaatatatgatattatttaaaataaaatgaaaatatttaaaaatttaccggtaaactatcatacatataaagatactaggtaaaatttcttagtttatgagaaataaaaataaaataaattttattaa

SEQ ID NO: 1418 - DNA, 1478 bp, Cannabis sativa
tgtacctggaccaggaatgtaagttgcagggtttggtttagactgtggaacaggttttcttgggttaacagcctttggcttttgtggggtaacaatctttggagttggaacaaccactgaaaacaatcaaaattcaaaatgttaattacaaatcaacaaaaaaccaaaacaaaacaaagattaacatcagaacatttagctctaaaattatagttgcagaaaagaatttatgagacaaaactccacgagaatcatagttctaatgaacaaaacaaaattattgaaagattaataagagaagagttaactaaatttacctggaaggagctggttataacctctgctaccactgctgagtctagctaaaatgccaagaagaggagcattgttgtaagttgcaggctcagtctgctcatagttatctctttcatcagcaaagttgtcataagcatcagggccaccaacaatggcaccggtaagtagatttgggtcactagcttttcggctaaaccaagtggcataaccctctcggcaagcaacaaacttagaattaaccttgtaagaaacaatggaagaacccctgtggtgaacttgacgagggtagttgtttccataaccaaccatgtagcttgtagctctaggattatctcccaaaatgtagtcaacctaagagattaacatggtggaaatttgtcaaacacataataaacactatggtgtgtttacatatacgtaatcaaaataattaaaaatcaaattgaccatcaatcacattgttaattggaatcagaataaatagtattctgttaatatgtttacattactttcagtacaacttttaaaaaaaaaataattaaataaaggtaaaaaaggacaaattaagaagaaataatttcatgagtttgaagggacaaaccccaataattattgtgaggcacacaaatttcattttcatttctttaaaaaaattagaaagagtaaataaatttatttcaaattcattatttattcttattctctagttcataactaaacactctataaatctaacatattcatcattattagggattttaataccggataggtttatggtaaaacaatatcaatacttatataagaagatttgaatacaaatttaatcttatatatctatgtgggattgcattacttgttagtttaacagtaatactagcttagcttttgaagatttctcaaagttatatttaataggcaatcatttttttttaatagacaataaattattttttaaacaaaagaacatgtactaaaatataatccaaccgttaaaaatttctccaaaattaagattgtttgattcaatgaatttattaattgatctataagtggacattgaagaaaaaacaatgatgtaacaaactaaggacattacaaattacaatagctcaattgaagttaattacctgagattttgcgaaggaaagaagctgagaggg

SEQ ID NO: 1419 - DNA, 3065 bp, Cannabis sativa
ctgcgacttctatggacgataatatggatcaggaacctaaaccgaattcttcttcttctgaggtcattaccagtaaagatgaggatgatagagacacagaaaaggtaaaaagattgtttttttcttcttcttcttcttttactttttgattttgggttttcttttttggaaaaaaaaatcaaattgagagcttacccattatttgtaacctggagattgttactgggttggtctttgttaggcattttgtgcttttgttgactttttttagatgtttatcttgactttgtttctgggtattgtttgtttttctgggatttgagttttgtaatcttaagtttgaaagtgggaattatattgcttgtttttgatctggttccatgtttttatgaaacaaattagtggacgagatttctactcttacaagtcttattatccatatcactgaatattattcaaacaaggacctttgttatttattgcctactatatttgattcttggttgtttcatttagttacccgtttcagtttcttaattttggattataggtttctaaacaagttgtaactaatcatttagtatgtttttctatcatccaaaattttacttcatttaattttcagaggattttgtttcaaatcgacaacaaccttgggtcttgtttctaattttgatctgttggaataaaatatgttttctactttattagctgagatgtttcccaatcttactcacacctatttgtagctttttcccatctaatagtttgatttgattctgtatatgctttttcgcttctatcaagtttgtatatggcatacatgagagctaggatttaggagttttttcatgtgaaatttgttaatatgatcctgttctatgatagatcacagcttgtgtgatttagtatcgtttttgtttttaacccctttgcttagttttcctgctatttggataaatattcagtgttcaactcaattcttaatagaaattttggtaaattcaggcaacaacaaatgatgatcccacagagactaaagaggaagatggaaaccaacctatgtctcctgaagagccaaggaattcgggtgcaacttctggaagttctgagaacccaacaacacctgttgataaggagagtgttacaccgaaagcttcaaagaacgaagaagagcagagcgagggaaataattcacaagaaaagaccttgaaaaaaccagacaagatacttccatgcccccggtgtaatagcatggacaccaagttctgttactacaacaattacaacgttaaccaaccccgacacttctgcaagaaatgccaaagatattggactgctggtgggacgatgaggaatgttcctgtgggtgctggtcgtcgtaagaacaagaactctgcttctcactaccgtcacataactgtttctgaagctcttcaaaatggaagaactgatgtttcaagtggaattcactctcctcatccttcaatgaaatctaatggtactgtcctgacatttggctctgatgcacccttatgtgaatcaatggcatctgttctgaatcttgctgataaaaacttgaggaactgcacacagaatggttttcttaaacccgaagaagtaaggacccccgtaccttttcaaagtgtagaacatggagataacaatgttgatggatcttcaattacaacatcgaattcaaaggatgaggcgtgtaacaatgtttcacaagaacaagtcatacaaaatcctcagggcgttcctccccaaatgccatgctttcctgggcctccttggccgtacccttggaatgctgctcagtggaacccttcggttccaatgcccgctttctgtcctccaggatatcctatgccattttaccctgcacctgcttattggggttgtagtgtaccagggacatggaacatcccttggcttccaatgccaacatctcaaaacccagccgccccgagctctggtcctaactctcctaactccccaacattgggaaaacattcaagggatgaaaacacagttaaatcaaattcctcagaagaggaacaaccaaaagaaagcaattctgagagatgcctttggattccaaaaacattgaggatcgacgatccaggtgaagctgctaggagctctatatgggcaacattggggattaagaatgataaagccgattcaatcagcgggggaggacttttcaaggctttccaaccaaagaacgacgaaaagaaccacagagcagaaaactcagtcttacaagcgaatccagccgcattgtcaagatcgctaagctttcaagagaggtcgtaattaagtacacttgtgaagcaagaatcaattcttgtgtctggcctcggagaaaccttcctcgtaagagtaggcgtcgtttacttttagctcaagtagtgtcactgatttttttttcccttgctccgagtgctagaaaaacatatgcatcttgttcaatgtttgtacatattttctttcttatatatgtaatagtgagagttagaacaagagactgagtttttcctactataaatcccatatgcaagtaaataatgtgggaattcaaattaagcttttttgctactttggttagacttgtatcccaactttttgtttaatgtagtcaattatatattttggtttgaaaaagataagaggcaacatcagaagagaaggaaaggaagtaagatgatgttggtcattttcaaagctcatcaagtaatgatgtgagtgggggcatgtgggtctgtaaggagtacaaaacttggggctgcaactaaatgtaaaaaagactgaacaaaaaatcacaaaaggttgtaggccctccttttcttcttcttctttgacacacaaaaagttaaatcttcattctcatttatgctttacacaactagacaactagagtcacatagagcaatgataaagttttcctgtcttcattgtctagtacctttcttttttttccatctttatcttcctaacttttcacaagtttatattattggaaataactgtagtacggtacacaccctctatttctttca

SEQ ID NO: 1420 - DNA, 836 bp, Cannabis sativa
aaatttacgtacctcatcatcatggaaaagtttttgattttgaatgggaaagttaataaaacattcatgagtgtcgtctgaagataaagtactcgaagaattgatgagaacaggatcaagatggatggttttgtgtggtattttcggatcagtacttgataagcccaaaacccatttgttgctatcgtctttgccttctgtacttactacttcaacctcttttgcttcatcatctttctcaacctgagagagtgattttggtgaaaccatatttaagagctaagacactaagataaatatttgtgaagaacaacttgttccgtttataaagtgagagagtacatggttttatatatatagaggctatagcacaccacaccggtatacttaaatatcaatatataataaatataagcaaatttggaataaaaataaaagctctttggtggaatcattgtgtgatggtaaatgtttaaataattgactaattaattcaaagtttgattttttttttggaacttttaatatattatgataaaaaaaaataaaaactgattttttttttttaataaaaaaacaaaatatttattacttgtaggttacaggagtgagtgaggttttggcttgtatagatagaaaagagaagatccattctggagggattttagtaactgatgtaattatagtgaaagccaacgaattccacattgcaaaccaaaacttgttgtaaccttcttatattttgcaataaatgcacactcagggctggaagaactacgtgtgtgtttttgttcaacttttatttttgttgtttttcaatttttatatttcaatat

SEQ ID NO: 1421 - DNA, 1439 bp, Cannabis sativa
agctgacctataccaaacctttgataaaaaaatgctagaagattgcccaagtggatcttgaggaggtcaaagaacaagctgagacatgaaattttgcagtgatctatatgatacttgatgctaatcctcctatgacaatttttgaaggtttcatcaagcgaatttggaggcatcttgggattgtgcagatagcaagaatgtctaggggcatgatcatggttaagttcaatgatgagacaaccaggaatgaggtgttagaagctggggtagtgcaaattgattgaaagccagtcattgtttgaccttggacaactgacttgaactctgttaagctggttaggtcagtccttctatggatttgcttacatgatttagggctccaatattgggaaaacaaaagtcttagtgtcatagttagtactgttgggaaaccaattatggtagaccaacatactaaagatcatactagggtccaatttgctcaaatcttgattgaaatggatattacggatgaccccccgagatctctccagtatcttaatgaatttgggcaattaatggagcaaagtatagattatgaatggctcctagttaagtgcaagaagtgctctaggtttggccatattgcggttgactgtcaaaaagatgaaatgagaaagaagcctattgtttttgagaaattgaaaccagttaataggttccatttgctaaaactaattttgaccatactgaagtggcatctaagagtggtccagatcaagagctatgcagagttgaagccaacactgacaaagattggcttactccaaaaaagacaggtcatgggaaattgcttaaaactcgaagcgctaatgttgaagatggtcatacaagaggcaatgcttttagtgccttgcactatcatgaaagcagtttagagatcgactacgtctgagaaatttagggtaactagcttcttttacctttatctcatggataattgtaatataataagttggaatgttagaggtgttaataataaagataagcaagatgttgttgctgaattttgccaaaaaataaggtaggagtaggattaaagagatgtttgatactaaattagccaagtgggattactatactagtgttactatagaaggtcgccttttgattgcttggaggaaaaactttgctagagtcattgtcattgctgagtcccctcaattcgctcactgttttgtcaagatgtcagggtgtgatacttccttctgtgttacttttgtttatggtttcaatattatagatgaaagaaagagcctttgggaggaacttgttaaacttaatctgcctgtgaaacctttgttaaatcttggagatttcaatgctgtttttaatgtggatgatagagcaggtggaaaccctattaccttcaatgatattcatgattcttctatgtggct

SEQ ID NO: 1422 - DNA, 1964 bp, Cannabis sativa
aatagtaataatgggatgtacgagccattagcatgtgactacttgaagaagcttgacactaatactaatagtgctaagtactcaaacagttgggatgatcataataatcacttctcatcatcaaacaataataataattttgatgatcaaaagagtaatagtactatgatgatgatgatgatcaatactagtaccactactactactccttcaacagctttgatcaatgaatcaatggtggaaaacgaaagattaaccaacaagttatcaaacctaatcagcacatggtcaattgcaccacccgatccactcgaaatcaacatcaatactactacaactactaacaacaacaacaaccactacttcaatcctgatgatcaaacttgcaatatctccttgagctctaattcaataatggaggatcatcattttcctccatgtaactaccttcttccaagtttgaagctcgaaaatcatagtggacatggcgatggtgatgagatggatgaagcaaggccgtttaataataatattatgggatataataataataatggctcctttatgacttccgccggtcattatgggatgccagggccaggtccagggctggggccgggatcgatggactcttattcttcatgcgctagtaatgttaagaatttcgccgatgttatatcgtttggtggccgattagggaagcccttcatggatttgcatggctctaataacaacaatattaagccttgtattaacaagtctttgggtttgtcagattctaagaaacaagggcttcaaacttctactccggtaagtaaattttttttattatattatttcataacatattttatgttattatacgtaaatgttatcctatatatttattattcatttgcttttgcatgatttattgttattattctcttctatattttttcctatatgaacattaactagtgcatcccaactaggatttgcaccatatatataattaaaattttatgtataaaaattaaaatgggattttattttcttaattttacatggctaattaataattaaattatatatttgcagacaaaaggcagtggaagaggacaaggtaatacgagttctgaagggaagaaaaaaaggtctgataatcaagataataattcagaaacaagcttgaaaaaaccaaaacaagaaaattctacagcttcatctgcaaaggttttttttaataacatcacatatgcatttattatatatatttttcctagtttatatatattattaattttttttaatgaaattttgttatattatatagtttatttacaaaaatttaattaattaattattattattttatgtaacagatacaagtaccaaaagtcaagcttggagatagaatcacggctcttcagcaaatcgtctccccttttggaaaggtatatataattaatgaattttcattaaatttatgttaatgatttaaaataaacttatataattaacattataatgtataccttaatttgttttcatgatctaaattataaaattatttctttttttttggttgataatacagactgacacggcatcagttctatacgaggcaattcaatacataaagtttcttcaagagcaagtgaaggtagttatattttaaaaccttgttgattatttgtaattaattaggatgagaaatgtatatagtttattcaaaaaaaaataactcgtgtcaacctaattatagtttattaattaataaaatcacttgatttattcaaaaaataactcgtgtcaacctaattatagttgtgttattgtgcatgtgatccgaattttttttaattacaccaaatataatttttacctatcatccattattacctgtaattaatattaaaatataataataattatagtattgttattaagtaaccgtattaatgttgcatgattaattaatg

SEQ ID NO: 1423 - DNA, 2010 bp, Cannabis sativa
ttgtcctttttcttcctctctctcccaaaccaaatctctttgtgttcctttttctcatcatctcctctcttttctttcctttgtttttcactatggaaaacattggtgatgagtataaacattattgggagaccacaatgtttttccaaactgaggaacttgatcacaggtaattattttttctgctaattaattattatcattaattattccgaataatttctaaaatgcttattatactaactagagctcttcaaagggtagtatctttttactctacttaaaacttgttcataataagctcaagatttttccattgtagaaattaattttcatatatatgtaatatatatttgttaaatacagttggggtggtgggttggaagatgcagcgttttctgggtactacgactcgagctcgccggacggggcagcatcgtcggcggcatctaagaatattgtgtcggagagaaataggagaaagaagctcaatgataggttgtttgcactaagagcagtggtccccaagattagcaaggtgcttaccccaccattctaaataaatattattgctaagcttaattattgtctctaatttgaatattatattttatgcacacatatatatactatatataatataatagtattaagtgatgatagtgcaatttatatatacatgaacaggtattcaaatcttcctactccattatttttactatttttaaaacaaattttggcctttatttttaaattaataaattcgatgcgatatcttttctgggttttttacttttaattattatttttttagatggacaaagcttctataatcaaggacgcaattgaatatatccaaaagcttcatgaagaagagagaaatatacaagctgaaataattgagctagaatcaaatcataataaaggaagtcataataataataataataacaataataagaatctgggtggtaattatgatcattttgatcaagaattgccaatattgttgagatcaaagaagaaaaagattgatcaacaactatatgattcaaatggatcaagatgtagtggttccatttccccaattgaagatcttgaggtcagtaagctaactaaattagtattttgttgattattaaaataaataattatgttgttttcttttttcctttataattaattataacaacataaaataatgtttggagtgcagctaagagtgacatatatgggagagaagactttggtggttagtttaacatgtagtaaaagaacagacactatggtcaagctgtgtgaggtgttcgaatctttgaagctcaaaataattacagctaatattactgctttttctgggaggctttccaaaacagtcttcattgaggtatatatttataatatatatgtatatatatattatttttattgacagtagctttctctctatctctacgtgtttagtcttttaggtcactctagctatagctacctttaatttcattttatttgtcttcgtccaattattgttttggcataaaaagaggactcaaatttactagaaaggctaaacagcatccatggtccacaataagtttgaggtagttattagtgtaatttaatgtttgatctggcattcttaattaattatataaaacatcacctcctagcaatagtaggtatctttgtatccagcattgctattgggcaccagttatgtctggcacccttaagacgtgtcgccttgtgattgactagcgatactccctgaaagctattatattaaactatatgggacccgatatttaattagaccaatagtgatattgacacgtaagagagtgtttgacaccactgatactttttagcatttctcatttgtatccaatagtaattctccaaatttactaattaatgatcatattaattttctagttatactaaaattttacataatttttataacaaaaatactgtattcaagaaacagctaatatatatatatatata

SEQ ID NO: 1424 - DNA, 896 bp, Cannabis sativa
tgagctcatttgtctactgctttccttttcttccatcataaactcctcgttcgtgcactttttttgtcacctcaaaatgacaaaatctatctaaaataatcacaataatccaactaatactttccgctcaaaggttcactccctttaggagctagcattcagctgtattcaagtacttctctctctctctctctctctctctctctctgacaggtagtgtaaagctccattgaaagctgttttcatgtatactaaaatgtggtatatatatatgcaggtaaactatatatatatagttaagatcatcgaaggtaattgctacgtacgtgatcatgagaggtgcactaagaagccctgttagtgacccaagagtttttgtagtctcttgtggtctgatgtttactttcttatgtggtatgtgtactagctatagctaattcttatatttctccttatgcatgtggatatacagcatggagtatataattgtatactatgcatattgtgttttctaaatttgaaatctctctgttacgtgtcaatgtcacgcagtgacggagttctttgagtttaaagcaacgagtacaggagatactggcattaataaacaggtcattttcaaggaaattagtagcaacagtactggcctcaacaggaagctattacactcggccagtaacagtaagatctcatttcttcaagtcttgaaacttaaaagcttattatcttctttttccttttctaattttaaaaaagaaacaaaaatctcttttatttctttgcactttttaaattggtatgtgaattaatgaacactacgtgagaaatcgttaatatctaattaaacatgcaaataatgctaacggaaggaactacacattgttttaaaatcaacc

SEQ ID NO: 1425 - DNA, 1339 bp, Cannabis sativa
ttaggaaaatagttcatatttaaagcatttatcaataaaattgaccccaccattataagatcaaaacaatttacttataactcaagccaatagattctattctaccttacccattataaaaagctagaaaaatataaattcattatcatataataattaataatacaaaagtttcactttcaccctttgagataaattatgcaaccataaattgtaaaaaaatgaaatgaaataacttatacataattccaaaatcttatctttaataaagaattttgtgtaccaaataattttgaaagctagctcattgatacaacatttcaaaaggaaatagcattggatgatgggtaggcatccaacactatttttatttaattaactttttctctctttctaataagaattgctattaggtaaggcactttaattgattagcagttaaatgtgtgggacccgatattaaaatattatgcccttaacttttctcctatctaaatttggtgcctaaattgcatagtgactttgttacagtgtatcaataacagtatgccacttcttactgtgcccttttctcccttctaaatttggtgcctaaattgcagtgtgtctttgtcatagtgtcattgtgtgttggatactattaacaaaatggaaaagattgaaaagagagatgtaatgaaagcattaaatgtttgacagaagaagaagtaaattttcaatgaatagtagtacatacagtactctctaatcttagaacaataagagttattcgagaaatgctaaaaggtaccagtagtacttaacacgctctaacatatcatatcatatcgttattagtaaaattaagtatcagatctcataaaatttaatatattaacttttataaaatatcgttaactaatagcaatactccaagtgatattgatactcacacacaccaaagccaactccaataagagatgaagctttgatctgatctaatctgagttataacttattaatgcatcattgactttatctctctctcataccaatttggtcaacccaaaacaataaacaaaaccattaacataaaccaaagactatgacaactataatccaatttcaagaaagaaaaaaaaaaacaaatcttgaagaggaaatggagagcttgttagctatggagattttggttgatttaattagcaaaataaccatgtttgatcgtacaagcgaccaaaaattacactatacaattacaaccataaatttacaaaatgtaatcatttaatgtgtttattttgctaatttaacatttttatattgttagtttaagcaaatctcccaaaaaccaaactat

SEQ ID NO: 1426 - DNA, 984 bp, Cannabis sativa
ccgaacacaaagcataaggccattaagaaatgctaacgcttcaataattgaaggagaaggtgaaccaacgaacagagaagtcgataaagcaaggcccactcctaagtggtcacgaacgacagccccgcaaaccaaacattctatctatagtacgaagcccagcatacacgttcaatttgagccgtcctgacggaggaagcacccaacgaggagccatcgtaccaaagggagaagagcccaacccaaggataaaaccccctaccgtattgttctcattagcaaagcgataccaaaaatctttagaccaaccatacactccctcatcatccaaaagcttttgactatgtacccattgatttctcctataccaaatatgtcatagtagagttaaaagaagacacgtcttatctttatgcaaaatagattcacattcatggataaaggcatagaagtttatattaggcctaaagttcataacagtcacaaagaaaacattagaaatgatagaatggagactagagcaaccccaaacaacatgggaattagtctctacataaacaacaaatcgatcaacatttgacaatatggtactgggcaagattatgcatggtaggaatccaattgaaacaagttttccacacaaaaactttaactttaggaggaaccttaaatgtcccaagaaccttccaccaataagagggaccatttgaagatgcaaattgcccctacccaacagacgaattacattttagtagtcattcttcactgtataaccacctgaagcattgtaatgccagattaatttatccttatgctgtaaataactcaaaatggtcaaaatttgattatcttctttatcgaaaaaagctcaccaatcaaatcataattccaagtaccattagccatctttaaagcactaaccatatggacattcgaatggccatgaaaggaatgagaagtatgttaggatttaagagacaatga

SEQ ID NO: 1427 - DNA, 2727 bp, Cannabis sativa
ataagtccttatggattattgattttggagccactgatcatatttcttcttcaatgtaaatacttgatttgtcaagggaactggctgatggaaatttgaccaaaagagtgggcaatggagcacaagtgtgttggcaaatccgtttaaaatttcaaaactaagtttttgatattgagcaatttttattcctaattgtactaggaataatatttctttatctctgttgcacgaagaattatttaacattggttttattaatgatgagattattatttccaagtttggtatgcctatttgttgtgcaaaacagaaaaatagactttatgtgctcaagcttagtgagcaattaattttaaataatgaattttttagagtagctttgactcactccaataagaggcaaaagctttcaaatgatgatgaaacgtatctatgacatctacgtttaggccgcattgccttagactaaataaaccggttaacaaaggatggttctttaagagaactaaaagttgaaactcttccgttatgcgaatcttggctagaaggcaagatggctaaaagacccttctctataaaaggaaatagagccaaagaacaacttgagctaattcacactgatgtgtgcggacctatcaatattcaagcttgaggtggttatgaatacttcgtcacttttaatgacgattattctagatacggtcatacttacctaatggctaaaaaatttaaaacattcggaaagttcaaagacatcatgttgtaatatcacgaattcatgtataaatccctgtttatcccctcccaatttgagtctcaaatggtgtaaaaaattcttctctatagtagccttcttcacatctaacaaacttccacacatgtcaccattttccccatgatttttaagttccataaattcagaggcaacccttcaacgccaatccaagagctcatgcaatctactttcacatctttgttttgttcttccactgaccatctgataaaagaaacaatagtgccacctataccagtattacagtcctgttaagcttcagcaccatttccatctcttcctcgttcttacaccaaattatagtgcgatcatcatacatttggctgaccaccagctttctatctacttcccgtgaaagattgtagaaaatggtgctacatcccatctcattattgtctctgaacatactcacaacctgattccaattcttatcacattcttgcgcttgtaaatatgcatgaaaaaatttctattccattctctctttcgaaaacgagtttcgtggcctgaagctcctgttcccttttcgtaaaaagcccagtatcccaatttgttggcgtttcgcttctgatagctctattttggaaaattggttctcccaccgtatggcttcattcctctgacataatttgagttgttgtatctgccagcaggttgaactcttgttgcttcaactgtccgtttcacaatgttcgcccaagagaactttggaccaccaatcctttctgtctccttcggatccatagtcagtttttgtttctcatttatttgcttgctattcctttttaataatccatttaggtatcgtgcaaactcgctccatcccctgcttgtctttcctcctggatgattatcatggttatcttgtttttaaggatagataatttaatgaacaccccctagtgttatgaaaactctccaagaagcagctatttgagttgtttcggaatgatctcttgaagttcatcctctataactcctcctttttcagcaaatcatctaaagcttcaactatccacgtagctgcatccaatgttacaactatttcaaatcccgagaggcgagttctttcacaaattctaacggaacccccatcatccgttaaggtgagcataaacaccttatgagcagtctgaaagctccaatatctttaattcccctagtcaccaaaggatctgagatgttttttaggccaaaactagtgagtaccctttttcttcccataaccagtggggttatggtgtcgaccatggccagaaggatcatgaccactcctaacgtgcatgggaaagactcaaaaagaagagagaggagagaacagttaagatcctttaactccttatcaaaggggcaattggatttccttttaagcttctaccacaacttgagtgcaaattgacataacatgctgctcttttttttctttgtcatgttagttcatgtgttgatagtccttgacaaaatggtgtagctgagagaaaaaatagacaccttcttcatatttcacaagctattatgttttcaaaaaaatgtccctaactggtttttgggggaatccttgcttactgctacctacctaattgagccaagtgttacaattcaacacccaacacaatctattggtgtcatcacagcctcacatttcgacattctcctcgaagttaccaatcaaagtctttggttgtcttgcttttgtccatatctatgatcacgcaatatcaaaacattgatccaaagtctcatagatgtctcttcattggctattctagcacgcagaagagcaataaagttactctctagtaacaaaaaaagtgtactaacactatggatgtcttttttaaatcttttgaacaccagtctttttttcccaactcttgatattcagggggaacattcgagggaatatcatttttggaaaacttttcaagataatc

SEQ ID NO: 1428 - DNA, 1711 bp, Cannabis sativa
tactgtatcaactcgatccttgagacttgagagagatatcccattgagtagttgcatggacactttttggtgctagtagtacttatagctatctaccttgtttaaagtatttcattcattgaatacatgcattgtaatagaagaaagagaaagtatattataaaaaaaaacaacaacaacagaagaaagaagagaaagcagattagattagaggaacaaaaaagggagaatatgaataagttggtcgtagaagtagtctagtcgtgcatggaagcgattcccaaggagaatcgaatcagcccacttcccctttagctcttctttacagtttgcctcttctttcctttacccttccccaagagaatggaggccagagagagagaaagctaaagttatcttagagagagagaaagagaacaacaacacaattaggaatagcaatagcagccgcagcaaaagaaattaaaggtaaaaaagaaagaaagaaagaacccctccctccctcccacacaccaccacaccacactacaccacatctctctctctctctctctcccaaaaacaaaaacaaaaaaagatggtcaaaatgcataaaacatacctcgaagactacttgttatatattccatcatcagcttcaacttagctttattgaaactcaccattttcacctctttctttttctgttttcgatttatttcgttttctttttatgcacacattataattacacccctctctctttctttttcaactctccatcaacaatcatagctaccaaattatttatcaagaaaattttatttattaatcaatatatttttttttattagtcacacactaattaattcacatacatataacaattaacacaaaaatgagataagattaatatttaatactagcgtttaatgataaattgtcatggtctttttatttgttgttatattatttcacttgactctgcaaaagttagaacttacgtaggaataaaggaatattcaaatttgtaaagcaacaacaattttttcccttaaattgactgtcaaaatgtgctgaatctcaaagttaaaattgaaagagacctgacccatgtttggatatgtgaccaagataaagaaagtgtacatgttagaggagccgggccaagggctttgtggttacaagaatatgcaattaatgtcttaagacttaataaaagaaaatgctgataaggattccacattgtccaatcaaatgctgacaagtggtcattccatgaaattcctttgatgggctctctctcactcacatttgccttggtggggtatacccctaatttttgagtgccacattagtggaagagggtcccaaatggcatggtcaaagggcctttctaggttcatgcttcacttgattgagttgagcagatttgttgtgctattaggttacagaatcccagttttctttttgtgggtctggttttgttggctatacttctctatacaaacaactatagatttggtcaacttagttcaactatgttccaccaaacaatatttgtaaatttgtccccttagtatcttatttggatacattggaataatattatatctatctactctaaaccttaaaaaattttagtccttgactttatttgtaagaggatatatcatatattgctttgcaaaatcagaatgaagaaaaggaagaaagaaagaaaaaaaaaaaa

SEQ ID NO: 1429 - DNA, 1793 bp, Cannabis sativa
gatatgttttcaaactctttgcagcatctacaagggatattctaattagagcttttcaaataattaaatttcagggagttccaaaacaatggtcttacagatatttcaggcagtattagcctccctccaaatgtcacagtctggtatgtttctacctcagctgcaaaaaatgacttagtgcattgagaagcatattttaactcatgttttagctcgaaacaacatctcatttcacatgtttattaaaaaaagatatcatattgtttgattttgactttaacaattttcaggttcgaggggaatccattatgtaccaattctagcctagtccacctctgtggacctgaacgtgcagataatagtacattgactgaagtcactcctgattgtccagttcaatcatgtccatttccttatgagtattcgaataaatctcctgataaatgtttctgtgctgctcctcttcttgtcgaatatcggttaaaaagtcctggcttctcagatttccttgcttacaaaatccgatttgaggagtatcttagcgatggtcttaagatacaacagtatcagctggagattagtgaagttacatgggtaaaaggaccccgtcttagaatgtccctgaagctctttcctgtatatattgttaacgacacaaaatctaataccttcaatacaagtgaggttcaaagacttatggccttgttcacaggatggaccataccagatagtgaaatatttggaccttatgaacttctcagattcaatctattgggcccttatgtaaatggtttgttcgatttcttttgttatctttgttaaactcatactatgaatctgttaatgacataggcaaatgtatgatggtgatgttcacactagctcttctgcactctgcatgcatgaaaattccctgctcatgatttatccataatcgataacatgaacacatggttgattatttttcttttatctttctattagtgcttttatggacttggtttttggcaatcaaatgaataaccgaacaattacaatgttgaagttctatttcttttctttttttttttcattcatttcatgtatcttatttaatgtttcagcgattccttttgcttcgaataagtctggcataagcaggggagcaattattggcatagttattgggggtattgctgctgcaactgcgttatctacatttgtttctcttgttatactgagaaagcgcatgagaaaccatgcagtttcaaaaaagcgtcgcagtgagtatattccatttttataaacatttttaaaatgctctaataattattccttagactgataagagttaccttgaaaaatcatcttctacttcaaaatattttgctcttttgattaaattctgatgtctggacaactcagctttattttgcacctgttctggtctacatgactttaatttaaggatggatttgttgtcagtgtctaaagcttcccttaaaattgagggtgttaaggatttcacttatggagaaatgatgttggctacgaacaattttgaaagttcggctcagattggtcaaggaggttatggcaaggtttataaaggcattttggaagatgggacgctagtggccataaagcgagcacaggaaggatcattgcagggtgaaaaagaattcttgactgaaatagagttattatcaagattgcatcacaggaatcttgtctctttgctcggattctgtgatgaacaagatgaacaggtactttttcatttcaatcattttattctggtgaagatttttttt

SEQ ID NO: 1430 - DNA, 2376 bp, Cannabis sativa
cattttgtactctttaagtttgaagctaattaattaagacgttttcatattgaagttttgagtacatatatatatatcaatattggtaaatacagttttagactatgtattttggactttctattttgttaaatgataaaatggaccctgtattttttaaaattgtacaaataggatccagaactgattttttgtcaaaataaaacttgataataatttgatctagagatgttatgacaaaactgattacattttctgtatcagttcgtgttaaaaattatcttaaagttggttatatatattaaaaaatattttttttttgaaaattaagctcagggtcctatttttactattttgaaaaatatagtatctatttggtcatttaacaaaatagagggactaattaataacttttacaaaatacagggtccaaaatagtatttaccctaccttatattataccaagaataatattaacataattttttatatatataaaataagggatttttaaaaatattttttttattattttatattttatgtttttgtgagagaattacaattggtatgtagaatcagatcaaacttaaaataaatcaacaaacaattagtaataacagcatcaacaaaaatcataacgaaaattggagataaaacaaggtagaatagaataattaaaagcaagaaaaagtagaaacaacactaagatatatactggttcaagggtgcattacagttgagatcgatttgttagaattctctcaaagtgattatctttcacacccttacccaaaaagcttctatatctacataagcttcttcatacaaatcccaaaatttaatctctatcttttctctgttctctctctacgtctcaatctcactctcgacctctgctctcaaaatcttcttctgtggtattcttctaatgatgagaatggtgtagtatttatagatttaggaaatgaatcccaaagtccgtggttgcaatacaactcagttacgtgcgacttaacaaacttaacaaactccttgtaacaagatctctatgttagttctagcaagagctttccggatgtcccaggcggatcaagaaacgtgttcctaaaaggatgttccggatagataaaaagccaattagagcagacttattcggaaccccagacttgagggaatagctagccttctggaactccaatctggaggacgactagcttccctaaagactacttagagtggacaagctggacttctgaaactccttttcagatgacttttagctttctacgagacttctttcggagatcttttcatttagaaaaattataccacaattttacggattaaagtctttatatgcttgtatagttttaaatgtacaaatatatattttgctcagcaaaaagtaagaaaataactaaaaaataatgtgatttcaaccttacattatacaaaaatcttatttttagtcataacaaatttgtgactaaaagtaaaaaaaattgtgattaattataaatcataattcttatgttgtgactaaaaggtctgtggctaaagatattagtcataaaatcataatttgttgtgactaaatgtatttttagtcacaatacttgttgtgactaaaactaaattagtgactacttgtatctaaatactatgttttagtcacatataactttttgttgtgactaaaagtcacatttagtcacaaaaagtttatattgtgacaaaaaaattgtcactaaaagtatattttgttttgtagtgtcccgacaataatcatacaactataaataaattatacgtacaacaataaaaaaaaatattatttatatcgaaaaagtattttatcaataaaaaaatttaaaatataaaaataaaaatttattcatatgatgtattcttataatttattaaatttttggtcattacataatgtttatattgtaacatctccattttaagcctccattgggtccttacacttacgaaatgaatgactcttatacacgagtacgtcactctggctgctttgtcctcactcgcacgcttcctgagaaaatttcccaggaggtcacccatcttgaaattgttccaggtcaagcacacttaactgtgaaattctttcgagataagctaccgaaaaacaagatgcaccttgttgatatatgtattaccaatcaattaatttaagctctcttcaactgtgtagttccatacccacacagccttaaaatcattccaattgaccttcctcaggcggtgtaggattatacagcttacccggtatatctccttacatatcacgagacttttgactgtcacaaatatactataggtcatgattttgttaattaaaaaaaaaaa

SEQ ID NO: 1431 - DNA, 680 bp, Cannabis sativa
agcttggatctggtaaccatgggatgaatgttatgagtaatgactagtgctaaagcagatgaattattgctgaaatttgtatcaacagtactgttgcttattaagtgtgagttttgggaactttatgatgcaaataatgagctgttggaggattgactagaggattcattggcggagttggtgggaagggagggagggggagaaggaggtggcataggtgtaggattaggtggcatagtagttgtaggaataatataggcacttgtttcaattatagttgaagtaaactaagagagagattgagaagtagtgccaaaaagggtgttatatggaaattcagattcattaaaagtgacattacgagctacatagaccctgccactagggtgcaggcacttgtaccccttagagttaagacaatagcctagaaataggcacttagatgatcgaaaagacactttgtggctttcataaggtcttaaaagaggaaaacatgagcatccaaacacatttagaatgttataatcagggggttgatgaaaaatcttttcaaagggtgaaacaatctgtaggacagtggatgagagcctattgattaagtaggttgcagaggtgaaagcttcccaccaaaaagtaagagtcatttcagctttggcaaggagagtgagattaacattaac

SEQ ID NO: 1432 - DNA, 6609 bp, Cannabis sativa
tctataaatatccctaatattgtaattagaaacttagtctcttacttgtaaattcaggttagacatagagtaataaaacaatacacttcagttatgttctttgtgttcaatcacgttggagtttgtttgagctttgagggttgttcttggatgttccttgaatcatcattatatgtgagattgtgtgtgtcttctccaacaagtggtatcaaaacatttgatgtccaagaatcgtgatcaaaagtttttcaagatttaggtggagtgatctaagaagatagggagtggtaagttcgatccagaaaagtttacaagtaagaacgattttggtttgtggtgtgtcaagatgagagctcttttggtccaacacagtttgcaagttgctcttttgggagagaagaacttacatgaaggtttatcggagaaagagaattctgatcagcttctcgataaggcacacagtgcaataattctaagccttggagacagtttttagagaagtctccaaagaagaatttgtaataacatctttcattaacatgtcctttataatgaaagagttatttatatcacaatgatgatcattagtagatcagtttgaatccttagaatacatgaatttctatttgtgttcattgagttctttgatttacttgtcaaagtttctcaaagaagatagattcttacaacttctattttaggagcttaataacattagtggctgggaacatgttatacaataatagaatccaaactttctaaaaggatcgaatattagttctcctatagtgttaattctgagagtgctaacagttggatcctaatctataattagattgtagattaattgttcacattaaattaatggtacagaaggaatcaagagataattagaagggtaaaatagtaattttgttaaactctaattatgaactaataattggaggacgaactacttatattaattatataaatggactactagtaagaattatgtaaatataattctatattgtcaaagagtgcaattaatgagaattaatcaataattatttattataaataataaatctgatttaaaaagacaaaattgagaaattaattttgggctctaaaaatcctaaatgctacacagaccatataggtactctcgtcctatatcaaaatctgtgtctcttttactttagcataattaatactcacttctcagattttgcaaatatcattatatatataattggtgatcagacaattaaaagaaattaagtacgaatgaaatagatacactgagaaagttagggaagaattaaatcatattaaaccaaaataatgtgtcaagcaatctccattaacaatcctaattaaaaatctgactactcatagtcattgtaaataactgacaacaattaataaagaacataagaaaataaagaaaaagaaataactcgttcaaaaaatattgatgaaaatctctagagccactttctgcttttaatttttggcccaccaaattgttactctgaaaagtgtcaaaagtccctttataaagcctcgcattagggtttataatcttgaaaactcgccaaatcagctaggtagcccgcaacatggtaaaactcatgttgaggcacgcattcaatttgagaaatcctaaaaagctaaatttttaggagcacaccgcgacatggtctggaccatgttgaggcgcaggtaggcactttttgagcaacaagcttcttagtgcgatgaccgataatatttcagccataactcttttaatatgacttgaaattggatgattcaagatattttgaaaattcgaatgagagatttagaacttttattcacaatatttctcctgaaaatgaatgcatcatagtcaaaaattagattgaagcttcagacttgattttcgatcacaaataaagcgtattgagcatctaaaacttaaaatttttcacgtattatatcctagtacgccaaattccatgataaatccatcatattcacctcatttcacatgttttttttttcattttcaatttatattatgaattttaccatttaatcctgaaataagtaaaaaaaaaaaaacaaatataattttacacaaaatgaatataatcaattgaaatacacctctaaacactttataaatatacttaaactaacctatctgttatcacacctaaagtaatacaacagttagagatggtcttaccaaggagagattagttaaaagtcattttcttttgattcaaaccttaatgttataattttgttatttattaatgtatgctttaccaacttcagctctttattaacaataattattttctagtatctgattctaacatgaagactctcccctgtatagatacaccccaatctatttatagttaatttttgaaaagcactctatcctccattaaaaaaaaaagcaccttatactactaatttttttttgaacaaccctatactactaattaaaagggtagttaatgtaatatacattatatataaacttagttcctaaattcattatcaatccatgcacattaaaaaaaaaatcaatacataaattttaaagggattattttagaaatacccaaaaataactaaaaagttacatttttttttacagaattttgaatttttttttttacatttttataaattttttttattattataaaccgttgtttacaccctgttttaataaaaaccgttattaacccattgcaaaaatataatgtaccataaaaacaaaattaaaataacacaaaatcgtaaagataaaaataaaaaaaaaatcgtaaaaatatataaaaaaatctattttttaaatgtattgttaaatttcctgactttaaatacattgacacaacaaccttaatatctgtttcatcacctaattagtaaaaaaaaatctcaaatcatttgtattaaatttatttgatatgcatatttttgtaaagattcttcacttgaaatgcatccaatctattttatttttctttccttttttatgtttagggaccatggaggctctttatccattggaatatatttaatcattttcctttttttaaaagaaaaaatattcaaccaaggacagctcataaaaaataataagaaaaccacacaagcacaacaaggtaactaataactaataaataaatggaaaaaaccccatatattttacgtaattagcaaattgcccaaattaattattttttttactaaccaaaccaatgcttcagagtaaaaagttaaatccaaatatggcattgttcaatcaagttttgatctttacatatatagatgatgaatgagtaagtgggccacattcccaatttacgattttttttttctttttgttttagctttgcttccatgcaaggatttctgcaccttaccaatatagaataaaaacctttgagagagaattaactcatttgtttagtaaaaatgaaaactttgagagaaaaatagagagtattattagtccaagaaatccatatactgactttgtagtcggttttttctttttatgtgtctattaaaattcattacattgtgaaaacaaggggcactataaccatttctcttcagttatagagacctgttggttgaagattccaagtactgagttagtgagtgagagagaatcaaccactttgagcaggttatttggggacccagatcttgttaaagccgaaaatggtttattctccaatcacttaacaaagaagaaggtaagagaagaaaaagcaaagtcttcttctacttgttatgaaaactttggttatattttttgatctgggtttttgtcgattcctctgtttcttgaacggggttgtgtttttcttttgttatcttccgggaaaagtttagatttttgttggaaaatcgagctgtgttttgttttttctgatctgggtttcccttgttgtcttcattttagttggtcaatcagtactattctacgatggaaaaagatcaagaacagaagcatgtatgcaaattctgtaacaagagtttcttgaatggaaaggtcttgggaggtcatatgaggtgtcatggagctaaaaattcaacgaagacggagaagaagcttaataacattgtacacacaaacatggaaggtggtgagcgcgttggctatggcttaagagtcaaccccaaaaagtcttgcaaaatttcaggtgggtcgacccaagaaacttcagagcaagaaatcatctgccatgtttgtgataaagggttcgattctttgagagctttgtttggtcacatgaggcatcactcgggtaataagagaaggaaaatggtttcgtgcaaagaatgtgggaaagagtttgagtcattgagggctgtcactggtcacatgaagagtcactcagaaaggtttagggtccccattgaatcgagtgagaagctttttggggatagtcaacatagtggtggtggaacttctggcttggttaagaaaaaaagatcaagaagatcgaggtataataataacaataatactgctgctgctaataataataataagatcactccaaattcttctgtttctaatttgagtgaatgttcttattatgataatgagtatgatcaacaagaagtagaagaggttgctgttagcttgttgatgctgtctaaaggggttaggaattgggatggatttacttcacttactgagtcttctgataacatttcttcagctcttgaagttaagtctcctaacacaagtaagcgaattctgaacaatggtaccctcaagaaaatgaaaaagccaaggttggaaaagactcagttttgctttgcaaattacagcaattatttccttgatgacaagaaagtgtctggctttactgaactcaattttgggtctgcaagtagtgatgataaagtagtgaactttgatgatcaatctgcattagctctggttgatactgctgagattgagaaagacagtaatgtcatctccattgaaatggaactggaagaagaacaagatgatgatgatgatgatgatgatgaagaagtgggagtggatctagctactggttttggatcactgaagccttcttgtttgagtgagaaaaaaaccaagtttgattactccaattctgggtctgaaatgttggaaaattctcctaagaaaaatggctgctacaagtgcaggacctgcaacaagattttctactctcaccaagcacttgggggccaccaaactattcacagaacacccaaaaactgttcaacattgcagatttacagtcgccaaactgtcactcagtttgaagattttcctggaattgaagctattggcaactctaccaaaactgatttcaatgaggtgtcattggatttggtgctggaggtggataataatagagtaagtaccatgacaagttttgagattaaggagcacaaatgtcccatttgttttaagatatttgggtcaggccaagctttggggggccataagagagctcatattgttaaagatactgaaagtggaccagaaccgatcaatatactgaagcatcattccatttgtggtgtctcagatgtacttgatggtgttccaatgacacctgggaatgaggccaatactgaggttgacctcaaatcatggtggctcaaaaacggccaaaagcatgaattgctggtaggtttaatacccaactgagtattagtcattctttctacagttcctttggagtttttgtttttaactgaattctttttttgtttttttgctggtttggggatatattcatacagaaagaaagcaaaagcaaaaaaaaaaaaaaaaagctttcatttttgtgattattgcttgtaaatgtcagtacagcaattctttttcttttttaacctcttgcagtgatagtttgaacaattttttcacctgggaaaatctcaaaattgatttttgtacatcattgatcctatttgaatgaaatcaaagcaaaatgggttttggtgtttagttaaaattaaaaggcaaatagagaattaaaaaagatggcatctaagctaataatggttttttagtcaccgcccactatatacatgacaaccccatctcatctaactgtatatcttttatattatatatatcattgatctttgatttttgctttgttggataattattatacacaacacaagatttgtttactctttctctttctagttcatttggcttggtcccaaaggaaaacagtaactccataataatatctcagtttatgcttaactggcaaaaaaaaaataaaaaaaaaagttccaaccttgaagaaatttatgaaatcaatatggaggagacaaaaaagaaaatagtaaatgcaaatggttgcattatggcgagttgaccaactaatacctttgttaatccatagtaagtatccactcagcactgaatttcgggcttgaatttataaaaaccaacatgattacaaagtaagaattaattacaccaaatagtgcttttttttttgtactcattactgaagagccttttaagcataatcttttggacataatagggtttatttggacataattcattctcatgataaacaatgc

SEQ ID NO: 1433 - DNA, 3031 bp, Cannabis sativa
tatatcgaaggttgtactgctattcatatatcaataaacaatatacacaatttttttttggaatttgaaatcagatattcattaaacaagaaattaaacacataattaaacaaaagcaaattgaaagtaaaacatggtcaagataacaatgatagaataatactaaacggcatcagtataatagaatgactatcaaatttataatattcagcataacttcaaacagagatttgaacctgaagaaatttttattcaaactgaattttcctttatacaattcggcattagtggagagctaccaaattgaaattgatgcaatttatgccttctcatttttaattattttggaactattctcatattagaacttcaacaaaacttctgtcaaatcatagttggaagtaactaccaaagaatggtggctcacgctcaaatggtaaagtatgtggcttgttcctaagaagtttgaggttcaagtccctcttatgttcctacatagaaagttttatagttcccttcaatactgcagggtgaggaaccaatttcacaaaaacaaaaggaaaagttactagaaagtacactgtatttgactaatgactagttcctcctatgtgactaatttattgtaccaactcttcttagacttttgttgttaatcgtgacatttcaacaatggatgaaagaacaccaccatggatttaaaaaccacaaaagaacaagtattagtattactatgaatacagctgttattagcatagaaaaactagaataagtacttgcactttaagaatcaaggcatattaaggactactttcactagttctacttctaccccactttagacttttatttttgtgtgtttttcttatccacacttaaccccttgctgaccaaatacaggtatacagctttattgcttactgagagacaaggatgaaaaagaagaatttttatttatttattctgaaaacaaagaaaatattagcaagtatgcaatgtaaccattatggaaacaaatattacactaaatttcaatctcgtaatatgccatgtcagcatgtgtaaaaatatggtctatttcttggggcatgtcttactcctataatcagtaaacatatggcctagttaattatatgtatcatactgcattacaatttatactaatcaacaattactgaattttaaaaatgcaacatgaatcaaataagagaatagtaataataacctatacagcttcagcacgacccaaataactcaatctttaccataaataaaattattttctagagtagagaatgatgcataaatgagaaaagaaaatagaaaaataaaaaaaaaaaaaccattttgattttataacacattgataactgcaaaacaaatcatgaaacactaatagttcatgtaagaagtacagggtatcaagcacggtactcacattgcttcttccccagaatgttgatcgttttgaattatgattggtaccaccactgactttattcatagcctttccaggacctgattcaagaccagacaaaggtaagggatgccctggatccattgatgataggatctcccccattgatcggtaagattcaccagctggtgaagtacttggatgatccaactcatttgagttttcattacctttcttctgatcaccttgttcttctatcaattgagctattggatctcttacttgttggggatcaacgcataaatttgaaccctctgcagaagcatgattctctttgggtgaacctacatctgaatcatcaaccccaaatgtctgtgtacataaaatgaagtgtttgtcaattaaaatgttcatagaagtaacttgcatgtatcgtaaattcctaagtgatccaacatatttcttttggtcgcagcagaacatagcattaagttactgagtgggatactggccaactagatgcatatttaaacagaaaccttagtaattagtcaatttttcttaaaagacagttatttttagaaaattctccacaacattcaacacatacaaaattaatgtacttaaaacatatttatatctagggacgcatacttgtttattgtaagacaatcatgtatatgagcataatataatggagaaaacaaagttgaccttatagtcatagagatcactgccagcataaccactgctttcacttaatttcccactatgtacacgttcaggatcatcatctgtttctggatctacttcattttccgcatcatgataaccattatctttcatatcaatattttcatcatcagtagattcttcactcccgctgttttcaatccgagagtcagccgagattgagcatctttgtagattttcatcctgaataaaaatctaataggtaagcaacataatttaatttctaaagcattatgcttcatgccaatgtttgcttcatggccagaaaataaggattgacaacaggataagaaccacttacatcaaaaatgttttcatactcctccaagagtgtcgtaacaattgcgtgtgcattagtagcagcatttgcagctgcaagaagctggacagaattatcaccattaccatcaaaatcatctaatccgcagtcaccagttaatagaggacgtaaaagcaagggcgccatgcatgcagcaacagcagatggattcatcagattctcatgagaatgagatgatataatatgcatcatcttcagtactctgcaaaaggggcataattaacttgttatttgcatataaagatttccaattagagttggtagagatacaaaattaaacaaaggtaattaagaaatgaagcatgaaaaaatataaattccaagtacataatgagtatcacaagcagcaggagatttctcattaaagcagaagtcactccacagtcaaaattggagaataggcaagcaggtagtacaaaccacggaagaaaatattggcactataatgttatggaaaatatcttttggaaaatctagatggaaatttcaaaaaaaaccatatatatattattaaatataca

SEQ ID NO: 1434 - DNA, 1859 bp, Cannabis sativa
gccgcatttcttggcatgaaattgcagaaagctaatgtgtctaagaatatttataatctttgtcatataaacatcaaagctttttctcttcaaggtcagtattcttgtatgtatttagtatgattaaactctatctataaacaaacaattctattataattattatcacaagtccataatctgataatgatgcttttcttgtgtgatataatatgcatatgatggttgattgtatcattatacaactgggaagcaacagttggatcacaaggtaggtaactcgaattttagaatttccataactcaacaggtggtttaaaatcttgtttttccttggtttagagcttttcttatcttgaaattatttattctttcgattccagagtatggatgccttctaccaagcttgccttcagatgccacatacgataaaactacaggggtcagcttcgtttgcgatctgaatgacaacattgcagctccatggccttctctgtcttcaaaatatgtttcattctgtaatagaagtatgtcacaattgcttaacttgacagttaaattatggctactgagtttggttttcatatgcattaactattgtttggtattcttttagtaacattttctcattgaaactttttctgaaattgaatggattgcagcaaccaaacttccagcagttcccaaggcaacatcagctcagaaaggtagattaatatcatgactatttataatgctttgtcaaactttagagtatattttggaaaggaaagaaaaaaggtaagggaaatgtaagtaaaaaaaagtgtggaaagttataaaaaaatcaatttttttattcaatgtgaaagaagattttgtctaatcttaactttttatctttttccacacaattcttttcatatcaaacacaagaaattaattacttcctaacttcatttagaggtgacaaggtgtgacaccactaattggatttggaattcaaaattgtaatgatttaaaataggccatttttcttttgtctccattcaaaacgatagccatgaaaaagttgatgctgttcaagttgcatctaaattcattaatctaaaactataaaatatttatcaaagattaaccatttaaacttaaataggaaaaaaaaatagaatttattcttgttattattttgatctggtgttattggttcgtaggtctttacaatcagaagtggaaagttccattctccattaccatcctgtcagtcatacagatgctcttactatgagtttggatttggggttttatcatatattgttgtgcttgtgcttttgggtatggtacaaaaacaagttcgttttttcattgtcttaatacaataaatttctaattgtacaaaaataatgaaaacaattaggtaagaagttgaacacaaaagttgtaaccacccaatttttcaattttcccatgctggttaactaagtactgcaaattctgagtggtcaaggatcaattattttgaaaatcagtcaatatgtaaactaatactgctcttactgatatgttatctaattggcaaatgtaaacatgtacgctaaacatgtgcatatctgcatgtgtcatactaatcttacctcaattctgtaattaggtatgccggtcaacctgagtggaaaaattgttcgacaattagaggccctaagtcatattaacgtaaaactgataagtgtctcactaaaatatttttggggacttaaactcaaagctaaaagttttgatgtcgataaatagcgtggagataccctaaatatcgagaaaatgtgaaaattagggtacccaaaatcgttttcagtgcagaaatcacaaacctctaattttct

SEQ ID NO: 1435 - DNA, 3553 bp, Cannabis sativa
caggggcagccattgggcttgggcggactatagaacctaaacggaaccatggacgagctggtggttgagctgccatgatgacaagttttggtgtgttgggaaagagtagtagtagtagaatgggaaaacaaaagaaatcggcacgtagaaaaatggttggtttgtgttgttatttatagtttttacaactataatgtattctgaattaaattaaaagaaacaaaaacatgagatacacgcgaaagaggaatacggaaagcatctgattcatctcatatagtgcaacagccaagcaaaaccatttttctcatttttctttagattctatttcatcaaatgccttaaacatcactaaacatactatttcaaactgtaattagattctcactttcacagttgaggattttttgtattgttgttttgtctgtctgagtctgtcttctcactcactttgcttgctgaagcttttgattttgtgattctctctctctatatatatatgcctataatgaccatctttcacttttcttttcttttcttttatttatttatttattttttttgtttctttcttctcaataaccctttttctttttacttcataatgcttcaacagttacccttttattgtaatatttagcttgattgacagcataatttaaattggagatattagctttaatactctaaaactctataataatgcaaaatttgtacgagatcacactttaatatagaactctaaattttgtgctatttcagtactagaaatacatacttttacctcaaaattaattagtaataatatttttatatttaattcatgtaaaataatattctctaatatctaacattacatgcaaactttatgtacagaaaatatgatttaattgaattggatcaaattaaaacacgattaagaatgaataaatttattattgagcaacaacaacttatgacaaaacaagcaaccacaaatacatgaagagatagtataaagtgatcttgagtctttaatggggtcaagttatcatatgttgggggtacttgttagtatttagtcagaattttttttttttagttagtacaatttggagatatttcttatatagatgggaaaagggaatttgtttttgtttattagttgttatagtatttaggggtgttcatgaattggtttagtccaaattttttttttttttagaaccaaattaataaagttgattttttatatttaaaattaaaccatgccaattaaatgttcaaactaaaccaacagattaatttggttcgaaatcgtcatttgtagtttgtaaatgatctattttttattttatttttttattaaatttcattattttaatgcttataatatgtaaataataataacaatagatattttaaaaataatattaaaatatttatcaatagtatatttaaaattatccgtaaatatcaattttcaataaaaaaaatcacattaaggtacggactcacgatttttttttttgtggggactttttattattaaaaaatatttatataatcactcttactagatttatttaattttgtgggaggttctctattattttggtctataattatcaaattaaaaaaaaaaatcaaaagacaatatttttgtagccccacattaacacaagtgggtccgtaagaattagacggtttgatttagtttgaactacggacaagaattttaaaactaaaaccgaactaaagaattataaacggtccgaattgacgaaattattgacaccaaatttatttagtctagtctcaaataatttggtcatgaatagtaagggtttgagatcacggattgcatattatataaataaccctaacaatacttagagatatgttttagttagtcaattaatatctgtagttgatatttattataaatctgaatttatattaaactcaatacatttactctatatatattcaaaacagcttcttgaaaaactttcgtttgggaagaagaacttctaaaaaaaactctccaaaatttactcaaacactcctgaatacttatcatgctcaaagtactgtcaaatctaacagaccatcacctcattctacaactcattaggtcatgcaccattcaaaaaaaaattactatatagtatttgcactacaaattagtacaaaacattcattgtatccagtaatattgctcagtaccattggatttgataatagttatcttctctcccaaaaatagaaaaataagaaagaaaaaaaaaagaacaaatgaaaattgcttgtgcaagaaaagattgagactttaaattgttcatgcagtggtcaattgaatggatataaccctcctttagtgattctattttacaactaagacagccttgaaaaggaacatcatatatcatatatattaaaaaagaaaatcagtgaaagcaagttcctagatttcgtcaacaagtatagtgttagataaacgacactgaccagaaagttaaatgcttttatttatttattatttaactaacattgtcctgtgactttcgtctacataaagctactaaagtactaattaattagtatgataatgacacctaaatgtggtcttaaatgtattgttaatataggaaaggggaagcagctcgaataagtttaagctttgagaaattgttgtttgtgagagatactcaaacttgcattatcataatactggaaacaatggaaaaggaacttttatccttgccttgggttttagggaaggcacatattgagtcccaggaaacctttttctgaacacttaaatttttgtcttaggtcacttatgaagaaattccatggtgaaagagtctggaattcgttttctagcatggtttgaggataacatattaccaagactaccagtttttttatcttaaggtatacatgaaaatgacaagttagagaatgagtgtgaacttaccaagattgaaactgcagaaaagcaagtagaagaagaggaatccatggcaatgggactgtaagtgagaagaattatgaatatctgtttacctttgctttatgcctttatgcaacttgtgtctggtgaaggaggaaaaatttattgtgttagttggtatactaatagccagacaaacagagatactgccaattaagaaaatgaatttcgaatggaatgttatcattctacaacatcattatcaaataaacatatacaatcaactaataccagcttgaaactgaagatgttacatgaagaaaaaaatatttatgtagtaatagaacttcagaaactgaagatggcgcagttgcagcaataggtgaagcacatataagtatataactctctttgaactatgtgcagcttaaggccaagtagtgaattcaaacactttaaggacaatatcaagtccagtgggtatttgccatacaaaaagcagaacatttgctgcgtttaaagcaatgtgaagatttcttgctgtatcatttcccttttgcattgcaggtacaagggcggctgcggctgcccacaaaactgtgatgcctgttcaaa

SEQ ID NO: 1436 - DNA, 3315 bp, Cannabis sativa
gtgtatattaatgtcaatgtcattatcttccatattatctatgtaatatatatacacacaactatatatatagctagttagtacttcaatatattgttagtaacagaaaaatatttgggggtcttcatattatgatcttcattttacataaggggtgtataaattaatgtcaatgtcatcatcttgcatattatccatatatacaagtatataaattccttacataactccttcacatatatatatcatctcttttctcggtatttgatcatatcatgaagatttgatttcatgtggctcgaattaaaaattgcagccatatagttgggaaagtatcactatcatgagacagctccttggaacctaataagcatatatgtcaagtactagctttatattattattatatattatttgggaatgagaaataataaatgaaaaatgcatgggaattacaaattgctggctttcactattcatataattaataacaatttgtttgaaacactacatttgagcagtgaattttttaaataaaataggctacaattggtgtgagaaacacaatagtagtctttgctgacttaaatattatatatagcttaagcttattatctattgaaattatcttgattgtgatttcatggtagatatatatttcatgaaatgttcttctatattagtactgtacatgtgtcttgatcatgcatatggatttagcaagtaaattaaaatgccctatatgtcaaattattaatatgtgatgacatattatttgcatggattgatttatatacagtaaaattaaatttgttaatatgagtttaatatacgtacattacaatatatattgaatagtcaattataatgaactaatcatatgtatgaatcgattttttatatggagttaataagattcatatattacattttcttttatatagaagtgtgtattctaagctaagttcatatattatatatatatttagctcgatctcagacatagaagaaactaactggtttgtggtcacaacaactaattttgattggattgaaatattttatacaatgtttataaataacattgacttgtttgtctggaggcttctgtgaaaacggttagcctgtacatctaggattttaagttagtgtacgtgatataagacagagttctttagtactagaacaagaaaaaagttaaatgaggaagctctatacagtactctattcctgcaaattcattaaactcaacggttctaatttgtcgttcaaggaatttttttttttaaaaaaaattaaattgtttactctgaaaatgtatacataactttggtgaaaggtcattatccactgaccacgctctcataactatgtttatatataaatagttcttacttccatgcatacgtagttatacttacgatataattggctttctcgaattaggtacacttcttctgatctgatctgcttcatattcgtatctgacgtaataattaatgcgtcaattaaacttggatttaattaattaactaattattgatctacagccatgatcagagtagaaattgttctagtgtaggggacaatatatttttgtatattgtatcccatcatcttggtagataacgtagtataataataataatatatataagatttcccctatttgattccttactttttccacgcttttggtaaagaattgccttttgatatataggccatacgtttgtacatatatataaatagatattatgtgtataatatgtaatattaaatgatgcaccatgattatagctatagcgcctgaggtaattctcaaagattaagaaaaaaaaaaaagtaatagctaatagctataggttttatttattaaatatgcatttttatttaggcaagtgcttaaagaaaatattaaataggaggaaatagtatttttttttttttaatgagaagaaagaacttcattaaaatagaacacctaaaatctaactggttatattgctatacgaacaaaaatacaactttgactaattaacatgcatcgctagtaagataatgagttagcatatataatcaaatttgaaattagcaagagaatcaagtaaagtttttcaatcagaaaactaaagaaccaaaaatagactgtataataactgagttcagaatcgcttggatagcaacagtttcaacaataacatcgtgccatcctttcttcttaattaactcagcttattagagcctcctttatgttgataatctcaccaaggttagtgtagattacattaattatttggttcactggtataaattttttcaaataaactaatattaaataaactcatcccctattttataactaaattttagtcataattaattggagcaaaaagaaaatagctcattggtaatggaattacattattcttcacttacaccaaataaacacaacacattaatgcctcaaaggtcaattctgactttcccttgtatatgtgaataaaaacacacagttaaaacaaaaaaagttgtctctttgatacacgcgcaacaaaacctatatgtcaaaacagttgtgagtgagtctcccaaaaaacaattaacccaaaaatcaaacgaaaaaaatcctagcaattaaagtaactaagagaacaaaccataaaagtgcatacacgactcaacaacatctaaattgatcttttttgacaggattaatagtgaaaataataaaactagaaattaagaaaacttgaatttgttaggctacgtccccatgatcgagctctttttgcactataaatctatagattgatttacaaccaattaaggtgattccaagtcacaaagatctcgactaattataatccctttgatctacaatatatagaatgttattttcattttctaataattacttaatctatatttatataataagttctaattattcataattaaatttctggcatattacttacttgtttttggctcttgataatgttgttaattgttcttttattttgatccccagaacccatgggctgcatttttctgttctattggttttcttaatttaagggaggtcttctatttgttttattaatttaagggaggtcttctattgattttcttaatttaagggaggtggttcccttgtgaccaccatgaactgatagtttcttttatttcaatgaagtctcttttttgaataaaaaaaatagaaatctagtatataaactttttatatgaaatatatatataatatacttgcttttaggtggtattactttatgtatggtagaaaaaaaatat

SEQ ID NO: 1437 - DNA, 3292 bp, Cannabis sativa
atattggattaagtaatcgaaggcctcttgcattcactgatgaagatgacggtgaaagggaagttttctggaaaatggggagttctggtttgaaattaaaaaatgggaattatgggagtttgaggtgaggaaaaagaagaaaggagttgggtgaatcctttgatacattggtcaggatccttgcaatttgaaatagacggctcagatatcttcttccaaaaagcacactttgatctaatcgatgggaagttgaaaagatggcaaaatgccccaagcatttattattcatcactgtaactcctctcaagaaatgcgtccccagcatgcacgagttgccaacaattgtactaaaggtgttgcatgcgtgccacggtcgtggtgccttcaatttatggccttttacttaatgacagctggttggaggcatctgcgactccaatatttaccacgggttaggaaattatctctaaaaaatagaagagaaatgcaagctcccggatctcagagagtcctaaaagcttggggtaaatgttatccatattctgatcatgtgacgcatggcatttaaaggaaggaattagcatcataattttcctaattaaactcttgcactacaatcttgtcgtggagacgcctcatggagccaggagcaattcaagactgaaagatacatggtagtcgcccttgcctcgtcctagctttccgggcatggaaggcatgttgtctctctcagccctggaagggtccaaatatggaagtctgtctagttgatgctcggatgagtactcaaagagcctattgcggatgtcgactgccaagagtgtcgtggacgtctacctttggaataagtcgattagcccaatgacagttattctttttctaacataggaacagatcttgtcctctctgtataggcatggtagtgcgcacacctccaccacctttaagcaagacggatattacagacctctacttttaaaggtgaaagcttttggtggcatgctttttaaaggttaaacctttgagcaccacgtctccatagcgtacgaatggtccccaattgtccagctgcagcatgcacaagcacaattattttcaaaggacccaatacgcaactctttctttttcatgtaatttaccctattattggccttttagcggaaaccctaggcaagtcatgggcatgtcctacctaccacttagcctatatatacccttctatttccatacgaggggggatcacaacctgcatagccaaaacttaaccaatattactctttgttttcttcttcaagagaaactaagagtgtagagttagggtttcctgccaaaaatattgtaaacacattaaatacacccataagaggctaatagactaactcgtggactaaaattaattaacacccaaattactaaaaactctccatctctttatttttgcattttattatttatttagttctcaaatagtagtttctaaaaatctcgataaataataagcaacaaggaaatttcatgatgaagaaaatccaaaattttaaaattaaaaaatgaaaatctaacatataataatcatgaaattaatatgtaattagagataattaacttatacaaattaatagttacacaaattataggtcataaatcatatatagtaaagaattcaataccattgttaaaaaatcaaataaacccaaaatatttatatataatttaaaacgcaataataattaatattaattaagtatatgtatctaattaattcatatcaattactgcaatttgatagataaatactatcaactaaagccttgtccctagatctataaatcataatcatctttatttgattatcataaatctacaattataatgagaacatatgtacttatagaattagaaaaaaacttaactaggtaaccctagttgaattaaatccactcattaaaaattacaataaactagaaaaattcacacttggactctctctagacattacacacatagtggcaaagcccattagttataaatcactaccaatataagccaaaaaactatccaacaacccaatatattaataaaacaataaaaatttccaaatcaaccacattttgtgtcctaaataaacattaagaagcaaagatatacctctaatatatggcgaaattgtaaatataataataccaagtaaagattgttaaaatatgtgtaagatggccagcaaagtcctttcttactaaaagaatcctatagccaaattaggaagaaggtatgcacagccattccgagactccagaccagtctacagattgcctgtgcttattcttcgaaatgaataagctgagaatatcgttattttaaaatgatcatgagagacatgtaataataacaaaatagtaacaataataacaaatagaaggaacaaaaaacaaaaacaaaatatgtggtcttatcactccacaatgattggctccgttactgcagctttctcaccatcatctggggcagaagcttctgattttgatgtgtctgtagtaccattagcaggagcatcattagatttttctgaagtagacccagcagcagttggttcagcctttttcccatttttgtcatccttcccttccttgccatcctttccgtctttggcaggtgcgggtgcaggtggaggaggcatcatatgaggtggtggcttctgtttaagctttaagagaatattgcgcatcctcgaaagatcagttggcttaccaggtttaggtccttgaactaccaccactgaaggtttcttatctgcatccttcttccctctcttcttctcgatattaggtacttcccggggaatgatttctgctattgctttccagtaatgtttgtcagcttctttgtggaacttttcttggttcgctaagtacagctacaggaaagatcatacatttagaacaaaaaaaggaagatgcttgtgtattgacatagccaacagtggaaaaatgaattctaaaaattgtaccttctctctttctctgttgttagccttgttagtttcacaagtggtctttcttttctcataaaaagatcttttatactcctcagcttcctcaatgatctgattcctcatttccttctctcttttctccttttcctccagatggatggcatttagactgcatccaatagtagataagtaattgaaagctaattaaacttaagcttccaaactagaatagttaacaaatcctaaagatcaacaatctttccatttaaatgaaacaaatagatataaacaagattaatg

SEQ ID NO: 1438 - DNA, 1434 bp, Cannabis sativa
taaaataatttccaacatgggcatcataagaacatcagtagatgaaggagaggcaaaaggactagtgaagtgatcattgagacttaggaaagaagggaaagtgatggcctgattagagaagtgctgagggggcaaattaagattcacaggctggtaattaaccatagtaatggttgggggatggggatattggaaaggctgggtcttatcagtaatcttttctttgaccctaagtaagatgttataggggcacaaaggctcagtcagaagctcatcacatctctgtaagaaaagcaaatttttttttgtatgatctaatttcccacagaaaaaacagaaatcaggcaggcgctcatatttaaaatcaatccacttaacaaactcacgccccatcctaataaatttaatgttcatacccctcctaataggtaggttaacatccagaagaactctcagacgcagataaggaccagtgccctccttaatggtgtccttatccaccttaataaggtcaccaatctccatagctataaacctagcaaggtcatagcgcttacacatgaaaggaataccatacacttggatccaaaaaggaacataatggagattatcagaagtaaggggaaaggaactatcaggagctgcaaagatagtaagacactgggcaaaatgccatggttgaccctctaaaattctacccttatccccgccaaaggagacaagaaacatgccatcagcatgctcagacacagtaacagggaatcggcattgcgatgaccagataccagagagagttttcatcagagaaggcctattgtaaggacgaatagtatgcagtttaagaagaagactactggggcaggatcagaactggaagaactagcatcataggtgaaaatagtggactcatcaggggggagaacaagagcattagaaacattgtttaagaactcatccatttcaacaaagagagaagagacagctatatgagcaggaaaaaacaagatgacagaaaggtgatgaagaagataatatctgagcttggagatatatataaaaaaccaaaaggcacgaagtaaacaccggagaaccaccctagtcatgtccctagtcgcatccattgaagcagcaatgatgagaagaacctgagagactttgggaaaccattcgtccgcctccaaattgcgatatccaaggtggtttttctgggtatggattcgggggatcaggagtaaatgggaaggaaacaaaagggaatgatgagaaaaattaaatagaaagggcagaaggaagggcttgtagcaattaatgctccgatcaaaattaatggaatgtgaaagagaaccataataacccctagagcatttaatacatagaaaggatggagaagtaggcaaaaaagggtatctacaataagtcaaaccaccactatac

SEQ ID NO: 1439 - DNA, 3435 bp, Cannabis sativa
gtcctggtcacaccgttcagaagtgctaccatcgattcgatataacgtttaccggcaatcaatccaattcaggtcaaacttccacctccacaactgaccatcctcaagctcatatctctgaatcggccattactgaagaatccccaggcacatggtacttagacacgggagcaaccaatcacttgacagcagatgctcaacaactcactaacagtgctgattacaaaggcaaggccaaagtcattgtaggtaatggagcctctatccctattttacatgttggttctaattgcatttccacatatagtcctaatcaatctttactgcttaaagatatccttcatgtcccgagtataaccaaaaatctcttaagcatatctcaattcacaacagacaacaatgttgtccttcaatttgactctgtgtgttgccttataaaggacaagagaacgaagcaagttcttctcaagggttccctcagtaatggcctctacaaacttgaagttcccacccattctgttgctgtccagaatccaacccagtcaagcaattctgctgcacaacacaacacttcagttttcaactgtaccacctcttcaaatcctgtttttgataagagtagaataagttctatatggcactgtaggctgggacacccagccaagccaattcttagtcaagttttagctcaagtcagtcctcaaactaaatgtaaagatgtcaatttttgtgatgcatgccaacttggcaagatgcatcaatttagtttcaagactacttctaataaaacagtatctccctttgaaataatacatactgatgtttggggcccctcattctacacatctagagatggttacaaatactatctcagttgtgttgatgatttcacaaggtttgtttggatatatcccatgcaatcaaaagctgaagttactgttctatttacccatttcaaaaaccttgttgaaagaatgtttgaaaccaagattaagagtgtgcaaaccgacctcggtaaagaatattcacccctgtataaacattttcatgaacttggtatcaatattagacagtcttgtgctcacacacatcaacaacagggtcgagtcgaaaggaaacatcgacatgttgttgatatgggccttacacttttggcccaggctcaaatgccattacatttttggtgggaagcttatgcttcagctgcatatctaatcaaccgacttcccaccccaattcttggaaatgtatccccctatgaaaagctgtacaaccacaaacccgattacaatcttcttaaagtctttggttgctcatgtttccctcttcttacaccatacaacactcacaaggttgcttttcgatctgccaaatgtctgtttctggggtataataacgcacaaaaaggatatcgttgcttacatcctaatggtcgtgtctatgttgctcgaagtgtaaacttcaatgaggctgagtttccctataacgatctgttcccacagaaatctcatcaaactcctccacctgcaatcgtaaatcctaatacttttactataccaagtaccaacactggtcagtttgcattccctatacacaccagacatcaatctcctactctagccacatcaggttcgagtgtctctcctgcttcacaatctactcctgttcccagcccaaacatcagtcaatcgagttcaactcataccatacacactggatcccctcttccttaccctctgcccacagaaaactcccaatccagttccaatttcactcacacagaacctgtaccaacccaagttaccaacaaacatactatgatcactagatcaaaagttggagtcttcaaacctcggacatttctcactcatattggaaatgaattagaaccaacatctgtaaaacaggcccttgctcacaagcaatggaacaaggccatgaaccatgagtttcatgcccttaaaaccaagaaaacatggatccttgttccacctacacctgatatgaaaatcattactaacaagtggttgtttagagtgaaatacaatgcagataacactgtgaacaggtacaaggctcggcttgtagctaggggttttcaacaaacaccaggccttgacttcttagagactttcagccctgtcgtaaagccgtgcacaatcaggatcattttctctcttgctgcaaccaaaggctgggacattcagcaaatagacattaacaatgcctttctaaatggagagctcaaggaagatgttttcatgcatcagccacaagggtttgttgactctgaacaccccaatcatgtatgcaagctaaccaaagcaatctatggtcttcgacaggcaccaagggcatggttcgatacactcaaaactaccttgctgcagtggggatttgtcaactctgtagctgacacaagcttgttcttcaccaagaaaaatggccaactgttaatgctcctcgtgtacgtggacgacattctaatcataggggataatcaagaacaaattcaaagcgttataacagcacttcatcaacgatttgctttgaaagtacttggttctgttcattattttctcggctttgaggtcttgcgagattcaacaaccatttatctcaatcaaagcaaatacaccaaagatcttttggtgaaaacaaacatgcttgggtccaatcctcaaccaactcctatgtgtgccactgccaaattaagtctcaactcagggactcctcttgaagatccttcccaataccgtagtgtaataggggcactgcagtatctactaatgacacggccagacatagcgtttgcagttaacaaactaagtcagtacctcaaagcacccacaactgagcactggggggcatgtaaacgcatattacgatatctagcaggcacaccaaatcttggtctctcctttactgcttccacaaacttcagtctccaaggatattcagacgctgattgggctggttgcagtgatgacagaaaatcaacctccggttattgcatgtacttagggaacaatcttgttagttggtgttctaagaagcaaagtgtcatagctcgatctagtacagagtccgagtatcgtgctctggcacttgcctctgcagaaatggtttggctcgaatcaattctcactgaactttccattcccacagtatctactccaattctgtggtgcgacaatttaggtgctggctctttagcctccaaccccgtctaccatgcaagaacaaaacacatcgaaattgatgtgcattttgttcgaaacagagttcttgaaaacaaacttgaggttcgctatgtggactctacataccaagttgctgatattcttacaaaacctctacacaatcctcaattcaactatctcagggacaagttaacactcaaagtaaatgagtgcaacttgaggggggatgtta

SEQ ID NO: 1440 - DNA, 4981 bp, Cannabis sativa
ttagtagaacttgatgttagaatccaatcttgggctaacctggggctctgtgaatttgatatctgggcttgcaacaagtccagctagatcatgctccatgtactcaaagaccagatacaaactacacgacatcctcgatgtaaccaaaccctccagctttacaacattaggatgattcaatctccgtaaaattagaatttctctagccataaacttcacactctcaggctccagattgtcaaatctaaccttctttagagcaacaattttacccgtcaacatatctttagctttgtaaacattactgtatgtacctgatccaatcttaaaattcataaaaaaaaaaacagttaatttcaaatcacaaaacaaaaatagaaataaatctgataaaaagattaatgaaaacccatgtcttaaaaacatcatgaaaactccatctcaatagatatggcccattacattcattacacttatctgtcacagcaatgaaactgacagaattgccctgttgttcttaccacataattcatgacaagcgttgagactaaaaaaagaaagaaatcatgacgaaaaacaaagacaaatcaagtaaaatgactatcttacgtttcccctcagctaaaggaattaccatcaaaattgtcatagtttgttatactgttttggcaatgctatgtggaacaattgaaatagaatcatgacttaagttgtctagattttaaagtacaaggcatgagataagtccaaatcaggattaagaactgagcttagcagggttttttaggtcattaacgttgttcagctttctaatttcggaaacaaacaaaaaaacacatacataaacatataattttacaaagaaaagaaacaaaagaaaatcaaacaccttatcaatcttctcaaacgtgtcagccctccttggaatccaaccatcgagagcttccccacatgcgtcggtgagccagactggccagccagctgccacctgctctcctcgaccatgcttgggcagattactcaacctttgattgggcttcgaccttcttcttccctctttgggtggcctctgatctcctcctccatcaccctttttctccttctggctctgggtttcagttgtggtcccctcctcatgagcctcaacaacattgttttcttctaccttccctatcgaaacctcatctactttccttgttgtggatgctacactcgaatccctactctccctcttggactcggacactgttcttgatgatacctctcgcccaaacacacaacccatatcttgaatctaagcctcatctcgcaaactaatcactacaagattgcaaccactttataagcataaacaacttgagaagaagaaaaaatcaatccaatttataagattgacctatatattatctgtatactcataaacccagtaattaaaacaaaacaaaaaagtaataccatgattagagaaactagaggtagctagtaaaagctcgagaaagaaatatgatctgggttttgttagaataagcttaaagtcaaatatttgatctgggttttcttcaaataaagcttagaagtaaaaaagaactgatctgggcaaaaggaaaagactgaaacttgtagaattttaagagaaaaaaagagggttcagaatgaagaaaagttagagttgaaaaaggccagtgatccaacatcatcaagaacaacataaaaacaaaaacgcttatacatagaaatagatagaaagagagaggagttcagagtaaaagtagtgacttactgagattaaatctgagttcgtaattggtaagaatcttctagaaaggaaaaagaaaatagattttgaggtatgtttatatatggaacgattgatggggttgtgagttctatgatgatggccgtcttttctggctccagacaagaggacgaataaaaggagtaccaaagcagatcttccaattcacaagtcaaacccccagaactgaactcctcctgtctctctcctctcctgccttggatttttttaatcctaacctcactgccaagttttctctttctttctttcttttttctttttttttttcctggttaaaaaaaaggatatgatttattataatttcaaccaaatttcttctgtcttctttttatcaatggggaggattaatcatatcaagcttaggcaggtgagctttttggacaagtaaaaatggttcctttgtaagaaattcccaggctttgatgtttaaaaaaaatgtcttttttattctagaacgacatgtcgttcatggggccgggagcattgagaacaggtttggtttgatatattaataacttaatcaatgaatttttttgaagaactattctagacatcagccaattttaataaatgcccatactcattaagaataaatacataaaaaaaaaaagttaggtttaagacaaaaatagaaggggttaggtagttgacatcgtatacttgtaatatataaattccatttgttgagttagctgcacaattgataacatttaaaatcatttcatctaatcccaaatagaaaatttaagctgctataatatgtccacatgttgatatttcacgactaaggaagaaattgaggtttaaaaaagaaacattaaatacaacatgataaaaatctaagttgaaaaaagaattccctagaaaactaatatggtaaaagaacaaaatttatagaaccctttgtttgtttttagtaaaaccaaatttaaaatggaaacagaaggaagaaagattatgcaaagaaaagaatatgcagcattacttatagtttatggagaggagtaattatgtcttctgaacaaattttctgcaactgagtcccaagacaactcaaggatacatatttgagagcctaaacttaccaaaacagcgatgtaatgcaccaagaaccaaattatacattaagaaaataagatagtttgctaaaattaaccaaaatttttgagttccaaagctactacaatttcctgaacttatcaatctgaactcttcttcttcttctttttctctttctttgtgctgggtacttctgcttcttcttcttcttcaacatgctttcttttcttcttctttttttcacctgcatcaactttttcaccatcattctgtacctcagcttcctcggctgagtgtttcttcttcttcttcttctcttttttagcttcaccatctgcatgtgcattaccatttccattctctggcacagctgctgaatcctcctcttcggtctgcctcttcttctttttcttcttctcttttttgcctgtaacaggagattcctcagctgcttcctcaatcttcttctttagagattctttcttatcagtttgtccaagaatagaatctgctgcagtgttgtaactctgcacgggaaaataagtgtgaggcttaagataaactgaaacagagccacaaaaaaacaaaaaataccaaccgcaaagcatcaaagcaaaatatctagttatcaaaaaaccaaagcaaaatatctaaccttagcagcagtaatcaaaccaccagctcccgccttcctgtccttgtcatagacttctatcttcggtttgcctttagctgatccagcagatcgacccaactcttttccttcaagattcctcaaccgtgcctcaagctatgtatagaaataatatcagtaaacaaataatttccaattgaaaaataaaacaaaacagaaactatgccctagtgtaccttagctcggttctccaatcccattgagttatcttgcccatccccaagagcatcatatctaattgccaatgctgtctttgcagccagtgaccttgaaatttttcccttgagcttaggagctgcctgcccaatcaatgatgcatggtagataagcccatacttgggagttgcatgcttggtctttagtgccctgaacagtgccttctcagcaccaagaatttggactgtgcttccaggttgttttgcaaggtttatcaagctacccccatgggcaatgaggcgagcaccaacaagctctccaacaagagcagtcaagtttggagcgatggtgttcattctgctcttcaaataatcgtaaagttgagctctgtactcagaaagagaaatgacctggtcacaaagttctttgatattaatcaaatcaaggtcactgacttcagttcccatagaaatcatagatgcttccttcatttcagtctcaacctcctcgggcaatatctgttaaattttaagatgccaaagtcacacatcaattaccattagagcaatcattaactttgaacaagataagatgattatcaagaattcttacctcagaaaaatcaagctttgcagcattagtacggtcacccatcagcttcacagccttggcataaagaatgttgtcctgcacaatctttgcaagctctggaaaatgccaaccgtaccattctcgaactctcattgcataagtattcagctctttatcaagatcatcaagcaacccaatggcttgaataatcattgtatcaacctagaatgcagataaatagattagttactactcgaagagcctgaatagcttccaaagcataaactaacaaccctacctagccttgacataaaaacaaaattaaaaacataaaaaagcaaaatcaacagagggatcacaattattcttgaaacaaacttaattaggtaactctatcaatataatctctacctcctttttgaaataaggatttttttaaaaaccacatatcaataagcatcgtgatttgttataataaataaaagaacacaccttgtcagcactgaacttcagcttgtatcgagcaagactatgagacaatcccaagctcattggtgccaaatctttagctgataggccagtcagttcagtcaattgacttcgcacacctctcatcaactccataacaacattgttgtggacacagtctacttgctgcaaaacat

SEQ ID NO: 1441 - DNA, 3232 bp, Cannabis sativa
tagaccacgtgacacaataacataaatgagctttgattatattacttacataggtccgtacttgagttaatttaattgcgttgcccccagggctcaataacctggtcatactctgtttcccccgacccaaggctcagatactttggtcaaacacccaaaacatctcgaaataaatagctaataataaatgataaggaacaagtttataagcattcgcgtggaaattgtgttatgaaaaatgaccaagtttcgacaagctgatatcgttcattcattcaataatatgctcaatgctgatcttgcaaaactaagcagcatcaagccaagccaagccgcgccttctcattattatcatacttatgacaacttgtgatattataacgatgatttgacttgactcatccagctatgcaatacgttaaatcagtaacagtcaaaatgcaaaaagtgacttcataaatagatagtagcaattgctttttccttcatctttatctcaatgactgactcaatatgaccccccattgacattggaactgcacaccagattgaggggccttagtctagtacactcccatcccacgaccccacaaaacataacacatgagaaaattatttagaacagaaccaacaaataaaactggtaacatgattaatgtaacattttattttaaggtttagtatttgtgagaagcatatgattccacttttttgacctcatttcagccctcctcatcatcaataacaatagtgcctataataatgtaaatttacagattaaaatgacacataaaaaagaagaagaaaaaagaaactttgagagctaatttggtaagtatgaaaacaaaagaccatatcccatgttctcatattggggcagtagtagtaaataataaacacttccattgatttgctatttgaacttaacaaaagaagttgtatccacatagttcagtaaaatttgatttgaagattggttatccacagttcttgaagaagatgatgatgattctataacttcacttcgcattagaatctaaacacagcagcaacaacaaccaatcaaccacaacaacatattctgtgtgctgctctgcttttaacgaagcatttaattcctcctatgactcgcctcatcctcttcacaatactttccatgctacaataataacaaataaatagtgagaaacgttgtaaaaagagacaattgatagcagtaacagataggtggttggactgttaaaaattattaggaaaacaatgaaagcttgacagtaagaagtattaactaaagagtaaccaatggacaacccgaaaggcaagaagggttttctttttcccagttcatttttttatgttacaaatgaactggggatatcaacacaaacaatgaaagcttgtactgaggtaatactgattatgaggctctctgccaatgaacaatccaaaagagaaaaagggatttctcagttcaggtttatgttacaaacatgataaaaaataaaaactaggagaaaaacagagaagtacagagtatagacaaatgtgttttttgactaaatcattcaacttaaataaggctttgatcaatcagtccgttaatagaaacctaacccaatcaataaccattttttaaaataacgatcccaaattttccataggcgacatatgggatatttattcaatgattgatcatgcatataaatccaaaagatattattgtgctactccaattcaaaaagacgtctagttaaagaaaaatgtcttaacagagatataattataccagggtaggtaacccagttcataatcaaagggttttcttctattccaaagcaaaaactcttcacatgaatcaacgaaagcatattctcattaaattcaatcgataacaaagtaaacaaacaagaaattaatgatgaaattctcaaatctcatatataaaataattaaaacataaattgcgagaacgttacgatcaaatcgtgaagttttaaataaagtcaaaggagatatgaacttaccaggaatttccttccggggctgagaaggtcccatggcgtaacaaaaaatggagcgccccaacatggagaggctcgaaacaatcccagccacgtagaacaccatcaccaatcctagaacccaaggcatcaatatgaatccgatgaagaaagttactgacccacaaagcatcagagccaaagaaatccctaataagagcgaggcaaaccctgccggcgagatctgcgacgccgccgaggacgaggatgtcggtgataacctccgcgtcggaggcatctccggtaactgatcggaaaacggaatcggcgatggaggagatcgaaggatgttgaggactagagatgaaagctcatacaaaacccccgactgctgatcttgttgccttctcatcattttgtctagttcctttttcccgagaaaattgagtatcagaaggaaaatatttttcctagtcgtgaaattacttctagatagaaataaaaattaaaaaaaaattaattatttgttgtaaccgaggcaaatggataaaactgggaaactctatccaactgcgtaataggtcgattggggagaattttctctgggcctatctttttcgcaaaacacaagtggcgagttctaatagggttgctttgtttgtttctcgggaaaaattattctggacagagaaataagacgcggcggtggaattcgaaaaaagcaccacacgtagttttccttttctttttttttcttttctgttaggtatttggattatattaagagaaaaagcagaataagcgaaaatggataaaaaagagctggggatcaggagttgagttggagttgcttttctatgattaataagtgggaacccaccagtaacaaagggtgcgcgtgaaatcacacgcgattgagacttgaggtgcagtcaaatcggtggtgataacgtgggcccgtgtttgacgtgtttaccttatcttctacacataaacacgagtacgcgcgtgcctttagagaaagagaacgtgcgcgtgtggctgcctaattaaacaaaagatctatttgagaggataatcttggtatgactctgctggataaccaattttagttggtgaggtgttccctgtgaggtttttaggtgagcgcgtagtatttgtatttacgtaattgtatttttggtatctaaaatgattatggaaaattagtttatatattattttaatttttt

SEQ ID NO: 1442 - DNA, 1635 bp, Cannabis sativa
gaattaattttttttttatagtagtgaatttttagaaatggtataaaactttgtatataaatgtgaatttcacactaaaaaacagaaagaaataaagattaatgtgacaaaatctaacatatgatctatagcaattgaagatatatattgaacaaaatgtgagctatataggtagataggtatctaaatgaacagaagagatccacaattaaatatcaactgaaaagggaactgaatggttcaaaaaagtcttgattgggaatgtgactacactactactacaaatattatgtactcagaataaatcaaagagaatcaaattttttttgagatcttcatctcttttttttcttcttattctttccctttttctttattctacaatgaaaaaacaaacaagtaatcaaagatatatattgctcccagataccaagaataaagagatatcttatcattcaaaattatctactaaaaattatatatgtatttcaagcaaaaaattattacatattatatacatttgatttccttttgctttttccaccccaaattttggaatatacggccgattcctgtaatcttaaatagatctctatttagtaattataacatcaaagtccactagccattcagaaataacttatttataaatttatgtatacactaaaacaaaatagttatttttttttaatagcaacataatttttgtatgtacgacttttaatcacaatataaaaaataatttgtgattaaaatatagtaattaaatataaagttattattaatttagttttaattataataaatatttcgactaaaaatatatttaatcacaataaattataatttttgtgattaatacttacatgtcttatatatatatatttttagaaaaacttaccgaacttattttttttattattttttttagaagaaatggtgacattttatgagtaaattgcatcaaccattacaatattcaaaagatccaccggagcattatttagtcacaataaattataatttttgtaattaatattttcagtcacgaattttttagtcacaatataaaaataatttataatttttcacaattttttttttaattttaatcacaaattttattattactaaaattaaaaaaaattctagtaattttatttcaagaagaaaaatatatttgtataagtttatcgtgattgaattagatatgtttatattaaaaattaatatatgtatatatagaatgaataaattaataatttttcaaataatcattagaaataaaaaaaaattgttagatataaattaggattaattgtggctaactttttgattctaacaattggcatagttgatcattttgatttttacttcatagatgtggatatcacagggatattcttcaaactcacaaagaaacaagaaagtgagtagatagggaaaaaaaaaagaagaagaagaaattaaagcaaccctatcaccaaaagaaacacgttttttttaaattcatatcttttttaaaatatttttcttccattgatctctattttgtgtaattttatggttggtttgggaggtcttagttttgctctagataatcaaattaaagcaagcagccttttcacttctaaa

SEQ ID NO: 1443 - DNA, 4138 bp, Cannabis sativa
aaatgctaaaaagtaccagtagtgtttagtaccttataaagtgtcatattgctattggtgcaattaagtattgagtcctatataatttaatataataacttttaggagatattgttaaccaattacaaggcgccacttctaggtagtgctaggcactactggtacccaatagcaatcctctatatattaattagggtgatacttagtgggatgctttttaatttgtaatcttttgtgtatatggtttttcatcccataaatctatgatttttagtaggtattattagttatggtactccatagaagaaaggcttaaccttgatccaaatagtgatttgaagctactcaatatatggctcacctcatggaatggcaggtttttttcttctcaaaatcagctccttcaccaattgggcaatggagaaattgtgtttggcttaatatcaacattatatatatatacatatattgtatattaatattgaatgatcataatggtgcattgaaatatattgaaggttttttttttttttttttttttaaattaagtccaaaaattataccttgaatttagtgacttattgaacaggtggatattataatgtattcatcaagttggcctgagcattataattacaccattgtctctaagagtaatgaaaaagaacagaacaaataaataataaagtgattttaaagaaaaaagaatggatgatgatatacaacaaataaaagcatggatgaaagaattagttaaaaaagaaatggaaaataattatacttgttaggtagaactgtggcaaaagatgtttgttttggaaactcaagtttacatcttccaatctatctaataatgtcatcattgcatggattttgggagctacaatcgaatttcgttgcacacttacatgagttgggtaattatatgattgggttttggaggtttctcatcatcaacgtgaatcatgagtgggtaaaaaatgaaactcattaccatttaaatgttagaattagccatataatgataagatggtatactagctacttattaatttgaaggcaataatatattaaagttgctatttgttaacacatggtttattgattgatgtagatacatataaagtgtggtgtactgtgatgtagaatggtatatatgtgtgtgtatttatttatattattagtaccattgttgtttaattagggttgaagcattgtagtagctattatataaatataatacatatagataattatacatgattatcataatcttatatatatatttgtataattgataacttggtaatatgacatacatggctgcgttatgtaccataattaatcttttcttcttaacagttaatattgtattaatatgtttaatttcaactgatgagaaaatttacatatagtatcattttttagctcacccatgccgattgctttactctgaattatattaaagacttatgcatttaaatattatatatatggttaattcttgctcaatggaagtacgctcaatcaagaaaatttgatccccttcatgtgcctgctggtacttttgaagggtgcgagcgttggtcgaaatcggatgcaaataagctcaagattaatgtcgatagtgccgtgtttgctgctgaaaatgcttatggttcagggattgttgttcgggatgatggtagaaggctaattgaggcttttacaacttatgtaactggggatgttcaacccgagttggccgagataatggggattaaggaagcactcagttgggtcaagagaaagggtattcaagatgttgtcattgagtcggatagcctacttttgatccaagcgttggatagttctattcgaatgccttctttgtttggtttaatggttgttgagtgtcaaactcttttactttctcttgtcaatgttaaaatttgttttgttaagcgatctgttaacagagttgcacattgtgttgctcgcaacttttgtttttggtcaggttgtaattttgtagaagggtcagcgcctgctgctcttcaaactctaattcttgtcgatttggcagtttaatggattgaagctttttttttttaaaatatattatatatatagtgatgaatatatattgaattaattatattgtgggggaatttatccaccttgattaagaaaactacataatgcaatttctaaaacatacagatgaaaggctttataaattataataacttttttttttttatttttttttattttttattgttattgatattatagtttaaatgactttgttgacctttaataatattgtattaatataagattgcaatccataatatttttttaataagaaaagtaaaaatattttgtaaaaacatgttctataaaactgtttttacttttttaattaagaattatattgaaaacaaaaaaataattactttcaaaatttttttaaacagttttttttttcttaataattattttgaactccgactatgacccaaacttggactttgacaccatggacctagaccttggccccgaacaccgaccccaattgatcagagtcgatccccggcctctgaatctgaccttgaccctaacccggaccctgacgctggacctaaaccccagaacctggcccatgatccaaacaccggacccgaacctcgacctcgacccgaacttcgacctcgacccgaactcggacctggacccgaaccccaaacttgaactcagaccttgacccgaactcggacctagacactggacccagaccctgaacatgaccttggatctagacactgtgcccaaacccccaaccccgacccatatctagacccaaacccggaccctaacctcgaactcgagcctgaactcagctcgcactccagacccgaacctcgaactcgaacctcaaccctgacccagacccaaacctcgatcccaacccgaactcggacctggaccccgatctcaacccctacctcggacctggactcggacccctacctcggacctggacttagacccagccccaaacatggacccgaaccccgaccccagacctggacccggctaggacctagacccaaactcgaattaaataaaatcaaaaaataaaaatgaaaataaaatttacaaaacacactttgttttctatttttaaaattgaaaaacaaaagtggttatagaaagcatttttgttttgcaaaactaaaattttaaaaacaaaatttgactttcatttttgtgattaaaaaatttaaaaataaaagtgttaccaaaatgtcacctaaatgttttgtttttgttttattatcaatattattaatttattattttggaaatcttcatctgtgtgtatgcgtgtgcagtgcatgcattttttgaattttattgttatgcatgtcttaacatacacactttgtttggtatcacctacacattttagatttgtattttgttgtctaaatttttaggagcagttttgtcctatgtgattcgtgttaaaaatttagcagcccatagttttacaaagcatacttttcgattagactatgagttattctaactcgaggagagtctcgtatatctgcacagtaaattcattaatgattttaattactatgtcaaaaaaaaaaaaatcattaaactttttctttatgattttaagcttattaaattaataatcataatcatataatgttcgaaaattgatcaacttatgagcaattacaacataagaaattagtaatttactaataataacaataatcaaagtactaaatgtgcacttaaaaattatcattgtacgtaattttgacacggttgaaaaacacaaccatattttgacatggttgaaaaatactccaatagtactttctcaagcatatagtacttaattttataacaaatactccaattaagaatgagtcaaattcaaatgcgtaatgtttattttacatatttttaaaagctgagagcaatctctaagttaggttttgtagtttacaaaagtaacttttataataattgcataaaaaaaaaacgttatacatatataggacaaatattaatgtgaatacaattttaattaaaaataatatgaatgatatatacaacaataaatttg

SEQ ID NO: 1444 - DNA, 2189 bp, Cannabis sativa
taagtatgtatatgaaaaaaatatagcaacttcatttgatgatttgaacttctagcgagaattataacatcgtaacctaaatagagaattataaatgattttgattgaccaaacaactgacacaaaatttatttggtctggtttcaaatgatttggtgtgaatatgttgaggtttggaaccatgaattgaatgaacaaaatgactattagcagccatatggtatttgttacctataaaggtaaattgagattaaaataaatgtcttcattattattttatgagatagtttaaggcatgatgctaagagtagttacctggtataattttgcctaacaacactatcatcccatgcccaattctttctgctgaaaaatcaccaccagcacatgcaaataggttaaatttagcagtcaatctatagttatttgactattaagtctaaaaggttgggcgactacaaatagtaaatctagtatatatggaaatgtaatggagatcatatatatgtgtctataaacaatgtattgtatcctgcttatacagttacatatattcatttcacacgaagttaattaccacttcattccatttgttctatttctatatataagaaatcaccacattataatgaattcacattttggttttgtttaaataaattgttgtttgttatagatgttcgaaaataggaaatatgatcctttggtaacacaattgatgagtttcatcgttcttgatttcataattttataactagaagtgcaaagcttagaatacccctaacatgtacagcatttgacattttcattctcataatatataatgtaaagagtaaacacacgtgtacaataaaatttcttttgtgtttgttatacgcactctcctccattattgaaaaaaggaaaaaaaaaaattgttgaattgaatgatgtgaatgtgaacttgtttaaacaagtggttgactgataagcttaatgtatattttaaaatacaaaaatgaactgatttataacgtgtcttaaagggtaattggttgtgagccatcgaaccgatcttcttcgtagttaattgggagtaattatagtcaattcaatcaactctgcttcttgcactgtattcaattttgtcaagttcaaacaggtggggagtaaatcacaaaaagaagaattgttttgtctatattgaaaaaactacaacactacagctaatcaacaaagcaaataaaacaaacacataacagaaagagcatgaaaacaagcaaaggaaactattgagttgcaagggaaatgaaaatgtttgcctaggaccattgtgatgatcaatccaagaaggtatccatggcatcagtgtacatacccccttgctcagaattcctatactccacttgttggtggtgattaagatgatgatgatcgaccgaggtggatgaagacgatgcagccattcttacaggcaaagtaaagctcctcttgaacttattttccatgctattggtctttctgccatcctcagcttcgtggctatctaaactcaataactcgtttgaatttccatgacaagcattatctgaattggggtggttgttttggttctcttgtttgtttcccaagttgtcagtgttgaacagaagctttgcatcatcactttttccagtgagtgcattaaagaaggacaaaccattgggccatttgatgtcattttcatgctgatctctgcctctgactcctcctcctgctatacctcccatcatgtcttccattcgggttgtttcagatgatgaatgaggatgcaggaagatatgtgtctcatctttggcttggggaaagcctagttttgctggagagttatggtaattaggtgaaggaatcatagaagtaggggatgggagtggcctttgtgcccagttaaagagtggtggaggtgatcttattggtatgggggattgttttgaaggaatgggaatagaagaggatgagcttctacttgaagaaaacaattgggagagataaaaaccagattggtagcccagtgattcaaaggtatgcctcattcttagcacaaaatgaaggtcttcaggtacctatagataggtaaatatgcatgctcgtcattagtactaattgcttcataatttacaaatgtttaaaatccaaagggagtagagaaaattgaaaaaagaaaaaaaaac

SEQ ID NO: 1445 - DNA, 1436 bp, Cannabis sativa
attttctaaactaatttagatacttctttaaggcaaatagattaaaaatgaatataagatatgtactgagtcttagaagaattaacactaaattctacacaccgcattgtagacaacaatatctggttccacccgtggatcccactcaccaagagcccctgttttgaacttcttcttgggaggagaacgcatggtatcaatgacatcaaaaagttctttcatatgtcccgcttgtccaagagtaacagcaatagaatgataagcaactaaatcaggatatgaggatatttgttgctgttgtaagaaaacaaagaagaaaaagagtattagagttctgtcaagctttttcttctatattcctagtgccaagagccagcaatgaacatattacctgcattgcgttaaacacattgagcgcctccacaggtctccttgcctttccaagaacatgaagtgcagttgtgtatacaaatctagatagtaatatgatatgtcagaaaaaaaataaaagtacaataaagttatataaaatacaatagccatgatcttcttcatatgaatacatatacaataactacctcctttagtagatgttacatgttccagtcaatcgtaacatggagagtttcatatacatacatacctatatatatgtatattaaaaatgactggtaaggtatttaatttggtgtaatacttgcaatacaatagtaaagtgcttttaatgcagcctagcatgaaaaatatgctttggtgttttatggtcagcaatttattgtgcctcgggtttgcaaatgttgtagaaaaaggttttggttgttctgtttcctcttaagacacatgaaaaaaattataatgcttatgataaacagataaacatgatggactgaacaataactttataggccattaaaagagaagtggttgatattgagggtatttaatggaagaatatcccagattacctagtaacacaccttgagaggcgttttgaagagaaggaaattaaacatgcacggtttctcattgggagtttatcaagccaattggaaaatattgaaggaagatttgatgagggtgttcaaaaaaatttcagaagatggaatcgttcaaggaagcatgaatgagatataattgtctcatacccaaaaaagtcaaacggctgcaaggtgaaggattacaagccattagtttaattataagttcgtacaagattatttccaaggtattaccgctgaaacttcggggggttcttgctaatactatttctgaaacccaagccgcctttgtggaaggacagattttagactcttgtcttggtggctaacgaggctgtggaggaataaagaagcaagggaaggagtggattagtcttcaaaatagattttgagaaagcatgtgattatgtcaagtgggactttctagggttggttcta

SEQ ID NO: 1446 - DNA, 2354 bp, Cannabis sativa
aaaaaaaaaaaaacccctcaaagaataagatgaataaggagagagaataataaaaagtaataaaagttagtctatgatgtgatatacttatcatcaaaattaaattaaaagaatgtgataatacaaagttaaatcaaactttttttaaaaacttcaaatataataaaaaaaaacatacaagctgtcacgtttgtgttaaaaaagaaacaatttttttttatcaaaaaaacagtatattagtataaaattgaaacaataaaaatatagtaagaacaaggtaacaataaataaaattgaaaaaaaaaacagtatagggtgtaaatgtccctttaattaagttaaataaatatttgcaattaactcaagaaattagataatgtaattatttacctaatgtagttaataatatgttattttatacactaatcagcacttttaattttatattagtgtaagtgggagtttgttgatattttatgccctaaataaagcttattttaataaaattagatttactaattaataaaatttagaaatcattttatgttgcacagttcacatgattactttcataattatatgtttaatatataaattttattaaatcccgaacatataattattcatgattgtagtgttgtctacatagtgaaaaataatcataattatatgctccaaactttttagtctcacgatttatcagtgcactgaatttatactgatatgataattagcaatgtggtttacttacatttgtaagtagaatgtccttttcaagacgttagcaaattaaactagtatcagatttgtcggctatacatcggactgagccgatattgacagtggacaggatatcataaacttaacattatgtattttctatgtcaatgtcacttagttgatcttaggtcaaatgatctaaattctgagatggttaagttctagcttgattgtactatacaaattctttgaatgttcctcaccaaatattttcgagtcaaggcgcacgattcttgaatttattttttcttttctaattcaaaaataaatttgaagaaaatctagaatatagcaagcaacaacaaaatacacatatattccagtaattcacgacatgcgtgagcaaagaaacaaaaaaataaagaagaagttaaaaaaaaaataacttacccactattgcaccgagagtaattttcttagtggaagaggtcaggatggaaagcgaagctcacatagcttgaagaacaacttttccttttttttaagctttgaagatgaagagctgttgaaagttctgaatgaatttaaaaattcctcttatagacccactaaagggtaatctcagtatgcaattgaaattggattctcacccccaaaatgacaaaaagtatgatcattaaatgagtgagggtgcaaccgtcaaagcacgttaacccatttctcaacttttgaataagtattaaattttgagatttgaagagacgaaagaagatacactcgtctcaagcaaggcaaatgtcacctccagtacgacatgtgaagcctaacacgtgctactaatccaagcaatatgaaaaccttggaagttcccatgcgaccagaagctcccacgtgtacttgggagcaaatgttatcataatttttgcacaaggtaatgtggcactcaatagggtaacacacattaagtatgtttgcagctggacggggtatactagtttagggttccatctagaacgatttacagccaaaccggttgagtttagttcgttagcaagcattatccgagcaggttccatgccttatacttctacaagcaaatcagatatgcctaattgagttccattctccgtatagagggatgcgataattgaagagctccaaagataattctttaaatatctcatcaattataacttaattggaatccctatttttatgggattgattttatttaattgagagaatcgtgagatttaatatttagattatcaaattcttctttgatttttttgagacattatatcttttatttttcctataaacaggggagttatttcactgcgaatggatcttttttttgactttcgaaagagctactatcttgctaaaatatttgtaagctttctcgagattatttagaaactcacttggccgaactcttgtgatcttaataattctttaagtaatacaacagaaagaggagtagactattaccattatcacagtgcggaacctttataaacaattattataactttattattaattgatcattcaattcgattactttaaagactcagtgttgttggttaaaagcgaggtcaacagtattaattctcacgcgattttcaatt

SEQ ID NO: 1447 - DNA, 1630 bp, Cannabis sativa
tttaaagtataaaaatgaaaaaaacccaaaaaaaaaattgaaaaatatttcatttttctaattttaaaaataaaaaactagtaaaaaaatgttactaaatgcatcaaattaaaaattaaaaataaaaaacctttttttcctccaaacaaaattaaaaaaaaaaattcctactttaactacttttcattttaaactttaaaatttaaaatccctaaaaatacacataacaggtaataataccacaccagaatgaattcatactgaaaagaaaaaccctttcccaatttcaatttcaatttcaatttcaatttccacgagacttggaagacgatccaattaccaaaacacgctttgctttcgattttttctagtctatggcgattctctacgcccttgtggctcgtgggactgtggtgctcgcggagttcagcgccgtcactggaaataccggcgcagtcgctcgccggatcatcgagaagcttccggccgacgccgattctagactctgtttctctcaagatcgctatatttttcacatactcagagttgatggcatctccttcctctgtatggccaacgacacttttggcagtgagtaactctcctttctttgttttcattatttgatttttttgcttaattgagtatgggatcaaattccatgaattgagattcagtttaagggtagagttgatgattcaaatcgtacacagacagtcatatcttgtgtttagctgtagttgatatccttgggttggtctctggagctgtaatacacaaaatatagattacattatatgaatttaataagatttagatgcatttatatagtgatcgactcctccaaatgcttgaagattacctgttttgtgtaaaagaacaatttttgatacccattcgattcgaggtgcatataccagaatagaggacaatggtagacaaattttagaaagttgaaacttatttataaactaatgatcacctctgatgataattattgtgcatgttatagaattttaagtactagttcaacttttgcaagagtaagtgttgtagcactagccataattacagctttactgaattaagctttagctatttgagcctaagatgaatgctaccctaacacatagtgtacttgattcttaaattgggtttggctgggattactttgaaatgtttggatggatcaatactaaattctggttttgtaacggttgcattttttcgttaaagccaatgcacatgcacagtatattccctacaaatgtacaggaggcctattatcaacttccaaaactagtaaaaaaaaattgacaaaaaataaaatataaggagtgatgtatcaattcactttccttatgaagttttggtggtagctttttagttgtggtttaatttacaatggaaatattttatacgtgatgtatctaaggcatgaggagactgattgtaccgctttatgatcatgactctgacttagagtctatgcattttctatctttatattggtctgctaaggcaagtatattctgctggattattattatgagtatacttgtgcggctatactctgaactgaatgatgatttttagttaaaatttgtatctctccacccccgcccccccc

SEQ ID NO: 1448 - DNA, 2338 bp, Cannabis sativa
ccaagctttatttatgtatgcataaatacataaatgatgaattgtcaatctttttaagcttctcagccttaaaaaatgatgaattttttgtgtactattagtggtcattcagtgttttagttattattagctcatatttctgtactaagatgcttaatctgaataagaagaatgcagatagagttgcagaaaacaaacaagatgggtaagatgagatttagataccatttctcctcgtgcatctcctagaaatcagagtgacatcaattacatccttccctattgctgcttgaaagtgttggaagcctggtgattgattaaggagaataataacccccaaaagtaatgcatttgaaaataatccagtttaaaacagttaacattttagagaaaaaataatcaagaagagtaatctaaatagagataaaagactaatcaacagaaaggatacttccttggataacaggaagcaagaagggatcaagctgcaaaacaaggaagcatacaaatgtgagcaattagaaactagaaacataagaatttgaaaacaatttggaaaaaaaggctaaccttgttatctatgagtacttccaacatataattgttccacaaaaacctaggttctgcctgtaaaagaaacaatggaaagtttccacttaaaatctacgaaattcccttaatcacatgcattaagaataacactgatatttcaacaaaaaaaaaaaaaatcaagagtttacctgtctccaaagaggaagcaacttagattcacctcccaaatcatgcaatttctgtacactgtatacacaaagaacacaaagataagaaaaattgattctttttattaattaacaaaaaaaaaatataagaattcagtttcacctgagagttagattcgtttcataagagaaaaacaaaccagaagtcttttcaacaatattgaggagagcagaaaactcagcttccatcttcttatgttgggcatcagaattttgaagagaatgatcacaaggaaaaaccttcaaagacaaaaccttaaagattgtatgacccaaataagttccaacacattgacgatccgtaatgacgatcaagtaggagccagtgaggagcttgaccatgccaacaacaccgtaaatcgtctgaatttttggggctcgaacagaactggattcaggaagctcatctggataatacacacatacaatatttattatatatgaaagagaaaggggatcgaatcgaatcaaatcaaatcaaatcgaaggaagaagaagaacgaaccaatgaagcttagagaagcatcgagtcgattgatagagagataaggagctgaagttccatcggttggttcaataacatactgatcgggaagctcccatagcctcatgcgtgagtagagcttctgccctgaatctgctcgctccatcattattcctatttccttcttctgaatttcacaaaattaattcaaaatgttaaatgactatgaatgaatttgaatcttgaaattgaaattgaaaatgaagaatcacattcggagattggagattgagatctgataatatttttgaattgaatctgaaaaggtttgatctgatctgacaaagtaaaagttagtttgaaacgcaacccgcgaaattttgagagaaaatgaagatgaacaacaataaagtattcaccacaaatagttcattacgtggcacattcttattggttgatattttatattccacttacaaacaattcagcctatattaccccgcctcttatttatttattaattaagcaaagttaatttattaatttaattattattttttgattaataaataaatctaatacagctactataaacaatttatatcagtagttgatctccttaatgtggaattttgagataaataaaataaagggaataaacaaaacaatacattatattaattatgtcttgtgatcacttataaaaaaaatggacaataatcgattatatatgtgtgcatcagtaacaattttataaattagtgcaagtgcaggcttatggagaatctggctgcaattaattacgataaattaaaaataattagtcagaaatttacattagacaatgtatatatatatccaaattttaattatatgttataataatttttgaggttaaaaattaaaatatttattatttttaaactattaattcattgtaggctttttttgcgttgggctttgggacttccagtttaaagatcttctcaaattcactatttttggtctcaattttagaagatcaaacaatatataattgatgatatatattaaagttttataatttaacattctc

SEQ ID NO: 1449 - DNA, 2366 bp, Cannabis sativa
agaagaagaagaagaagagagcacccattgccgtaccagagggtagtccaataagtaaccttttaatctcagctctctctttcatttatagggtttttgatatggcgatggctgagattttatttatgtatttatttgttcattaaatttgatttgtgtatgtttattactctaatatttgtgcatttcaggtttgaaaatgggactgggattgattacgggattgggaagaataatgaggagaaaaaggacttcttcccttgatattctttcttcaaagagggcaccaagggattattacaagggaaagaactgcaaaccaactgggtttcatactcgtaaaggttatacctttcttcttatttcaatctattcatctgttaagtttatgctatgtttgtggtttgtagccatataatttttggggaagaaaggaaaatcccgtttgttcctcaaaactatgttgaggaacttgagtagattctgcattcattactagcttagccagtgattatgtcttcaaaagtgtatgtaattgtaaccatgttgccggccttcaacgaggcattaatactaaaagcattactaacatggtattcatgctgtgattaatataacgcaaaataaacataagaaatgatcatgttctttgtgaagaaaataaaaaatggggtgggagtgggagtgggggtgtgtcctgaaagattaaaaagataaattcttaaagattgttttcttaatgcttttaaggatttaaaggatgtagatttttcctgctgagaatttttctgcaaaacaagatactgagacaattcctgtgaaataatttttcatagcatcttaagagctattattaccttgaactgggaatgtttagcggtttgatgggagttcaacatggtttattgtggtttgaaattcttatctattgaaaataattactttgcatgggaaatgtttggcagtttgatggagggtgaacttggtttattatggattgaaagtcttatctattgaaaataattaccttgaatgagaatgtttggcacttagataggagttgaacatggttaatggttcattatggactgagctataaaatgtaatcacttgtatacccatgaataattatgtagaaccaagtgggtaagaataacagacaagaaaaaagaagagaagaattcaaagagagaattggagtagggaaaactgagtagtttgtactttctttacaagttggaaattgattaaaatcactaaatagttaggtgaataaaaggacattaggtctaggaatccaaattcggctaaattttaaattactcacaattaaataaagtccaataaaaataaagaaatgctttaatattttgggtctatatatacacctataacacgaatgtaaactataactgtgaattcctcgcattatgcagtttcattatacatatgttgccttgcaattaatatagaaggaattttgctgcaggtgggtatgttgttgtgcacgaaaagctgccaaactatgttgtccctgatctaactgacttcaaggtaccgtcatttcttcttatcacaaaatttacagtggcatcattctgttgcttgatgcctatacttggacgaagagtatctcaacaagaataataacttgaaagaaatatcattattgtttctgctaaaaaaataagcaagatttcatggagaggataagatatcgtcaaagaacaaatataagaaaataaattgcatgacaccttgaatattaagtttaaaagcaacttaaacaaatgtttctacagatgagaataatcaagaatagtggaaaatgcataaaacttctttgctgcctaagattaaacctaagaataaaaaattggcatggattacatgtttagatgtcttgaaaattctttcccaaatatgcgttgtgttaatatcattgtttagctttatatatttgtagtctggctaggtactcacttttgtttgcttgtttagcctgaattaatgggaaagacatgatttttatactctgttttttatgtttgaactctggttatgtatgcaatctattattgcatgcttacttattccaaggtaaagtcatttatagttaagttaggttttttatcttcaaagaactgtgagcgttgtcgaatcttgtgatcgggaatatatatgtatacaggtagttaacaagcaatgcacagacccacattatttggctagcccccacccctcaacttgctatgtaattaagatcgcagattatgagttgattttgggttgagtagtgctagagacacaaaatttacacatttgatgtttttttaataaaagtttaaaatgatgaggtcccactt

SEQ ID NO: 1450 - DNA, 1846 bp, Cannabis sativa
aaaaatattccactatatgaaactacttctactatatgcttaataagctaatgagtatactatgagaaaaaatgcccatgttatacccctgcctaattctttcttctctcggtctctcttatcattctccataatggacccagcgaaaccaacacccaccttatttctgtcaaggagcacaatatccttggatcattgtaccaaacaaagaactgattaaccgttattaaactgcaccaaaatttataaactatgattcaatggggtatacaataatacaaggtttttagaacaaaattaactgcaagtatcatgggttcaaatgggacggaaaacaatgcatgactagattcaaatgttttctgattgataattgacgtgtactgcaattggagcaaaatccaacatgtgtatagctattttaaaaatcacatgcacacccacatatattttaaaaaaaaaaggggataataaacaataatattaaattatcctattcataaaataaaaaagattggtcccttgggggacattctataaaagaaaacagattatatgccccagtgttgttctttgagtaaaaaatgcgtggaccttgtggtcagaggggacgctgcgagagaagagggcttgttgattgtggtgcacaacaagacatgagacgatgcaagacagtgtgtgcaattgagggagctacagactggtgtcgtcgcggggactgtcaaagataggcaagtagcagattggagggcatcgatcgggctcagtcgccggagatggacaaccatctgagtatgaggctgttagttggaggatagaggaaataaattcggctatagggctgagagaaagaaattaggagagtggtagggggagttatgagaggggtaatttgggtaaactttgaattactggaataccatccaactttaattatatgataggaagaaaagcgatgtaggccaaatgtggttaagcattttagtatgaggtgttgtttggttattgggttttaattgtaattagttgctgaggtggcaagtttattctctttatataaaaagaataaacatagtttcttgtgagaattaagacaagagtgttttcttggattgatttactccacttgaaagattagagcagggcattcaagcctctcgaaatgcttggttaaggttcaataatgcttttccttgtgggatttctctactcaatgtgtgtactagcttggtaaactctttctagtttaagaaaagtatatcaaattggtgcagtgaactgtggatacaaaagaaacttggagacaatgattcaaccctcgacgatgaagttacgatgttgaagatggaggtgctagtattacgaactccatcaaagacgtggtcaatgagcctattctcgaggtggggcgccagatgcaaatgatacaacaaaatctcaaacgtcttttgagggctcaagaacaagcaagaatggtccaagaacggtcgaaggccattcaaggatcgtccaagaatcgactgcaactgagtttccaacgtccagcgactaggagccatctgcaactaggattccaaggactttaatgggtgcaagaagcaacagacaacgactagagcaaggtactgaagctcctgaagtgccacaagcaagagaattatgaggaaattgtctttgaggatcgttcattggataaaggacatttaaggtctcatttcagacttgagttgtgattgaagaaactgaaaatgcccacttttcacagggtcaatccaaatgggtggattaatgcaagttgaaacttcacttgtcataattatgatgaagaagagaagattcaagcagc

SEQ ID NO: 1451 - DNA, 6756 bp, Cannabis sativa
  modified_base (865)..(880): a, c, t, g, unknown or other
tatatatatatatataaagagtatatttaaaaattctccaaatgagaagggtggtcctctatacattagtggccctttgcgtggcacaagtttcaccaaaggcgaaaaggatttcgtggacagtaaagtaaatatctacttcaaatacagaactctgatcttattataaggtcaaaggaatgtgttcagtctgtccgtaaatacgaaaaggagaaaaagaattgtctgacgttatggaattttaaatacttgtgctgacgaggacagttgccaaaatctgcaactataaatttgtcatatcatgtttcttctataatattttttaatcttattggaacttgaggataacccaaagcttttcgtattatcgttggtcgtaaaacatgattacacttgtaactgacaaaatatgaagtataaacaattcttaatgaatcagcataaacacccatccacccacttttttttttccttttcttcttcaaaattaaaatcggtggcaatcaagtgcccattaaaaagattaaggtcaacgatagaaaattagcaatagagtaatcaaaaatgccaataaacaactatccccaaatgattcaacccaattatgtagaaaattttggtgtaaacccaaaaataccaccccatatagctttcattttatgtgcacatcttttctcaatttagattttagttgggtttcttgccgttaagtttattcaaatttcttagctcgaatttttttcaatcccaaaacttttcaagcacgcaaggaatgaaatacttggcttagccacgtgcctgatctctctctctctctctccctctgcctctctctctctgtctctctctctctcttcctctctcnnnnnnnnnnnnnnnntctctctctctcactctctctctgatggatttcattagtagccgatgggccacattgggtggggaaagtgaaattgaaaagttgagcaatcagttttaggtgcaatcccatcccacctacccaccatatgacttgaaaacccatcctaactccaatccagtgtgattttgaagtccatttttaattttaccaaaacaaattaggttggtgatggtttaatggcaaagtcttgctcatttgctctccgataaagcaaagccgatgcctctaccctgattttggtaaaggaaaaaggaaaagagacaactatgtcaaatccatgatccaaaagcaattaacaaaaataaaagtcaatatttgagatatcttaccagccaggatggacggcaaatcttccattagatatagcccaattcacctgctcaagagttaatgccatattcaaactccataaacgcaccaaagatcgacatataataataggacattaacaatgtttaccttatcagtcccgggagaattggccactacatgggtaacctggtcatctatctgcgtagtgcataccgcaccgaactgctcagcagtttgccacaaaggatgtaagtgaggattaacctcactaacaggaaacactctactaaatactattcggcagccagacaaaatctttcgctgctctgatgctagaatatttctaacatctgcttcatctagtgagtgatggctaaaaaaattctgatggattctctcaataacctgtaagagaaaagacagattagtaaaaattcaaacaggcaggcatttgtaaaaagcctaggcagatttctatggtagtctcacccccaaagaggacgctagtgttccatcttctggtctttcatcatggtcaatctccaaaagagaaggacctggaagaccgaattggcgtctactacagggaaagaatgtatacctgcaagacatacacaaaaaccaatcacaaactgctaggggaacaacaaaaataagaaagaaaaagaggcaaatgcaacatttgcatctaataaaagcattgttacctttctacagctatcaagtttaatttgttatgcggccagaccctcacagaatcatcaataattacaacagaagattccatacccaaaactccttccaaatctttacttcttggaaccctctcatcaccatctataaattccccatcatcacccctagaaataactcgtccggcaaataagagcccctttgggtcaagcacttttgccatctctgtagcatatagtttgttccccatggtgtaaagatgcatctcatatagcttactggcctgaattccaggggaaaaaatgactaagtacttcaagttgaagtcaagcaaataatatcaaacacactataaattaaacaaccttttctaaaaaattccagaccccgggcctcagtttggtccacattcccatatgagggaaacgaaacaaatgtctatatggtttttcacgatcttgttcctctttctttctcaaaatctcctcatgcactggatctacttccacaaactaagaaagggaaacatagttataacataattgaaggccaagaattgaaataaaacaatcttccatggaacaactcaaaattgcaaacacatgagatcaccttggctgaattaagaagagtgtgatctaaatccaagacaaggcacagcttgcgggcctcaaacatcttcttctgttcgtctaatcttctagtcctctctctctggattgcagctttttgcttgtcatcatatccttcaaatagatgttcaacatctccccacgtgttaggtgcacgagaagaacctgccacagctgctgcttcaagagttgcacgagagggagctgccacagctgttgtttcagaagttgaaatgccactcccctgatcctcactcttcgtagaaacatctttcacatcccttttttctggtttgactgacactggttgcgaagtgagactctgagaaacaataaccggacttgtagatgcatttgacactgacaggagatcagcaatatttctgagattcttggtaaattgtccagcaatatcagggcgttcagctgattgagaggagactgccttctgatcagctcgaccctcctgcatttggctatttgaattgtccttatttcctggattatttgacactgagggaatagtagtttttagttgttcattccccaggctcccatttttctgaagtgaaatgccatggagaacacgacgtgggtctctgggtttcatacggatttttcccaaatcttcatgcgggctctgtaatatatacacaatggttttaactacaaatgataagggaatctaacaaaaagtaaaacaagaaattattagcacaaattaaaccctatcttggccaatatgtaaacaacataacaattaactagtatgctctcaccattggagctacttgtgaagtaactgaaagtgatgccgctggtgtctgcaaaatcccagtcttagaagaagcaaggttcactaaaggagctactcccaggattgaatttgggctcgaagaatgaatattattttgtacatgatctggtttgagctgagtttctgatactaatagctgttgttgctgttgctgttgctgttgcccaagtttaataatgttgagtaacattgtcggattaacaactatatccttcagtaagtcgggtaaagaagttgtagtactcgtacttgtaactggcaccagctctttagccatatttgggccattcgttgcatgatcattccccatatatgattttctaggatcgacttcagcaccctctgttgactgacttttgtttgcgaactgtggacctatgaaaccattgtcttctatccagccccctagtccagacacacttttaacatcaccaacagttccagcattcttaaatgaatttctttgccttttgaatgaagaaccatccaaatgtgcctcatccgcaaccttttgctttcttgagcttgttggttcaacatattcgactttaggtgcattacgcactgcagccacaggtctttgattgagatccaaagcacccgaatctgaatttgcaaatcgaagcctaggatctctactctttgcaaaggctttcatgcttgaactagaagcagaacttgcagatagagcatttttagcaacaattggtccttgcatgctggaactactcacagcagtataagaagagacctctgaaggtctcaacatcggcatacttgtatttcttaaactactaccagatacagagctcgtgacctccatattagtatcatcattctcctcattgccatcttctgaaggggttgggcttggaagcctgtcactcattagaaaggagctcccaccaaacttttgttgataagtagaaacagctttgacagcatcagtttcatagcggcgaattctagaatcatctgtccctgtagtcattttagatgtagcaggcccaggtttaacaacaacatcgccaacacccaatgatttaaggactgaaaaggtagttggtgcctctcgagtaggcgaaggaagactatcttcatcgtgatccttgtgaagatctaagaggggaacaagaagccccctgctcttaaatgcagatactcctcctgatctcatttccagggaggtaatcgggttagcatgggccacagaagtaacatcagaactgacagtcttacaattaacatcagaaggcagctcagaagttgtcaatccataaatggcatttttagtattatcacttgtattcttgaaatctatttcctgaaccccgttaacaatctctcgctctttcagtttatcacttgctgccatgagctctatctgtgaaaaagaaagcaacaatgttgtcaactgtcaacgctagaatgaaaaaaagaaaatgatcctgaagtactttcatgcgttctcacctccttcatccatttcggggagacgacaggaggatcagagttctttacaaaacaaagtaacctgacattgcaacaattaattggttaataaactcagcatttcaaaataatcaatcagaaaaattagggaaagcatctatagtcgatacctagataaagtgtccttattatgatcttttttattctggtccatagaacaaaaaacctgcaagttacaagcaattgaaacattacattatttttttcaaccattacaacatgtaacataaatactcagctgaatgttcgattgccttacagagttgacaatttgaatagcagtgaacgaaatgtcaataataacatccttagctggagcactgtactttgaaagaacttctcttaagctctccaaagtgttatgcagccgggagcaagcctgctcaaatgatctacagcaaataaaatggagccaaaattacacacaaaaaaacgttgattcaactatttccactaagtatttgaaattgggcagtcatctcattcactctcaccaattcaccaaacattcaaagtacaagcctttatttatttctgttctttttgttacttacttctcagtattagtcacattaacactctccagatcttcctgaatcaagtttattcgcttctccaactcattgtgcatggaatcaatagtcactaactcattaatttgggtagcatcacagttcaacacagcaccatctttggattcttgagcagggttcgactcctccaaatcaatctcaccctcctctagttccccttcttccttctccatatcgtcatcactatcatcaatcacaactttatccacttctttgacattattcttttccgccggcgtagacgatgatagtttagagttttggtcagaatcaacatccattacaaaaatatcatcgagacttttgttctgaacggcctgtgcccaggcaagattatacaaacccgtattattaaaccccttatatccctggtattgaaacagatcacgcatcgtccaacccctagcactctcaccaccaccacctcctttagttttcgattctttaagattcaaatcaaccggaactgcagcagcaccaccaccatcaccaccagcctcttgctttttgaaatcttcttcactgatctcttccacagaggctgaatctgaaatttcaccttcttctacatcttctattttccccatttcacttaaaaaaccttcaatctctttaattttaatccactcgacggatttagatccaaaatcaaccataaatttttagtatatttcttacacagtacaatcagcaaaaaaacagatattcatgtactcgatgtaccaacaacaacaacaaaattaggtttcttgatttctcttttctttcggtctctcttttgcccagagacccaaaattaggtcgacaaattaatcgatgataacagatgaaacattaatagcaattaattttctcagatcagatccgtttggctgagaggaaaagctcgaaccaaattttaaatcgtaattctttgaatcgacaccaaaaaaagtaataataatcagagacgattgagaatgagagacatatagaagttcgggtgagttttattatataaatatattaaataataacacaagaagaagcgaatctaatacgccaaagactttgaatctggaccgtccacgtcagcgatccggcaaaaaaaaataaaaagtgggactattttatttgttaaagctttaatgggcacaacacaacttgcactagcactagcgctacactgggactataaatagtaaaagtatgaacggaaatagccttagaaactgtacttgtgaaacgtatctctttgtagtgtggtgtgggagtacttgaatattctatcacaaa

SEQ ID NO: 1452 - DNA, 2078 bp, Cannabis sativa
gtgtggctccacctcctttggctctcaaccataaagcacctctgacaccaacttttctacatcacatggtccactaggcttcccccatccaccacagtatggtcgccctttcaaccatgttactctagaggtggtcacccatactcatggccaatatggtaattacaaaggtggtccctctcgtggaaggagtctgttcactgtttgggatcgaaaagcccaatgccaaatgtgtcacaaagttcgtcacacgatacaacagtactactatcgatttgataaaagcttttttaagacctgaatctcttcaaaatttccctaataatgtcactgctaatgtagatgaaatgcataattattttgcttaactagagagtgtccttgatcccaattggtacttggatttaggaactacatatcacctcactctaaatgctcaaaatctgttgacaagttctgagctccttatagactagcatatacatatgggcaatggggcatgtttgcatatcagtaaaattggtcatttctcatttctttcaccttatgaatctcaacatcttgttctaaataatttactgtatgtgccttctataaccaaaaactttcttaatgtttctcatttatctcaagacaacaatgtcttctttgaatttcacatttttttctgggttgtcaaaaatcacgtttcactaaagactttaatgtttgggaaacttgacaaagatctgtaccagtttaattcctttcagcttattcttctggcctccagccccaaaccaaataactcttcatctattgttccaaaaaactataatcttagttgtaactctcacacttcgtatgataaaaatgatgtttttttctttatgtcgtaggaggcttggacatccttcctctcagattgttcaagctgtctttacatcatgtaatatcaaaactaacaataaaaatgtttcccactctgatctgtgtgatgcttgttgtcttagtgaaacaccataaacttacctttcccatttctaaaactacttacactgagccattacaattactacattctgatctatggggtccagcccctgtaacctcttctaatggttatagatattatatttgctttattgatgctttttcttaggcacgcatagatatatcttttgagaacaaagaatgaggccttatccactttcatccccttcaaaacacaagttattaaataaaaaaaaaataaaacttatccaacttgattggggagagaatatcaagctttcactaattttctcaatgattctaacattttgtacaaagtctcatgtcctcatactcatgagtgaaatgatgttgcagaacgcaaacacagacgcatattgagagtggctttactctccttgctcaagcctctctccctcttaaatactaggatgaagcctacaggtctaggtctgatgtctttctcattaatagaatgcattttcctttactcaattatatgtctcctctagagaaaatctttcaaacacaacctgactattccactctcaagctttttggttgcctctattatccttaccttaagccttacaacaaaaataaactccagtaccctgtacatttataggctatagtctttcacacaaaagttacaagtgtttatctaaggatgataggttgtacatctctagagatatcctctttgatgaaagcgttttttctattctctcaattatcatcttccaaattggttctctagtgtcttttcccaataccagtgctactcctcgtgtagtgactgtcccaactacatctcctcttcccaccgtggaagctccagatttgattcccattcaacttgttactccaagtatatcctctcaatctgacactggagtagtttttgttacatatgcgaatccaccccatgattttgttgttaatgcttcaaatataggttctattttaatatctcatggcaggattccaaccttaacatctattggtgtgtcaaaccagaatgattatgctggtgtgcttcttcctcttgcaaatgttgcttcaagctcacctatttgtaatgt

SEQ ID NO: 1453 - DNA, 999 bp, Cannabis sativa
ttggtaaatttgaggttgaaaacaggttgcctaattcaaagaagtaaaacacaaagttaaaaatgcttccatagcagataaacgaaatgggtaaagctaaacagttttacacccctaacataaaattctagcaaagactatatcaaatgatatgaaacaagaaataagagaagcttatcattagtacaattgaaacctgaataagatatgcgtgaccacaatcttatatggtgcttttgatgcatgataaatttagtattaacatttggcgcaaaactttccgataatccaaccacgattacttctcaacaaacaccagctttcttattttaaaattacaaacaacaggtatatccaagtgaaagcctggattcagcactccttttaccctatttaatatgctttacttatggaaagaagtatatagacaagacaattgcccatcagaaaaaaaattaaaaaaaattagaataataacaatttggcacaagacagaaggagacctacctgctgcgcaagcacaacacgaccttcacatttcccagaagttgcagaaaacaggggaagagtataatttcgtagctgaaccacaagagagcttgtatgcaagttaatattcctcccatacattctagaaaatggtatattattttcactacagacaggatcaagcttctttaaaacctctatcatgccatcatccccaccatcaatccttgtcaagcttaaatccaaatcagtagctgtaatggagagaagagaagttctagcagtgcttggcctaaaaccagactgaaaccctgtacggcaagctcctgaaccttctgatggtaatagattttgacatgccttgtaatatgacaggaatgatttttcataaatttcttcctgcattttagtgacagctgaatgatcttgtatatcaatctcaattccattaaagcaaacctttctttcctgactagagtcacttgtatcagcagttttagagctttggtt

SEQ ID NO: 1454 - DNA, 3087 bp, Cannabis sativa
ttgtttttgtagataattggaagcattggagctgtttcagctggattggatctaggaaaggaaggacctcttgtacacattggtagttgcatagcttcattgttaggacaaggagggcctgataattaccggattagatggcgatggcttaggtatttcaacaatgatcgcgatcgaagagacctcatcacttgtggttcttcctcaggggtttgtgcagccttccgttcacctgttggtggtgtacttttcgccttagaagaagtggctacatggtggagaagtgccttgttatggagaactttcttcagtacagcagtagtggttgtggttttgagggcattcattgaaatatgcaataatggacaatgtgggctgtttggaaggggaggacttatcatgtttgatgtgagtaatgttcctgttacttaccatgcaatggatattatacctgttgttctaattggtgtcattggtggacttttgggagccctttacaatcatgttcttcacaaggtccttaggctgtacaatctcattaatcagtaagtaccctttgtctcagcttcttttattggttttgttttgaaactaacaacttaggattatcttagtagagatttggcataaacaacccatcttacatttcttctaaaagataatgcatggtaatatgctcctaatggttacaattttttttaggtacaagacaagcattgggcagtatagctattaatattcgaataattaaaaatcttgattgaattatacataatttttttggatcccaacttgaaaaacataatgtaaaattaacactcaattaactaatgatttgatcaaattgtacttttgtcctgtccagtgttattttataaaacttttacttattttcattataattatagttgatacataattttataaaaaattaataaatttgataagaataaaattacactcgtggtcacaaagatagtttagtttagtgattttacacctcaaatttctaatgaacacatcccaaactcgaatctccacacctcattgtcaagaaagaaaaaagaaaaaagaaaatatataactcattttacatactcaaatatatacaatatctataaatgtaatgttaagcaacaaaacttggtaggaattttactatagcataacagcaagtacactcttgtgtaagcaacttcttatatttattattttaaacaataaaagaaatgaatttttcttcttggcaggaagggaaaaatccacaagctcctcctcagtcttggcgtatcactatttacctctgtgtgcctatatggtctgcctttccttgcctcttgcacaccttgtgatgcttcacttgcagagtctgtttgccccacaaatggacgatcaggcaactataagcagttcaactgccccaaaggatactataatgatctagcaactctactccttaccaccaatgatgatgcagttcgaaacatcttttcgacaaactctgcaggcgaatataatgccatctcccttcttatcttctttgtactctattgtgttttaggactgattacctttggcattgctgtgccatccgggttgtttctccccattatcctcatgggatcagcttatggccgtttgcttggtatggcaatgggatctcacacaagtattgatcaagggctctatgctgttcttggtgcagcttctctcatggctggttcaatgaggatgactgtttcgctttgtgtgatatttctcgaactaaccaacaatcttcttttactacccattaccatgattgtcctcttgatttcaaaaaccgtcggagatagtttcaatctaagcatttacgagattatactggagctgaaaggcctgcctttcttggatgcaaatccagaaccttggatgaggaatctcactgttggggagcttgctgatgcaaagccgccagtagttacactcaatggaattgaaaaggtatctcgggttgtagaagttctcagaaacactacacacaatggtttccctgttttagatgatggtgtattacggcctgtgggatctggcattgaggtaaccgaattgcatggagtaatcctcagaactcacctggtacaagtattgaaaaagaagtggtttctgacagagaaacggaaaacagaagattgggaagtgagagagaaatttacctcagttgatttggctgaaagggaaggaaaaattgaagaggtaacagttacaagggatgaaatggagatgtacatagatctgcatcccctgacaaatacaacaccttacacagtggtagagagtatgtctgtggcaaaagctatggtcctcttcagatcagtgggactccgccatatgctcattgtaccaaagtatcaagcaactggggtgagtctacgtaacaattttcacacacttgaactctgcaatctctcatcttcaaagcatatctaactctttttcttatctcagtaattgaaaacaagaatataattgagtatcttagattatatataaacaattatgatgaactaacctgaaggtatctgctatttataggtgcctcctgtggttggcattttgacgaggcaggacttgcgagcacacaacattttgtttgcttttcctcatctggcaagatctaagagcagagagaagccatgaacctctataatcaaagaatggtggtattgactttcttggtgtgagacgactcattctttattctttaaaaagtttgatcaagttatccaggttctctgttcccatactaagagggtcaaataagatgccaaaaagatacgtaaaagcttcattcaaattctaagagagccacataagatgccatgctccaccgggacataaacaacatcaaatttcaattattctttatacatgaatttcagtcaaaggagaacaaaatttcatttctctacagaaaagaaccataaaaagaaatcatggaggattttggtcagagagttttgttttgttttgtttttcattcttcgtcctcatctcctcctcctcctcttcttcttctaagaaccgcactacgaatataaatatata

SEQ ID NO: 1455 - DNA, 6478 bp, Cannabis sativa
ccccataaaaatgtggtttgacacacatcacggtgtggttgtgatttgtatttttaccaagttgcgcaatttggcttggtttgacattcataataaaataataaatagtaaataggttaattatccctcaagaacaggaaaataacttatatttctcccctattttcgtaggttgttgaagcctaaatcgtagcttggcttgttgtcctagatgaaggctgcgcaccaagcgtctgccaggtgcaggttggggtctggtgtataaagtgcctaccaaggtttggccggccatgtgcttgttagggtctggccgaccatgtgtctgccagggtctacaggctgcacattaagtgcctgtcaacattggcatgatttgatcatgaacatcaaatcaacaatttttttaaaaaaattaattaatagggcaagcaaaatgacaagtgacagtataaacagtataactgtacagtacttttgtaatttctatcgtgtaatagtataagggtaataaaatgataaaatacagtctaccatgtaaaagttctcaaaaaaaaaatggattgaattagatgcccacccaatataattgtacggtggtttttcttaaaaaaaaaaaaacgtagaggtgtttggaaaataattggcatccgaaattaactaggaaagaaacaaaaattgaacgacattaatacacaacaacgacagaataaggactgatgataataataaaacgacattagatgcctgtcaacatggatactcaggtacattaaaggcacactaaacctgggaataatctacaacaaccaaacaaaagttgctgaagaagttgcaggatatgttgacagtgactatgctgccaacatagacactagaagatctctaactggattggtgttcactgtttttggcagttagctggaaatctaacctgcgaaaggtagttgctttttcaacaacagaggtagagtacatggtagctgctgaagcattcaaagaagcactttggttgaaaggtttgacagcaaaacttggcttaaactccagcaacataaccatatactgtgataatcaaagtgctctccacttgattaaaaatcctatgctacatgagtgttctaaacatatagacataaagtttcactttattagagaatttgtatctaaaggagaggttcaagccaagaaaatcagcacagatgataaccctgctgatatgttgacaaaatgtgtcaacttaaccaagcttaaacattgcttaagtctactcaacatctgcaagtgcatatttctaccttatgttcaaatctgctacacacatcatattcttcctaaaacctaaaatgactaaactaaggtggatttgtggtgtttagttcagccattttatgttttatcttttactgatgtgtcaccaactgttttgacagttggtgcctgagtaagttagctcaacaaacagctaactttgcatactataaatggaccttgtaacacacatttttagtcatgttgtaaattcagttttagtaagaaagagagtgaaaaggagggatgtataagggaactaagtgttgctgatcttggttccccattggtgagattcattgtaatttcttctcattcttttttctttgtattcaacactcttgtactggttttcaacatcaataaaggtctatgtttatcaactcttggtattaattttttctctttggattgttctttaagttgatggtttttatcagcacagtttatgattaaattgtgttggttagtttgcttgattttggttgctgcattgtgttcttgagaatgatctattcactacacaacaaggcaaatgtcttgttatttttctgttactttgtagatgtctttttgttgttttttttagttgttttcatattgttggtaatatgttctatagttaatttttagttatcttactgaaataaagtatttttgtaatttttgaagcattaaaattgtatttttaaaaacttagtacagtaaaaaagtaaaaacaaaagcatgacagtaaaaatttaaaaataaaaaaaagataagtatttttataagaaccctaattattatttgtatatccacaacattggttggtccaatcaagatggcccaaatttattaatgtgataagggaatcgtagaacaaaataagtaatagaaagctaaaatataattcaataaaatagttttctcaactatattattttctccttaccaaaataaaataataattttttattccaatatctcaaattgacatccgagtgaatagttattttacaaaagttaatcaaattgcaacgcatatcatcgttaatgcatcatttacacataattgttagccaaaaatcatgctttcatggtatcatcgcaacaacaccatagttaatgagtcgttttactatttcttttggccaaaaatcatattttcatagaaccattgcaaactgatcgctaaatttttgttaaagcatctctaagtttaaatttctacaaattaattttcaaagttttacatatgtaaaaaatgggagcaaagcttataaatcatacatatatgaatgtgttctgaacttttaaattagtggttaatgtctatttaaagagttacactaactagctagtataataaaacgaccactctgttttggccacacttacaaactacttatttatacaagtgaagatggcacaaaacaagtacacattaataaaaacatgactaaacaaaacttattaattattattactattatttcgattattatatcataattaaggccttaatttcctaggggaattaattaagtagaagcatcatctttcttgatcatttccacattcttatacttgtaccaagatgcacacatgacataaaccccaaaatttacaacactcaaccctgccaacaaccagtaaaagttttccaacttatccctatttagattattgtttgctaaccaacccccactaaccttgttcacaatctccaccaccacagagctcaagtagtacccgaaagccaacgagcaccacgagatggcggtgctcagcaccttcattcccgccgagctctcagcatagaagaattccaacatccccaccagggtaaacatgtcagccgccccaaatatagcgtattggtaaccaagccagaaaacacttatgggcaaggcatcttggctatcgaccatgtcatgctgaatcgcgacgtttctgcgcttcttttctacaaacccggcaactgtcatggagatagctgagagaactaagccaataccaatgcgctggaggtggctaatgccggtgggaatacccgtaactcttcttgctattgggacaaagactctgtcgtataatgggatgagaatgaacataaagagcaaaggaatggctgggactgagggtccggggatttcgaagccaatgaaatctctgtccattgttacgctctgttggactgagaaggtttggagttgtgctaagcatgtgttcatgaagattgtggttagtatgattggtagcatccgtattaggatctttgtctcttccacttcagttactgtacacactctccattctgatcctgaattactaccatcattatcatcatcttctgttcttcttatcacagctgctctgtccaagaacctagcttatcaaacaaacattaacatgtcatgttatcacaaaaacattacattttttttttattttcaatgttaaatttgaaactcttactaaaaaaattgtttacttgaattggtctgttctttgaaggatttcatgatgtaagttatcatcttctttgtcctgataaatctcatgtaattcatctgcattttctggaatgggaagttttcgatttcgaaaagaggccacgaaaacctgatcattcaataaaatgtgattatacacaatgatgtttggggcaataaaaaaatatataaatattattttgaacctatatttttgttaaaattactgattggacctctattttaataaattataattcaaaccttagaattgacccaagttcaagcttggattaagataagttaagctcgtgactaggtccacctaaatcgagaactcaaagcatttatagatgtatatatgaacccttatagaaaaaaatagttgagtgatgcaaatgctcattttttaaattttatttgtggttttcacaaaaatattaaattttggataaaaatttataattttactgccatgaaaatttttaaattataaatttttacaaaaatattattttttgataaaacaaccgtaaaatactaaacagaatatttaaaaataacagtagaacaactaaaaaacaacgatggaacaacacatgaaaacttaacacaaaccaaatatttttgaaaaaaaaattctgtctcatagtaaaaaagaaagaaaaattaaaaaattcaatatgtacagtaaaaatgttattttattttaattttttttaggcccaattgagttaggactgactctgagttgacctaaatgtgttataaccacaagtgttataacacacgatagccaattagtaacaactttgtccaataatacagtagacaaaaattgagctcagttattattttgtaacattttaaaaaaatataaatttaatttattatttaataaaataaaaaatttgatgggtaacttttttgtaaatactaaatattatttatccttaaaagaatataaattacttaattaaattacccttagaaaacgaaggagtgggcttccttttggaaggttattccgatagaaggggttgcccaaagaaatgaaaaagatggaaagtaaaagagctatagcgcaaacggcaaaggcccaatcccagcccttatctgtgcttatccatacaaccaaagtgacacccaagattgaaccaatggtaaggctgaaaatgaaccagttaaagtaagtagacaactgcttagctttttttgggtcaaactggtcagcacctaaagctgggagagctgctttgactccacctgttccaagggccataagatacagccctgtgtataggattgctgcttcccctgctgatgcaccttcgcattggtgtgttatgcttaggcactttggtggtcttagatccgaacggtgggcttgcactagcagaactatatatccctaattatcaaacatataatattattaattaattaattattagttaccgttaatttcctgttacaacctcttagttaatctctacgtccgaaaacatatgttagaatatttttttttcaaattttatttacgagagtattcattatgcttacaatatcatccctataaatttttgaaaaatttcgaatagtttaccgtgccgaaaatacgttttaagtttttaaaacacgcgtggtagattgaaatatcaggaactctcttttcagtattgtaactattcggaatttttcaaaaatttacaggaatgatactgtaactataacaaataccactatgaaaaaaaatatttcaacatgtgatttcgaacgtgatggttgactatgaggttgtaataggaggttgtaattaacatttctcacgatgtattattatgtaccattaattcaattgaagcgaaaataagagtggttgcaaatctggttaaataggtgtcagatataaaaccgccgaggagggagagtaaagtggcagttcctaagagattggtgagcatggtcgacgattttgttaagctgtaattcatgtagctgaagaaatatatcaccaggcttgctgagtttgatataaacgccatgctttccagtccttccattactatatacatttatatatatatatgtatgtaacatattatatgtatgtatacacaatcaattaattaatcaataatattcatatgcatgatacttactatatacaaaaaatgcagctctgtttcctcctcgtttgccaccaccactttgatcaaagtctctgctcatgacctcctgccatattatgatggtgaatgaaacattaattaactcattgtgtaatataataaacaccaaggctagattaaatatcatatacacatatataagtaccatattcatgtatagtactgtttcaaaggcaccgaggtgcacgcctgactcgcttcaccttaaggcgaaactctcttggaatcaaaatatatttaaagaaaaattgtggttgtggtctgagaaagactttaatgtaaacgtactactcgggtaactattatagttcaatgtaactaatatgtaccacttcaactttaaataataactaatagctagtaccagttcttctaataaaaatcaaggtaaaagaaaaatagtttaaattatgttatgttcatgtattaattgttttagggtggttaaacataaatgcagaatgccaacccactctcttttagactatatatatatatata

SEQ ID NO: 1456 - DNA, 2572 bp, Cannabis sativa
ctggctcttacataagctaaatataatttactcaaaatatatattgtgaaggtagtactttcttggcttggtggtaatagccacccctcattggaagttcaaacatcttctggtggatctacagacatgagaatattaatcaagccctactcatgtacaagatatcttggagaaaattggagggcaacaacattattaaatagtaatgatattggacacaatccagttgatggtcttcatctttggcatggtgccataaggaaagatttgataaagcttcttgaagagctttatcaatcaagaaggtcaagtgactattctaatcttgacagtgtagttgtccaattaaaatttcttgctgatattataacattttacaagtaagttgtttcttccttccttttgtttttttggggtcattctttgtttattatgtaaatatattctctttagatatttatataattcttgactttgtagcactgcattagagaagctattttgccctgtgttgaaccaacttgtcaaaggctctttgtcctccactgaaggattccctattgagagtcacattgaaggtttacagatgttgttgtactacagttctccatatgataaatctttgagtaaatttgctgagaagctttgctgggaactcgaatcatttgtggtggaaatcagcaagcaatttgagtttcatgaagcagaggtggaaattctttacactgacttagactaacatggatatttagtcatttattttcatgagatatcactaagtaacaatcatcatttaaacatggtcagccatatgtttgtgatttgacatttatttttcataatatcctttcaggtatttcctatcattagcaaaaactgtagtcatgagatgcagcaacagcttctgtatgtgagtgttcatatgatgccattggggttgctgaagtgtgtgatcacttggttttcatctcacttatctgaggatgaatccagatccattcttaaaaagatcaagcaaggagatactagaatccatgactctttttcttcactactgcatgagtggtttcgcgctggttgttcgggtaaaatctctgttgaaaagtttggaatgaacctgcagcaaatgttcaagagcaaattctcattcttatctgatcaagtcaaggatgcatctttatcttcaccattgcaatccaaaaataagaaatctttcattgaatctgagcctagaataaagttaatgagctctggcacaaagggcaaaagctctttttcatcatcttttggctcccataatactagaaagtatgaaacatcatactctagtgttataaatctgcacatctattttccagacaaaataaagacatatcaacatatttctggtgaaaaccattctggttcagttcccaaagatccaaaaccaatggacttcatatatttgttccataaggctctcaagatagacttgcagaaccttctttacagttcagttcatttagctcaaaatccttggtttcttggagacttttacaagcgctttcaactaatacagtttttgtatcaaatccatagcgatgcagaagatgaggtcgcctttccagccttggaggccatgggaaaattcacaaacattagccactcttacagcatggaccacaaattggaaattgatcacttcggacgagtctcctttattcttgacaagttaactgaactgaatgtttcaatttctgagctaaacacaaacatggatcaaattatgaggaagcattatcaactatgcatgaatctgcatgatacatgtaagtcattgcataaaatgttgtctgatcacattcatcgcgaagagctagaggtttggcccctattcagagaatgtttttccttaaaggagcaagagaagatcataggatgtattttaggaaggacaaatgctgaaattttacaagacatgataccttggctaatggggtcgttaacacaagaggagcagcataccatgatgtccatttggcgccaagtcactagaaatactatgtttgatgaatggttgagagaatggtgggaggggtatgacatgtctgaagttgtagaggactcaattgtggttccttcaacagtagtcactgatcccttggagattgtctacccttatctttgtgaagctactgaacaagaaggtaaactcagtagcgaaaataggcagcttatggaaaaagattgcattagtgatactgtcaagcaaatgggggattgtaatgtggatgataaatcaaaggattctgatttatgtgaccacagtaacttagaatacaaaggatgggatgagaaaaagagaatggaatatgagattgaggatgtcggatgtgaaattaaaccagctcaatttttccaagctgctcagaaatctaagtactatgatttacttttgaaaatgaatcaagaggatttggaggctgcaattagaagagtgtcaggtgactcttcattggattctcagaagaaatcatacataatccaacacctgctagtgaggttagttataagcattctagtgttattaaca

SEQ ID NO: 1457 - DNA, 2036 bp, Cannabis sativa
tgaagagggagtacgtgagattaatgtggagcagttggaaaatcttttgtctattcttcagagcagctttgatgggtctttagaatcgattcttgaggaaatgaatttggatctaaatgaagagtttgtgttaagagtgcttgaaacccccaatattttgggtgagaatctgattagttttttcaagtgggcttcgaaggaaggatcagagtttaaagtaacttctcgtgctgttgatgcacttgttcaatctgtatgttgcaatctaaggaagaaagatgcatatgcactgtgggatttggttaaggatattggtgagaaggaaaaaaatgtcatcatcactgttgagagtctcaatgaattgattgggttgtgctcaaagttgggtaaagcaaaggctgctatggagatttttaacaagtttgaagatttctattgtgaaccaaatgctgatacgtattacttcacaattgatgcactctgcaggcgctccttctttgattgggctttgtccatttctgagaagatgatcgattcagggaaactcccagatgctgagaaagttggtaagatcatttcctggttttgtaaaggtaaaaaggctaaagatgcttacttgatttatactttggcaaaggaaaaagagctgtaccctcctggctgttccattaattttttgatcagttccctttgccgtgaagatgataacgtgaaattagcactggaaatattagatgatatttctggtaaagaaaggaaatacgctattaagccattttctgttgttattagaggtttgtgtaggactaaagatgttaaggaggccaaaaatttgcttcttaaaatgatagcatctggcccacctcctggaaatgcagttttcaattcagtcattcatggttttgctaaggctggagatatgggagaggcattagacataatgaaactgatgggaaagagaggcttaaagccagatgtctacacttacactgttattattagtgcttatgtcaatggaggtcagatggatgaggcttgtaaaatcttatcacaagccaaaagaaagcattctcaacttagtcctgtgacttaccacactcttatccgcggttattgtaaactggaagagtttgataaggctctaaagttgctggctgagatgaaagatcatggggtacaagctaatactgatgagtacaataagttaatccaatctctttgccttaaagccttagattgggaaacagcagaaaaactattagaggaaatgaaagagaagggcttacatcttaatgggattactagaggcttaataacagcagtcaaggaattagtgattgaggaagttgaggctgctaagactagtagtatagaggcctaattattctctggctgctggaatgggaatggccaagttcaaaactacaattactcttgtgtgtttagtattacatctctcaaatgccaaaaaatgaagtctttaactttctttcatcaatgtgatggctttttttgcttgaactgtatgggaaagctttgtaggtatgtgcccagatgttagtagtgggtggatgtccttgcaaggtgcaatttttttccccctaccttttcttattcattcgtttcttaatcagactaagaaataattgatgaagtgctacaatattatcaaaccttttacacaagatttagtgttttagctgttaaataacttaattgttgattttgttagtgtataacttgcttctgctatatcatgagcagttgttgtataggtatgcattttcgtgggtggatagaatcatggattttctcaacatatattgttttgcggttacttgagaaaaatggtgcttggggatgtaatatgtttatctcaaatggtaaagtgtaagaaaagggttacatgtttcttagaaatgtagattgctctctatgcttataagtcgatagatatacatttaatattattagttaaatcgggttggataagtagtaatactaatcagatcagattatacaatgttattcttgta

SEQ ID NO: 1458 - DNA, 2556 bp, Cannabis sativa
atattaagcaattttgaactggctatggcttatttaacacctattcttagttctcatgctatgagatcttaaaactgaagaaaatagatgtttaaatatatttttttatgaaggaattagagatggttgataagttacaaatgtggtaattgtgcttgccctgaattaaatttgaattttacataattgggggattttgtaggatatttgaaagaatatttaataagggctaaagattgtggagtatgttttccaagaaggtttattggatgaaaaatagacttgtatactcattagaggtaggtcacgtgatcatggccatggtttgctggtatgtttggggttccataccaaacatatgaaatgaatgttgttttctggtaattgtgaacagtaatggtaaaatattaagagagaatgggaaatgattgtcagcatgttttgctagactctaatactcaactatattaatgatctactatagtattttgtgcaatcaattaaatgtgtacctattaaatgtaatagatatggatctacattacagtggaagtggttattgttagattcttgttataaccaaatctctatctttttttctctgggcagagttgatatatatatatttatatatatatttctcacttatttgcgattcacataataggttactcgagtaattgtttgttttgcatagggttggttattaatgtcttgttattttgatacttgtgatcctggctatgaaacagagaaaacagaaagacatgatacaaaaatctttcttggcctagtgtcctttgtacttttttaatcctcaataatcattagtttttttcaacagtaataaggcttccctaatcgtgcaggtcttcattttgttttctctaacagtttcattactgctagaggttcttgctctttcattccttaaaggtatgctgcattatcaagtttgctcaataatagtatttaatgttctgccatgtatgtctattccttaattatattgatcacagtgtgatttttcccaaataattggtgtggaatatgtaggaaagaaaaatgtatattgctgtgcctaaaggggccgtcattaaacaacaatttgtttaccagctggtgtgttgttttagttgggataattgttattaatattttgtattatgattaaaatgcttcaacaatctgtttgctttctcatcatgtggtggaggcttcctattcctagttcaatttctttttcacaatttgtatttgcacaactttgtctccgctttgaggaaacactagagagataattaatctgtaaatggtttggatgctatttcatccacggttcttatgcttgctatttttgtgtgtttagatattatttccaaagaaacatatacgtgctgcaactgactttgtataagtatcattttttttttctttgcagatcctgctaagaacctgatcacctccggaccttatggccttatatttgcatcatttgtgcctttcttctttgatatcccagtttctacacgctttactgtattcaatgtgcacttttctgataaatctttcatatacctagctggtcttcaggtaaaaactaaagaatgtgtagtacataatagtatctctttcccctgccatagaaacctaattttaactttgtctgcctcagcttcttttatcatcatggaaacgttctatattgcctggggcttgtggcatccttgctggtatcttgtatcgcctgaatatctttcgcattcgcaaggcaaaggttggtttttgatttgaagattgaaaagagaaaaacattctcattggtttcttattttctagttttactgtagcttgtatgggttcatattcttttcaagtaatgcatatttctcgctgctgagagacaatccattgataatattttttgaggttcttgggggtgtaaagtaagcttttacaccctgcatcttaaaatggataccgtttacgtttacagctttggcctttgctacagcatgcaaaactatgttgaaaccctttgattgtgcagtcagttcccataatatttatacaatgtttccacttgaggcttaccaaagtaattgggtgggtacaaattgagaaagaagagaagagatcagtgccgatcgagagtggagagcattctgtgtgtggtacagtgtgtggggtattgggttcaagtgtctgtatcctataaaaatgaaatttatgtacttttatttggtgacccctcttggagtagctcaaatgattagagacacgctttttcttttttttttttggcacaatatctgaggttgaagttcatcttgggcacatacatagcaattttttactccctaaatattgtaggattaggtggggattgcagtttgtaaaagaaaataatcttaatttgtatgtttttatctacatgcttcacatccatttgtatttatcgagcaatgcttatcaacaatatttgccggttttaatcgtgtgcatgaatgtgtttcctatttgtatttttattttttactttgtggagtgtcttcc

SEQ ID NO: 1459 - DNA, 1561 bp, Cannabis sativa
aaatgcaaccttactatttccttttctaaccaatgttttaagcgtattttgggcattaaatttgtattgttatgtaaaatctatgcttatctcttgatcattttgtcgttgtagtcagaggtgaacttcttagggcgactctctcatcccaacctcgtaaagctgttgggatactgtttggagggtacagagttactgcttggctatgaattcatgcaaaagggcagcttggaaaaccatttatttggaagtaagggaaatctaatcacaattgagttataacattacttctcccattaaaatgcatgctcttttttgctgaacatacactgtgttttctggctgtacagggggctcagttgttcagccactttcttgggaattacgccttaaaattgcgatcggtgcagccagaggccttgcattcttgcacacatcagaaaagcaagttatctacagagatttcaaagcctcaaatatactaatagatggggtatatttctatttaaacaatgccataatgacattattctttccaaaatgaaacactctagacacacttgatatctaacttttcttgcttgtactctcagtcctataatgccaagatttctgactttggcttggccaagttgggtccttcagctagccaatctcatgttacaactcgggttatggggacatatggttatgcagctcctgagtatgttgccacaggtaaccaaccatctcattttaccatctgttatctcaaaggccacctgattagctagctctgattttcttgacttgttttaaatagggcatttgtatgtaaagagcgatgtttatggcttcggagttgttttgattgagattttaactggcttacgagcacttgatcaaaaccgtcctagtggaagacataacttggtggattggataaaaccatacttatcagataaaagaaagttgaaaaacattatggattctcgattggagggtaaatatccatctaaggctgcattcaacattgcccaacttgctttaaaatgtatagaatctgaacagaagcatcgaccgtccatgaacgaagttgttgagacattagagcttattgaagcctctgatgaaaagccaagagagccaagggttcgttctactcgctccactgttcatcgaacaccaggccatcatcatcagcagcagcctttgcaccatcgttccccccttcaccccaaaatagatgatgctagagttcaccaatactcaccaagagttaggtagtcttaatatagactattatgacttgtgaattgtgatcatataccatataggcatatatatatttttatacataggtatagtagattctttaagcaaatgattttgttctttgagatctcatgtgaattgttcttcattcaatgttgttctactcttcaattgtatcactataaaacaagtaccttagtttgcatgtaaatctgtaattacattttggctctaaaagtattgaattgcaaggacataaaaaggggtgttgttatagagaacttgagcatgtttggtattatttttt

SEQ ID NO: 1460 - DNA, 3172 bp, Cannabis sativa
taacttgcgccaaaacctacaacgccgttcaatcaagcgcccctttcattctttccacccactcaaactttgcaccgataattctcagacctttatatgcaactcttgccataaaatgcatgaaaatgttgatatgtattttacatgcaatcaatgtgatttcttcatggacgtgaattgcatgcgcatgccccaacaaactgagtatgatgattttgaaagtggaaagctcattcaacatccaacacatcaacatcgaatgccacttataaaagacggatcaattgatgatgatgtcagttgctttgtatgccgtttgaaatgctcaggtgaagtttgttatggatgcaaacgttgtgattattttttgcatgagtcgtgtgcacaattaccacctcaaatttatggttcttcttttcataatgaacaccctttatgttttcacacttctaatcgtgcatttcgttcttgcaagtcatgcaaaaaagataatcttatcttcacttatgaatgtggtaaatgtgattgtattttatgtgtgaattgtgcctctacaattccacatggtgtgaagttcgattatcatgagcatcctctttaccttcaccaaagaacagatgaggataatctaatattggagtgtgattggtatgattcctattgccaaaggcctacactcattaattctgaggaattcaattgtacaaaatcgtacatattttggtgtgcaaaatgcgatttcaaagttcacatgctatgtggtttgttacctaaatctattacttgtgaatatcacatgcatcctcttgttctcgttgatttggctattgaaaatgagtttggagaatacggttgtgatatttgcgaaggtgaaagagatccacgattttgtgtatatttttgtgaagattgcaagttcgttgctcatgtgcactgtctaacttctcaggtatatatagactaaatcactagctaatattaattatcattataattatactctctgcctaattttatttcaatttataagattagttgtgaaatgttttataaaattatttagcttttaaattaatattctttgtgagcttttgaattaatattagattagatagttaaccataatttttttttatatattttacttagttttttttatgtgttaatattaaattttttttttttttcgaaaaaaaataatgtacatttgtttttattttgactttaactttaagattcatatattttcttgttttttttttttcatcttaatacttcacggtatatcttatgttatgtatgtatttttggaaaaacattgttattgggtaccagtagtgtctagtatttttagacatgtcgtcttgcgattgactagcaacataggagagtgaggcactattgatgcctttcagcatttctcaatttgagcattgctattgggcactagaggtgctaggcacctctagactagacatgttgtcttgcaattagctagcgatactccctaagtatgtgtgtatttacaatctttattcgtatactaattaagaaaaatgctaaaagatattagtggtactcagataaataatattaatagtagtttccatatacatatttatctatgatagcgattaaatacaaattattaaaaaaaatgtgtacaatttttatgaatgttgttaaaacttatattctatattcgtgccaaacttaccacaaaataattttgaagctttacttttaatttctactaaaacaaaaataattttgactgtacgggatcagattatgaatgtgttagaaggagatctggaaaatgtggaacttcatactgttggggagatgaaattgtccgatgatttaaacaaactttgggtcgaacaaaaagagcaaggtcgttcagtgtcgaccttaatggatttactataccaagtatcagaagatgagaaagaatggctggcagatcattttcactgggatgataataaggacaaaacattagctactaatgaacgtaccaccgacattgaagaggttcttcgattttctaattttactgggagccaacaatttatgtccgtactttttgatgagtttcgttccagttttcagaaaacaaagttcgaaatgaaatccacagatttatcattgagagttgttcattttaaaggttatttaatacctctaaatttgggcactgttttgaatagtatacttgacaagtatggtgatattggcggaaagtcttcgaaattctccccagctatgaagagcataggcattttcttcacatgtaaaatgctcaaacaaatgaatttgactttggttgctgacatcaataaacatcttcttcgagattggtatttctacataatatttgccaaggagattatggagtttgaagtggaatttttggaagtgtctctaaagaagatcacacaagttttcttttgtcaagaagttagtaagttacttggtatggacatttcgtcatttatacaaagtaagatggctgagcttgaaaatgaaaaggcagagtgcaaagtggtacttaagaagttcaatgagtttcaagagtcttcttcaagtaatgaatacttgaaggaacgtttgaatgaggggttgaaactgaagtggaggactgctggggaagttaactttgaatttcataactaataaataacatatatgtaataattatatattatgtgctatattactgaatctatatatatgtttattgtacgtgtctatgatctgtggactggatgtcatttgtttggtgtgtgtgaatatataaatatatatatatagaataaaagatggatttccagacccttattccaaccaaaaatggattaatttaataatgacatttacagctttggttgattttttatttacttgattatgggaataaatattagaatattttatattgagtatgttactgtttttttcgaaaactgatttaagaataaattaaactaaagataatgtggttgggacgtaaataattatggtgtattatttgttttaagattcaaacacttgaatttggatatctaaataataaaatattatatctaaatttgaatattgaaatatttggactgcttactgagagttttggaaactcaatagcatatataaaattagaactatgaaa

SEQ ID NO: 1461 - DNA, 3204 bp, Cannabis sativa
accaaaaccaaactataacaactcagtttcaaattaagtggatcaactactctagccaagtaaaattgataagtccaaaagaatataatgaagcacagtacatacaattattgcaccacagccacatacaaatttgttgattgtcaaagattagaaaataagatatcaaattggaatttaatttcttttctttttcagaagtcaaataaaacggaaagtgaaatcaacatatatcatcacaatgctgctgaaatatgagcataatagcatatataagtgtattgagtagtatatatgtaccacacatatatattagtggaacctctctttatttggactttagactaaactttatttattagggtttttggcatttcctaatagaggtatgaacccattaacattattgaaaaaagttaaattacatatcactattagactcccaacaaaatatagcaaaacatgtacaatggaccacaagaaaacaggaccacatgtagatatttttgttgttgtatttgaaaaaattataataattaatttactgtaattaataaaaataaaatttaaatattttattatatatttttttatttatactcagattatagtaatttatttagaatatttagagaattatggaaggtctataatacaatatatgtatgatattaaaaaagattataatgtcttaattaaactaactattgatagtcttctttgccacagaaaaaaactatggataatcttcttttcgagagattgatataaactacttatgagtatatttttaatgagtatttactgtgaataagtattaacaaaaaaattggattaaaaaaattacattatatatatataaactgaagttattctatcaactcaaaaaaaaaaaaacaactataaataatatcaatttatatataaatgtttagattagaaaattgacacattgaataataatttactcaattgcaaacacttaaatattattgtcaacttcattctccaaatcttctttgattattgacaaccaatcattgtcatgcatgtcattgtttccactaaacgatagtcaattaccacattctcaaagtcttcatatcatatagtccattcacatagtcgacatatacacttattatcatattttatttattatttattatcacatttggtgttggaaactttatgctctcatcttcatttcttgccactaaaaatatggataaactactacttactcaaattgttatctttttggtgatttttcttttctcatcaaactcaagagaggttagaggatcaagtgtgatgatcaagtgcaaacaagttgaaagagaagcacttctcaagtttaaacatagtctacatgctactaatcctcttctctcttcttggggaagtgaagaagagaaaagagagtgttgcgattggatcggaatcagttgtcacaacaaatccggccatgtcatcaaacttgacatttctccttcaacttttggcgaaagtgatgaatactacaccttgcctctttcaggtaaataccttagttcttcattgcttgagttgcgaaatttgagatattttcgccttagtcacactgaattgagtattcctttcccaagttttattgctaatttcaccaaattattgtaccttgatctttcttccaatttcatgagtggaaaaattccttctcaatttggaaacctttctagtttacaatttcttgatcttagctctaatcaaatggttataacaaacttggattggctttctactctttcttctttaagacatcttgatttaagtggttcaaacttaagtgaagccaaaaattggatgcaaccaataaacaaactttctcacttaacatatttgaaactaagtggctgtagtcttcaaaccccaacacctccatttctttccattttgaactcttcaacctccctttcctttcttgatctttctttaaattatctctctttctctacacaccaatggttgtatagcttcatgcctaatcttcttcatcttgatcttaccggtaacaagttaagttttcttccacaagattttggaaacttgacaccggctttaacataccttgatctttcttctaatcaaattgaaagtactattccaaacacttttgcaaacatgacttctcttgaatacctttcccttagtagtaacttcttaaaaggtgacattccttatggttttggaaacatggtttcactctcatatcttgactttagttttaaccaattagaaaattcaattccaaatgattttgggaatttgacttccttagaatcaattgatcttaccttcaatactctcaaaggtgacataaccaagtttattgtcaaaaacacacaacttttatctttgagagagttgtggcttcagtcaaatcaattgtatggccttgtaccaagaagtattggcaatatgatcaatttggagattttggacctatctgtgaactcatttgatggtgtaattgatgaagctcatttcacaaaactctcaaagctttatcacttggatttatcatcaaataaactccttcaattcaatgtctcttctaattggattcctcccttcaacttacaaattcttgggcttggtagttgtaagttagggtctcaatttccaaagtggttaaaaactcaaaatagtctttggcaaatagacatttccaactcaggaatttcacaatctattcctaattggttttggaatctcactactcaattatcttttgccaatctttccaacaaccaaattagtggaacaatagaagaagcctattcatcaaaaatgaaacttgatgatgttgatttgagctcaaatctttttcatggtccaataccaagttttctattcaaagtgagaacattatttctttccaaaaatagattttcgagtttgaattcattatgtaatgtcacttatcattacttaaatattctagatatctcggataatcaattgattggaaatgttccaaattgtttgtcaaaactcaaggacatagaatatcttgatctatcaaacaataagttatccggaaaaatccctaattcaatcggtagcttatcttcgattcgatcattacatttgagtagcaacaatttttctggaagattgccttcatcaatgagtaattgtagagaattggaagctcttgac

SEQ ID NO: 1462 - DNA, 1232 bp, Cannabis sativa
  modified_base (589)..(589): a, c, t, g, unknown or other
tttttccaaatataaattgtgcaaatactattttaaaaagtttttttgtgtcgatcattgatgctactgcttcaagtaatcgggtcgctcaaattagtgttgtattatgaaccgatacaattggctttagcttccattcaaaatcaggtcacaaaatttattatttgttgtagtaagttaactataataattcttaaaaaaaaactataataatgtatgccattaaaataagattgagatttaatttaaacaatataaataagattgagatttaatttaaacaatatttatcaaaaacatactcttctagtcttctgcattctatttgttatctcatgccttaaaatgcataattatgtctatttaacacatcttttagcatatatataattgatatttttgtatgcatatgttataactactatataccacctaataagctatatctttttaataattgagcagtacatataataaataaaaaaaactgttattataaaaaaaaattatttttagtgacaatttttaagttataacaaaaagttatttgtgattaaaatataaaatttagatacaagttgtcactaanttaattttagtcacaacaaatattatgactaaccgattctaatttttataattaatactttgagttatagaccttttaatcacaacataaaaataatttataattagttttaattcttttactttataaaacttagaatttcaaaggaattcaaaatctttctttttatttattatttttgaataatttagagaaataagagaataaatgaccatcaaagatatattgatgactaacaagaatgatgcttatattgttgtcaatggtattttttattggaaatttttaatcacatttttatttattattgtaatcggactagtgatgtcaatgctcatggaggggatcttatgaccctccttaatttttgataaattaaattttattaaattttatttttacccttataaaattaataattttttatttatacctttataaatttttactttattctcataaaatttatatattttttaatcctactaaatttgtatttttttttattttattactcacatatttttatttttatctcgatccatacaaattatatttttcattaaaactcttttcttaagaaaaaattgcccccaccaaaaattgtggctaaccccgccataaatcctcaagttttgtggcc

SEQ ID NO: 1463 - DNA, 1384 bp, Cannabis sativa
gggggggtaggggggggatgtggtgtaaaatacataaagggctaaaatacaaatcaaattacatattaaaaaaaattgaactgcctaggacccatttgggtccaccactgtataacgtaggtatatagcaacatcaagatgaagtagaagcaaaagtaaagttgagtcttactgagtatgagaagctaacgtctgtagttgaccaagaatagatttcagattcgtataaaaatcccatttttcccgcatttctccttacttgctgaaaaatcaggaatttaaataagaaaaataagactattacaaagataaaaggaccttagaattttaataaaaatgcacctttaaaggatgactgactgcctgacataacacttcagttccagtaccagcattcacattcaattcgatcttctctttctttgaaattttttttacaacaggagtgacatagtcgggaaatgtaaagggtacattcaaagtgaactgaccatcattgtacactaatttctgagaccaactcatgctaatagagagaatggaacccccgtcaaccttcaaggagaacaagaattgatttcttttaagtaaaaaaaaaatgaattaatgtattcccagatacagaagaaaccaacttaaagaatgaatttgcagtaaaatattacaagtatgtacctgtggaactgtcatggtaaatatatggggcttcaggaaacctccatatgtagaagatgacttttctgtatccttatcgtcttccaattttaccagttgcgtacgataggattttctagacacctcaacctcaacacctagaattgaaccctgttagccaaataatacaaacacattgagaacagtaaaaacaaacaaaaaggactacatttgtcagtgacgaaacaaagagagagacaatagagctattattcttacaaaaaacaaaaactagtgaatatgaaaatttaacaatacccagcaagcaaactaaatttaagaaaactcctcgtgttttcatattctttaaagcttattattctttagattaaaaattaggattaattcatattgaatcacactatcgttttcggtttcagccttaggaacagcaactagcttcagcattttcaaccacatgaaggaccaaagttggcccagaactcctactttacaatctaaactgggacccaaatacttttaggtagctatagcgtaagctaacaccaaattcacgcattgactttcgaaattccaaaattctccagtattaaatttacgcacctggtcacccatggggatcacaactcgacagctacagctcttactacccataacacaatgaagcctccaagatccaacgaccctcacaaacgccgtgtccaaataa

SEQ ID NO: 1464 - DNA, 1686 bp, Cannabis sativa
aagaataatattggttagacatctaaatacatttataaatatattatattgtatagaaaatatatataacacagagggaaatgggggacaaggggacttgtctattatttttgtttatatataagtgggctccgtttgctagaacaaatcagccaccgttttggtataaatgctttagctagaatgaatgaattaaaatttcttataaaccatggaaatggggaatgtttttcggccatgataccagcttttgtcatgctatcatgtctatccaaatattacttatattaattgtatatatggaaacatgctgcatcctcttcttctattttttttttaataatatatacatatatataataagaacatttcgggtgctgatttattttccaaattatatctcaaattatttatatgataacgtatattaatagtattattttgtatgttgtttcaagtaatttgaaaatttaaaatgggaaatttatgattcacacatgtcaattgtgtatgcgttgatatttttttgtatatgtgcaaattgactattttataatttattttgtacacattaaattatatgttataactaaaacatgcaaggtcatataaaaataaggatataatttttttgggtgtcaaaaatagaaaatgtctatacagagaaaatgtgatgctctatagagtaagggcaattgtatttatatagtatagggttttttgatataacacaaaatttggtatgaaattagaggcacaagcacaaccccttataaaaaaatatatgaatttaagcatgacactgcatgagaaatatggatttagcgacgcagcacaatattagcccaaagtaggacacatatttacgaacatactatagctcaaatgcgcatcacacgtttaaaaccacactaatttgacactaattaataataaaaaatattgatttatcaattatatattagataatgatcgataaatatttagaaataattttttttatttatacgattttacgtaattattatataaaaattatattaaagtaattaaaattataaaaagctatcttattatttttaactaaagtttgaaaatgtagaatatgaagttgagcccgtaagtataggtaaaataataagatagctttttataattttaattacgggctcaacttcatattctacattgctcaaatcatgtacaaatctgagcaatatacaaacggaggcgactccacaacttatatctttttaattatggtcccatacagacacttatttaaacctttgtttatatgcatagttaaattagcaaaataaaaaaacaaattacacatactatattcataatatatatacaaatttatatatgttggtgttcaatttttcttctttttttttttggtactcaattaattactaattaaataagctcaaacaattaataaatgttggatattttgagagacaattgattttattttgtgcatattaatgaagtgcggcatacatctactatacagatatgaattaagatctcctgttaaaagttggtgtcccatactgtgttaaacctattaaagtttgacacactaactaatctaatttatattaaatatgataactactttattgactttattagaggtttaaattttttataaataaaatattaattaatgtg

SEQ ID NO: 1465 - DNA, 4837 bp, Cannabis sativa
tatggtcgcagacccaactgaactgattgtcattttcattattttcatgtgcgctaaagcatgcacaataatatttattttgataaccaaagcatgcacaatatttgctccctaaattcttgtttatttatacaataaggacttagtgcaagtggtctgctacttttgtttcataattttagcattatatataaacttgtgatcctacctggaatggacatttttttcctaaatgacttgtacgcaaacgggacagtctttcctcataatgttcaaaaatctttgggtgccccttaataattttgagcactctatcatgtgtttaacttttggaacatgcttttcggtgcttgtattttcttatgagtaacatgtatttgtggcataagcttttccttaggattgttgagcactcctcattaatcttatacacttgcttgaaggtgtggccacctttattgaaacttgtaaatagttctgattgctctaaagaacaatctcttatgacaaaatttaaaaatagtaaaacttaaaagtaaaaactagaaacaacttattaaatgtttgattgctttaacaagcagcaccttgcgaccacttgagctgtagtatttatttctcttttgcttaaacaagctcgtcaccttatcatgccttcaatctcaggtgctttgtttccttgttgctctgtagatatgctcgagtatattgatttaaggtttcgtccttgagatgtctgtattcattagtgtcgtggtctatatctttacgtttttgacaaaacttggttgagtccctttctctgttcttcttcataggcactagtcacttatatggtacttgggccccaatagtaacaaacaagtttttctgtgacttagcaagttagtgtacttggtgaaacatggttcttatttgttttttcatctgttttgcatgtttctggctatcttgttgctggtcactcactccctcttaccactacacttgctgccttgatagtttgtgctgacaccaacttgtttgttaattagcttgcctaattttaattcctccctcgttttcttgatttcataatctcttcggtttgccttagaatcacctccattaggtaacaactcttctaggctgagaactcttagtgagaatgccaaaatgttaatgtgatttttcattaatgaagaattctctacatccgctagcatctttttattcatctctttcattctttaccagattatactgaaagtgttttacatgttacatggaaactcatttatttatagggaaacccttttctacattttaatttgaaatatcctttccataaatggatattacaaccataataaattcaaattcaaataaaaaacatactaaatattcaaaagaaatgtctagtttgctttctaaatatttgctgctgactaattaataacacattcattctctttgattctaattcttttgattatttcatggacctagttgagcagagaggacatatgaactggctgtttttgtatacaaggaaacataacttcctggtcaaatgtaattctttcttcctgctcactgatccaaccacttgtcgttttctttattttttatgtgcgctaaaagcatacgcaacatcaccttactctccccatagaaaatctcttacctaaaatttgataaatcaatgctctcattaacaccctaaagattgatattgtacacatatctgaaatattacaactcagcccgacaaataaaataagtctgctagatagtatcctaaaaactactgtttttctctccaaatatgaatcaataatgttttgggcctaggcattaaaggcgtatgacttatattctgtatctgaacttttgatgggttcaagcagtgagctgtaattttgactgctaaggtttataatggtagtgttgaagataaaaattttacgtatgaaaacatactatttttcatgtgtccaagtaattcttttgccatttgtgctttcagatgtctttgtatattggtcaaatatcagcacgcactcatagagatgatcttgaacgggtttttcggaggtatggacagtgtgatgtacgactgaaagatggatatggttttgtagtctacgatttccctctaaatgctgagaaagctcttagaggactacaaggtaagagcatatttgggcaacaattaaccattacatggtcaaaaaaacagccaagagctttccaaagatacacaaggggcgcaaggtcctatgagtcacacgggagagattttggccggagaaaagggccaaatgattggggcaattatagctcaggtaacaggcaaacagatggtgatggtgataggcttaattctgaggatatgcttgctgaaggtagggattatcatcaagaagaaacaatcgattgtgttggagaagaacatgataattttagggaagatttacgaagagatggtgatgattaccttggagaagaacaggataattatagggaaaatttcgcaagagatggcggtgattacattagagaacgggataattttagagaagatttggcaagagatggtggtggtactgtatctaagattgacaatggtagatggggtgagcgagtggatgaccattcaaatgaaaatggactttatagtgacttgaatactgaccgatatgaaccttatcagggttatgacagaagagataaagatgaaaatcgttggaagactcgctctggtggttcgacacttggaagttctcaagagaatgtagggagagagttagatggttatagttgttttagttgtggagctttgggtcacaagatgcgagattgcccaagaaaacattcttcacggaggaaaattacaaggtttgatcgtggacctgatgatgatatcagtaaaggaagaggtgatggggagttggagagatttgaatctaagtccgggaacaatgtgcagccaagtaagggtgctaagttgagggagatgaacgataaaagaggtgatggggagttggagagatttgaatctaagtctgggcacattgtgcagccatgtaagggtgccgagttgaggaaaatgaatgataaatggacatctaattcagaaaagcatcaagtttcaataaagaacagaaattctgatgaagttgtgagagttcaaggaaaagatagtgaaagaaagaaaagaaacaaaagggaaactggatctcctaaaagacaaagtgcaaagaaaccaaagagatcagcatcaacaacttttgattcagagtatcctgcttctagagcacgttcagtttcaaaatctttaaagtcttttggaaggtcgatttcacaatctagatcaagatcagtttctgtaggttctttgtcttctgattcgaaagccagctccaaattgggttatttaaaatctttaagttccaaatcaaggtccaggtcaagctcacatacatccttgtctttgtctgtatccattggccggccagcatcctctcctggtaaggcacatattaatcacaaaaaatctttgaatgatggtgtgattcccaaatccccttgcattgaagttcgaaagtccataaaaggtgacactcactgtgaaaatgctcaaactgaaattggaatgacagtactcaagaacggaaatgcagtctcagcctctgaagtagaaaacgacacagaaaagaaccaggatactactaaaagcaggtcattgttcaaaatgactagtcttggaaactcacaatcggatgtaggtgctgggcattcaactccagatgatttgaaagtgacatcagatcagacaaattctgatgccttagcaacgaaccgtatcctgaaaccaactgatgcatcagactcaggaactcccactgtctcctcgggccgttcaacaaacatatctttgaacgagatgtgcatggtgctaaagcactacggcctagaagtcccagaagaaagcgaaagacatcattctttagaatcttactttggatccgctcgcctgtggccgtggcagagcatctattacaggaggatgagaaaaggtccagtatcagttgagaactatgccaaaagggttgctcaaaatcaagaatttggtattgttgacaagtacatcagaagcagtagtggatggggagaaatgtttcaggaaaatccatgaaagtttttggtggttatacaagaactatcttgccttgtaaggccaacttagaacttccataaggtttctaagtataatttttgatcctgtagctttcatgcaaacatgtttcatatggttatagttattattcatcgttgttagtagtcatgcattacctgttattactttttccaattttctactacaaacaatctctttcagagcttcttcttttcttgttggtgtttctagctaaatgaagaaatgtagataaaaatatctatgggtttggattgtatggctgatatcacatttttaatttttgtgtatttgagttttaatatttttattaaagctttttggttcatatgctcatgcttgtgacttcatcttcagctgctgtgacttcaacttcacttgtttatttatttattcacaaaatataaaggaataggttggcataataatagaatttgagttaggttggtttgcaatggtcaaattactggaccacctaatctagattaataaatcttatacatatcatggctcgaaaacatatgctacagatattgaatgataaataaacttcacttcattattttaacattattgtctcataatttaaaataaataccaccaaccccttttaagctgtttcaaaaaaaaaaaaaa

SEQ ID NO: 1466 - DNA, 2172 bp, Cannabis sativa
aaagtttccttctttatttaaaagcaaataattttggattttggtgccaaattatgatattaataagtaactgaaatgtaaactaaccgtacaagacatatgaaataatagtacttcttcttcttattgatattattattattattattattattatgagtataagtgagtattttcatttcttttgaaaaagtatcaaactttagtcaactcatttcttggatctttacaaacaaaaaataacagataatatttttataattaattaaattgtttaaagtaaagaaacttgttctcttcacaccctccaattatcataataataataataaaaaaataatcacattaattaaataaattaataaaaataaaagaagcatcttcttctcttttgtgaaccttctctagttcttttttccaaggacagattccaatggctctgtctctctgtctttaatatatatttgtttgtgtatatcaatggagtatacataatgtttatctatgtaatatcataattcatatgtattttatttatttattttgcttcaatttttattaatgtacaattctacactatattatatttctttccttaaataacttcttatgtcattttcttcaaattcttattttcttcaaattcttaattatatttatatatatatatatatatatttgctgtcagaatgagaagaacaagaaagagaagctctttgtgttatgacccatatcataaataaatctttcccattttagcttgagaaaatatttgtttctcttccaaaaatatttattgggtattttccagattttatttcagatgtgaaaaatcagtacaagaagagatataaagatcaaaggaagaaactttggtgtttttggctcaataaagattggatttttatgttctgtttttttacagagaaatatgctttgtaagtcctctctttgttattagtgattttcttcttcacttgtagaaaagaaacaagtcaaatattcaaagtcatataatttttcttaatatatgtggttcaattttctctactaatgactactttaattttttttttttttttttctgtgttttagtttgaatggtctgagtcctgggttttaacatgtttgaatgattcaatataatatacaaaaaaaagtcaactaattttgccccaaaatgatatctttttaacaaatttataaaagggtattgatataaggcaagagatctttctcacagcttcaaatcaaatataaaaatgaaaaatctcacatgttttgcttctattacttctgacccaaaattaggttcaaagacttaatcctacttgctcttctttacttaagaaatattcacatgactcctaagctttaaaattttatgcttaatctcacatgttctaacaaagattgcccatttctggttttagagcaattcagtcaatcattgaagaaaaaacaagttttctcaaatggggtatgctaattcaagatctgtaaggtacttacttctttacccatattactattttgctttaaatttcattattgtgcttagtattgtgaattagtttctgattttttacttaaacatattaatgtagatttcaagatgatcttgaattaacaaaactacctatagttaatggagatgataaagatgttaaggctcaatacaagattgatgggactcaaatacaagaacaaagttctaagaagagtgatcatggaaggagagtagtaacatcattaaaatccaaagttttgtctagagttttctctgaggattatgaaagagttcagaagaagatactcgatcctcggggtcctataattcgtcgttggaacaagattttcttagtaacttgtttgatttcattgtttgttgaccctttattcttttacttgccaatggtgagaaaagaacaatgcattgacattggaactcaccttgaagtagctctcacaatcattagatcatttgcagatgccttttacatgattcaaattttcatcagatttcgtacagcttacatagcgccttcctctcgagtgttcgggagaggagaacttgttattgacactaagaagatcgcaaggagttacttgcgccaaaacttttggattgacctcttagctgctttgcctcttcctcaggtactgaaagtc

SEQ ID NO: 1467 - DNA, 1331 bp, Cannabis sativa
taagttctgagttttgtggttaaatttgttcttggctttacacaaaatatacttgattattgcttaagacttagaacgtttcagaaaccaaacatgttgattttatttagtctctggatttataacatgttctggaaccaggagagagttgaccttctggaaacaaatcattttagctacactcaaacgcaaaatcccagtggagtaaatgaaagctcaaagcaaatgaacaaataacaaataacttcaaagctcaaagcaaattgacaacactggcttttataccttgacatatcaattttctgccacctcccgaaatctaagctagacagcacaataacatgtgtctttccactagcagcagcaaactcagccaagtttttagcaaattcaatcatcatcccctaatttaatggccatgtcaaaaatcgtaaaccatgttctgaacaataaaaatttaaggtataaccacaaagaccataataatggaaatggagagcatgacagtgccaaataaaaatttatgaacaagtttaccttgacaactggggacctttgttggagaagagtgactccattagcgggtgattcataaactgaaaacccaagcatttacaataaacatcaaataatggaaacaagctaattaaattgcagcaattgatgaacgaaccctaaaaaaagggttacaaaaataagacaagtaatcaccttcaagaggtagagcgagctggccttgaggcacaggcacatatgcatcatttcccacacaaggaagaacaaaaggagtatccaaatatccaactctctctggtttcatggttgaaactaaaagatccatagccaattgccccacatttccaattgacaatgccggcttaacaaaaataaaaactaaattaagattaaatcgacactagtttggccaccaagaaaacatagaccatcaagaaatttaaaatttgccatttccataactgtccaatattgtattagtgatacacaaagcttaagaacttgcgcctaaacttccgcttaatttaaaccaaaagaaatgaaaaaaacattgttaaacatgtgaaaccctactaagaatcgtacagaccataattagagtggaacaatctttatcgaggtgtttgtcttcttcaacgacgaattccattttagtatctcaactgtcgtttctctctggtcgccgatacttgattgaacagcctcgaatcttctacttgatgaagaagaaaaactttgagttttaactttcgggcttagctatgtaggtccactaactaagcccagtctgtattttttgttgagtttttaattag

SEQ ID NO: 1468 - DNA, 2203 bp, Cannabis sativa
cgtcaggggcgcaacatgcatatcctccgcaaactccgccttgcagactgccaacatcatgctcgatcgtgatagatttgtagcctcttcgtctctagacgccccttcagggcccgattcgcctccttctccctctacattttaagagggtcgaagggaaccaccctcttggggaaggcaaaccctatggtaggcgttctagacgaagccgaggggagggccctgggctggcccaacctcaattgagcgtaaggggacaaggggtgatcccccgatccccccacgccgaagttcgttaccacgagtttttgcctcttcctggcagaggaactgctttctgtcgccttggagggaccgacctatttaggagaagacatgatgtacgtgtccacagattggcacaacaaaaggagaagggtcactacttcacccaatcattcccaagaatgacaccactggaaatcggtgtcccagaagcgaatacaccattgtggctccctcaaaaacattcaagtacatgaataacttaccagttgatgaggtagacaattttggtgtggcatccttggcaaaaaaccagtgttcgatgacagcagcgtttgaatgtctaggaagaagggaacttgaagggttatgacttgacgggtaagaagagttaaaaatggattgactactgtaagtatttatgggatgactagaaggagcacatttcacacaaagcagacgcttcagtttgccccaagagatgtccgatgattggatgtgagaagttgcaatgatacctcacttcccaacagacggctcccatcattacatgcatcgtaagaaacactcgaagaaaaaactacctaagtccaatcgctgccattttgagttccccagagatatgtgcccagaacgcataaaagagtccagaagttagcatttaaaactctgacaagaaaatgggagaaatcatgcctcccacataatgacgctttggtttgacggttgctgatgtacaacattaaaaggcttgtcaaaaaatccacgtgcgcgaaagatctcctagaaaaagatactacaagctcctggacaatggcatgtcccgaaagcttggggagtaaatgttatccagattttcgcaagcatgaccgtggaaattaatcaagaaaaagtcaagaaatcgttaaagctgccaaagtgcctttctccttgctccagaaaggtaagagcctaatatcgcggaacagattcttgcacgagaagttttattagatgcgagccccatggaagacgcccgtgagccagagactcgctcgactctagaagccgagaccctacgcaaaaagagcaactcctagggcaggtccctccgggtagcccactgtcactcaagaggaatatgaggcactgaagcaaagggtggaagagtaagaagcacggaacgagtggcaacaatagatgatgatgactcagaatcaaatcatgagtgtgttccaacaacaaataatccaattggccaacatagttctaggatttaacatgaccgagatgcctccgattctacagattccaccattttagcctcctcgccatgttgctgggtcctcctcacagactgcccatctcggtgatgacgacaatgatgatgatgctgctgtcgatttgtagtttttttattagtctgcagtgtacataatattactgtttatgaactaaaaatacttttatttagtttatgacatttaatgtagttttgtaattaccattacaattttagttttatagtatatttgatattatatttatatttatttttatttttattttaaatttaattatatcttataagattttaaaattaaaaaaaaaatacttttaccggcgagttcatgtgcgccaacaaaagtatttaatattataaatattaaatgttttactagcgggtaactcgctggcaaaagtatttaattttttattattaaatactattgccggcgagtttatgcgcgggcaaagagtaggcaccaaattaagaattggtgtcaaaatctcatcaatgggacctcagccggcaccctattgctggcattgaacttacgccgacaaattaattcgctggtgtaaagaattttgtcggtacatatactaatgtcaccgaataaatttgatatgccaacgagacactgccgacaccctttgtcggtgaaaaaggtcaccg

SEQ ID NO: 1469 - DNA, 1781 bp, Cannabis sativa
  modified_base (646)..(646): a, c, t, g, unknown or other
ttatctatattattatgcagtccctctaatggctctgttctgtttctgacatcttatagttatactactgttttgtaataaggtaaggttttttaatgccgtgattatacaagtgacgtgtccagcatgatttacttaggagtgatcacgtgcttgtattcgccactaaactggaacttgttatgtgttgtactgtggtccaaactctcacataagctttaatatacatcagaagcaaatccatggcacatcatatttgcacattaataaagtactaataagttgaaaaatcatttattttttcaatcaagaggatgtttttgcttttaatcaacggatgtactcaaaaaaagcagggtcttaattttctaattggacaaggacacttcaatttgactgtctcatttgttaaggagagaatatcaactaggggtacacaaaatgtcacttgttaacgttggaataagtataaaaagtacaatttttcactaggcaaaactctgtcaaaaaaagagtataattttttactaggcaaaactctgtttggagcgacactattttaccgaaaatgtaaagcaaaaacaagataattttcccgagaaaatttgcgtacacattcatgatatgtagagagagagagagaganagagagagagagagagagaatgatcatattacattatgattttcattttgcatatgagtaatgacctttacaagataaaaacaaacgagagcaaacttcatgaaagacctccaatataacaccatgatattcatccgaattcatggaaacataatagtttaagagactacgaagatccttaggctctctaatccgattagccataatcatctccaccatggattctctaaaatcctctctaatatcattagaacacttttccatggcaaccattaaaacaaacttagttctactactactactagtcccttgatcactactactactacaacttactctttgccttcttctctctgccaagttactattgatagtcttcatttctctttctctgatcatctgctccaacctttcctggaccatggcgtgagcaaggctagaaaccgaagcgaaccgatccgagttggtgctctcagtttcctcagaagatgaaacactaagcctgcaactactacaacacaaagctctgctgcatcctcctgatttgatctgctcaagctgatcttgccttttcttgtgttgccttagagaggaggctctcatttttatcttcctcttgaggacacttaatttgaagctgtgaagggaaattgtgttaatcatttatgcagaattagcaagtgggtcacgttaagcatgattgtgtcttgtgttttacaacatatgtttaattgttaattatatttaatatatggtattgtttcagagaattagttaagataaattaataaggtaattagagaaacctttgtgtggttaatcgagatagtgatcatggtgtgcttaagtggaccttcaataatttcctctattagggtagtagtagtagtatagtattaggtgtcatgcttttcaaaatctgctggtgaatatgtaaagctgcttaaagtggtccaaaaaaggctttagatgattaggactactgaagatagcttaaataaaataaaggaatcacactgaaaattaaactctgttttgttttggtacaaattcacattccagctttaaaattgtacttgttaatcttatgacttgctattgttatacgcaaagattaccccaaaaagaatggatc

SEQ ID NO: 1470 - DNA, 1557 bp, Cannabis sativa
acatacgatatatatatggtgtggtatggccccataataaattaactttatacggtgcattttttttcgtgggagcatgagtgaaaaatagtatcattcttttaacattattatagcattttgttttttaattttttttaaaaataaaaaagaaaacaaaaaatatcctaagaatcaccaaaaaccagaatccgatgctacaaaactttttgcactccatgtttatgtgtctaaatgtacttggtctggttttagccgcggttttaaatagaatatattatttttaaatatattatttttatatgtatatatatatatatgtaataaactgtgttagtgttctattgggtgagctatatactgctagtattatttacttatttgctggtgctgcccatcatgtgtgttcatttctcatttttatgatataatatatattatattgtgtatacataccagctgatcagactgcgtctgtaaaatgggctgttgctgatcagcctgagccaccagagatcccttggtcgacttcatgtacttctctataagcccttgcatggttctaattaattgtatatatatatgatacaaaataaaaacctaataattatattatgtcaccatatatattacactagcttaactacatattatatatcatattttatattcacaaccgcatatatatatatatatagtgcatgtgcatcttttcaatatataatctatttaatatcatcatgcgcgcactttcactgcctcttttcatcatattcataaataattaaagttaaaaaaagatcattatatatattatcatgtcatatttaatttgaaaccaccattattaataataatttatatgtatatataggaggcactgttatagctagtaagaatagacacgtgtaaatagaggatgaaagccacgtacgtacccttttgtggcgagatcgtagagcttgccatgggcggagaagatgacaagtccaatctcagcatcacaaagaacagaaagctctttggctttcttaaggagcccagctcggcgcttacagaaagtaacttgtctgtgaactgggttctctattcttctcagctgaacttttccacgagccatatataatttcctttatatataatatatatattgatttttcaagaacaaaaaacaaaaagaaaacaatatatatatatatatatatataatttggctgtattaattggtaattgtattaatatgtgaagtttgaatttttggggttgtttgatggatgaaatttaagagctcttaattagcagctagctgacaaacctcccactagtttgaactagcttcgaggatttgccgcagaaatgggtttgtgtgtggttttggtaagtagtaacttctattgaagttggttctttttagtttgaagcttaagcccttatatacttctatacctagattcccttttccaatatatatctcatgcccttataaaaaatattaatcaaatagaataacatagctaaattgttcggcatctaccacctactttttttttttttttt

SEQ ID NO: 1471 - DNA, 1293 bp, Cannabis sativa
gagttggtgccactaacggcggccgagattcttcgaaccagaatttgtggaatgggattgagaccaataggaggagaaaaggactcgctagagcaaccaatgcagattcatggttggaagagcttgctatattgagtttaccattcttcaaacgcttaatctctgccatgaaagatcgagatctaagccctgacatgatcgagagctgtttgattcattacgccaaaaaatgtattcctggaatttcgcgtacgaatcggaagccatcatcgtccacgtcatcgtcttctttgatagtttcagagaacgaacagaaagagcttttggagaccgtaatttcgaatctgccattagagaagagctctagcagatcttccaccgccactaggtttttgttcggcttgctaagaacggcaaatatattaaacatttcagaaactagtaaatcgacattggagaagaagctcggttcgcaactggagcaagccactctcgacgatcttctaatcccaagctactcttatctgaacgagactctttacgacgttgattgcgtcgagagaatattaaatcacttcttggaaggattacaacacagaaatacagatagaattgaagatgaagacgaagctgatgaatgtgacgacatcagatcaccagcgttaatgctcgtcggaaaattaattgacggttatttatcggaaatcgcctcagatgcgaatttgaaacctgaaaggtttttcaatctagctatgtctctaccagatcaggccagacttttccatgacggtctatacagagccgtagatgtttatctcaaggtatatatacatatatatatatacgtatatacatacaagtatgtatagtcattcaaagctatgcaaattttgctcgaattctgatttattattatgcttttattttcattagtctcatccatcgacatcggattccgatcgcgaaaggatcagctcagttttagattgccagaaactcacattggaagcgtgcacgcacgcggctcagaacgaacgactaccacttcgcgcggtggttcaggttctgttcttcgaacagctccagctccgccacgcaatcgcagagaatctaatcgccgtggaagccgcacaaaccgacgccggaaggccatctgttctacgaagagaacaagaagaggctgaagaagtagacgaagacaacgaaaacgaagtcgtcgaagaagatcatcagctaccgcgagcggtggctcacgacggaggaggagtagtgaccaacacgtggagagcggcg

SEQ ID NO: 1472 - DNA, 5435 bp, Cannabis sativa
gatgtgatgttggactcatgtaagacattataccttaaaaaaatcacattggtaagtagtgaatttattatgacaataaagcaatcaacgccatacttgtcgtggctgctgccattatattaactggaaaactctcttccccagacactactagatttaacatccttacaaaatattattcagaacaaaaatatattattaaactaaaacgagtgattatcaaatcacaacataaacctgactgtggcagctaattatcaacaaaaactagaaatgaatctctgaagacaaacctggagaaccccaacgagaggtgaggaaggaacatcaccaaatatgtgaattgaaacagttgacatagccattgacaatggcctcaaacttggtttaacgcaatggaggcaaacataattaactggagcctgcagaaacattatgattaatgaaacattactaaagcatcgtcatataatgacagccaagttagccaatcaaaccaacccctttcatttaccacatactggggatgagcaagactgtttttaatcatgataaatcacagaaaccataaacaagaaaccagtatcctatcaaaacattcctgcattaaaagattacctgagttgcaaatacaagcagctcacccactgcaaaaagagctatgaagccatataagctttttagacagaaggcactgaagcagaatatcgcacctagaaaagtggctccggaaagaagctgcaaaaggcagaaggttaagcaataaaacaacaagtgtcatcagagtttttgatttaatttctagcagaaatggtacaattcaatattaaagaggatatgagaaaaaggctgactactgatacaggaactgttttactctgatatgcctaggcctcttgaaaggtactttggcagatataatttgtaagaaattaaacaaatataaaaaaaagcagcctattatgttattaaaaatcaagtagaaaatagaacatcaataatattttaaatacatgcaaaccaatgaaagaactcactttaaatgcattagaaattgtagcatccattttatcaaggataaaccctcctgccaatgtgccgaaaattccacagacaattgtaatccctccaaataacaaatctgcattactctggagaaagtttcaatcaatcagaattatcatcagtgctgtaatataaaaaaaaaaatgaaatttctaagttataagggctgacattgaagaaagacaaaaacttcatcataaagtatacaaatacttaataagcagaagtagcaatagctttaccatatgataaatattataaccagcctttggcccccaataagaataggcgccaataacaaagttgtatgaaatgtaacctgccaatcaaaaaaagaaaaaaagttcattgaaaaaataaaattatgaatttacaaatttagttagtagctggagtctggagacatcttaaggaagtagtttttacaaaaaataagtatttctttacatcaaagaatgattaaaaacttggatcctagggagcgcacaaacatataaatgaaaaccactctaacagcagtagaagatgtaaatattttatcacaaattttataatgttcatgaactaaaactctgcaacaaagtactaataatgaatataaaagtgtacctaaaacattgacaacataaactttatcaagcaaaagtactttcatatccttagtaaatctggagcattggctcgataatttagagaaagctgataacctgaaacatacaagagaaaacccaatcaaattaaattcaacaaaatagcatgtcaggcacaactttgtgaaagaattttacactaattagttacgacgctaaaaagtattttaattttttctcaaatgttagaagaaggatgacaatgtatatttaacaaacccaaaagctttaaataaacaaatccaaggaattttggcctcacttactagatattttgcagactctatttgccattagttttatagccatttaatttgaaactctcaagtattcttctctttaactaagctacctcccttcccttaaatggatttcaattcaacagttcccttaattactctattgccacaattagttatgtgtaggacttatatgaggatttaatacaataggatctatcggtattagtgtggtttttgggcttcacaattgcccattagtattttccaaaacaatgaatcagcccgtttggctaagcttattatgcttttgcttaaagctagaagcacaagataagtaaaagttgtaccttatttttattgtttgggtaactattctgtaaagatttttcattaatgaaaagacatcttcaaagtgtttggatatttaaaaaagatcttttatgaataaattagaaatgattgaattttgaaaatagcttctcaaaagtcctttttggagaagctagaaaagacctttttttttatccgaccgcttcaaaaaggattttttttaatcctagaaactaaaaaggagcttagaaaagcttagccaaacggggcagatataaaaggaatccaaacataaagctacttacttctttgtttcatctaaaggaataagcacagaatctacatctgatccgtctgaaacagcaattataaggttatcagcagtcttaaaaacaggaattgctgcacaagcatgtcttaaaaaacagaaaacagcatcaacaagatgtaatttcaacacatatatgaatgacaatccgcaactttatctaaagccacaatttgcatcattagaaggaaaagagatggcaacatagctatatagattttttcgttacagattaatgaaatgcagaactgtaggtccaactatgtgcagatgacattactttcttagattatgccgttctccaataccatcaccatgagtatatgcaaagatggtgtcctcttcttcaagataattttcttaagcaaaagcttaattcaagtaattatctggacagtcttttaaaataacttcagaaattacatacctttttaatttgtttggtatgtgtctaatttgaaaactcataaatgagaattatgtaaaaacaaaatctttaaaaaaataactaaagaaaaaatatcatctcatgtgtgaaaatcagttaattctatgagaaatagaatcaaaattagaagatatattataacatgacaaaataaaaaaccctataatgaaaaaaaaatgatataaagaggcgcacatttataactgactttaaatttcataaaggggttaaatgtgccaaaattgaaagaatggggacctaatcatcactacttaaccaatgaaggactactaaatgtgttaattacccactttaaaagtcatgctaaacaacaagccctttaagcctttgatatcttcaatattgtagccattacagttatttttctagctgtcttttacacgtcacgcacaggtgcacgcatgtacacatttacactcttccagtttgttaatatacttcaagataaatgagaggataagtaaaacctggcaacagtagataaaagcacatgcactaccttccattacatggctagttgcttcaattgttgtcactcctttgtttgaaccaacatacgcaaatcctacagtcatgtatagcaattgaatatataaatgacaagattatgcaaggctattcaacatacagtatgcatctcaaaaaagtcacctttcaactgcaaaggtttcaccagaaacccggaaacagcaaaaggaagcataaggagtgcctcgccaaaaaatgcataacgccaactgaaattgcttccaaccttaatgagcaaaatacaaaatacattacagagttaatacttccaggagatctacaagcaaagaaaagcaatatagatatgacactagatgaaccaaagacatagtgcatatccaatattatgaataaaaacctagaacaaacccatacataaagaacggcagttgctgtaatttctcattctcagttttcatggctggaaaatttaaaagatctaacttgtaactattgcaagaccgcacttaagagcctaaacataggatatgaaaacttacaactccaccatagacatagcccagtgcaattcccgtgggtatgcacatgtaaaagaaagcaagccatgcagttttctgaggtccacaacaaaaagttatttaggatagagtgaaggaagaaaatgcacgtacaaacaaaataagaatacaaaggaaaaggaagaagaaaatctaacttgctcaggcggggcattgtcatcaataaatggggcagcaagactaatgaaagatgcctcgcctacaccaaccagcctaaaaggacagcatagtgttataattgacaaagtagcaccacttaaagactaaaagcaaatggaaaaactaactcttttaacttacattctacatattgtgatagaccaaaaatcaattgaaatgccgcatcccactgcagcaaatgtccaaacagataatccaactccaataagcctaaaaggactatggctgaaagaagaagaggatataccaacttgtaattaatccagcaaagcaacaacctgaaattaattaaagtttttactagaaaatgaggtagtcacctctttgccaaggaagcaaatattggagaagcaataaggagtccaaccataaatgcagatgacaaaacaccatcttgaaaattattgaggttaaaatctcccctacaagaaaaaaaaaaaaataaataaagcaaatcacttgctgcagtgcccataaacatggaaaaattaaactttattgtattgtatcatgattacacaacacatggtcaaaggttaaactcaatccccaattaactctacagagctactctgatactcttcattaaaagtgtcagaaagccttactgaattccggttcccgaagtacaaactccactatcggtgcaagttccaagactaccattaacaccgttacttgctattgctccacgatccacataattcaccatattaattatacaaaagataacgagcaacctgcagcaatacaaacaaaccaagaatttcatggacggaaaggtgagaatcaaaaatagaaagcatgagcccaattcaagcaattgaagaagtttcttcataattttggaaagagagaggtaggaagaaagagtatgaaggaggtaccttttgggcgtaaaccatgtaggcttgcgatctgaatcgtgaattggaagggtggccattggaggtggaggttgaggtccgttggtttctgggtttgggtttgggtttgggtcagaagaggaatgtttaacttcgatattcatcgtctttaaattaatatctgcaaaccaaattatatgtttcaaagttgaaagtccaaccccaacctcttccctct

SEQ ID NO: 1473 - DNA, 2765 bp, Cannabis sativa
atttcaccttaaataaataagaattaattgataaagtgttaaatactactaatatccatcttttattatttcaccttaattaaataagaaattgattgattaaatattaatgagaattgttatttgaggctccaataaagttttacattttatttattaaatcaaaatttacgggataaatgcgccaataatgcatgcttaaggtgcctcctagtattttccaataataatatacatacggtacctatacgtacgtacatacattatttatttatttttgttgatatatatatgtaaatgtacgtgttaattaggtatccattcgatgtgttggatcgcatctgggttccatttaacgacctttcatggaaacaaatgacgacatcgacatcgcttaacgttgacaacaccactcatattgactattttccaccgtctgtcataatgaacaacgccgccacacctatagacgaggacggtccgatcgatttctatctcgaatcgctggatgcaactaccagctattatctctatgcacactttgcggaactccaagagctcaaatccaatgagaccagagcatttgacatcaatgtcaatggtgatctcttgtatggaccagttgtccctaattacttgtccacaaagaccgtctacagcaccaaacccataactggaaaactcaattatagtttttcaataaccaaacttaaaaattcaactttgccacccattcttaacgctattgagttctattccttgcttgacttttcccaatcagaaacacaccaagatgatggtaatatttattaattatatttttctttgcgtactagctctatttttaatatatgtagtcgatcttccctattttatttttatttttaaaatatatgctagtagtgattattatatattttgtgtatctatagttcttatatcatcaaatattgattatttataacttttattattagtggatgcaatcactggcataaagtcaacatatgatatgaagaaaaactggaatggagatccttgtgttcccataaaatacttatgggctggtctaaattgcaccaatgatattgttatttctcctagaattatatccttgtaagtcaatctcaatctgattctttaatatatagcgtaccttaaattttagaatttgtattttttttttttatatatgtactaccctgtaataatttggtggtttatattttaattatttgcacaataatcagggacttgtcttcgagtggattaagtggcaatataagtctatacttctctgaactcgctatgctagaatctctgtaagtataaaatacgtacagctctcaagaaaagttcaaactaattggttactttatattaatatgaaaatttcatatatatattacttatttcagggacttgtcagacaacaatttaactgggccggtgccagattttttgtcttcattaccgaacttgagagtgttgtaagttattataataagaaaacacatacattactataatatttaatttatttattaattaatactacattgattagattttaatcttgatttcattacaggaacttggaaagaaaccaactcacaggctcagttccaacttcacttcttgagagatcaaagaatggtttactatcagctaagtatgttgcttttgagtctttatgaaagaacatatatattattattcaatcttaattttcagaagaagcccttattaactttataatttttcaccaaactctaccaacgtggatataataatatgatagtttcggagaaaatcaagatttattatgtgactcatccactccatgcgtaacgaataataagaagaacaagaagaagaacagtatactcattccaatagtagcatcagttggtggagtggtattgttgttaataatagccgcaattattttctacaccctcaagaatagaaagaaacaaaataacaatggtaacttctttagcgatcaattttagttatcattacgattgagttccttgaattgatagttaagtacgtaatttatcattaggttatgccgtcgcaacagggattgtggcaccatccaatttgcagactgattcattattaattgacgaatctaaaaaaagacagttcacatattctgaggtgatcaaaatgacaaacaactttgaaaaaattcttggtaaaggtggatttggaactgtatttcatggcttgatagatgatggtactcaagtagctgttaagatgctttctcattcatcagttcaaggatatcaacaatttcaagcagaggtattattcatttttcctatataatttttttttgaagttgtactgcatatatatatatatatatttgtacatgtattaataagctataattaatgtatatataccactttgaaagtacaggttaaacttcttatgagagttcatcatagaaacttgactagccttgttgggtattgcaacgaagggtccaatatggctcttatttatgagtatatggccaatggaagtttagattctcatctttcaggttaagtactgtactgtattaattagtttcattatgttagtatcactttttatttttcttttaagaaaataaattactattaataaaaaaaatgggtaatatctcgtttgcaaaaataaatagagaaagatgcaaatttattaattaacataaatatatatactttttgcatttgcagatggtgttagcaatgtattga

SEQ ID NO: 1474 - DNA, 3194 bp, Cannabis sativa
taatagaaaatatttcatattatcgaagacatatgcttgaatagccaaagatgtaggtaaacaaaatcataaaaacttgccacatccatacttactgttcgacatgcgacaaagacagaagtgagattttccatcccacgtcaacccgatctgatctgaagtagacttatgcggtacgagagaatcatacgaaaacatttccgagcctgcacaaactctgcaatagaaacacaaagaaaacaccaagaaacatggcagaaacaatacaacaaatactaaataatcaaaataacaaagcagtgatggttccaagatgcttggttcagaatcaaaatgcaacatttgttaattgagaagttccgctcatcttcctattttacgtctgcagtgatgaagacaacaaacacagaggcagaaatgggcggagaattgatggagttggttgttatgaattccttaatgaataaaaaaatattacaatcaagacataaaaaacacaatgtctcctatgtcccattataaatattattttacaactttacaaagacagatatactgtaagacccaaaaatctcagttcacctgacatttataaattgctctatgaagaatctcataagttatctcattaggtccacaaccttccatttccatagctttaaacaaagagagaatttcaccgaaatggcctctccagaacattgcccccataatggtgttgtaaatttctacacttggcataatcccttcatctaacatctgatctctcagctggagggcaacagatatcttccctttcttgataacacctctaactaaaaatctgtaggtacaaagatctggttttagtccctgaaaatacatgtccttcaacagctgctccaccaacacatcgttaccctcttttacaaaagcgtctatgagaacattgtatgagatcatatcaagtataaatcctttatttttgagatgttcaaaaagcttccaagccattttgactaacccattatggcacaatttgtgaagaagcaagttaaaagttatttggttgaatttcagctcattgcacatcatgtcatccaataacttcaaacactgagaggattttcctaacctagcaaagtattgaatcaaactaacataacttacaccattaagctgaagatgctcatttctcattcgacacaaaacccgttggatcaaggaagagttgccctctttgcatgcagcagacaaaattgcattaagggaaaccagatcaggcccatttgcaccccactcaaagcaatctaatagctcccaagcttcatggaccttgttctccatacaaaaaccctttataattgtgttatatgaaacattgttaggcataaagcctctttctgtcatattcttcaatgaagacaatgctttatctgacttattcttatgacataaacaatggaagaaaatattatatacaaccacgtccaaagtaaagcgcattgaaatcaaatgagacaatagcctgtaagcaatatcaatcttacccctttttagtagacttccacccaaagaagcatatgtatatgaatcgtaggaaaaccctttttgatcaatcaacaggaagatccgagctatatcttgaaatctatcttgaagacaaagctcgcgaagaataacattgtatgtaatcaagtctgcttcacacccttctctttccatcataaccaacacatctaatgcctcttcaatcttaccattatcacaaaacaactttatcaatgtggtgtatgttattaaattgggcatacacccacaacttctcatttcatctaaacaacatagaatatcttgccatcgacattctctaccaaatccataaattaatgcagtgtaagagcagatgttatgtacaatgccctttttcttcatcaaacaaaataattctagagcaatggaacactgacctgatctacaaaaggcccatagaatcgaattataaacatgcgaaccataaatgtgacccttgtgtagaagaagagagctcacttgaaatgcctccctaagcatacaagcttttttaagcttagagatcaataaatttaagctgctttcggtcaggttatagtccaatcttagcataaacttgaatacatcaagtgaatcaactaaactccctgcctccaacattttcttcaatatcttagacaaggtcgtaaatgaaggcgtaaacccacaagcaaacatttcttcagcaataatgtagctatcttctaagtaatcacgagatagcatcccattgataagggtattaaaagttgatgcattaggaggaccaaactttttcatggaatgatatagctcaacaaagacctgctttggtaatggtgcattcgatgatttaaagaaataatatatcaaagcattatagtcataaataattggctttccattcatttctttcatggaatccaaggtatacagagcttcactcaaatggccggatttcgcataactctgcatcctaaactgcaaatctttatggtcagaataattcacattgttcccttttatgacatcataatctctaagtgcatttgtacaagaaaacttcaccaaatgaagaccatgcttcaaaattttgctcgactgcctgactatagaactttcacagagaagcattatacgaaaataatcattgtagaccaaacattgcaactaaactgcatcaagctactccaccaaatagattcagtttctgtttaagaacaaaaaaatcaaaataaaacacggttacagttcacaaataccctcagctaaacttaagagctacacatttgaattgaaaacctcaaaacatgccaaagaattacagagtcaatattcctcaaaatcccctattacattcaaatttctcattataaatccgaaaaggaagtatgactagaaaataactaatcaagaacaaagaaaatcacagaaactatcaacattaaattgtaaatcattaattcgtctaatatattgaaattgaaagcgtagtaacaatttttaagagtactagtgttctcaatctgcaatgaaaccacgctacaagttacatttcctttcccctttctttaatttccttcgaaataagtgatctgtgtatgtacttatgaagaaaattctgaaaaatatatagctgaaatacattgaaaaatcatatgtat

SEQ ID NO: 1475 - DNA, 3772 bp, Cannabis sativa
tgttatcttattattgaactaaaaatgatttaacctcaagaaagaaaacaaaagcaagtattttcttagtaataaagtaatataatgataatttaaaataacaaaaattattagaaaacagaaaggaaagctctctcctatttgttaaaaaattgcaaattggtcagtggctggtgagtctggtgagtcgtggtaaatgtaaatgtaaatgaattaatgaccataaagctaccaattgaagacatgagaaacttttttgggttgaaaagtgactgaggaagaaccaaaatcaattatcaaagactataatcaaactgacccctttagaacgacttaaaaactgatttttggatagtgaagggcagccctacatgttcctaaaatagtatgttgtaaccaaagaaaaaggaatggcaacccattggtgtaatgacccacaaacttataattgggttgcagaagaagcaagtaattaacctgaaaaaagaatggcattttctgcatggttgtggtgggagtatgtattgtataggggaagcactctctatgctatttaaaacccttttgtatattattattattattatctcaaatatcaatctccctgaccattttctccaaacccaaagtttcctttaatttttttcttttctaaatttggtagtagggggctaaaatctccaacccaaattcatataagtaaaacagtttgtccaacaaaagcattgagttgttgagatcacactcccatcccatgtatgtcagttctcatttttcaaagcttttatctttctctctcattgcaaaacccaaccagagttttgattacctacaattcctcagccataggattgtcaaggccttctatttgatttgattccttgtcttttatttaacactgaaacaaagtaaaatcatttgaaggggtgctgaaggtgaagaattcaagaagatattcagttttactgaaattcttgtaatttggtccctgcccttttgtttgttctgggtcttgagcctaatcagggtttagggtttttcagtgaattgaatcttactgttattagtcgttttaaatctacctatagtacaacatgggtcccaaatagttattggaagagttttattttttcaataaataagtcatttttctgtagaagttcaagttccggctttgcttcaaacaaatgatttcacagtagcaatagaaagatgaattgaatcaaacaaagctcaaattttcttaggaaggaaagcttatttttggttattttcttaatgggtttatctgggttttttctcctatgtgttctccactcttcaatagctttgacttgtggagttctgatgatgttctatgcgaacgagttcgctgtgtttggccatggaagagaaactgctatcaagcttcaagggtcaacgccacaagatcagcttttgatccaaacctctgattcattttcgggtttgcttctatttgctattggtttcatactgttaatggtggcttttgttaaagacagagagtttcaaagtttctttgctaaagggtgtgtcttgcttcacatcgccatggccatttggcgagtttactttgagagaaaacttgaagacctcgctcgtgattggcccaggcaagtttttggagatattgcactagccttttcatggattttccttcttgtttactcatggagagaaaaatatgattagttgggtaactacattttacttgtttacaaagcagaggatatcaattttgaggaggaaggtactcttgatttacaattctttaatttggttcctctgcttcttgattagaaatgaaaataaaaaatgggaaagcctttctttgaagtagtttgtgcaaagctttatgttcattctgaaaaagtatctcttgctttatgctacaacttttagaccagatttcattgaagaatagatcaaatacattctgggttagtgtctttatctgaatcttgtaaatcctgttggagctgggatctgaaaaatgaaagcaagatcttgggctgctatgtttgcttaacctgaaaataggaaaaaatggtttgcagccatttctgttagcttatcctgaatacccttcttgtaaatttcctcaggccatatgtcaaatcatgagatatctgtaactttctatttcattacatttgtaggacacttgctgctttgactcaacatcatataataaaaatgtaactttattttccatgatcaaatgtcatctttgttttgttaattaaaaaacttatgcttctttggtgaaagtttctttctttaagctgagtgacattgcttagaagtttgataggtacttctctctatgctctgtctcaggagtttcctttgttctattctttttccacttttctggatctaactgtgtggtgagaaacacatttgggttatggaatgagaagaagagcacagctgctatttcactcaactgatgaaaccatcatcattgtttttaggctttttacagtttcacacataagcagtttttgcagtttcaattctggctaggctgctctgccttttcaggaaatacactaaaagtttttttattcatacagcagcacatcgttgaaataattcacaagtttacacttgccatctgatgcaaacacaataggttttgtaattttattggcatatacatatagttggatatagaacctcacatgtcattgaatggcagcttttgtcagctgttacttgataggtttgacaatgaattatattttgtcttctcaattgataaagttctgaggccatccaatgctcttttgaacctggagagaaaaacaatagtgcttcccatcccatggggccattaacaaggattcttttcaatataatcactgatttaattatttcatttatacataatgcttaatttctggggtccatttcttaactagtccatttatagattggattggattgtatttggcatcacatggaggctgggaccttagatactagttcagcaatcccattatcttctttatgctgtcataactcataagctattattactctctttgcctttagctctctttctttgggtggtggatatggaagattacttcaacttcaagtgtgtaatcaatataatcactacttgtaaagtcatcaacttgtactgtttagtgctaaacacaagtgtaaattcacactcgacttgtttgattggaaaagggaatgtaaaaaacattgttttgtttggtcaaaggttttaactaatgtatattatgcatcatttttggtaaaattataagagtagtgtcaagttgcatatgagaattttttaatattgtaaaattacataactttataaaagtattgtcaatattcatttgtaatcctttaactatctttccccctcctcataccccacatgcattatattttattagatgtataattactttaattttctcgctttgattccaatatctctatctttattttctatcaaaaaatatatgtaaaaatttcaataaaacaactaattaattattttaactatcctattttattctcctaatcgttattattctaccatcataaccgtaagacacccttattgattttgttttagttatattttctaatcaaacattccctttggctatacccatatataaagtataattattgtcctgaagtacgagtctctcttaatatatgaaaaatagtcaatgaagctattaatattataccaatacattgtaatttcttc

SEQ ID NO: 1476 - DNA, 2405 bp, Cannabis sativa
ttaatcactgataatcaaatccaggtaattttataaaaatttcagacttgtccccttttttgggcctgtctataccaatagctgctcttattcctacttggcaatatgctagagttttctgcctagttaactaaagtggttcccatttgtaaaatgttcgattttcttagggctgaacatgaaacttaggaacctttacagtttgtttaaaaatatatagtattcaaatttgcttcgatcacagcagatttttggggccttgtgctcctaatggattgatacttcactcctactttatgttttgctaagatgtgagctcaattatcccataatatgctcctgcaggctcggattgattcccacaacaaaattttatatgctagacatgcggatcagagaaatgcaactttccaacgggttttacagacaggcggtgaatttgatcgagatgttagatcaatgttgctcagagcaaaccttatcaaacatgatttcaatcttagggcatcttcaaggaaactataaatttaagtttcatttgcaagaacgtagtttgaaagtacagaatatcattttgatatgaaagaggtgatacattcatttggtgggtcaagttatggagcccaatacttttttagggtacccaaagatggattttgcacattcagaacaacacagatcaaaggcaacagtaacttgtatccaatggttggatattggtttttatttcatcaatttcatcctaattcttaactgtactggtttttgcttatttttatggtacttgatgctgatatgatttcgaatcctaaactataggtgagtgcggtcaattatgagctcctctggggtttgttgtgtgtatatatttaagatggtaggagttttgctttctcattaaaaaacaaagtcagcgatgtgattatgaagtacccgggaaagaaaaaaattaattatggattatgatctttttagtttcttttgtaaaatgttcatgtatagctaacttcacttaaagacaggatagtaacgtcattaattgcatacttttgtggaatgttgagtatccttttcaacttcaatcacattaggttaggttaagccaaaaaaaaaaaaggaaaaaagatggacatgagggcatatgaaaccatttcatattatgctgcagtgcagcaagaccaaaattattctcaaagactcaagagactcgcaaggaagcaaattttcatacccattattctgtcgcgtttttccttcacaaatgttattcctctgatttttttattcatcaaaaaaatttcttattcctctgattattatatagtatatatattttactcagaccgtgtataaaaaagacggtggaggatttaaaaaaaaaaaaaaaaagacggtggaggcaaaagaggggcccattttcttgtctgttttcttgttactcaaaatttaattgatttatatctctgacggtggtgttggaaaccaactaatgtgttttttattgtatcttggtaaaccaaattaagtaattttttttagatggacgtttgggcatcgaagcagtcacggtcaaccctggactgtctctgtaatatgactctctcttgattgttttataaggaaataacgtaatttcgacacctgtttatcatgtcgaaatagccgagcattcacagtttaacttgtaagcctcagtcacagctctgtaaagttaaatattctccgaaatctctgtctttattttttatttatattttttttttggaatggaagcaatattaaatacactgaaatataattagtaaaatacttaagatataatcagcttcattagtcaaatagagtgattaagaacccaccgaatctgtggttactttggtctctttctctctttactcttaatcacccaaccatttcactgaaaacgataacagagaacacccaataattatatcaagatccaagtagagctaagctatagccacacacacacccactcacccaattaaggatttaggattccatcatcaatttcctcctataggctataaccttgtgtatcggagacccaaatgctcatttgattagatccggaggtttttatcgaaatgggtcatgttaatttgccaccttcgaagcggagcttcaggcaatggaggcttttggacctcatatccgcagcgttctttggcatagtcattctcttcttcctcttggtcttcactcctcttggggattctctcgccgcttccggtcggcaatcactgctgatgtcgggcgccgatccgatgcagagacagcgcctggtgacggtggtggagctgggccaacatccacagcccatcgatgcatgcccggctgacgctgtcgaccacatgccttgcgaggaccccagacgcaacagc

SEQ ID NO: 1477 - DNA, 1372 bp, Cannabis sativa
cattcattcattcattctcttaactatcttcaatggaattaccaactaaaaacccagtttttgttacccgaaaaccagcttcatattcaatacaaactcgaaacctttcatacaaattgagaaccctttttgatgacatgaaatgggattgttttggtttcaatacaaaaacacttccaaagttgattttgaagagcataaattgtgaagcaaaaggaggagaacttactgcgattgcaggtccaagtggggcggggaaaaccacgctgctcgaggctctagctggaaagatttcggctaatgaaatctctggtgaagttcttgttaatgacaaacctatggagattaaaagtttcaagagaatatcagcatttgttaaacaagttgatacattattccctttacttacagttgaagaaacactcatgtatagcgctcttttaaggcgatctagtaaccgaaaagaggctgcagatagagttagagagctgttgagtgagttggggttagaacatgttgcagcctcaatgatttctggtggttcaaacaatgcaatttcaggtggtgaaaggaggagagtttcgattggtgttgagctagttcatgaccctgctgtgattttcattgatgaaccaacttctggtttggattctgcctcagcttttcatgtcatgtcattgctcaaatcaatggtggttaatcaaggtaagacagttattctaacaattcatcaacctggttttcgaatactcgagctcattgatcaaatcatccttctctcaaatgggaatttagctcataatggaacactcaatcatcttgaagaaagacttaaccgaaaagttcctaaacatgtcaatgtactagaattcgcgattgatgatgttgagagcttagttaccacaacacaaacttcagaagagtccagaaatcggcttaaatctaacaaaggtcgcgacaaggaagaagaagagtcacttacctacacgaattcacaaatcgaagaagttgtaatactaggacaaagattctgcagaaacattttcagaacaaaacaacttttcactacaagagttgttcaagctttagtagctggtttaatacttggaactatattcttaaatgttggaactaaacaaggaaagattgttctacaaaccgaaacaggctttttcgcctttagtctaacattcttgttatcttcatcgacagaaggattaccaatcttcttaaacgagagaagaatcttaatgagtgaaacagaaagaggtgcttatagagtttcttcctatgtcatgtcaaatttcttgatctttcttccttttctactaatggtaggctttcttttcgccacaccagtctactttctcgt

SEQ ID NO: 1478 - DNA, 2308 bp, Cannabis sativa
attttaaataactacaatcgtgaaaataaattaattaaaatacacttaaagtcaaatatatgtgattgagttattctcattgaaatgagtttttagaaattttgtaataatttaaataatttatttgctactttactttgttagagaataacataataaataagcttttttgttttgtggtacttttattttaattacaattttataaattatgtaattttaataatgacaatcaactaaaataataatctacaatttaattagaacatttctttagttggaaacacgacaaggattaaaattaaaaaaattactcaactaaaataaaatcagatggaaaagattacaacgtcataattaatcttaacaatacctatattttattacatctaccgttcagaagatacaatagtagaaactgttacagcatgttcattcaacctcgcattcaactattgtgtaaggtacgtaactgcactactgacaaccccttcagtcgcaacgaacttgttattaccaaccattaacaatggttttatgacgagtcatcgaaaaacaaagaagaatcaacaaacaaaacaaaatgaaatcatgccacaaagacaagattaaacactccaaattatgtcatagagataagactagaatactaaaatcatatcaaaataacaagactaattacaatagcaaaaattaaattgtagtagcaaaacataatcccaataaagccgcacctaaactcaaggaatgttagcgggcctgaagagaaaaaagaaaacctccaaattctaataataaaaatttaagaacgagaaactttaattttttttctcttttaatagcttttattagttgttaattgttctttgtattctaggcagctcatttggagcatttaaagagagggacacaagtattattggaacacttttctatctcatataatatgtttgttttattagtaactttagatcttattagctgtctagaatctcttgttcttaatttgttgcatttagcttcaactatacacaaataacacacatgattatgacatagaataataaggaaaatacaaatacacatgattaggatgttaaacttagatcttgaacatttgtatcttaattaatacaggatttgcattaatgattttaatcaagaaggacatggtttcctttatgaaatgttacattatttttattttgttttattttattttatttactgtaaaagtaatagagagaagtgttttcacatcttaaaccaaaatggttggggagagaaaaaattttgttttcttttttggtactctcgagaacagatccagtgaagagtctggagacaggataaggcttgtagctcaaagaattagagtacataactacaaactacgatgtcgggggtttgaattcctcctcgcccatgcccacaactggccaacaagggaataaatcacaagaaatatattaacaatttgtaacaattgtgaagcaaaattttattcaatcttgaaaatttatgtttttacaagtttatttggtagagtaaacaattgtacatgtgatcatcatatgagcttctttttaaataaaatataacaacaacaaagtatattattaattcttgtcagcttttgttaaccaataaaaactcgacacatgagctcgggatagtttttttaccttgaaaagcaatttttataattgatatttactcccaaaaaaatcataaataacaatttttccatttaaaaaaaaatattattgttaaacaaaggaaataaattttcaaaaacaaaactttagggagagtgaaatttgattcaaaagaaaacaaaatacacaatgcaacaaaaaaccaaataaacattttgagtagagtgatagaaaatagagataggaatccaacaaaaaaaatatgcaaaactatttacaactgtgtgctacattgcattgagatgacataccaatcaaccatcatgctattcatacaaaatccaaatctaaataagtacaaacacaccgacttgtttttcccgaaaaagattggaataagaatgtacatttttcgcacaagaatgacccaacgaaagaaaatctattcgtagcgagataagaaaatttccatctaaataggacattgagtgaagatcgaaataattatttttgtcttccatccaattattaaataaggcaaaaattagtaactaataagtagtcgtgattatgcaattcatgctaataaaaagtatcatcttcttctttgaaccctttttgttaggatttggaattcaaggtatgagaga

SEQ ID NO: 1479 - DNA, 2449 bp, Cannabis sativa
agactctacactctctcttatacgctctcacacacatcacaagcttcacctactctttctctctctttctctgaacccagaaaatgcagacaatcggctgaaaagtgaaaacccatttcaagatttggcattctggttcgatttcttgaatctgatatgtgggtttcttcattcttgtggttgtgtatgtgaagggaggtctgtgagtggttttgtttagctgaaaagtgaaaacccttggtcttggttggtcttcttcttcttggagagggcaatgtgaggagaagcagtgtttctgaacagagaaggcctatgatggtggcagccatttcaggagcaacagcttcaacaaaccctcaaaacccaaagacatcttcttcgcttcgtcaacaacaacaacaacaacaaggacaacaaacccatcttcaaaacccatcgagaccacctctcttaccttcagagaaaaacaatggcgttcttcccaaaaaaccaagaggtagacaagtttcttcaaggtacatgtctccttcaccttcttcttcctctacttcgaattcaaccacatcgtcttctacctcttctcggagatgcccttctcccttgctctcacgctccaccaattccactttggtttcaactccgttgaactcttcgacgccgaagcgggctcaatcagtggaccggcggcgtcccgggacgtctgcccgctccacgactcctctcccggagtccaccaggcaaggcaatgccgcttcggaagtttcagcggcgagtaagcttttggtcacttcgacaaggagtttatcggtttctttccaaggagaggccttctcgcttccgattagcaagactaagacagctgcaacgccgagctcgcgtaaggctacgccggagcgacggcgttctacccccgtaagagggaaaatcggcgacggaggaggagatcaggtagagaattccaggcctggggatcaacatcggtggcctgcgcgaattaggcaagggagtttgaatttgggtacaaatccgatgtcgagaagtgttgattttggcggggacagtaagagactcaatgggttcggatctgggagtgtggttcgggcattgcagcaatcaatgatagatgagagtagaagagcctcctttgatggaagattgagcttggatttgggtagtgctgaggttttaaagacagttcagcaaaccccagatgctaattcagtgaatgagtcttctgtgccttctgatcttacagcttctgatacggacagtgtctcgtctggtagcacttcaggagtacaagactgcagtggggtttccaagagccgagccgggcctcgtggaattgtggtgtcggcgaggttttggcaagagaccaatagccgtttgaggcgtttgcaggatccgggttcaccattgtcgaccagtcccagttccagaatgggagcttcgtccaagtttgctcagccaaggaagttcggtgataccccattatcttctccaaggacaatgtcttcccctattagaggagccactaggcctgcatcgccaagtaaactgtggtcttcttcttcaacaccatcaccatccagaggaattgctagtccttccagggtcagaagtggagcttctgctcactctaatggtagttaccctggcacgccttcaattctgagtttttctgtggatattcgtagagggaagatgggggaagatcgaattgttgatgcacatatgttgagacttctgtataaccggtatctgcaatggcggtttgtaaatgcaaatgcagatgctaccttcatggtgcagaaattgaatgcagaggtacgtttttacttttgttatcgcttatatgattttagttgttgacatgttcaagcttgatttaatctgtactcctttattatttcgaaagtgaccttctgttcagcagaggcaatggcatgaaaattctgtagtgtagtttaaattgttggtatggctgattgtgtaggtgcttagggctatgttcatttatgtgagttgaatgactttccagcaagaaagtggtgaactataaatcttaggctaagttcaagttgtgatccaggcacacatgttgaaaggatcgattagaagagggagctaataacccaagtgtactagaatgctatgcagtagatataaggattttattgtagagtgtctatgtaggttgcttttatcttaaggcaagatgtggtattaacaaagactagaaaaatgatctggaactgtttctttctttttcatcagttttcattttcttttgagctttttcttgcaatttgatttgtggtgctttttaggacggggttggggaattgtccactctcatatatatggctagttggtgtattcaatgccgttttattataaaaaaacaaaattctacatatggctataaatgtgtttaaattactagaaa

SEQ ID NO: 1480 - DNA, 1117 bp, Cannabis sativa
atctccttaaaatagttggactccatataacttttgtccatagtagacattttatggctagaaaaacaacctataatttatatatatatatttatttaagtttctcaaatgtttggtgtttatgttaatgggcaatttaaggaattgctgccaaactctatttatacccaacatgagcttgctagcttgtgtttgaagatcttgtaactattatttaaatattcatgtaaacccattgacatgaaaaatgccatggaaacagatcaaatgattaccgtgggatccatcttgtcatcacttttgactcaaattgacgagttctttatacatatatatcatctattggtcaacaaacgaatcttcaataaactgctttggaatttatctgatataatggccaatattttcttaattttcagctttttcacatagtatgcagctaatcataagttacatttataaaatttctctttatctttaacattgcctagtgccgaactactttactttacataaagaaatatcatttattttatatttttttttaaaaaaaaaagcaagaaagaaagaaaaaaagctcaaatgcgcatgtctccgtgtaagttaccgataatattgtaaaacttcttcaagagtaaacaagatgtattttttttttttctgacaaaaagagaaaagaagttattacacaatactttcactgtttaaataagatttcatgagaagctagctagccaagccgtagtggcatttgataataattttattattttttaattttttaatcacaaacaaaattttgtttttgaaaaacaaatatgtattttataacaactttagttttttaattttaaaagcagaaaacataaatagtgtaatctgtaaatttcattttcattttcttattttatttaagtcgggttcaggttaggagtccgggtccgagaccggtctgggttcacggtgagtccagggtcaagtccagtctagctccggggtccgagtctgagaacgcggtcgagtccaaggccgaggccaaggttagagttcaggtctagggtcggggtcttgggccgggtttgaggccaggtcagggtttgggtccgggtccgggttc

SEQ ID NO: 1481 - DNA, 4185 bp, Cannabis sativa
ttttttttttttttttttttttttaatttttacctgtgcattcgtcttgtattcaaaattagtgtttcttacagcatacccattcttggatttttgtgtttgtggctcgaattacgctcgcaacatcatttttctttacatatgttttatttatgtcataagattggattctctaattttgccggttaatttcagcaatggcagtttgatttttcatcgagaaattagcatagggttctgatagatgttaagcttttggaagactctaagtttcctataattcagcttgagatcaattttcttttttctttttctaattcattatttgctcttgtgtactttgtgcagcttgctcttcacactcttaattcgtcgcggtctgcctttaactcgattacatttaaacctggcttctttgatatctatacaatttctggcaatcaagtcgaatgtagcgtgctgttaaaggtactttgaaaactgtcttaatttttttcatgttgcatagtttaacagaattttttttttttggtttcttactgactctgtctgaacttcaggctgtttgttctgtactaaggacgcctgtagcaagcatagatagcttgagcattaaattgcctgattccgatgcatcgaaagtgcagtggaccttggagtgctttaatggtatttttgatttagctatttttctgtttgccccattgtttttttttttttttgatagaactgatacagaagatctggaccctcatgttatgattagatgtattttgaggtgattatagattttacaattgctacaccatctatatgggttcggttttataaggctatctatagtatgataacaagtcttggtagcctcaattttggaatttttttatttctctttctaaattttattgtctattagaatgaagcttcatattggctagacactgatatatggtaataaatggtctcaatagacaactgtgaagccatggaaagatttcaagaatgcttcagatttaggctctccactggattaataaaaaagaatgtcttttaggattcttcatttgtcagtatttctaatacttgtaatattataatagaaaatggtaatatctttgataagatatacctgaaacttgtcttcacgcaaaagtttgtacatgttgttcatttggttacaaatactcaacacacagaagttgcattttgtcatttggttatttagatatacatcttcttctttgtattaaaagatgatggcatgtcatgttatacaaaacagctaaactatccatctttcttggtcagtgttatgatgttcatttaaatcatcaagatatcaatgtctgcactctattttgttcaggtatgagaaaaacctactggattacttgcaacgtcgaaccaaatatacaacagttgtccctggatagaagaaaattcccaagtaactttgtagtaaagcctcgagatctcaacagattgctaactaactttcaatcatcccttcaggagatcactattatagcaacagaacccaattcattgccttgtgatgtagcaagtgaaattggaggcaaagctgttgaacttagaagttatatagacccaacgaaaggtgtcaaggctttttctattttcactccatatgtctataatatgcattactgaacttacagcaactagcatatttattcttgggtttctaattgcagaaaatgactcatcactgcatactcaactatggatagatcccatggaggagttcgttcagtacacccacactggagacccggtagatgtgacttttggtgtgaaggaattgaaggtttagtaactaagtccttcacagttttgaatatctatcaagttataaactgtaaggggaagctttacacattaatgttgagttttactaatgaccttcttcagcttgctgtcactaccagcatttaattctgttacttgatgccattctgtgaaagctgacttatacatttgccaatatgtgcttatgagtgatctcattgtccctcactctcactttctggaaagcaaatgggactaatttcattgatggcgatgttttctgattgtttcatatggcaggcatttctttctttttgtgaaggctgtgaagtggacattcaccttttctttgagaaagctggcgagtaagatattgttttcatccaacacatttatctctaactttgtctgcttttgtcctcttgccctctaccccaaatgattatttttcatatgtatttgattttcaaaataagcatataatcatttgggatgggtgttaactttaaaatttaatgtactcccaaattaaacatttgggattaagtacaaaaacctgctttaaaatcaaagcgggctcatcaatgtcagttctattgaaatttgctgaatcccacataacatgttatgatttttacaaagtatctttatctctcttacgagaaatcacatttattgcatgtgagttcttaactgcaagagttcatgaagatttggaattgaagttttatttatggttcgagccgttttattcccctttatagatatatgcttccaaccgcaggaaagtaatttaatggtttgtactttgtaccattcggaaacttgccaaaaaccccaaatattgggatattactgcaatattcttagtttggtggttagtacaagccattaaaattactttccaaatattgggatattactgcaatattcttagtttaaaaacaccattaatcatttcatttcaaaatccaacatgactaataacaggcatttggaaagtcttacacagtgtcttggactaagtagctgattctttatataagaaaatgtaccttcccttaatgttacaaatgttttttttcttgcatttaagaatcaagtgtcaagttaagacaatgtaatttgatattaatgattgtctcggaaacaggcctattcttatggcaccaaaatttggtgtagatgatgcttctaattcaaactttgacgccacatttgtacttgcaaccatgttgacatcacaactccatgaaagccatcctcagcaaagtgcacaagctgataccacaaggcatgtaggggctgataatggaacggcgtcccaaggacaagtcaagactggagcaaatatttctgagcatccatctgaccacaccagaatttggtccgatctctcaggtcaacgattttgttttcaaagtttcaaaggggaatctctgttcaattgctttaaattctgtatcttgtgcaggaagcgctgcaaaaaatggaaatggcaatgaaggaagacaggttcgagaggaacaaaatttaaatgctagtgaacagagagaaattaataggatcagtgcaatgcatatatctaaatcggcatcagatagagaaaatgaacctgttaaccctaacacgtatcctgaggctatggtttcctacaatgtccaattaattcttactgtctatattatgttgctgcaaatacaccatcttacaattttgattattgcttcaataactattagcttttgattccctatattatgtactactggcactctcatgtctttatttacatgttcttgggccaagtacttcaacattgcaccctgtgcttggggcagacagtacaatttcaacttttctatcaaatttcagaagtcttgtatgaatgggttagtaattgtttaggattctagctgcatttccttgacttgttgtaatagcttcaacatggaaaaggattgtatcaacgaacatcaaggttagtaagcatgttgggttaactgtgcaattgttttttcctgcattaactgatgtcactgtgggttattgtttttaattttttgatgaagaaacttgtggtttattgttgtgcatcagatattaatggtcaaggtgtttcacaacgccatctcagtaactgggtggatgccaatgaagatgatgacgatgatgaggaagaagaggctgaaatttatgttcagtcgacaccaccatatcattaagaatgttagagcttccagtgcactgtttgatcagctgatatctgttctcttcttttgtaagattccatctacccatagaatgtgctttttctgtaaaattatttttatgactaattacatttctcctttaccttaatctcccgtttttaag

SEQ ID NO: 1482 - DNA, 3960 bp, Cannabis sativa
aattccagcattttgtgccttatcgcctaatcgagtccaaaacgacttttggcacactttacagcaacttaggtttaattggcgctcttaaagccccaggaattgatggaatgccttgccttttttatgatcactattgggatattattgggacagatgtgaaaaaattgtgtatggatgtcctcaattataatatggattacagtgccataaataaaacactcttgtgtttaattctgaaagtgaccaaccctaagatagttgtcaaattccgacccattagcctgtgcaatgtaagttataaaataatggcaaaatgtttggccaatcgtatgtaggacagattgcatgaggtaatatcaaaaaagcaaagtggtttcattaaggtgcctcattcaagataattccatcataggatttaagagtcttcactgcatggagaaaggatgcttggggaatgaccgaaaaatggctctcaaattagacatgtccaaagcgtatgacagaggtgagtggtcattcattgaggttatgatggtatctctggggtatgaccaatgttgggtggataaggtaatgaattgtattaagtcggtctcattctcggtcatagttaatggtgagatttgtggcaacatccaacccatgcggggacttcgccaaggggaccctctttcaccctacatatttctccttcactatgaaggattttctagccttcttcatggggaagactgagctgattggattcatggggttaaattaggtcgtgacgggcccaagctttcacacctcttctttacagatgacaactttcttttcttgaatgctaatatggaagaaggtaaaagcttaaaaaccattctccaagagtacacttctctctcaggttagcgcattaatttaaaaaatttagagttatttttggggcgccatatcaacaaaaaggagaggttcaccttggatgttagtttgggagtgaaattggtggatttccatatttagtatttaggttttccagcctatatcaggaggcaaaaaaaagaagtgtttgaaagcattgaggctaagatttgtagtaatcttcaagggtgggaagcagggttactctcccaaaggggaagagaaattttgctaaaggcattgatacaagagattccttgttacattatgagttgctttcgccttcacaaagaactgattaaagatgtccattcgatgatggcccggttttggtagggaactgcagatacaaagtagaaaattcattggggtagatgggagaaactttgtaaacccaaagctcggagggaataggagttaaagattttggcaattttaaccaagccttactgtcaaagcacggctgaaagatcattataagcctcattccatgcttgctcgagtctttaaggcatgctacttcaccaatatctccttcttagaggctaaaccaggcaggtacaactcctttgtgtagcgtagcatcatttggggccaaaaactaattcttaaagtctgcattggaaggtaaattcgaggtggtcagtgcgcattaatgagaataaatggcttccccattaaatcacattttcgcttcgcactccagcaacagtccctcttgattcaactcttagtactatcaaaaacgccaatggtacctagaatactgagaaaattgaacaaagcttccacccaatgatgtccctattatccttaggttagccccttgtatatcaagtgtcgatgatgacctagtttggcactataatctccaaggcatgtactcgattagtagtggttataatgtggcagaagcttccctttttacaaaagaaaactcctctcctcagcttatagagtattggtggtttgagatttggcagttagaggttttgccaaaggtgaggaactttgtttggcgtgtttgtaagggctggctccaagtaggaaaggccccctatgctcgaggaataaagatagacccgatctgttgctggtgtggagtgtggggagaggaaatagtgcatactctttagtaagatctggaaacatctttatctgtggtattttctcaaacccacggtgactgaccaagtggatctaatgcttagagctcatcacctaatgttccagtatgatttttatacttttattcttctatcttggttggtctagaatggaggaaacaaaaagaggctccacttgtataaacattggttagagtgggctcaattagagatagctgatttaattgatgggtcgaaaaccagagttccaaataccttaaactctctaaggttgcttaatagttgtacatgccctcctcctagtttgtattgcttaactgtcatgctagtgtccccttaaatggtgataattatggaacgaatgttgtcattagagactacaaaggtagggtagttgctgtagggataagtaaactgtttggtcatcattcagttgaattggctgaggttatggccatactagtggggggttattttggcctctcgagttcaaggaaagcctttgcttatcgagacgaactgctttcaagtggctcattattagtagggtaggtcaaatgtagaaacgaattggagtgatttaattgatgagctacaggtagctttatattttcaagattgtatagatataatgcatgtaaaaagatcttgtaatacagtagctcattattggctcatagatcttttgattaaacattatggattggggattttcctaaatgtgttgtcacaacagatgtatctttcctattgtagtatttttttgtgagtaattatacttctctttcaaaaaataaaccgacactaattcaaagttcattttactacggaaagatcgaaaaaaaaaaaaacatgaacaaaataacaagagacatggaatcgtggaagtaatgaaggagaggggcgaaagataatgcctctctttttctttttctattttatttttttgaaaatggttttattttttatttttagaaagaacgattaggcctatcttcaggaatactttaatcaatttaaatgtcgaaagcatacatcaagtatagttgcccacattttctagtaactttagcaaacctttcattacgtgttggacaatacaatatgtgacagtccaaaacacccattcgacggaaagatttagacggaaaaagaaagtaaaatgtaaagatagactcggttgttttatgtacccaagtgaaaaatcacaataaacgcatgatttaaattgtggattagaagagtatttagttgcagattattttatttaccaataccacagcaaaaatcatagaagccacgtaaaatacaccaacattacctccagcaaccgatatgcaataatgcacgcacgttagcttgttaagacattcttgtagatccaaatttcatttcttctacccttataataactctcaatcttagttaccttccataaatcataacttttaatgaatatagcttcttcacaagcgccttccacatctttctgattcctcagtgacccagataagaaatatacgagatgaaatgaaaataagaagacaaagtaacagactgatttaccaaataggagagagcaagtgaaatctacaccatgctctatttgttggaagtaatgatggtttttctaagtagcccttttctacttataagagaccaagtgtcttcagctgttgaacatgctctagtgggagaggtgggggacaccaatcagatcccgtcatttcaccgtcgacatcttcaacaacatattcctggtagagaaaatatatcaacaccaaaaaatagtatttatccaagttcatcaaaagcctataacattgcctttcttctaacaaaagaaatgttctcaaaataccaaacaaaactcattaaagcatttaatcatgttgtgtggtagcaatataaaccctatttagctattcaa

SEQ ID NO: 1483 - DNA, 2386 bp, Cannabis sativa
cactcacactcaaacccaagcttgcacttactaaacttcagcttaacacaccacatgtccttgtgttatttagaggtgtattttgctagtcatatcatcaacaacatgatatctcacttaacaagaattgcaggtaattatatctgcattcaatcattctttttgttttcttttctcatatttcattgaatcaaaattgttagaatagatcaatgtatatacttcccacaaaatgagctttgatcacttaaacagcaaaagaatatgcagaagctagttcaaatgtagggagacagtcttcttcatccataatgtgcttccatagccttcgtatctcggcacgtatatctccaatctgtggatgcaactcatcaccaacaacaaacacatgaactctactcttcaactcaatccagctgcaaccaggctctttactaacacctcgtagtttcatcaatcttcgaacccgttcaacatcttcttttctacccaaagaagcatatacacttgacaaaagaacataagctgatgattcttgtgatcctaactccattagcttctctccagcataggctccaagctcaaaatctcgataatttctacaagcgcttagcaaaattcgccataaacacatgccatgatcaattgtggctgactctataaactctttagcttctttaagttttccagcgcggctcaggatgtcaaccatacaagcatagtgctcaactttcggtactaagccaaacttgtcgaacatcatgttgaagtaagaccagcccctatccaccaaccccatgtggctgcaagctgataacacattcacaaatgtgatatagtctggttttgtgccttcatataacatctcttcaaagagttgaagagcttcattaccatggccattgtgagaaagcccagatatcatagcattccaagatatgatatcttttgtaaccatcctcctaaacaccttgttaccatcttccaaactaccacactttgcatacatggtagaaagagcacttcctactggtatttcgagaccaagtccgtatttaatcgtccggccatggatttgctttccttgttccaaagcagctaagcttgaacaagctttcaaaacactagccatagttagctcattaggcataataccctccatctgcattctacaatacaaattcaaagcagcttcattatcaccattagtaacataccctccaatcatagaagtccaaagaacaatatcaggttctagtaaataatcaaatccctttcgagcatcactaatgctagaacatttagcatacatatctaccaaagctgtcatcacatacatttgagactcaaatcccagcttaagtgaatagccatggatttgtttcccttcttcaattgcactaagatcactacaagcattaatcaccccaacaaaggtaaactcactaggactaatcccagcaaaatgcatacttgaaaaaagcttcaaagccttttcaaagtcaccactttgagcaagaccagtcaccattgctgaccatgtaatggagttcttatcatcaaaaagtgtaaacatttgaagtgcattatctgaactaccacatttcgaatacattgtaacaatagcatttcccacagcagaaaaacacaacaacccatatttcaaagcaagacaatgaatttgcttaccagtatccaatagttcaggaactgtcaaaccactaagaacactagtgaaaataaactcattcccactctcatcttcctcaatccgcaccaacccgaaaaggtccaaagcctctttcgccaatctttgagaagcatacccagaaatcatagcagcaaaagacactaaatttctctcagacatttcatcaaacacctttcgggcatccgaaacaatactcgatttgcagtacaaattcaaaagcgaactaccaacaaacacatccccaaaacacccaatcttaaacgcaaccgcttgagcttgccggccacctgtaacatccaaaccgccggagaaaactccggcgaaagtgtgtgcattaggcaatacattctccaccatcatacccttcaaaagctccatcaccacacccaatgaagaagaagaacccagttgagaacagccattgatgaggcaattccatgaaactacgtctctgcatggaattcgatcgaaaacgattctagctttgaccaagtccccgcatttagcataaagattgacgatacaattcgctatatataagcaagaagaagcttgaccgtttctaatgagtctaccgtgaaaggccttacctttaggcaagtttcgcttttgaattaactcaacgagttcggagaagaatggtctggactgaggtggtaaccaaggcataaataa

SEQ ID NO: 1484 - DNA, 1306 bp, Cannabis sativa
aagttcttctcctggagtaaaagcgtcattcaatgtggataatctctcgtcgggatcctcaattgtgagaagatacttcaatattcgaatctccttgggcacaagcctttgaagattacctcttgcagtcatgtacaagtgatataaaacgtctttaacctaacaagatgaggaaacaaaactttcagcagtagtttaaataaatcagtatcttgcataacgaaaatgtgtaacaaacatctgagcaaagctactataactacctcgtctttcatcatgttcgactccttggccgctgaccaagcttttgtgatcatcaacaccaatgctgagtcaagctgatttttcgcagctaaattgtctatcttcctacaagcagcatctacagaaggagagttgataatatcttgtaatttcaactctgcattgttcaatgcttcaatgctttcatttgcagcatcataagcttgtactgcagccaagcatgtattcccaagttccgctacagctgcaacataaagagaaaaggttaatcccatcgaatccatagattaactgagtacaaccccagaagtagtgcaaataataaatctcaccattttgctctgtttcattgtcgtagtaggattcagctaccgtatgaagatgaacaaaaaattcttttgtgaaatctttgcgacgcctagcaacaacatcatttatttctgaaggtgctagtctaattactccaagaagttcattgtgtctttgtacatcttcatcaacctgtacaagagtagttactaaattctatttcactgtcacaacaaatctaaacaaacaaagaactaagagatatctcaatcttccacctctttaagtttccgtcctagcctaagtattttatgcttcatcccgggatcatcttcactatctgctcgctcttggtaccttctatagaaatgtggccggatactgtcccattccttactaaaagccaacaaccttctccagtcagttggagttggtttgtcaaccaagaaaacctcaatcagcttgtcacagactctaatcatcttctggtcatccaaactcccaacattatctctttcttgttcattttcatcatttcttgttttttgatttgatgaggaatctaaagaatcagaaactgatgtcctttcttcattacaactacttgacactgtttcggttatatgagttgtgtcaccagctgcagcacaagcaagaaaggacttgggttgtcctagtttgattgatttagctagagaatgagtacctagcattacacaacagttattctttg

SEQ ID NO: 1485 - DNA, 985 bp, Cannabis sativa
ggaggtcagattaatgcggtgtcaacataaccctcccagggctttgaaccagctttggttggaactgggatttttgaggagacccttcagaacaatattgaggctatctgcccggcggtggaggctccggcgagttgcccaaaggagataatggaagatcctattgagtgtacgaatgttgacgtggccctggacgtagtgggaattttaaaattcccatgcagacacaaggaaaggatggtggtgttgcctgcagtacgatttctgaatatccccctgcaggtgtggaccccaccgaatcacaaatatcacacctggcaatgatttttaagggagctttggacccaataactaaaacggctgtcaaaaggcctcgtcctaatatgaagggtactacccgcaagaatctggatgggcttattactcctgtggggattgggcccagtggaccgagtacagggaaaaagcggaggattgaatgtttagagcgggaggaggatatgggcctatcctcatttggatttcccccactggactcctgtctgccaagcccgagtttgcccaaaaagagctgttcgaagtttgtagctcctttggagcctggggccccatcgttggataattctacttcgactaacccctgttgcgagtccttggctaccaccagtgatggtaaggagaatggaaaagactctaatggcgatatacgggggcaggatggttcacagcacggagaggtagatttttctcaggccgaggaggcgggccttatcgtgccccccaatcccttatgttggtcctctctttgaactgccgggaacttgggaagtctcagacagttaattcactgcggactttggttcgtagtgcaaatccggacatggtttttctgatgaaaacaaagaagagcagtcaggatatggaagggatatggcaaagactgggttacaatgcgggtgtggccgtgtcttcagtaggagcggct

SEQ ID NO: 1486 - DNA, 1646 bp, Cannabis sativa
  modified_base (1241)..(1256): a, c, t, g, unknown or other
ctaataccgtacccgcaacatacctgcatatgtgcggtgcagttgttctccgctccaatcatttttcccatttgaatgattattttcttcactattgccataatcctttggctaaattctagtattatagtataaattattcacaatttctaaagaaaactaaggaggttcattaaatcggcccggataattaaaatatccaaattatataaccatgatattttttaggggaaaataagcatgatgttgaatataggaatttgttttttttttttttttgttatagctactagattatctcttggtgaatatatatgtgataggcctagcaggctgtcttgtgctacaattctttatattctcataactcataagaagcctcattatacattggtttaattactatgagagcatatataattttttttattataatatataagcttttgaattagtttttgtatggtcatatatgatgggatggatctgatatttatatattgataaatagcagaaggttgatgaagcatatgggccagcatggaactgtgtggttgggaaagagtttggatcttgcattactcacttgactggaagtttcattttctttcatgtggagatgatggagtttcttatcttcaaggatggcaaggacttccatgaaaccaaggatcaagctattggcatggagtttcacacaaaaaaaccaatacaataattaaaagatatatatatatatatatgtatatacatacatatcccttcttaattaatgtcctattttttagtgttaaacttaacttattaattcagtagtgtaggattgttaatctcatctgccaattcactaatggtatgacccaattatttcaacaaattataaatatatatcatatatatatatatattatatttggtcattatataatgaatactgcaacaatttatcaagaagcgatcataattattatgcatagctagatatataaagaaaaaaaatccttgcagtttgcaaaggagaggtccgaagaagaggtcaataggttggtatcttatgtgtgggtgtcctctactagaccctctctctctacataaaaaataatatattttttacactatattaaaaatatatatataagaaaaataaagacaaacttatttttttgccaacaaacttttcttctattatttttttttaagaaaattatcccttatactgtttttttattttttttattttnnnnnnnnnnnnnnnnttttttttttttttaaatttaggatttggtttctaaagttctcacagcactagttgcaatagggatttctatacgattttttattacaacttaggttgcagcgctagttgcaataagggtttctatgcagaatatcataaaaatacaaaaaaaaaaaaaaactgttttgatgaagtataaaaatgaaaaaatccccttttttttaatcgataaacaacccatttcatattatgtaaaaataatttttttttgttaaataaaaaaaattaattaaacataaaagtttaaacttttttaatacttcccattcgtgcacctatatatattagaaagaaaattaatgagaacaaaagatttttctcataaattataatagtttttttttttttt

SEQ ID NO: 1487 - DNA, 2336 bp, Cannabis sativa
  modified_base (786)..(792): a, c, t, g, unknown or other
  modified_base (1101)..(1101): a, c, t, g, unknown or other
ttcagcgaagattgggttggcttaggtatacatgtagatgtattgggtttgaatcaacattgatttgaatgactcgtgagccattggtggtgagttttgaggtttcttttgatggtttcagttcagcagcttcatacattaattaattaatttcaacatgaattttggagttttgagcttatttttcaaaatatcactcttcttctcagaataaatatcaatttaataagttcaatcttttctttatttaaaaaaaaaaaaaaaaagaattggtgtaatttgatacatttcttactaaaaatgtgcaagtctagaagtcccatatgtgatatgtgatatgttcatggtttcggcttaaacacgtaagatattgccatccatgatccatggggtggcatctatgataggttttgcttatgtttttagtttgagtattgttattggctacccgcattttttataggtagtattttatgaattagttattagcaatatttttattttttttaaaattattttcttaagttatataaaacttaatatttaattacactaataacagtataagtaccaataatgtattttaacaattctcttttagtttgaataagtatgtattttacatgctttcttactaataagtaggagtgttcatcaaaaccgttcaaactgtcggcaccacgccgcatcacaaaaaaaaatgcaatttaaaattctttgcggtgcggtcacggtttgaattttttctaaaccgcgcggtgcagtgcagtttgcagttttgaattnnnnnnntgcggttcaaaccgcaccgcacattataaaaatactaatttttatatttagttaactccaatatgtgaatgtccaacccaaaacccactaattattgtatcttgaaacttaatttttttttttttcatataagtcttatggtatttttgacaagtgttactcaagctttgttgtatttgtgatagtttaattattggtgatagtcaaaatcgcaaaaaccaccaaaactgcaccgcaccattttttgcggtgcaattttcgcggtgtgagtgcggtttgggaaattgaaaaaaccgcatgtgcgggttngtttgaaaaaatagtcaaaaactgcaccactcgcaccgcgaatacctctactaataagatcgtgggggcataagttggttttagtaaaaatttgggagataaaatattatagttattataatttagaggataaaattactaattatttaacgaaaatctcatattttactaactctcataattcaagtggtatttgagttaggagtggaaatttatgttatcgtatcatattcgtgctcgtgttatgcacattaacatatttaattggtcaaccctaactcggcctatatatttcttattaagaaatctcaaccctattctgactcggtgttctcatgtcaaccatcgtgtttgcgtgttgactatacttatgctaaaatacatgttgatcaatggtattgcatatttaatttttataaatataatttatcacaaattatcaatataatgaataaattttttaatatcaaatataaattatctattttatatttttgtaagcaattttctttttaatttatatatctttttctataaaaattaataattttataactataaattaataattttaataatatactggatataaataaattaattcgtatcgattttgtatcacatgcattaatcttaatttgatttaaataataatcgtatcatttagtttacttataacccataataattaatatccaatttaaattatattatcgtatcttgaatgatcactcttaatttaaacataattatttttggccatacttatttaatcttttacttatttctagttttgggttataaataattttatcttcatacataagtgtccaaaattatgaaaatgtttgaatcatatttattatacttgctcatactccatgatctaatacgtataataattacataatttttattattattattattatttgaataaaatcatcttcaataaataaaacaactgcacataaaaatagataacaatttaggtttcatagtctcttccaatatacaattagccaaaaaaattcttaaaataaaaataaaaataggcaacctaatttattcattgattaaaaaaatgcaaaataacaaaatttaaactcaacaaagtctttcaatccttaaaaaataaaaccaaaacaatagaattttggatggcctcaacaaccaccaaactataaactccagctcggcatatgaaaattgttgtcttcaaccaactcagagcc

SEQ ID NO: 1488 - DNA, 4242 bp, Cannabis sativa
tatatatatatcattgtcaatgattgggtttggagtatattttggtcttggataatgtaaatgcataatgtttataacataacttaccagcttctgctgtcaacaatgttgatcattcatattgtgggattatctccatttgatgattgaaatatgagagttttgatggttcaaacatgtgcttcttcaatatgagtttttttgtttgtttgtttgttttttaaacttggatttgttggattattgaggcagcaagaactagcactgatttgtttatgttatggtaatcttttcaggtatataggcttttgattagttttacaaccttgaacatgtgtttcttatcttgctggtatggaggccaggagatttttgctactagtgaatttcagatgtgtgaaatatgcttcaatacctcctcacattttgttaaggaagtggtaactgaaatgtccaaaaagctgatgcctttggtggatacatagtattaaattttggcatacacttattttctcagctgtaccaagaatcttggaacttgcagttttgtgtcctggttggttatattgattgaattggaaattaaaacttgttgtggttgttaggatgaaatcattggtgcttagatgacattagttaagtagttaaatctgctgcaggcaacaaaggcctatagcattaggttactctcctttagataactggattttattttatatttttaaaaatttatgatgggcttacctcaagtttctgctgctggaacttcagaggaagccgctgcagcggtgttgggcgcatttttacaaagccctcctcgaatttcagatgtgagtagctgtgatttggatggtatgaatcatggaagctctagccaagtgggtgtaagtggaagttccatgtgctcctcttttggagatttccatcggagaacctcactagagctttcaagtttccctgatgttactggcaatgttaattgtttgaggcttggttctgtagacaatgcaggtgaatttgttcctaaatacggaaggaatatccaccgtcctatttctaggattgtaggtttcgaatcgagcagtaacagttttggcaatggtggttgcaaaagtgtgtcagcttctcatgtccattcttctgctgcagtcactgttttggctaatgaaactaagtctagtggatcgttagtaagaaagcgattgctgtctcccctgaataacatgcttttcccagaccaacattttgggggtcatcctttggacattggtagcagaaatattccttcagattccacttttaggattggtaatttaagtgcttctgctgcgcaagatcataagaaagcaaatgttggaagcaaagaccattttaccttgccaaattggtctttatcaagtggctcagaaaagaagtgtattcctcatgatagtgtcatggaatccattcttttcactgatggcccttttctggaaaatgggaaatcaccatctcacaatagttgtttatcttcacctgcattgttgaatgaaccaagatcaccaagaaatataaaatcccaaaatggggaaatatctgtatcatcttcatcatcaaaaaaggggatgtcatctcctctttcattgtcaccccttggtcctaagttttctgatagactgaaatctgcaacaggatacaagaataccaaaagagagttggattatggtcattcagtattaagtaatgtagagaaaacaatagagttttctgaatcaggcatgatctttgcttctgaagaagaggatttcgggatagcaagcaaatcatttgaagatgatgttttttacaaagagttccatccatcttctgttgaaaatagtattgacataagcatttctatgtctagaggatcagcccctacttcatctcaatgtatgagattcataaaaagtttgagtggacttcccattaggaggtccttggttggttcattcgaagaatctctattatcgggccggttcttatctggtaaattgagcaaggtaaacacaaatttgttgttgttgtgttagtaagattgttagtgaattctttgtaggctatctgactctacaaattgttgttgttgtgatcttatgagtagagaattgaaggctttttagctgtgctaagcataactggcgggaacttttcgccacaatcccaaaagcttcctttttcagtgaacagtgtggatggagactgttatttgttgtactatgcatcaattgatcttgcaggaaattcatcatcaaacaaattgaaaagccaaagactgaaacgaggcaataacaatgatgattcacaaactgtcaggagccgcctgcgcatacctatgaagggccgaattcaactggtatatctcttatgaaatttaaaagtatttgctgcccaagttataataccctgttttaatggtggtcatgctaatatcttttggataatgctttattacaggttcttagcaatccagaaaagacacctctccacacttttttttgcaactatgacttgagtgacatgccggctggtacaaaagtaagatgagataatgcattgtttttattcattttatacttgaagaaaaaaatgtgctttcaatagtgaattctaagcataatattgatgaactttcaccattgactatctttgactgtaaatgcatagaaaatttgtgatagattctagtctaaaatgccatgagtttgttggaatcacatgattgatctctatttctttgatagactttcttgcggcagaagatcacgatagcttctacacaaacgaaacaagggaagacagacatggagagctctaaaagcagtgacaaagagagtaattttgaaacaagcaatgcagatgagactacaccatctctactacaccaaggaagtgaatttagcaacaatggcatggctgaggccgattttgatgaacaatccaaaagcttaaattctttcgcgcttaagagaggctgcaacattgaagaggattgtaaagaacaaaaattggtggaaacatgccatgaaacttgcaagaaacaagttcatggctgttcaagggtcaatgatagtagcaatggtgctggtgctttgcgttatgctattcaccttagatttatatgcctgtttccgaaaagttccaagtcattacagagatgcaaatctgaccctgaatccaaaccacagaaaaagggccttgatgaggaacgaagattctatctctacaatgatttgagagttgtgttccctcaacgccactcggatgatgatgagggcaaggtatgtgtttcatgttagcctaagataattgtcttctttctcccatagtattaggtaacgccagatacatagtgctttcatcagcctcataaatatccatactatcacaaagaggatctcttattgcctcctccatattggcaccaaagaaaacagagcttttatcaaaattgattttctgtcccaaagctctttcatattcccccaataattccagcacattaccgacttcattctcagtagatttacaaaaaatttaactatcgtccgcaaagagcatatgagaatgtccttgagccacctaacacccatctatctgcccttgcaactcgtatttttccgcacataaaatgaataagtaaggcgaaatagggtctccttgacgtattccacgagccggtataattagacccatctccctgcccacatgaacaaagttacaaacaattaaaaatatcattagccaccaatgtgaacaactacattgttatagttttcgggttttttaatacaataatgttaggggaggagtgtagttttttgaaaatgtgtatctttgatgattagtttagtgattttgatttgtgttaatgatttgttgtttttgtttttttgttttcagttaaacgtggagtaccattatcctgaagatccaagatactttgaggttaattgaaatatctctcataaattggaatgacttccttactgtaaatatacatatattatttatataatgtatatatatcatatgtataatgtataacatataattaataattgaattagttgttcaatggccaatttagtttttatttggcctagttactaattatattatggattaggatcttcaaaggtatgttaattttgtttaatagtttcaggtacatagttttgatatttttgtattgtttaatgattgtttttatatataaaatta

SEQ ID NO: 1489 - DNA, 1526 bp, Cannabis sativa
ttctcactatttatgatatataaatgcaaaattaaattatatcatatgaaagtagaggctttggaagcaacaacttattaccatagaaaatctactagccaacaagatgttggagcactcttacaatgatttgacataagatattacaatttaacacgtggcagtactgatttggtcctaatctttcaattaggccccaattagtctagcaggatttccaacagcagtggtattaggaggcaaatctttcaacacaacagaaccagcacctatcttagcaccctccccaattctaacactacccaaaactttactccctgctcctataaacaccccatcaccaattttgggatgcctatccccagaaaccttccctgtcccacctaatgtcacgttatgaagaattgtaacattttctcctactacggcagtctccccaattacaaccccattggcatggtcaatcactaacccacttccaatcttagctccaggatgtatatcaaccccaaaaacctctgaaactcggctctgaatcagagttgccatggctgttcttccttgacaccaaaatttatgtgccactctgtgagcttgactagcttggaagcctttgaagttcaataagcaatgaacataacttgtacaagcagggtctcgttctcttaccgctttcagatcattcctaacagctcttctgattccctcgtctttgatgaaaacgctatagaatgtttccaaaagtgttatctttgataggcttgaattgcttagcttcatggccaacaaatgtgataatgagctttcgagggagttgtgtgacaatattgatgaggtgtagtattcgtggagaattggctcttgttgaacatcggacattgcttcctcttgaatctgaatccacaactcttcttcttcttctttttgttcttcatttcttacttggggcaagaagttgtatgttggtgaaatcttctcatcgacccagctgacaggtttgatacgagtggaaattggcaaagtgggtatacataatttgactaatttgcttaaggaattgctcagttggcattggttattagattctaaggaatatggggtagttgagttttggcttctgcaattttcgacacaagctgccatttcctctgttattataactcactttaaaagcagatatgcaaagatctatgatgctttatgaatggagtgaaagtgtatctattgttgtttatatactataatttctgaagaagcctacctagaggctagaaccttcatacgaggaagaagaataagaaaatccatgacgtttggcatgacgattctataatttgactatgtaatgagtcaaagcatttgtgatacgtggccaacactttatcaattatcacagcagccattaattagttgagatatattggtaaaaaaaaaaaaaataattaattattttaagtaagatgagtcttacttgagtaatttaattaattatttttatcgcagccatgaataatttaatttttaag

SEQ ID NO: 1490 - DNA, 1709 bp, Cannabis sativa
aatttgtgcttccaaaagtctataccatgtcgtggatggtagtagagacgtttggttgctgttaaggaagccttcaaagctgagactgaaatggcgacttttgcagcaaaaaggtataacatcaaagatggacatgacttactgttttatcaagcaactaaagttagttggagaaaagtgttgtgggatagattgaacattccaaagcatatatttgttgtttggcttgttatgttacaaaggcttcgaactaaagatcagattttcaaatttgatccacacgtcgatcaaacctgtcttctgtgtggtgctgcaaatgagaatacaagccatttattttttaaatgtcattacagcagtgcttgcctgtagaagatcaagtgtttgatgggttggaaatcaaattcggaagatctgctcaagcggatttgtcagattacctaggcgaagaaaataagttctgtaaggaaaagcataatgtactttcttgcttgctgcactagtgtatcacatatgatgagtcacacaaactatggcacatacccaatactgtacaaagattgcaaaaagatgttcattttagtgttactcttgtaatgctgaaaaaggcccaaaacatagatagaaattggttcactaacatttgtttaagagtcttaatgatgtggttgagattgtccaagcattattttgaatggcttgtaattcaacattgagcaatacaatatgattcttattccttaaaaaaaaaaaaatgagtcatgcacattttaaatttaattaataataatataataaactttgagatgcctaataggaattcttaaaactaatgccattaataaccttgggctcttttattttttcattgatttttttaattccctgtttttctcttcggccctccaactgagtctttcatctttagtagtctacaatgcaagaaacatctcaaatcatctaaagcaagaaacacctcagttcttttttaatagaacttttatccatctgaaatgaattgaaaatatatccttcatttcatgcactcttcataatatataattattcttaaaaaaaaaaaaaaaaaaatcttgaacccattacaatagctacgagggaaaaataatattattttataaaccattttaaatcaaggtggaagtgaaagtgatcacgagttgttatatgttctctaatccatagaatgatacggaatgatacataagctggaacacttatcgagttgcccctaattatgcaactaaaatttacaatattaatgttagagaattacaatcatataatgtctcttgaaggttgaataaggattttgactattttgtattttcggaggtacgtaccttcatgctctatttttctattatggacaagaaaaacatatttatactagtctcggtccagagctttagagtgagcagagactgaaggcaaaaccttcttccctctagtcccaaactgtgcccatggtttttgtttgttccaaacaaaatgaatatgtgaaagaatgagagagacaacttcttttctatctctttcggtttcaccccatgattctacattttctcataaacttgtttgaagaatttacatgtttattccacaaccctcgaacctctggatttccaatctcaagccacggctttgctggtccactaaaatgtacaaccgccgcagcttccagaagctgc

SEQ ID NO: 1491 - DNA, 3306 bp, Cannabis sativa
ctgtatggatatttgatacctatatccctttatgtttccattgagcttgtgaaggttttacaagccaccttcattaaccaagatattcacatgtattgtgaagagactgggaatcctgctcaagcacggacatcaaatttaaatgaggaattgggtcaggttgacaccatcctctctgataaaacaggtactttgacctgcaatcagatggacttcctaaagtgttccattgctggctctccatatggcgtgcgctcaagtgaagttgaacttgctgcagcaaaacaaatggctattgacctcggagagcacgatgatgagttttccaacttccctatgccgaaaaatagtgcacctagttcatgggataataagatggcttcagaaatagagctggagaatgttgttactcctacatacggaaaggaccataaacctgccataaagggatttagctttgaagacagccgtcttatgaatggaaattggttgaatgagccaaatgcagatgtcctattgttgtttttccggatattaggagtttgccacactgcaattcctgatctaaatgaagagactggtgttcttacttatgaagcagagtcacccgatgaaggagcttttcttgttgcagcaagagaatttggtttcgagttctgtaaaagaactcagtccagtgtgtttgtccgggaaaggtatccctcttctgttgaaaggtaagaatgtgattcagctgttcaattgggcattctattatatcgtgtttccttctcctgatatctgaacatttccttgttaatagggagtacaaaattctgagcatgctggatttcaccagcaaaaggaagcgaatgtcagtaattgtgcgggatgaagatgggcaaatatttcttctatgcaaaggtgctgacaggtcagcgacacaattcttgattatatctccccttcaataggaaaaagaagagaagttgcttggtttctaacttttaactctctgatcatttgcattgtcctttggttaatatatacagcattatatttgagcggctatcaaagaatgggaaaatgtatgaagaaatgacttctaaacatttgaatgaatatggagaagctgggttgcgtacattggcacttgcttacagaaagctggaggagtctgagtactctgcttggaacaatgaatttcagaaagcaaaagcatccatgggagctgatagagaaactgtgcttgaacaagtatcggatatgattgagagagagttgattcttgttggtgctactgctgttgaagacaaattgcaaaaaggagtatgcccattgaactctttatcttatcttgtttataacatctccttgaaaatcaatttttaacttgaatttcttttgcttttgattaggtgccccagtgcatagataaacttgcacaagctggtctcaaactttgggttcttacaggagataagatggaaactgcaataaacatagggtttgtctctaatcaataattaggcataacatttttccaagttcatgtttctcaaattggacaaaatctaagatgatttattataacaaaagatgtaattttgtttcatgattcaggtatgcatgtagtttactgcgacagggcatgaagaggatctgtatatcaacggctacctcagacacattagcccaagatagcaaagaggtatatattttgcttaaaaagtgtaggtgcttttgttttttggagattagtttcattttaggttagacctttttgttgtttgccaatgaacaggctgtgaaagagaacattctcaatcaaattactaatgcctcgagaatggtcaagttagagaaagatcctcatgctgcatttgcactgattattgatgggaaaactttaagctacgctttagaggatgatatgaagcttcttttcttgggattagcagtcgactgtgcatctgttatatgttgtcgtgtttctcctagacaaaaggcaatggtaaggtttaggtttacttatcctaagattttcatttgtcactttcaagaccacacaaatctttctcttgtttattttccgcgcactactcacaatctttcattttgatcgttacttttttaatcaggtgacaaggttagtgaaagaaggaaccggaaaaaccaccttagcaattggtgatggtgcaaatgatgtcggtatgattcaagaagctgatattggggttgggatcagtggggttgaaggtatgcaggttggtgccatatctgactgactcctttttatttaataacgtctttataattattttcattgacattaaaatgttcacatcctgttttctgctgttagaaacaatgtatatttctgtatttacaataaatctcattaactgtttgtaggctgtaatggctagtgacttctctatcgctcagtttcggttcttggagagacttttggttgttcatgggcattggtgctacaagaggattgctcagatggtagtaaacatgtgcttatcatatgtttttgattttttatgttaatacctgcatctctccactaaaattaacttgctcaatacttgcaagatttataattacaacaaattggaaggtggttgtattcggtaaaagtttttcttacaaaggttctttttttggcatttaggtttgctatttcttctacaaaaatatcgcatttggtctcaccttgttctacttcgaggcatttacgggcttctctgggcaatcaatgtacgatgattggtacatgctatcattcaacgtcattcttacctcattgccagtcatttcacttggagtatttgaacaagatgtgtcatctgaggtctgcctacaggttagttctattagtttttactttagaaagtatgtgtacgttttcaggtaacccttctattatacttattgatcatctcttctacagttccctgcattgtatcagcaaggaccgaaaaacttgttctttgactggtacagaatattggggtggatgggcaacggtgtctattcctctctcataatctttttcctcaacattatcatattctatgaccaagcttttcgtcctggaggccagacggctgacatgactgtcatgggaaccgccatgttcacttgcatcatatgggccgtgaactgccaaattgcactcacaatgagtcactttacatggatccaacacctcttggtctggggcagcatagcaatgtggtatctgtttctcttgctttatggcatgatgtctccgacttactcaggcaatgcattcaagattttgattgaagctct

SEQ ID NO: 1492 - DNA, 2858 bp, Cannabis sativa
ctgtacgttatatttatttaatatttagttaagatcatttgtaaattttaagaaaaatttgaacaattttaaataccgaaaataagatttaaatattttattacacgtgcaactattttgtagtgtggtaagtaattatttgaaccttattttcgatacgataaattcttcaaacatattttaaaatttacaaatgatcttaaataattacaacatatacaattatataaaaaaaaaaattgaactaaataatttttttaaataccgaaacaaataaaaattaccaaaacatcctttaataggtgtaatatacaaatttcctaagctatatagcatcttaatcttccactaaaaaactatatatatatgaaaggagtggtcccttataacaaccttaccttttcttttttcttttatagttgtatttgtcaaagtagccgttgcatctctctctcaatctttttctctctcatcaaacatttatacttacacaaaatcatcaaatcatatcataaaaacaaaaaaagactctgtctttacaaccagaaatccgtgttctttagctccctatactttacaacaacgctcctccaaacccagatcatctttttcccttttccattacttggacccatttacacatttcatcaaacacataacaaacactttagtttactatgaattcaacccttttggacaccaaaatggctcttaccccattactttcttcctcaattacaagcagttgtagtagcagaagcatcaccaccaccaacaccaccaccagcccccgaagcagcagcgcgagcagcgaagaaggcgatatcgaaaacccaccaacagttagtcattttgagcttcataaaaacatacccttttgtgattttttctcatataaatcattagctgtactctcaggtcatattggttctgtttcttgtttagcattatgtggtgagtttatactcagtgcttcacaagggaaagatatcatagtatggcaacaacctgatttaaggcttttcaccaagtttggtcatggtgataatggctctgttaaagctcttgttacaacaggaaacaaagtctttacagctcatcaagatagtagaattagagtatggaaagtgtcaagaagatcagagaatgtttttaaacttgttgacactcttccaacaacaaaagattatttggggaaattcatgaaacagaaaaactatgttcaaactagaagaaaccataagaaattatggattgaacatgctgatagtatatcatgtttagcaatctgtaatgggttgatttattcaggttcatgggataagactttgaaggtttggagagtatctgatttgaagtgtttagagtcaataaaggctcatgatgatgctataaatggtgttgttgcaggtaaaggaatagtttactcagcttcagctgatggaaaaatcaaagcttggggaaaagaaacaagtggtcattgtcttaagggtgttttggagggtcataataaggatgtgtcagttaattcagttgtggtttctgaggatggtaagtggatttactcaggtggatcagatggttatttaatggggtgggaagggaatagagaattgagtaattggaagattgtttgtgaggttaaagctcatcaaatggctgtgttgagtatgtgtttagtgggtgattttgtgtgtagtggctcagctgataagagtattgggatttggaagagacaatgttatggtaagatttgtaaaattggtgttattaatggtcatgaagggccaatcaagtgtttacaagcttcacctaataatgttggtggtgggttcatgttgtatagtggaagtttagacaagagtttgagagtttggtgggtttcaaaatactcatcaaaacaagaccaagaacaagaccaagaacaagaatgcatttctataagaagaatttgatgatgggtattcataaagttcacaacttttttggttttttttaacttattttgttcatagtttgtgtgaggattgaaatagtttgcaaagggtatacaatagtggagaaaagggcaactttgagttttgagtttttttggttgtgaaatactcaaacttgattttcaaagagttttgagtgttgagtttaggatatatattaaagggtaatttgtgtgattttctttttggtttttggttaccttttagtatttttacatagtttcttgtcaattgtaatcaatattctaaagtatttaatcaataaaatgaaatagcattaattatttgttagttcaattgttgaaatataaacaaaattttcctattgatatacttaaagacagagtcgagtcggccatgaaatttggttaaccttaaaaaataaaaaaaaacttataatcaatgtaattttctttttcttttacataatttcttgtcaaatataatcaaaattctataatatttaatcaatgaaatgaaatagcaataattatttgttagttcaatttgttaaaatataaacaaaattctcgataaagtcgaatcggtcctcaaatttgataaattttaacaaaaaagaaaaattataatagatataatttttttcctttacataatttctttttgattataatcaaaattacaaagtatataatgaatgaaatgaaatagcattatttgttatctgaattattattattcaacaacttaattgattgctaaaatataagcaaaattttctcattgatatatggctaaggacaaatctttctaatcaaaggaaaataaggtaaggctaagaacatgggattgcttcctcaagacatagcattactaccccactaatactaaaattataat

SEQ ID NO: 1493 - DNA, 2923 bp, Cannabis sativa
ccattatcttggttggaccaacttttgagcctgaagggattgagctgtaacctctatggaatttacacgtgttctcatccaaaaacacggataacatttaccccccaagcttccaaaactctatgggttgtggagctggcacccttcctctcagatgatgtgaggacatgtggaggctcaaggtgaaaccttaatgaattccaaaccaaattgtttgtggttgacaacttcttattttttgaaatgaagcaacatgtggcattatacctttgctacttgcattagtcggatgtatttcgacaagtgagccctggggtccgtcctgcctttgtacaactcaatctgaggcattgtaaagtgttgtagaaagggtgcctctattatctttcttacacatggttttggatcctcttcttctgaatcagatacatccccattttacttcgaggaaagacattttgctaactttgttcacttagtaatttgatcctctagacgtttagttgtagtgtcttgggattcacgtccacaaactcagtgcttgatgtggtttttgaggtcgtttccacgaggcctttccaacctaactttagctttttctttcttcacatttaaacgttcccagagatcatttgttgaaagacttccattagaaattggataaatttcatctacctcgtcatcactctggtcaatagaattactagggtaattttatctttcccgaacggtaggcttttgtgcctgagcactaggcctatcctcttgcaccgctctccctctcggatcaataaggtttccttgccttggagcattggctacctttttttccacaaaggttggctaccagtatttgtgttgttctgtggagcaattgttgaggagtcggatcattaggaatattcttgtcgggagtcacattttttggctctaatcaggcctctagtctgaccaaggttggttgcatctagcaagaaaattcttcccgtgcctcctttttcagcttgtttcggtgagttctttggccatttcaacaactgcgggatttgggtcgtaataatattcctcattatcattttctttcccatcttcttcaggatcttcatttttgagatcttcctctcaacctcattaatggaattttcatcaacatatttttcattgcgttgagtcttttaagaaggatggttggttgcctttgttggatctctattaactcctgtctttgcctgggttgtaggatctacatcgtccataggagcatctctatcacgactactaattttgtttcggttgagttccatggttgcagcatacaaccttcgatggtaccactacttcctttagctctcaatgaaagcaccaaaatattttctgagatttttggaaactaataaaatatatattaaagctaaataaatggctcaaaattagaaaaataacaataattttttacatggttaggacgttaattagcctcaatccaagggtcaatattattacaatgagacttgaaaagccttaggatttacacaattgtttgaaccctataaattttcctaagtaattgaggaatgagatttcatccctttgcttgaatgggtgttcttatatttatagttgtagggttcttattcgttagaccttgcccattaatagggtaaatacaagtaatatattgacttttgggccaatctagtggagcccagtccaagaagcactgattgtaggctgatgtggatgccacatcatgtagatagttgtccaattcgtgtcctaaaatcatggataataaagacatattaaatgcttgatactcaatcactatttttccatattgagaagatacgatccgtgagtgagatcgtgggagttaaatcttgatattgtgggataaggtaattaatgagtatgacacgagctggatgtctggatgttatttgactacttttctagatgcttcgactaaagtcttccaaatacaagctatgctggaggaatactttgcctagactagtagtctgtcagccatttaaaagccgacttcgctaatggatataacccattatcttggttgggcctgctattaggcctaaaggaattgagatgtaatcgctatgaaaattacatgttttctcattcgaaaacacggataacacctgctatgatgggaaaactaaaaaaaaaagtcttattttaatccatttgtgatcgtatttgaaataaattgttcaattggaagtcccagtcctagagaagtacttctaaagtctattattcagtccatctccacttattccatgaatttgtttcgacttcctgtcagcttggtgaatgacattcataggctttgtgcactgtttttgtagggtggtggtattgataagagaaagattcactggtgtacttaggatatgctttgttcgaataaagttgatggtgatatgggttttagggacctctttccgtttaatcaagctctcttagctaagcaaggagcgaggttgttttcttcccgactctctttgtggctaaatttatgaaggccatttacttccccatgtcttccctgattgaggccactgacaataaaaagtcttcattcatatgatattcaatttaatgggcgaaagagctttttctttctggaacacgttgactaataagtcatggttcataggcttaagtttataaggatcgttggatccctaccgtgtttgacaattgttcttattgtccacgttatttacctttggatgctattgtatgttattgggacctttggggttatggaatgttgacttggtttgtgttagtactgttagttaaaagatgtacaagctgtagttagttaaaagctctaactgaattgtcggttagttagttagaattgttttcgctgttaaagactctgtataaatat

SEQ ID NO: 1494 - DNA, 3304 bp, Cannabis sativa
caaaaccccattctcaattttcttatttttagttgaaaatatcaattttttatacaaagtctttaacttttatccattcccatcaaaaccccattctcaattttcttctttttgacaaaaagatcatcttttcatataaagttttcaattttatcaaaatattgtgtgtgcaaagcccagcccactaattttagggctaacatcattaccactcaattttccctcatttccatttctttgccctttgctgttagctccacggctattgcaagaccagcaggtatttatatatgtatatatagatatttatgtaattgtatttgtatatgaagttatgaacttagttgttgattttgattgaaagatttagtcttttttcattattatcactagctgctcttttgaatttgaactaataagggttaaggaagaaaagttagtagctttggtgttcttagtttcagcaataactggttttgtattttgtaggcttgaaagaactgaggattgttttcatttggttgagccttattatggtttatgttgtttcatagagttgaaatgaaacactatattatgtaccatttatgtcttgaatttgagatgagatattagatatcatatattgattagatcaactagatttgaaacttgaaacactagtggtcctaagccatgttgttgattttgtcttcaatttgagttgttatatttcatatattgataagatccactaaatgatgttttttctttccttatagctttgtttctttaattttgtctcaataaactaaactgttgcaatggaggctatattggtttggtttgattttgcttttctgctttgtaaatattatcaattggaccatttgttttgttaaaatgaattgagctacgtattttttaaaatagtacaaatagggccctaagctcaatttttgataatttttttaatataactaatttgaaaacaatttataacatgaacaaatgtagaagacgtaactaatttatcatttaacaaaacaaagggtccaattagtaatttttgcaaaacccagtgtccaaaatggtttttactagtatgtaaatattattccttttgtgagattactaaaaatcctatcctatgtaactcaacactaagcatgagataaataagcagaaaatagattagaaaccaaagaagaaagcattcttacatagtctttgattgaattctttgagttgaaacacaagtatttagttaccatagcagaccatgttgttagtcttgaatttgagatattagatatcatatatttgataagatcaatcaactgtttctcttttatggcaatctgattgatttttcttcttcttctttggtttgatgatgattagctttggttgatttagacttgagagaacaatggcgaaaggtctgatatgggcgacagcagatgatttggctcgaaataagggacatgttctgtctctgtatcgtcaaattttaaggagcctcaactcccccgagctaccacttacttgggctgcacggctgtcaaagaaggcggaggctcggtccatcttcttagtggcttccgaagagcgatcagtccacaatattgctgacctcattgatgtagctgagcacactctttctctcctaagaaaaggccaaattcctaaacttcccttaatatgaacattatttgtaagtcttgttttcttcttactatagttttttttgggtttcctttgataataatacaagtttgaatctttattaaacaatgtggatgcatatagagattaaagttttattggtcttgacatcaagatcaaattttatttgatatttgttgtattgattttagcataattagctaaagatggtttgaaaaactttcatgggaaactcataataaattgaatttagattaggcttatacaccatagtatgttgtttgtagtcaacaacatacaaagagcttttgattttttcatgttgtccaagagttgaacaatgatttttttttcttgtgttgtcaaagagcttttggcttacacaccatagtatgttgtgtgtagtcaaataaatggcgagtgtctgatcgaattgatcaggtcctttaggaacaaggttcaagtttaccgatctgttcatatttcttgaggtccaccctattttacgctcataacacgttgtgatacaggtcagagtcaaatagcaatgatttgaaacattttttttttttgccaaatgctaagggcatccttgtgaggtgtcatattgctaccagtgtataattcaatatcagtcttacttattttactttaataaataattatagaaaatcactaaccatttatagagcatcatttcaaagtggcgctaaatattatggtgcctaatagtaatagtaatgcttttcttttttatactatttcgaaaactcaagtactcaatcatagagatatttttagtgacaatgttacttgaattgctttaattaatgatatgtagaggtttctaataatatttttgtagtgaaattattcttagtttttttgttgccaagatagaaatatgaattgacaccttcttatgttgatctgtatcaagagacttgcagacacataaggccgatttctagtacagcttcaatcgaagaaaataagcttgccggttgctcgtgttcgtgtttgtgttggtgttggtgttggatttcaagtcaaaactcgaaaatcatgagatgagctgcatgaaatgaagtattcacatttgctggagcaattgaattggagtcttccacagcaagtgaaaaaattcttctcgaactatagaaattattacaaatttcctctcatggttgcatttcgtagttatatgtttagagagaaattttttcaaaaaacaaaataatttatgagacaaaaaaagtgtcttaatttaggggacaaaaattatatttatttaaacattttttaacattatgaaaccaattgaagtgattgtcatgtgatttgtacatgtttttactttgctagtaatatatgtctcttatgattgattattcctatacacaccattgctactatactagtgttgttcttgcttgattgatttgattaatcaatgctagatggttttgttcttagtaattttagtgtgtaatatgttttttttttaaaataataataataataataaaacttcattataaagataaagaaaattcaatttgaaaaaatatgaggttttaacaaaattatgagtgatacttcattacatatgtaatatattttagaatattagcgg

SEQ ID NO: 1495 - DNA, 1679 bp, Cannabis sativa
ggattgatacactgaagctgaaaatgacctatatcagtaagagtatatatattcttaaatttattatatttattacatgaatgtattttttttaatttaataggaaataaacatgttaattaaattgctcatacatatattataatgatattgtaaatatattataaacttgttataaatctgagttgataagttaatcaaaattaagcatgattatttataaatagattgagttgggttaatatatttataaacaattttggttttagttattgacacgattaataaatgggttgtttgagtttaatatttacttgtaatacttaaaacttaacacgacacaaacacgacctacaaatatgaatcgccaccctaaaattgacccctcataaaagaaaagctcaaacctgagtataggcatgcctttgtttttagtatgtgaaaaattataatcaaatttattttactaaattgtagttaaatagatatttttactaaatttttatttttttttaaaaaataatttatagtatcgaaaataaacttcagaataatatgttgtgtttcatactcatatataatatacttcaaaataatgcattttcagcataagaatgtttaagaatctctcccacaaattattggaaaattcccaatgattaagaaactcatgtcctctactataatcaatgatctcaaattagtcctaattaaaggtcaatatttgttaaagttattattagttaataattagtttctaaacttgaattatgtaaattatattataataatattcttaattttgtcaggtctcaaatcaattaataatttgctcccattcaaagtaaattatctacaacaaaaaatagcttgaataattaaggctcactcatcacagctcatataattaaataaataaatatgaattaaaataaaatatttacaaccataaaccacgttacattaatcattcactaaatttagcataaaatataactataaaattatatatttagatcatgttatatctcaaaaattctctcctacgtgatcatatatcattttcacctatatacatctatatatattatatatgtatatatatataataagacacgtatgcatgcatgcatgacaaaccctagatgatacgaaaagttcttctctctcatgaccaaattaatatatgacttagcaagaaacctgggttaataataatcattatttagagaaaagaatcagaataatatatatcttatacatcaagatatatatatcattatatatatagattgtgattcattatatatatcatcaaaagtcaattacccttttctttctcttctctcaaaattcatatatgttgatgatgatgatgatgagaattagtggttattgtttggtggttttattattagggttttcatcattattatttgatgtagattgtttaggaatgaataatcatgagatcaaaattgataatttatgtaatttgtatgaagggaattgggttttggatgagacttatcctctttatgattcattgaaatgtccatacattttcaaaagatttcaatgccaaaaaaatggaagacctgataatcaatatctcaagtacagatggaagcctacccattgtgattttccaaggtaataaataaattatatatatatat

SEQ ID NO: 1496 - DNA, 3970 bp, Cannabis sativa
  modified_base (2851)..(2853): a, c, t, g, unknown or other
gagagagagagagagagattaccatgactaagggggtggctgtgcggtggctcttgtctaggtggccggggatgggcatctcgacgaactccgatggggactttagttgggggaatatggtggtttcccttagcttagagagagagagaaaaagagagatagagaaaagagatgaagggggagactgctcttgttagggtttattaatgtaggatttatagtgttttttaattgggccgaagcccatacataataatatttttttaaaaaaaaattggaatgttttgcgtcgattgtgcactgacgctaaatttgataattttgtgtcgatgctcaaccgacgcaatttctttgaaaactgatgctaaaactgcgtctccacataactgacgttaaaattgaccagtaattatttgcattagtggtttaatatttttgttgccagaaccgacgcaaaatgcaatatttgtagtatagtgattgcacccatagggtgtaagtagattttcaagaagaatagaaatgttgaagggaaggtagagactattaaagctaggcttgtagcctaaggctacacacagcgagaaggtgtcgactatgatgaaacattctctcctatggtaatgattaaatctatttgcattcttctttccatagttgccacttatgactatgagatatgtcaaatggatgtaaagactgcttttctaaatggtgatcttgatgaagtcattaatatagaacaaccagaaggttatgtgctaccagaagaagatcgaaaggtgtgcaagttgcttaaatacatttatagattaaagaaagcctctagatctttgaatattacctttaataagactatcaaagtgtataaattcgaacaaaatgaagacaaagcatgtgtatacaaatacattaaaggtaatgtagtagtattcctagttttttatgttgatgacattctacttattgaaattaatgtagaaaggttatgacgtaaaaaagtggttagccaataaatttcaaatgaaggattttggagaagaagcaagctatgttcacagaacaaaaaatctataaagatagaaagtggagaacattaacactttctcaagcgacttatattaataaggtgctcaaaatattctcaatggagaattccaagaaaggaaagttacagtccagacatggaatcactctatgtaaagatcaatgtccaaagactcctcagaaatagaggacatgagaaagtacccttagttgggagcttgatgtatgaaatgttgtgtataaggcctgacatatgctacgctttagggattgttagtcttaccaatctaatctaggtttggaacactaggtagttgtaaagcacattctcaagtatcttcagagaacaagagatctcatgcttttatattctggtggagggttaaattctattagacatactaattctgattttcaatcaaataaagatattcaaaagtttcatttgggttagtattcactcttggtggaggagatgtagtctggaggagcattaagcaaaccagtattgtaaatacaaaaatggatgctgaatatatagcaatttttaaaacagctaaggaagcggtttagttgaaaaaattctacaccgatttggaagtggttccaaaagtagaaaagccactggtgctctactgtgacaatagtggggcagtgtgcaactccaaggaaccaagaagccacaagagaggcaagcatattgagaggaagtaccatctactaagaaatataatagagagaggtgatgtgatggtcttgaagattgcatcagaacataacctggcagatcatccattcccaaagactctaccggtaaaatcttttatgggtcatataactaatattggactaagggagatacccaatttgcttttagggcaagtgggagatttttagggtttatgccttaaaattcgtgtaaagacatttatgattattaataagagttgaacattttaatatatatacatgaatgttaaattattaatatttaatattgaataatctatataccaatatcaaaaatttctgattcatacatgaggttgtgacttgtagttgtacagagaattaagatcacttagccatgaataaaatagctagcaatgtattaatatttgtgaatctttgatcaatagtttctagtacagttcactgatgcccgttcttcggtgaaagaaatcttgattcggatagccaatatagctagtgagacatctaagtgaaggtgttgtatataatagagattatatatgacaaggagcgatatgaataaagctatctttatcaaactgacagtttactattaagacttaatttatatcataatgatgatcaatagtagatcaacctaaatcttgagtaatcatgaatctatattcatgttatttgtttttttgttcactcattaaagtttctcgacaaatcggatctgtataagctagaatgcccaattacaatccgtggttgctctcttcaccacggaagcagaatttatggtaactacggaagcattcaatgaagcattatggctttagcgaattctttgtgaattaaaacaaatcaaagggggagtgactgtgcattcagatagccagtcatgcatccatctctgtaagaacctaatttatcataaaaagagaaaatacatagatataaggctctactggataagagagaagatagaacaagggctggttgatttagagaaggttagaacaaaagataatcttagtgatgttgggacgaaggtcctgacggtaaactagttcaagcattgcttgaacttgatcaatctcagaannnagtatactgagattcctggaacaccaactatgatggctacattctttcttcaccatcgtcacacttttaatttgaagtaacaaggtggaatttgtggtatagttcctccaaataaaaaggtctccagaagttattatcattcctgaaaaattgttgactcacaaatgcaggtcctggaaggctttcttgtccttccgaagaagggttttcaggaaagctagtcatcctctggaaaggaattctggatggctagatgttcctcctggaaggtagtccaagatagtcgactccaggtgactctttcctatcccggaagctccttcaacaaatgccttggaccgtgactctagaaaccttctttctctattccttatgcactcttacttagcctgatgtggagaccccgctcaaagaagagttagttaagttagttattgcctaactaacttaacaacctatctttttgtagccaccgactctaggatcttgatccaaagcctataaataccaccaacacttatctttgtaagtacatcgattagactgagattgaaagatagagagagaggtacagagaaaagagagagagagattgagtttgaattttgtaaggaaaatcttttgtggatgaagaagattcttgggtaagagtgtgagagacgttgaaatactttgagagaactcatcaaagaatcgacatcgactgtatcgtacatgttcttgctcaatcaataaagatgatttagtggtgttccaaaactagagtaaagacatacatcacatcgatcaatcggacgtgaaccaatatttatcttagtgttgtttttctattaatttactgttttaattagtttctagttattcgttcatccctattttttctctaattattattcgtgaattttgtcatcactaattttttgcttatttaaaatttagttgattttattttgcaccttgtaattttaccacataaattaaattgtaccggaacttcaattaaacaataggcatgcaatttttttcttcccattctcacagatgtgatcagtcaattaatttccagtgctgaaaaattacactcatctcctttttcatattttcctaattatttcag

SEQ ID NO: 1497 - DNA, 1358 bp, Cannabis sativa
cctcataaaataaatgacaatagtttcaagcattcttatgtaatattcaaatgggtgaaattattaaaattgtacattggccattcatatttcgaataatacatgaactcttaggttcagtggtgttacttgcatattgagttttcgaatcatttaggaacacaaacctctcagggtttatggatgcagaaacctatcgaggtttaatagaatataatgcatgcgattatatcaatctggtattgggcgttcatgtaccggtacatagaacttatgagttttggatgagttatcgtgcacatttgttattcgaaccaaccgcttgtaaagatatggtttttagatacggtgtggggaagaaacatttgattgtcacatataatcgatatatgtcgcaacagtgctaatttttctctatcatgcgagcataaacaaactgggttggtagtgttgacatgtcatcctttactaattgggaatggggtcaacgtgtcaaataaatataaggttgtactcgttattctaggtgaaaaattcattctataacacatatccctagttttgcgatgacagttgtctgtcaaatggcgaaactatcctaagggacaattaagttgccacatcacgtgtgacgtttgagttgccttctagaggcttacgagtggtgattgtcgattattacttttgggttttcaaggtgccacatcatcgaaaccctttaaggttcgtgcccattgaagggatgtgtgggcgtgtctcttgatagtcgtttgatgaggtgagccttagtttttgctcaccacgtgtcatcatcctactgagagattgtgacactgatataaacctcaagtacgaaatgggggtattcattttctccctcatttctttaagctttttaaaaactctctcggtcttcaaagaatttttttgaaaatctttctctgtttctaagtttgttcaaaaactttattgttcaagcttcaaaattagattcaagttcgtttcaaagctctagaatcgtgctttcagatcaaaaaggtaggtttttcttttatatatatatattttaaattcatttgagtagtcgcatgcattttgaattttttgcttcttttgaggtataaaatgttaggctctgttataggtattcaaacaaatgaagttaggtagcctaaaataagtactttgtgaagaaaatttccttgtttgagtctatatgcttattacccacatcttttagatagaacacttgttggaatatgtattaccatgatttagatttactaacaagtatgtttttaacatcctaaatatgaataatgcggaattgaaacatagaatttgtattatctgattga

SEQ ID NO: 1498 - DNA, 1065 bp, Cannabis sativa
aaaaaaaaaaaaaaaaactagaggatccagcataaagcccgacccaacataagagtccaagtagatcgttcaggccgaagtaaaaccaccatgaacttccaagttatgaccggtgacgaactcagattcatcactcgcgagaaacaaaaccgcatcagccacgtgtcgcgtcttcagcaccactcctttcaaatacgaagacctttcgtaacgtttctcaagttcctccgcctccaccccattggcgccgcacgtaagcggcgtcgccagcccgctcggcgagacacagttcaccctaacgccgtgcttccccagctgcaagctcgccgatctcactagccccaacaccgcgtgtttcgacatgcagtaatctgtccgtgtcctacaaccgacagaggcagccacgctcgccgtgcatacaacgcttcctctcacgctccgctccaccatcgcacgcgccgcatgcttcacgcacgccgcaactcctcgggcgttcacctccagaagccggtcgaaagttgagagatcgaggtccaatacggtctgcggttggctgctacagattccggcattgcagaacatgatgtccaggcgatggtacttctgaacagtccagtcaactgtgagttttacctgttcttcgtcggtgacatcacaacgcgcgtacgtacaccttccagcgccgattgattgggccacttggcgtccaagttcatcctgaatatcggcgataactaccattgcagtaccgttatccgcaaacagtcgtgcggtggcttcgccgatgccgctggctccgcctgtgattatggctactttgccgtgtaatttgggcttggaataaccgtcggctgtggttgtcattatcctaatcctgaggtatatattctgtatagatatactattctgttgttatgcccaataccattatgtataaataaccaaattggattgagagtagttcaaatcaaattattggagtaggtcctataggcttttattattgtttttcacgtgagtacataaattcgtacataatatcacctgttttatttaacagacaaa

SEQ ID NO: 1499 - DNA, 1359 bp, Cannabis sativa
aattttaacacaatatttttgcaacttagtagagtaaaaatgtataaaattttatgtctcggtatttttgtaaattttttcctattttctaatatttttgtaattccctagttaaatgagttcttggcgaaaatgaaatggctgtgaaaaaatgattttttctgtattagtattactaaaggaaactcatacatataaacatccaaaaaaaaaacatataataaattcatacatgatcttatatattattaactttaatgaaatttttggtaaaaaaaaaaaaaactcacataaaatgagtaattttatagtgcatacattagtgatcatctgggtacatcttatttgttttggcatcaatgtaaatttttataaaattttaaataatttataatatcaaaattaatattcaactattttattgcttccataactttttttttatgcctatgaatatgatagacacctatttgaaattttatttcgacactataaattactaaattattaaaaaatttctaaaagaaaataaactaaaaaatattttaaataccaaaacacataaagatgtagcaaaatgtacttcaacagttcaacattatttatatcatgtggtatgagtataataatcaagattggcaatcacaatttacaattatatatcaaataatggttagaaaaacttatgtatgcaacaaataaatgattggtagctttctctaaattatttcatatagaatctgtttcctcaaaagaataagaaaaagaaatgttggactctgacaaagtaatattcctttttctttaaagaaataaaacccaactaaccttctgaccacccttcattttaattttaataaaaaccctcaaagattctataactttaagtgagaaaacaacatatagattggttgaaacaaaaaataatgattctcaaacttaaactacaatcttcatccaagtcaatctttttttctttttttttttttgttaagaaacaaatctctgaatttttgataatttttatcaaatatgcagagaaaggttgatcaagaaaataccaacatgaaatggcattttttttttgggtcttaaaatagcatcaaacaaaattatacatacattcatacaaagatagatcaataatcatttttctttccttaattatttgttctcattacactaactaatgcttttctataagaaaatgtttagaaggatctgcaaaccggaaagagaaggagcgagagatcaagctatcatcatcttgttcatcatgaaagtttatatcatcatcccatgcaaagcttagatcaaaattctgagagtaactgtggggatcatagggaacaagacgac

SEQ ID NO: 1500 - DNA, 1383 bp, Cannabis sativa
taaaattccctgttatagtattattgctatgttatattcttcataatgtttatattttattgatgtttgtgtgtgttgttatgtagaatttgagtaagaaaattaaagatgttgaagtcagtcttccaattgtgtatggtaatattgcattctggcttggcaagaaagcaagcgagtaagtgttttttttatagttatgcccaattggttgattacttgatttagttgttacatgaaaataagctgttaaaatacattttttcttttggtatgaataggcaccaatcacataggtggactgtctatgttcgcggtgcatccaatgaagatctcggtgaggtggtaaagagtgttgtttttcaacttcattccagtttcaataatccaagaaggattttggaaacaccaccctttgagttatcagaatctggatggggtgaatttgaaattgtcattactctttacttccacaatgatgtttgtgataagccattgagcttgtaagttgctttgcacattcttttgttaggatttattctgtttttcaggctgtgaatgctccaaatggaaacaaggttaatagaataacaaagatgaaatgatttatagaaggacagatttgaatttaatattaattttcaatatgccaacctggttagtcagctccttaatttgatctgttaaaatggtattagttcttaataaagtatatgtttcaagggaaatatttgactgttactaagtatggttacagaactgtgtgctgattttataggaattaagagcaacaattaggcttaaattaattctagtgaacttattcatagatatcatcatttgaagttgtatccagaagatgaatctggtcctatgtcaacaaagaagcctgttgttgtggaatcttacgatgagattgtgttccctgagccttccgaggcttttctagcccgtgtgcaaaacaatccagctataaatttcccaagattaccagcaggctatactttgcctcatcctggtatgtttttcttgttttccttgttacctgtgtttaaggataagtaaataggcctcaatacatgcagtaccagctgaagttgatagcaaaaaaaagcgaggtgacatcaaagatcactccctaagccaatggttcacaagtttctcagaagcagatgagttattgcaactcgcagcagctcgtcagcaggtaaaaatggtcttctcgcattttctcgtggtgatgtctaattacaacctcttgggtttttcatatgctaaattctgtgtgtgtgcaattgatggtaactatactttttatttgttcatcattcactttaactataacatttcttatagccaatgatttactctctctaaacctgatga

SEQ ID NO: 1501 - DNA, 2721 bp, Cannabis sativa
taagatctaatagtccattctattcttgagtgttgaaattgtggcttggaaaatcaaggtgtggattcttagttcttggattggatgttcgatatttatacaaaaagaaacaaggataccctaataggcttcaagaggaaattgaatttctttcagtagttaaatttaatctatatctattatgttgagatccttaggcttatggttcattagataaaaactattttttttttatcaaatcccacttcagcttttacaactctgatatggactgtaaaaaccaacacttttaagcagatttctggctctgtaaagacaaggttttgaacccctttagtggtgagcatgatgccatatttatatccagacatgcaaaccgggctaggttgacctagataagtagggtttttctaggattgaagcccaatggtggggtatttacatgattaaagctattgggccttaaaggcaagacttaatgtcaaaaattataggtgtgacacaccgtttcatagtactaatgatgctacttatctatctgtgagcttccgttcggtgcatggggaaacaatgatgtcaaagtagtggccattgcaatccctattataattgtaccattttgcaaaaacccctcctcatagaagataaaggagacactcagcagatttggtgggatcgttttagaattgtgtctcgtgggaaagtagcctgagctgttacataaaacatgcccaaactacaaggctctttcttggaaggagttagctcttggtaggaggtttggttctcaaaacagtttccaagggcaaaaggtcttggccttgactccttattctatcctcgagcattgacccaggaagtggggatgtagctagctattttggtgttcccaacttgtgaaataactttgtccttttaatgccatccagagaccgattttgaagcagtcttttccaactcagtgtctttgagtagggaccatctagtggctttagggtgttgggttcttggttcatgagagatagcaggtgggccaaatcctatcctttgtttctagacttaagatgggttagtttaattctatgaacttcaccgtggggggccatatgtcgagatgggagaaacggataacacaaaacaatgatgtcaattacaatttctttaaggtgacaattttgaatataccgaacatgtatttgagtaacaaaaccacgtgccctaggttatatataaacctaggcactggtaagtaggtgtgcatcaccagcgtgcaaggcaaaatactacttgcagctgatgatcattctgggaaggcacaacacctaagagttcttggaacaagggttcattgaggtttactcaagtggaattgttagaaagcttcacggtgtgcaggtttacccccatattttaacccaatcactggtaacctggggggttgtcgtcctgggcaccactcaaatgtttccgccactagattgatttgtttaatatcaaaaagtgattgtatcctcttatttgatgaatacaaagaaaatgactgcaaaacatcttttatgagcatgtagaaagcatcccaagtcaacatatatcaacctggatgttgggtcaaggtcgaactattttggaatcttcttctttcgtatctcattattttcctatttgaaagaacgcatgtgaatcctaattgtctaaatcaaagatgatttgcttagagatgcgatttaggtaacttgggcgcctagtgagtgcacactatcaacctaggcgttgatttgggtttgttcccctcttggccactagatgcaaaaaatctattatacacatcgttccttgatgaatttgaggattcatggttggaaaatgttttcgaaaacctaaacattaattgtcatgtgtccaagattatatgatgtcaaccaggatgctgacttctacctaagtacactctaggtatattgtaatcctaaaattggtttagtacatccggacataattgtggcatattttatatctaatttttcataattgagttgtttgcttagactattgaaggatgaaacatggaaagtccttggacaatttaagcttctatctatgctgctcctagaagggaagtgacactgccctgtccgggaacctgggcccatggttggcaaatcgaaacttctttctttctataatccttttcatctcatcactcgtgataatcataagaacaaactaataatgctatcaacttcaattaaatgatattaaattattttatatgctagagttgaagtaataatatattaacgtatatatagttttagtattattgtcttagaatatgatgaggaagcctatgtttatggtatacatggtggtattgtaggctccatagcggtggaaatattcctatcacatttgtccggaccaatggtcaccacagcttcatcctgaatgttatgatttaaatgttaatttttaaaattcaaacataatatgagatagaaataaaaattggatatatgattttaacattgatatagtttatgtatgcactcacctttgcaatatttctaaaatatgttgtggtgtaatttccagtaggaaataatgcctcaatcagatctcctaacaccaattgtggctgagagatggctccattgtaccaatctaatcacatcaaagatagttcataatcttatactatctacatgttaatacattataatt

SEQ ID NO: 1502 - DNA, 4083 bp, Cannabis sativa
ttctaaaacaaatgactatggcttcaaatgtttatagtagcgatggaggaaagtgttttcaacaaatttgataagaaactttttttttcaatccaaacatgagaaaatgttggaattcttttttctttccctcttaaaatccaaggcgggaacaaagccaaaaggtcttgggattactactaaacatcaaaagacagatgaggtaaacacgggttggcctactctcattttctaattatcaggcctagtccctgtaaacatatcaaaaactaatgcttcattgttttgttcctcgtactaatcaaaagtaatagtttgttgctaataatctttgttagtaaatcagagcttgcacttaaaaaattatttaggcgaagattcaaaagatatagaagggaaaagtcttacaagcatttgcagggcaccatcttcaatacgcggtccagggatgcatcttattatagtctcgaaaagtggccccagatcttcagccaaattttcaggagacaaacctgcttttcctttaatgccacttgcataaattgcttgaaaatcacactgcacattaacatgaaataggaaattggtgacatagaggaatcacagaacttcaaaagatgaacacaattatgataaatctgtggtgaaagtgtccattttagctgctcatgcttctcacgaatttacaccatttttcttaatacatggtttatctttgcagtatgtagtaaataaacaaattttgttacccttttgacaaattatcctcaaatgaaagatcactcgcatgcatcaaatttattgggaactccttagaatatttgaaaggaaagatgatatttacctgttcatctgttgcattaagttcaatgaaaagttcaaaagtggaattaatgacaaaatccgggcgagctgaaggcctatcgatcttgttgacaacaacaacaacagcatgaccaaactctaaagctttcttcaaaacaaatcttgtctgtggcattggaccctccacagaatctacctacaaaaaggaaaagcacatttgtactttaacattagaccatcaaataaaccaactagttcataagaagatacatattggaattgaagcacattagcagtacatacaaaattctaaaagagaattaaacttgaggctgtgtcaacaacagattagtgtctatgacaaagaagctatcatttactaatgcatttgtcatcactctttataataatgaaggaaatgaaatagttcaaatagagattgatttaccactagaagaatcccttccaccatattaagaatacgctccacttcacctccaaaatcagagtgtccaggagtatcaatgatattaatttttgtatctttatacataatagaagtatttttgctaagaattgtaattcccctttccctctctatatcatttgagtccattatcctttcttgcacaaattggttatcacgaaacacctgcaaaaacacagaataggaacttaataagattaatctcatcatcttatccaatgaatgtgataactttcataaaaacaacatattatttggctaacctttgattgtttcaacatagcatcaaccaaagttgtctttccatgatcaacatgagcaacaattgctatgtttcttatatcacttcttctcttcaactgactcttcttctctgaaacaaccaaatacccattacaggaaaattactttaacaaaatattagtatcagaatttgaccaaacaaaaaaagttggcggaattaccagtggctgcttcagtagcttcagaaaccgaacacttgattggttttctgctgattgaattcccagaacgaaatttaagagcagttttggcagttgaaaatgaatgagggactgagctattagaagaagataagctgagaccaaagagttgcttggagagtggaacagcagaagaagaagaagaagaaatggttctagtattagggttgggaatagagaaggaggaacaagagcaactgttgaagccaatcgccatttccatagctccactcactctctcagagttgctgaaactgagaaaatatagatagagagataaaagagggagagacaatggatttggcaaatgaggctcgtattagagctctctctaagcaacaaatataggcatgtatttggggggtttattccttggaaggtcctcttatctccacgtagttgcatagagacgagtccacttggtgggccatagtgaaaataaaaatcgaacctttttgaagtattaaagaagaaattttgataaagaaaaactgggaactcatcaatggttaccgtttgttccaccagtgccttatgggttcccgccattactgtacctcaacaacctttccctccattgaaatcaagaatacccagttgcagatctagacttttctcttcgaataaagtgataaatggcaagactttgaaggttgaggaagttgaagattgtgagacccttcttatcaatgactggcctcagcttattcagtcctcaattgggtctaagaatctctatctgggtcggacgattcatggattcttggtgaaaaagggtacccaaaatgacacctttgaagggaataatctagtgaacatgtactcgaaattgaagagattggatgatgcacagagagtgtttgatgaaatgtctgttagaaatatcattacttggacttctctaatgaaggggtactcggaaggtggcgataccgaatctgtttttcggattgcaaatgacatgttttgttctggagagaagttcaatgagcatacttgctcggtgattttacaggcgtgtaattcgcctgagggccggaaaaatggggaacaggtccactgtttcgccataaaaagtgggcttgatgggaatgttactgtgggaacctctttgatttctatgtactcaaaaggtggctgcttgagtgatgctgagaaagtgtttaatggcatagataacaaagatgttaggtgtttaaactatatgattttggaatatgggaagttgggatgtggagaaaaggcaatgtgggtgtttatccatcttttgagttctggtttggttccaagtgagtatacatatgctaatataataagtgcttgcagtggagatattggtgcaaatgaaggcaagcagttacatggactttctgttaagtatggtgttgtgggtgaaagtccaattggaaatgcgctaataaccatgtatggaaaacatggaatggttgaagagtttgagaggatgtttgtcacaatggatgacaggaatttgatttcttggactgcaattttgacagcacatcttagaaatggcaatgcagataaggcgcttgatgttttctcggaaacacttgcccttggtttagcttgtgattctgtttctctgtctattatgcttgatggctgctcagaatggagaagccttgagtttggggcccaaatccatgggttggtaattaagtttggttacttatctgatgtcaaaatagggactgctttaactgatatgtatgccaagtgtggtgaccttcagtcagccaaaaagctttttagtaaactttcaaatagaactactgccttattcaatgcaattctagttggattcatggaatcatatgaggatgatgaagttaatccaatggtcttattcagtcaactaagattcgaaggtcttcagccagatttcataactttttcgcggcttctaagtttatcagctgaccaagcaagcttactagtggggaagagcctccatgcttacaccattaaaacgggatatgaagccgatttgactgtaagtaatgctctaattaccatgtatgcaaaatgcggtagcattgaagaagcgcataaaacgtttagcagaatgaaaagcatggattctatatcttggaatgccataatttctgcatatgctcttcatggacatggcaaaagagcagtttttcttttcgaagatatgaagagagaaggattctaccctgatcagatcacaacattggctattcttcaagcttgcagttactctggattattggaaactgggct

SEQ ID NO: 1503 - DNA, 2653 bp, Cannabis sativa
caatatttatgaatcaaatctcctaagttcgtgccgatttagtggtgtgtcaaatgaacccgtatttacaattatgtaaatgttgagacactgatgggagtactactgtaactcaaatttcccttattatatttgtgtcattaatgacctgaccatactaaaagacagagtagtttacggccaataatggctctgcggtgtctgcagccttacatattcactaattaattatactatcctatatctcaccgacttctacttttagcttctttaatcatgtttattcaaaagctctgaaactttatcttgtttcgtcttttgttattttatattaatttttctattaatggcaggaggcttagttaggacgagcagctgagaagcttgatatttcaacccaaaacccatgtgcgtatcccatcccatcccagctgtgttgagagaccaaaacgcaacaaggatgataccttcatgattttcgagctttattaattataacattgaaagaaaaacatttattaaaaacatataacaacggtttcaaatcattcacaccttgtcacaacaactaatcattcagtcacattaattgggtttaagaatgaaaatgctttaaatgtgttgtaatgtttgccgcactcactttctctccctctctctctatatcccatccctctcttctatggcttaatgctccattatgtagttttgaagatagtatttttaacaagcatagacacttgttttgagatttctgcttctgggtattgcttgttttttagtttataaaatctttctgacttctgtgactacttggaattttttgagcaatgggtcacaatctattattctctttcttttggcttttatctcttctggtcggagcttgttttgcggattcatatcaagatcaagagaaagatagggtcactgagttgcctggacaaccaaagaacgtggactttgctcagtactcgggctatgtgactgtgaacaagaaagctgggagagcattattttactggcttacagagtctccagcgagtcgtaaacctgagtcaagaccactcgtgttgtggctcaatggtggccctggttgctcctctgttgcttatggtgcagctgaggagattggacctttgcatatcagacctgatggaaagacccttttcataaatccttattcttggaacaatggtacgttgactgaccttaaaaatggccacttttgtattattaattaaattctcactggtttttgttatctgggcagtggcgaatttgttgtttcttgagtctccagctggtgttggcttttcatactccaatacaacgtcagatttgtacaccactggtgatcagagaacaggtataataatgatctcagttttgtttcaatttgttagcttgatatgtggatctatatgctgtttgtattgttttgttaattcttcaaagaattgagttgatcttgattccatttgatgctttactcatctgggttgtttgtgtttgtagctgaggatgcatacatatttcttctccattggtttgaaaggtttcctcagtacaagcacagagatttctatgttgttggagaaagttatgcaggtactaaaatttactttacctctaattttttacattcaacatttttggttcctaaacttccattgcaatgaaggaagatctaaatcattacttttgtaggtcattatgttcctcaattatctcaaattatttacgaaaaaaacaagggaaaacagaatccagtgatcaatttgaaggggtttatggtaagaaatgtaggattgagaagaactttaggggtgatgcaaactgatgatttaaataagtaatttgtgttttttcacaatttatggcaggtgggaaatgctgtgactgatgactaccatgactatgttgggacatttgagtactggtggactcatggtttgatctctgattctacctatcgaatgttgcgaaggaaatgtgatttcgggtcctcacaacatccttctgtggaatgcatgaatgctcttgttcttgctgagagggagcaaggaaacatagacccatatagcattttcaccagcccttgcaatagtagtgaattccttaaccgcaacttacgtggtcattatgtaagttttcataacttgtttcttttgccaacaaaataaatggaaaaaagataaacttgtgaacccttttcattggtaatgttgcgagtttgaaacaaatgtctgatttgatataccttattgttagtgagaaataacacataaatgattttttcttactcttttcaaactcagccatggatgtcaagagcctatgatccctgcaccgagaggcactcaaaagtgtacttcaatattcctgaagttcaaagggcacttcatgccaatgtaactggactttcttatccttggaaaacttgcaggtaagtattcattattgagatattggatgcatcatataaaattttaaattctacagcagtgtgatagttttttttttttaattttttttttcagtgacattgttggaaactactggacagattctcccctatctatgcttcctatttataaagaactcatagctgctggtcttaaaatatgggtattcaggtatgtttacctaa

SEQ ID NO: 1504 - DNA, 1169 bp, Cannabis sativa
atagaaactctcatagcaaataacggagtaatctatcgtaattaaaatttacatagcgatccacatagaaattaccaaaaaaactaaacaacctaaattaaaaaaaaaaattaaaaaatagtatatagtgtaatttttctattttatttcattattttggcttgtgtaaccggaggatgcgcattagttggtctcttgctatcttacttggtgaaaataatatcatctactaccaaacaattctgtagttggcagtataaaattgaatagtattttatggtctcttgtgaattttttactgaccctacatcgtatatggacgtttcgttaaagttgaatagtattggtttctcccatgaaaggcagctgtatcaatacaacaactacctaacaattttggaagaccttgactttaatccttcaccatagcttttaggcaaaatatcgaccatgtgattacacataccctaccaaactgttatctagaacagattcttttttatttttactaaatatattgctaattttttggattagattttcaagccttggaaaccctcacaataagtaatgtaaaatagatattttttaaaatatttcaataaggggtcttttagtttatttattttagaagaaatgattttgttaaaatctcttaagtaaatctaatgagaaaaaactcaagagtaaaaaggccacaaaaaaatctgttaatgattggctttagcaaaaattattacactgtgctagtagatcagcaatcaaagtaaaataatgagcaaatatcatggaaattattacatgaagtaacaatgtcttgttactcttgtattacaaaacccaagtaaaagacaaaagatacttgatttttatcttacgaacaacgctcacacaatctaatatcatctaaagccaatgccttagcaccatccacatttcccagtcaatttccaggcagccatcacctccctcaccacatttcgaatcaccatccccatcttaatccaattataaggggtctttttattaacatacaacataaaagaactatacttaaaataatatttacacaagtattgtcacgattcgaaccctaaaccgtgtcagatatgtaatatctataacttatgtgatcaagtattgtcatcacaccatccactagaccccta

SEQ ID NO: 1505 - DNA, 3486 bp, Cannabis sativa
aacccaccaaggtaataattgacgttttatcacgattttaacgaatgggtatgtttcaatttggtgttttcatctaattttagttttaaagtattggttttttattatattttcattcatccaattgctaaaattttatctttggataattttggttaaatattgtgtttagtgtaattaaatttataagaaaatgagagatttgtgtgtgtgtattctgtcttcagtcggtgtgacttgtggaatttatatttacacttagcccataatgaaatttggtggtaaattaatgaaatttaccaagaaaaaaaatcaattgagtatttttcacgattttaacaaatgggtatttctcaatttggtgtttttcatctgatttgagtttaaagtattgatttttattatgtatactactcaaaagggtgttgacagctctcatgagtcaacggacgccattgaagctgctaagtcactggctcaagctactggtgctatagttgcagtgtctggagctattgacattgttacagatggaaaaagagttattggagctcacaatggagtggcaatgatgcagaagattacagcaacaggttgctctgtcacagcacttatagctgctttcgtagccgtggacccttccaatgcctttgaagccacagcattggccttatcggtttttggcgtcgccggtgagatgggaatgaggttggccaaaggtccagcttcattgaggatgcacttgattgattcactctatggacttgatgaagctactttgatttcacatgtcaaaataaccaccttttgtgattgaattgaacaatgagagagagggactcattgtttttggataggtatgttatttttgctaatacataattttatagtaatgcttctgtgtatagcaatttacaggaatgaatttgttttgtttgtattgctaaaattcattgatttctttgtttattgtttagattttataaatcattgaaatgcataattcttctatcttgaatctgtaagtaaaagatgaccttttgttgagcaatatctatttggaagctgccagtttccacagctgtcaatttctgaaccactttacccaactgctctatctgatttgactttatctcttgattacattataggattaggatttcatctccacttttgtctttgtaaacagacctttaaaaaccatgatcagcaaatctacaatatgttttggtagttgatgatatttagtggaactctttctcttctgtataatatgaggttgaactttttgtgagatttttgggttctttcaaatctttgatttttcatatataaatattataatcatcattaaattttgaattacacataacactataaaaatacttaaagataggaatacaagactgagagagacacactgactggactctctaacaaatacaatcatccatagaacacactgatcaaccttctccattcacatctacacaaaccaaacaaacaaagaagaatctctctcacttgactacaaagttttcactattcagtacttgagatgaactgtaattctcagcagagtttcagctccatctgtggagatttggccaggaggtatgagaggtctgagctcagcaatcccataagcattcttaaacttaccagtcccaccagttactgacaactgtgacaaagtagtaccaatagtataaacaccgaaaaagttaaggttatcattgaactctcctccttccattaaggcagtgaaagccataagctgtttcgacccatctgcagagctggcgacataaacaccctgagcctttccaagttgttgggatcccaactcaggagttgtagtgagtatatcatcaataacagtgattgtcccgaacccaagtcccaaaccatcagcagccaattgactctgtaagttgtttgtgttttggttgttaacatttcccgcgaaagctgttccagccaaccctgttccgagaggaaggccagtgacaccattgacagtaggcatagcaccattggcattggggagagccactgcatcgtctggggttttaaacccgattggctttgcaaaagggacttgactgctgtagatgttgcctagcagtcctgtgaccggccttgctgtcgggttactaccccccaaaatgtcatgcatatacatttcaagaaccggttctccttctccaacaggaacaactgcagccacaagaagaatcggattgtaaacagaaattagtgtcaagaagagtaaagtaatgactgattgtgatttcaacatcttttcggttttgttttatcttaaagctttgtgtgtttttggtttgtagaaaaactaggaatgctttgagtttgtgttggtgagttaagtttctatttctctgtttgtttttatagtaagagattttggtacacatgggggggagtggttgactagacccaaaaaggtggtgaagttgttgtgagctatgctgttaatggagaagttcaagtttgtatttttagcaagttatgatgatgatgatgggtttgttataagtttggatttagatggttctattttatcagttattatctgtaaattaatcaagttgatttcaccagcaccaatacaatgagactagtttctatataatatggtttttgttgatgatgacttcattgtcagctgagattacaacttttttgacttgaacatgttttattcattttatttttatatatatattattttataactatgatatatataacgatggatattttcctggttttttggataataatatagagaaaaacacaaaaggtttgacttttttttgaggataaaatattctgttgttaatcatgtcgttttcactttacacaagtagtttatgagtaaacgacaataaagaaagaaacgacctgttgttgtgttcttaaaaagatggcaatgttgatgaaaacaaacaagttctcctagttcttccctaatgtgttcaatactccaagcacctattcttgaagatccactggtggtgttgcagccttcgtctttcaagttgcgatttaaaggaaaataactaaatttcccaagtgcgactgagcgaatacgacatcttttttcaatcctaatgtcacatgaccttagaacatcaccaacgtatggagaattcgatctgactttggactcgattaattcagcctctcaaatgtaacagtgggattctgaggtattttagatttgtgagctttaggagccatgatctcaaattccaggtcacctagtggaaaagcatagttagtataactccttatagataaagttaaatgagcggttatgagaagttatttgtcattatcttatgtgatgtaaatgtaaaatatgaaatttgtccacgtttcacgaacggtaacaagtgaacggtcacctaaactgttataaataaggacagaatctaatgaacaaaggatgaccaatat

SEQ ID NO: 1506 - DNA, 1627 bp, Cannabis sativa
gtttttcatagagatctaaaggttttaatacactacttttttactgttttttatcaaatctgatcaatttttatatgagtaaaatcttatgcttgttcaatatttttattgacttttcaactatctatatgataaggtacattgttaacatggtatacaataatgcatgatcttttgcagcctgaaaatcttcttttagattcctacggtttccttaaagtttcagattttggtctcagcgcaatttcgcaacaagtacaggtgagtagtagagcatacagtttccacttcttttggagctagataataaatattattggtggggttgggagaggtggagtaagaaattaggataagatcgatattgtcatagaaaaatacatgtttaatttttaggagaagtatatactaattattgaaatggttaatttattaagctagttcagatgatcagtaagcaaagagtcttgaaatatatataaaagagtgtcccactacgtacttagaatagatgcatgtcaaattattaactcacttataagacaacaattatttactttattaattgtcaattaattttgtgtgtaaccttttcaagcacatcttaaggcttattttattttatggccattatatatggctagatattgatcatattgtttatccaaattaattcttgtttacagggagatgggctgcttcatactgcctgtggaaccccaaactatgttgctcctgaggtatcttggacaagtattttaatttaaagacatggattaattttacagcttatatatgtacattgtattatattgaattttgttatatataatgtaatacggtgtgtgaaatacatccatatattgcatatactcatgtatagtatttttataattatgacaggttctcactagtaaaggttatgatggcacatcgtctgatgtttggtcttgtggggttattctctttgtcctcatggctggttacctgccttttgatgagccaaatctcatggctttgtacaaaaaagtaactatactcaatttatataaagatgatggcatatgtgatcacttacgtacatgacacacaagcacacactaatgtattcttactatatccaaatcagatttgcaaggctgaatttggatgtccaccgtggttttcatctggtgcaaagaaactgattaagcgtattcttgatccgaatcctcttacagtgagttcatatacaaaaccctgctcacttctaattacatcatgaagtttatattctaagcattttttttaattggttgcttttcgctaattcatactattctttctttcttttattgggcagagaataacaatttctgaaatcttacaagatgaatggttcaaaaaggggtaccagtcagcacgttttgaaaaggaagaggatgtaaatcttgatgatgtcgatgctgctttcaatgactcgaaggtgaaattttttggtcatatatatgtcattctcttttgttagtttcgtctcttatatatttatctaagataacaaggcattgcatttgcatgtgattttctaaccttctttttttctttccatcttgagacaacacactatttatgcatatatatatatata

SEQ ID NO: 1507 - DNA, 1497 bp, Cannabis sativa
attacatcttatgtttagcggagaaatccatgctcataccattttcttatttttgtttgcttaagatatgtatatttatgttcctttagttttaatatacaatttggatgcaagtgatgtatgctaaagcaaattgtttatccagtggcctgtttaaagggggagcaaaaggttcgcaggccatggtgggcaccgtcatgcctctccgtagtctttgtgaaggtggcaaagcgtaatagacaatcacgggttgtttcgttgaatttggaaccttgatgaaagaaaagatctgcttatctgtatgtattcatatttttcttttttttttttttttacttagagaacagaaaattaggagaactctttgtgttgaatctgtcaagatgactgttggttcttctttgaagaactttggtgtaatctcaagctcgtttatgtatttatttcttggtgattttgctattggatgacactatttgataaagaaaaggcatgaagcaattgagttcccgttgcaatttactttgaacatctctacaagtgattgtatcacatcttatagcaaattgaaaatggactccatatttgttttggcttatacatcttcattttctactacgatcaatgagcatagttgttggtatcggacatataataatgttggtcatctagaaatgtgtttagaaggtcaacagtcttttcaccctcaattttggttaacatttcaaaattgagtcatgtttttgttttgttcttctttgccttttcctccctgtaaaactcatggtagtcatgtcatttgaagtttgataagtttatggttagcagacaatgccacatggatgcttggttaagtagaaagaaaaggggatgttgaggggtatgtacgtgtggccctcaatggagccactttttctcattttctttgttttggttaggggacatgtaccttatggcctggcaaattgagacctgtgctattgtgttggagtaagttagtgattgtgggtgaagtaattggttaatgaaccaaaggatcaatttacctttattcgcctcgaaaatcctctcttttttattacaatggtgtataaattatgaaattattttagttgcttttgtgtttcttcttttaatatacgtgtgttaatttgtgaaggtggacaattgcaattttagagtcctcttttgaaagcttttaactagttcacatcgttttcattaccaaaaacaccatcatcaaaaagggaaattgcttttttttttggccaacacgtcaagacaaaaataaaatgaataaggtgacacgtaatcaacgtccacatggagtttgctttcacttatccagattgaatattatttttaccttttcttccttgtgaatattaaattactgtattttattaaattgtttggtataatatatattttgttaatttggaaccgtgatatgtttttgttaataggagtggctcttctatactactagttttgaaa

SEQ ID NO: 1508 - DNA, 965 bp, Cannabis sativa
ctaaggctgggcgacccattatcatattgtaaacagagcgaagatctactaccaaaaactcttgcatctgagttattgaaaaaggcgagtctcccattgtcaaagggagttctgttgttcctaaacttgcaacactatcccatgtgaaaccacacaagtttatcatgcatgattttagggaaaccttttctaatcccatcttccttagggtatctttgtacaagatatttattgaactcccattattaaccaaggctcatttgattcttttattttcaagttgaacaattattacaagtgggtcaatgtgtgggaattggacatttgatgcatcatcctctaggaaaacaataggaggctcttcaatttttatgcgcttcaacgtctcagacacaaaagtcgaggactgattttttacttggtaagcatatcgcttctggaagtattgcttgttcctgcgaggtgggtacctctagagattaccaagatatcctcgccattaattaactggtggtggctggatgttttgatttggattatggttgttgggtggatcaatatccttatggaatcaacaatacttgttctgatctcgtttattcctcgcatttctcttgggattggtttttgaaaagtggccttatttttgtttgcaagaaatatattttcatgagcttcatttaactcagtataaacagaataaattgggacatacttttcctgtttcttctatatatttttatctttagatgaatccttggattcatcctttctctttccatagcactcattatctttgctctcgtttatgctagttcttacaatgcttgctcccatattgctcaggcttggtttatccttcgagctgctctttagcagtttgagttctaaacaggcctgctccttttggatgtatataagtgctctgtcgttgaactcaattattgtccttactggataccttt

SEQ ID NO: 1509 - DNA, 4417 bp, Cannabis sativa
  modified_base (3701)..(3701): a, c, t, g, unknown or other
taaaaaagataattattctataaagatatagataggtatagatatgtcacgttacccttcaattttattcttttaatggaacctttcaaaaatgttaattattcttttttttttaaaaaaaaaaaatatacgtgaacttattttagtactaaaggccaaacgaagagctctcctcgtctctcctattcttttccccaatttctcttcccctttgggagctcagctcagatccgagatctttaggctaatcaagctagggtttgatctcttctcatatcacgtcttcaaccttgtaagcccaatttatccctcctattatctcattcattatttgtctttttcttctatcttgtttgtgttaatttttccagatctattagattttcaaaattttccagacctttttaacgttatatgtaattgcaagcttttgtatcgattgggtttcgtgaaatatgttatgatttcaaattgaatgctgggatagatagctggatttttcaaacttgttttttcattgggaaagtttttacatttgggctagattcattgtcgtacgtatgatttgaattgactgctatcacactggttagttcacactgtatgattttgtacgtatgataaaaatcaataataaaaactgggttatccttttctgtacaaaaattcctcatgttctggaccatggatcttggatgtgattgattttgtattcaaattttggttgtattatgcagattggtttagcttagttttggcagaaacaagataagatgggaggtggttttcgtgtcctccatctggtgaggcctttcctcgcttttcttcctgaagtgcagagcgctgaccgaaagattccattcagagagaaggtgctatacaccgttgtagcgcttttcgtctttctggtgtgcagtcaattgcctctttatggcattcactctacaacaggatcggatcccttctattggatgagagtcattcttgcttccaacagggggactgttatggagctcggaatcacaccgattgtgacatcagggcttgtgatgcaacttctcgctggttcaaagatcattgaagttgacaacaatgtccgggaggatcgggctctcttgtatgtagccgttatcaattgcataaatttgtcaatttcttaaatatattcaatatatgaatattggaaaatccctttgttgcttgttagattataagaatggttttaattattcttcgcagaaacggagcacaaaagctattgggaatccttatagctattggtgaggctgttgcctatgtttgctctggcatgtatggaagtgttgaccaactcggagttggaaatgctatccttattatccttcagctcttctttgctgggatcattgttatatgcttggatgaactgcttcagaagggatacggattaggttctggaatttctcttttcattgcaaccaatatttggtgagttttattcttctaagcttatctccctttggatagatcgatggtattagcagtatgttactagcaaccatatctcattcttttgacctgctatgatttttcagcgaaaatataatatggaaggcattcagcccgaccaccattaacagcggccgtggagctgagtttgaaggtgctgttattgctctgttccatctactgataaccagaacagacaaagttcgtgctctgcgcgaagctttttaccggcaaaatctccccaatgttacgaatctcctcgctactgtcctgatcttcctgattgttatctacttccaagggttccgtgttgtcctccctgtgaggtcaaagaatgcccgtggacaacaaggatcttatcctatcaaattgttctacacctcaaacatgccaatcattctgcaatctgcacttgtttccaacctttattttatctctcaggtgattgattttgatatttaaatggacagattagatagttttatttttttgctttaccaatcttaaccttttattttcttttattatacagttactctacaggaggtacagtggaaactttctggtaaatcttttgggcatatggaaggagtctgagtattcaggtggtcagtatgtccccgttggcggtatagcttattatatcaccgcaccttcaaggtaacaaaagaatttttctcttgtttcaacaatcttgaaatttaattgatttcaaatacacactgaagatttttattcatttgtgcagcttagcagatatggctgcaaatccttttcatgcattgttctatctggtttttatgctatctgcctgtgcccttttctccaaaacatggattgaagtgtctggatcttctgccagagatgttgccaagcaacttaaggtataataaactcaagtcaattaacatgtatttttttttaaaaaaaataaaatggggtacacaatttctgaaatgcagtagaaagtgtgttttacatatcatctttggcttaattgcaggaacaacaaatggtgatgcccggacaccgtgaatcaaacttgcagaaggagttgaaccgctacatacctactgctgcagcatttggtggcatgtgcattggcgcattgacagtgttggcagatttcatgggggcaattggttctggaaccggaattctgcttgccgtgactattatttaccaatacttcgagacttttgagaaggagagagccagtgagcttggcttctttggtttctaaacttaatcaccttaaggagctaaaaatggcgccaaagctgccttcatcacaattttggtgtgtaatatatgtagctagatcctgttaacaccaaaaggctcgagttctatatggctagttaggtatttttcaaaattttccaaagttttttattttgtttcattttattagtgtatcttagcccttgtggctccacacttgtgaaaagtttagttatttataacggattttacgaggagtttaattttcaagaatatgttatacctacctatagcttggggttaccatttagtaaatagtattaagaaaaaataaataattttgttcaaaagaatggtagtctttacacctgagcaaatgacctatttataggtttacataatagcatgacttggggtttcctaatccaatacccgtcccacttctctaaactagatttaagttagtttaaacataaaataatactctagaatatcccgtaagtagccttggtgacatgtgagtctagctaccacgcctagtgtaggtggttaagcactagggttagccttgttgccagtcaccgagagtcggccctattgctcgtcatgaagggttggccttgtggctggctgtggagggttggcccatgtggcttgtcacatacggttgatcttatctcgtaatggaggcgtgtcttgtcacagaggcatgtcttgtcatgggcgcatgtctcgtcacaaaggtgtacgtcatgagggtcagtcgtgtctttggacatgcagggtcgaccctactggtcggtgatgctcatcagagtttgaattaaagaataattttaaaaaatcacaaaaacaacaaaaaaaatattacaaaaatatagagaatttttaacatttttacggttatttagattttatttacataaaatatgattttttttatatatttttatgttgtactacggttattttgttgttgattttttgtnatttgtatattatttttgatgttgttttcttgttgttttcttgttactttcatatagtccttttgttgttctcttgtatttttataaaataccatgtaaaaaaaaaactttgaacataaaaatataatttttgtttttacaaaaatgagtattttatataattatcccttgaattaaatcctttggaggtgtaggccatgttgatggaaaaacttttgttgagtgaggagtatagcttatatttaatgggttacctatgaatgggtagtattaggaaaaattcaatttttatgcttaattttttggggttttttttttttttttttttttttttgatagtaattagtacctcctacacttttttctttagaagttcaaaattcgaatttaatagtcttcaatttaaaaatatatatatatatattatatatatgttaatcgagaatgtatcctaagatattaagattttcaagtaaaaataaaaaactattacattaaaatcaacatatatatatattttctgataatgataagtatacatatagtaaattatacataaatttcacacggacaatgcttatttagtaaataatattcaaccactcatttttattacagatggatcttacttgttaaaaaagacctatcataaaaaagtgtatgtattttatacgtgcaaatatcattacttataataatagcatatatataattat

SEQ ID NO: 1510 - DNA, 1285 bp, Cannabis sativa
aacagtccttcacaaccatataaataaaataataattgaaaaatcttcacaaattttaagcaattctctctctcattctagttttatgtttgtagaaggaaaacacgttatattttcaatctaaaattaattgattaaggcctgctcaaatgccccacaagataacgaatcaagaccacgcaaagagatgagcctcaaaaccatctctgatataggatatctacgctcgaaattgaatgtctccggatccaaaagggcaccttgcccaaatatagaagaagtgatagcgatttttcggatgagcatttaggataaatccggaaggactttcaaagagacaccccgaaagccaaattgaagctgacgtatcgatcctttgacattgaatcccaacatattaaggggtacttgtcccctatgtcaagtgcgcataccaccaaaaaaaacatccttttgtcctacgactactattctgacactacagtatgcaaagacccaaaaattcaattggatctaatcggatagtggacgaggtgtccaaaaatccactgactattgatctcttttaagagttatctttatggtttgtcatcattcttggaataattttcactattctatgatgacaaaactctaatcttagagatcaaacaatttccttaaggtttaccattaaaactcttttagcattttacacagtaatatgcatatggaaaggatgttttgatctcttctcttttctgatgattctaatttaatattgcatcaaagttttaaatatcatttatgaaaaatatcaaacatattgtatagtcttttatgctaaaataattttctcaagtcatttgacttatcttggaaaaatatgttttatcttgtaatctttaagccttaaggtctaatcatgtaaatgtttagaccatagtcctttagactatagtttgtcattgctagtattttttaagtagcagtgagccaggtattatgcaaatcctcccactacttcaaaatactatgaccttgaaggagatctcttagctcttttcaataaatatgagattacttaaacatcttattcgattgtaaataatgactgagaattcatggaagaattctaatggttaatgaaagttgataatcatcctccaacccttatcactttagaattactagagaaatgatatctttagtttttctaaggatattggtgaggaatatactttaaatttcaaaattttatatatcttgcttattataattttgtattgatatgtctgaggtgata

SEQ ID NO: 1511 - DNA, 1990 bp, Cannabis sativa
tgaccattagaactatctactaaactaccttcttcaacttgtgtcacaactaatctcttctgtgatcttaacatgtgaattctacaaggagcaactagctcatgattgtgtttttcctcgaagtgagtaatcctatatttaccatcagactgtctagaaatgaccaactgcgccgaacatcctattctagtttcctttcgaggcctcttcacgttcatatcgcgtttgtctctctgcctaaaaccttctctgaagcaagtaaatcttctagatgccacagcaccatctatcttactcctatttacataatctttcctaacactgaagcctactcgtccagcatatgtattgtaaaactcatatgcttgatcttctgagttaaaccccattccaagctttggtacaccatctatcacacaatgattagataactcatcctcaactgcttgagcaaaagtcaacctcttctgtgatggtaacatgtgagttgttgaagagttaacaaactcatgattgtgcttcgtttcaaaatgagtgacacggaacttgtcattggtttggcgtgctatagtcatatgtgctaaacagccagttctagtctcctgccgtggtttcctggcattactattcggcctgacgggccgatagccttgcctataacaagtgtatcttctggaaaccactgcaccatctatcctacttttgtttacaaaatcttttctgatactgaaaccttccaaaacagcatatctactataacatttgtaagcatggtcttctgattcaaactcaatcccaacatctggaaccaaatataagtcttcttcctcatccttaacaccactgccagattctgataaatccaccgaggaagactcaaaacgactataatcaacatccatttcacactcattaacagaagataattttggggtttgacattcctcaccatcaatgtcaacagatgaaacatttgggctctggttctcatcatgttcaccatcattaaccactctattctttacaacattcttcaggctttcacctccttcactctgaccacaaaaaccagcaataaccacctgactcatatcagaagaagaacctcttggactctgacacctctctttattttcttcattagagtccattgaccttcattgaataaatggtcaagaaatgagacaaaacccattaacaggaatcctatatggagcataatttacataacattcattgacttatattgaattaaaaaccgagctaataatataattgaagctttaactcaactgaatcaaccacaaccaacaactcaaccaatacagaacattttaatgaaaagaaaaaaactttacggtgtagcaatgagcaatgaagcaaaatttcaactgggtttatctcaaattatcaaaaaaaaaaaaggtcaattaaacaaaaatgttccttttaccggaaataagttagaattgtgaaagaaaagtttaagcaaaggagaagaattcgatgttgggtaaagaatgaaatgaacggacctgatctttttgatcttggtaaatggttggtcggcagtgtagtgagagagagcaaccggaagaattgtagagattagggcttttctgtccgcttcgttcggttactgaaaagggcaaaacaataatgaagagaacgagggtaaagagacctagcagacgtggccttctatttgttttgatttttacttttgacgtggcaacttttcatttgccaatcaacccttcattgcacatgttaggtgatttctatactgcatgtagactcataggcatattcttttgtaaaaattaagaaaaagatagaaaaataaaatttttcttaataagggtgtttttttgacgcccaaacaattataaagatactctattaagattcatataggtgaaaattagtgggttatggtcagttttttataattttataactgattaatcggttacggtttttattttac

SEQ ID NO: 1512 - DNA, 2203 bp, Cannabis sativa
aacacgtggtaagcatcagtattatattgactccactatcaattggccaaatctgaggtcaataatgagtttgagatgaaagaactaggtgcagcgaaaagaattcttagcattgagattatcaggaacaagccacatacaatcactctaacttaggaaggctatctcaataaagtgattgagaagtttggcacaaaggatgccaaacctatttctacaccactagcacctcactttaaactacaacaagaacaatctcccaaaataaaagctgaaatggtaaaaatggagaaatttccatgtgctagttatggtctatacaagaccagaccttgctcattgtatgagtgtagttagtagatacattgtcaatccaagagatcattgttggactggactcaagtggatgttaagttatgtcaaagggactttgagcacaagtctggtatatggaggaaaaacagatcaaaatgaagaggaagtaattggatttgtggactcagattatgctacaaatttagacacaaggaaaacactaactggttatatgtttacagctctaggaggttgtgtaagttgaaaatccaacttgcaaaaggttgtagtactctcatcaactgaggcagaatattggctacatcagaagctattaaagaggctatatggatcaaaagtttaacaaaagaaataggtttcaactcagacaacatcacagtacactgtgataatcaaagtgcattagatttgattaaaaatctcataatccatgagagatccaagcatataaacataaagttacactaccagggatgttattgttgtcaagatagctggtgtgaggaggattagtacacatgtcaatccaactgacatatttaccaaactagatacaagggaaaattttaggctatgcctatattgaagatagaaggaaataaaagcctctatttagaagcactcaatgattcatggagtgaccaactttttattttgttaatttttgtagtttttcttagttttatagttttatcaagtgactaaaataggtagaattgtgagagattttagacacttggctaagagataactaacttactgtcaaaatagttagttagctggttagttagcttggtttttccacccttttggagcccacatatgagtcgcgtcttttgttcttagctctaagtgatgatctagagagagaatttgagaagaaaatgacgagcgaggagagatgtacaagaattgtgtgtgtttgattacaacatcctgcgagttaattgtaggtgtaagacaacattactaaattaatatctaaagatcattattgtaactttgagtaacaatatttttcaataaagattggtcacaaggtggttcttcctggagattagatccaagtagtaatcgtttgagattgaacctcgttaaattagttgtcttctgttatttatgctacaacaatcttttatagcattcttctgttgttttagttaatttctaatttctttaattgctattaattttgtttattccacattaatattaaaactaacatgttcttgaaatgtgaatattttcaacatatttgaaataaattaactatattaaaaaataaaaaatatatataaaaacaaaaaattaattattgtaaaagaaaaggttattttgtcattattcataccttagttatgtacatggacagaatcactcttattcaaatcttattagcataataaattgatgagacaaatattgaaacttactaaatattttttagatgaattcgtaatcaaatatgtaatcacacgtttctttctagtatcaacacaatggcttattaatgcgatattccatagctatattttgcattttcacactatagtcaatattttatgactttgaatagtagtattattgttagtgggcattaaagttttttttttttttagtggggttatcttatcatcattttcacaaacaaaatccattgtggatctaaaaacgaaacataaatattaatataattagtggctacttttttactattttcttacacaatatattaaatgaacggttatagaagctaatcaatcaagggccggttccaatctcagatatgttcacaacaagttgccattagataccttttccaattaaaaaagaaaggtagtttaaattaagggtaagttgaaaaatg

SEQ ID NO: 1513 - DNA, 2392 bp, Cannabis sativa
tcattcttctctattttttatctttctccttcaattatatattgtaatttttaactactcaaacaaaagcatcaccttattatcttcgaggacaccattattatattaaaagcaaagcttaataaaataaaagttaaattcatgggttaataattaattagtatccgttcattattgtgttgttcagtcttttcttttttgaaatgagaatggttctaagttctaacatatagattcctaacatctataatcaagtgccaaaaacgacacaacaaattgatggttcttctttcttgccttttcaattcattgtcgtttacataaacatgtcgtttgtttagcttccaaccaccacaccacaccacaccacaatcattatcatttttcttagaacaaacttcatactaatgagtgctgactttgtggctttagtacccaaaacaaggcacttcctcacaaaacaactcaaaattatcattgcttctaaatccctcccaagaactaaattactccatgcccagaccattacattgggtttgttgtcctcttctttcacatcaaattttgctaagtcttatgctttgtgtggtcatgttgtttatgcccgcaaactgttcgatgaattgtctgaccgaagctctttgttgtttaacgttgtcataagaatgtatactcaaaagggtatgtactatgatgctcttaaagtgtttggtgagatgattactgttggagagtgtgttcctgataactttacttacccttttgttgctaaagtatgtggcgagttgtcgttgctcgaggttggtttcgttgttcatggacgggcattggttgctggttatgagtcagattcttatgtccaaaacacccttgtagcaatgtacatgaattgtggggatacagaaacagctcaaaggactttcatggcgatgaaggaacgaacggtggtgtcttggaataccatgattagtgggaattttcgtaatggatttgctgaggaagcattggttatctttgaatggatgttgaatgagggtgttgagcctgattgtgccactgttgtttcagtgttgccagcttgtagttgcactaaaaatttggttttgggaagaaaagttcatgcctttgtggaagagaagggattggagaagaagaatataacaacatccaatgctttagtggatatgtatgcaaaatgtggtgaaatgagtgaagcaagattagtttttgataagattagtaagagggatgttgtgacatggacaagtatgatcaatggctacattttgaatggtgatttaagaagtgggttggaactttttgtactgatgcacaatgaaggagtaaaacccaatgctgtgactatagcttctcttctttcagcttgtgctactctgtctttttcgagacatggccggtctttgcacggttgggcattgaggcagaaacttgagtctgatgtaattgtagagactgccttgattgacatgtatgcaaaatgtaagtatgtaaatcacagctttcaggtttttgcaaagacttcaagaaagaaaatggttccatggagtgccattatctctggatttagttacaatgggctagctagagaagcaattgagcttttcaaacagatgagaatggaaggtgtacaaacacatgaggcaacactgaatggtcttcttccagcatactcgattctagcagattttcgtcaagcaatgaatatacattcttaccttattcgagctggttttctttcaagcattgaagttgccactagtttgattgatgtgtattcaaaagcagggagtttagaatcttctcacaagatgtttagcgaaatccccgcgaaggagaaggacataatcgcatggagcgctataattgcagggtgtggaatgcacggccaaggtgaaattgctgtctcatttttcaatcagatggttcaatctggtgtgagaccaaatgaagtcactttcacttctgttttgcatgcttgtagtcatgccgggttggttgatgaagggctgcacttgttcaaatccatgtttgaaactaaactagtgaaaccgaacaccgatcattacacatgtatcgttgatcttcttggtcgttcgggtcgattagaagaggcttatgatctaatcgaaagtatgacattcatgcctaaccatgctatatggggtgcattgcttggtgcttgtgttatacatgagaatgttgaaattggagagatagctgcaaagtggttgtttgagcttgaacccgaaaatacaggaaattatgtactaatggcgaaaatttattctgcattaggtaggtggaaggatgcagaaaacttgagactaattatgagtgagattggtttaagaaaatcaccagctcatagttt

SEQ ID NO: 1514 - DNA, 2423 bp, Cannabis sativa
atcactaatattttgtcatttgtataagtagcttcaatcacacctaacatgtccaaaatagaatttttaaagaaatataaagtctaaacttaaattattaaaatacatagtataaatcctatgtgtagttttattttacacaagtacacaaaaaatacaaaattcatttaaataaaaaatatattttataattaaattatttattttcaagatgaaacagttgaatgtgttaaaaataatatgtttacttaaagtatagaataaataagatattttccttgtgacccttgagagttttgtcttaaaaaaaatctcataaaccaaaaattattgcaaatattttcattcagttgcattctttgttaatatttcaaacaatttgcttatgtaagagtcgcatgtatagttgaacttaagctacttgaaatttaatttattgaggataaccatacaaatatctctatgaaatatatatttacataattcattattagactattatttatttatgtattttttatttggacctttgaactgcctacttagcatcacaagatagttctacatcaacaaattattttaaaaaatgaacaaaatgtaattggggacatttgcaatagttttttagtttgggagaagttttatatatataaatagtaaaactttagaagtgtcatagtttcgagagggggcaaaaaaccctatttattttgacatgagaaatttgcggcaaaaatacttattttgttgtatttgttgttaccaaatacccaaaacctaaaaattacaacaaaagtactcaaaacttgatattttgttattttcgttagtatctttctaatagttttgttattgttttcagaatactacgtgtcaagcattaattggtctaattaactttttttatattaaaaattataaggtactaaaaattaataattaaattaaattaactttcaaaaaaataattaatactaaaaatttaaaactttaatttattttagttctttctctctctctgataaccagtctaatggtggaccttgctagatctttttagattacggtacgatctgtgcaagcagagggtgctcaaatcttcgacgaaattctttgatggacaaaggtttttcatatcttcaatgtagtggagtttcttggcagaccagaatgaaagagctggtggaggtgctcgaatgttcttagctattgatttactttttgttcctcatcttccccatttttatgggttttttttttgtagatttgtgttcaccgtatttttttctccattttctaggatttttttttgggttttaacatatgtgttttcatatgtatatgttttttattttgtcatatagagagcgatagagaaagaaagggagagagagatttttttaaaagaaaagtcaaagttttaattttgtttattattttaagaaaataatttttgaatcagttgttaatcaacaaagattcatggttggtgtatagactttggattgattcctatattgacgaatcagtagttacaaaaaatgaattatgagatcagtttggcatttggtccactgactagaatgtcatatacatacacaaggaagataactaagtttcgttgtacttgtaacaacaatatgtggttcaatttcactaggtggaggggagtgtgtttgaggtacaataggtggtgcattgttgggtaaagcactagcgagatttgtggtttgtgattggtcatttgtccttgaaggggaccgtgttataggttcgtaacagggttactgttcgggttgcaggagatggaatatagtctagtatggggttttaaatagtgataagtggagatggttagctagttgcagaagaggatggagtagggatggtatttgtgacaggaagatgagtattgtgtattgtttgctcaatgaaaaatgaaccagcaaggaacatatgtgttagatggtacattattgaactgggaaaaataaaagacaatagtaggagaactagagacattgttagatggttcttgtggcgatgttgatgaagtagtaacaagaaatgtattttcatcaaaaatcacatttcttgcattgagtagtctctcttgtgaattttcacacaagtaacccttgtgtatggaagaatagcccaagaatgtacactgttgtgacctgaactccatcttgtgcttgttgtagggccttaagtgagggtagcaagcacacccaaatggttttagtatagtgtagtctggtatttgtcctagtaaacactttgggggagattgttggttcaaaacctgagttggtaacctgttgatcaagaagactgttgtgtggaaggcatgccaccaataagtgaagtccaaacctcattgtgctagaatactgagtctcatttcagttatatgctta

SEQ ID NO: 1515 - DNA, 1131 bp, Cannabis sativa
aaaaaaaaaaaagaatacaaatttgatgatgagttcctaatcccatttccaattcaatatgcatattgcataaaaattaaatatatattctcattgtccattgatacaatattcggatgagaggagagcttaataaagaatttgttagtatattgtaaaaatgaataccgtaaaatttagtattgaaacagtacatgcattggctatgtacgtatgtgcgtatatatatttacactatagtacgtacgtagtagtattattcgaaaaaattgttcctacaagctcataatactagctactactttcttatttatgtatgtttgggtcctatatttttgaaataatttaaaactaaatgcacgcaagggttacaaatagttaaattaaaaaaaactatagaacgaataataatgacgaacatagtatctattataattaagacgtaaggttgtatacataaattaaaatagacataactttctaaccattgaataatatatatactataccaaagctagaattaatatgaatgaaagcctagccttccccaacacgtcttgatctttttgagtcttttcttaataatatccttatcatattagtctatatatacacaaaaagagaatattaaataataataaccttttaaaaaaaatatgtactatacttgtatataaatcatgatgttttattaatatatatatatagatatttacataacactactctgatcagagacactctgcaaattgctgaacgcactaaacattgcgtaaccatagaaagagatggaagctacttataaactaaacgacactataaattaattaagaaggtgatgaattaaataaagaaataaataacaagtaaatattatctggtgggagtcatctgcatttaatttttaaggaaaacatatataggagaggtgcaccaatgattagctattagacaaagacagcttgagtctgtctgatgtggcatgcacgtgtcagaaccttataggatccaaatgggaaagggcggcgcaccaaccagacaagaggagctggattgtgggaagagctattgagagaaattaaatttataatgtcatatttttattattagctagtaagacacacacaaata

SEQ ID NO: 1516 - DNA, 2429 bp, Cannabis sativa
aaattaatagtagtctgcgtgcggtttttattgttgcactctcaaataagttgagaattgaatatatgggatgataagattaatttctgattctaactgcaggaacaatgagtgccctgcttgccgcacacattgtgctagtcgtcgctctttgagagatgatcccaactatgatgccttaatttcagctttatatccagatattgacaaatatgaggaagaggtatagttagttagattgactcgtagcagttagcttggaacagtttcctctattgtttttataagtcaagttctcagtgttttgtatgatcttcccaggagttagcatttcatgaagaggagaaagctcgcaataagcaggtgagattctcctttaccattcctaatttttgttttaaatgactatgaaattgtcaagttatggtgcatgaatttgatctgtttccgtcttttaaaagtagtctcggtttttaggatgtggttattttggaatgaactagagcagaataattagcccgatcttgttgagttgttggctctattatgagtggttaatggtttgccatttgaaggccttaatctttgagtccatgtgtgcagatacaagcaaccattgcccaaaccttacggcgtcaatcagaagctcttggtagaaaaaaaactaatgctaaatctacagctgctgcatttgtgaggagatcacagggtagctatcgaaatttgagaggaagaagaaactctcgaactgctgcagaaaatcaagaatcggatgataatgaggatgcaaatggtaatgatggaagcaaagattcatcatctgccgatgaacgaacagagcatagaccgaaaaggtccaagagatggggaggaggccgatattcgcagtcttcttcagcagctgctggtgcagatgggggcggtgatgagaatgattctgaagtgaacagagaaatcattggcgcgtcctacagttttgttggaagctcggaaagacttgcatggggaaaaggtggcatgcgtagtcacacacgacatggaagtaacactagtggcaatggtaaaaataccaggaacatccgtctttcaaagttgggggattatctcagaaattcagaagaaagtaatgatgaggtaagtaagaattttaaggtatataaagtggatttttgatgatgagaataatatcgattgcttttgcaaaaatttacagacaaatgaccatcatgctctattttagctaatgctgctgagcactggttcattagggaaaacggacatgcatatacatgcacacatctatgattttattttctttctcttctagtgggaatcttgttttcttttgcagtgaaaaacttggttcaattatgtcttcttgttattttcagctcgacatccacctcgtgcttgtttctattgatgaagataaaattccaagcttgcagcgaccatacctttgctgtaggcctactttgtcagttagacacctatccgaggtgatttatattccttccaattgctttttatattttttgttttcaattgtcgtgttaaaattgcttctcttttccatgcagtatgttgctcttcaaactgcattgaaagctgatgaagttgagatatacttggcaaagcagcatgatgaaaaattcgatccatcaatcttagcaaaaatttcagttttaaagtctaacatatcagaatccaaggaaaagctacaagttttaagagaagaagaaacattggcagaacttaaaattcatagctttacttgtggatatatggtaagctgataggtgttgtttgactatcaacataataaactatttaaaacactgtcttcatctctttctttgccgtattattttgcagcttcttgcttatcagaagaagtggagctcaaagtggcagtcctgacaattattctgctacctttataatttagcccaaaaaagaaaacaaaaaaagtctcacccttttcttacaaaaggtaaatataaaattcatactggctgtgaaggttgtcaggtaggaagtgcagtattatttatagcttaagcactctaaaacatgtcatattgaatagaagaaacatatgcttgatttgagtagcttgtccctattgaaaacacattctagaactctaggaaatgggctttctggtctccaatttgttactcaaattttatgtagattatgattttccttgaatctcattttaaatcctcacttgggttgaaattgcattagaaatatgattgcttgtgtttcagctttgttacttgacattatttttgttattattattatgttctgctggctcatgtggagttggggatactagctggatttaaaacagattagacaatatgagacgtgtgagagggtggaaatatggtttctatattggtatgcaataaaaaagg

SEQ ID NO: 1517 - DNA, 2382 bp, Cannabis sativa
ataaaagcagtttttagtattatttgtagtttgttaatgttaatgttaatgtgttttttgtataataacaaaattttaatctttacatagttccacacaaagtaacatttagaaatatatgaaacatgacattttgttctttgggtttaagtaatatactaccttttcttttggtaggtatatgaaaattttagattatattaaacctttcaatacagtaaaaaaaaacataacagttaccccagtgatttgaaaaagtcacagaaggggcctcccttaaggtcactttctaaaagagacatgcaaacttgtaatcgacctaaatgagatgcccttggacatcgtcaaacaagtttataagagacaaggttaccataataagttcattaggcgaaaaagacataagctagccataaaaaaggattccttgaactccttacatatgtcatatcacaagtctgagacattcgtaaagaggtcaggtccaccatgaaagagtctcctaaaaaacccaaatccaagcacccaataaaaaggaatcccacaagcacttcccatttatatatttgaagttctcaggatatcaaatcagatcataaaataggagccctccaactgccttggtgaggtgtgtggaaaaaacacccaaaggcaggggtaattgatgtgttgggaaaatgtagtatatagtgggattttgggagactatctcatgtgttgaccttgtattattaagttcttagaaataataaaactaaatcaatttcatagaaacgcgttcgaagtttttctatgtatgtaaaaaactatgagagacgtgataaaatgaattttccatatatttttcctacaaattcgctattctattgaagtgaatgactttaagaacactcttgatagggttaaaagcgagatcaaagaaactctaggagttagagacctagttgcaattattaagtacttggggcttcccttatttcggtccaaacagaaggatgttgacttcaactttattttggataacctgaccgctaagtttcagggttggaaagcaaaatctctctcgaaagttgggcaggctactcttattaagtctgcgggtctatccatgccaagttatgccatgcaaactatcaaactcttgaattgtctcgttcataatattgatggcatggtttgggacttatggtagggttttgtgaaaggtaaccatgggatgcattttaaggcttgggataaactgtgtcttcccaaatcccgtggagggctgggttttcagaaaactaaggaaatgaatcaggcttatctggctaagtgagggtggaacctgttaatcgggagtcaatctctttgctgcaggatattggaagcaaagtacctgaaaggaaaagattaccttatctgcaagtacaaagactcttattggttttggaagaatgtgatgaaagccaaagatattttgagaacagggcgtgtaaaataatcgcggatggaaatgataagagaatttgggagaatccctggatctcccatggcaaggagttccatcctaaggcaaatgatgctagagttacaattataacagaatggttaatttccttctagattatggggattggggtattcaaaaattgaattatccttttgataaagaatccgtttcagccatcctgaaaggaggtagaccctctggtcagggtatggataggtggatttggacaaaggagagtaatggacgtttcttgtgtaaatcagcttatctcatcaaagctttataaatggctcctcattatgatgtagctccattcctctggaacaaaccgtggaataataacatattggaatgccataagataatgtggtggtgtatactatctaaggccctccctgttcgcgctattctttctaagagattccatttagaggatgtaacctgccccttatgtgggggtggtgaggaaactttggagcacttatttctcacttgtaattgggcgtttcatttgtggtggtcgttcccgtggggtatttttcccatttctaattcaggcattcgtttgtgggattaagtcaaattcatctgggaactaggaaaataaggcattaatacagatgaagtctttctttatgcttcgattgttgtcgatacaatttggcagacgtggaatgacaaggtacataataaaagtctgatcaatgttaatcagtgtattgactatatttattactcttatgcagatcactgtgcttctattttccccacttcatccccgtgtctggtagcaggttggcttcctccctctcttgagtgagttaagctaaactgtgatgttaaagtgaggatgggaagcatgtacattgcagttgtggctaaaaaaaatc

SEQ ID NO: 1518 - DNA, 2054 bp, Cannabis sativa
tctgtcctggaatatctgctagcatatttgatgagcttacagaatgtaatgctgctctctcgcagcaacggaaaaagcggcaggtacagtctcatgtttaaaggttactttggtttgagattttataagctctctcttaaatcgtcagttttattcctatatttggtcttaaatgggatccaattcacggatggaatctttccttttcattatttattatttgagatatatttttaattttaattttcaattgttggtttttgatttggcttacttagataccatcaacattggctcctattgatgatctagagaggtatactcagatatctagtcatccacttcagaaaacaagtaaaccaggcattgcatctattgatatacatcataacaaggtatggggtttgttgcatttgttagtttcaagcaaatttgttttacgtggacaattgaggcagatagtacatatatgttatttgaatctcatttagttctctgattgatgaaagcttttaattttattttgcactttttctatcaggacatcattgcaactgggggttttgatacaaatgctgttatattcaatcgatcttcaggggaaatcttatctactcttagtggtcactcaaagaaggtttatttttattttaagtatattctattgtttgatgctttatatatatgtataggtttatttttttttatcttgttttctccttataatttttatatttgttctttttgttttaacttttttttattaaaccttataaatagttaattgcttctttggtaggttacaagtgtaaaatttgtaggacgtgatgacttattcttgagtagttcagcagacaaggtaagctacattcatccttttcacctcaactttggatgtcagtgggtccctactgtctttatgttctttacaattttttaaattcttatttggtctggagtatgatattttgatgtcacttgtcagaagtattaggatttagacttgcaaacttagaagtcgggatttcttgttacttttaccatttatcttaaaagagaaaaagatggtttcaacaaagaaaattacttaatgataatttcaatatttatgtacaattcctgtaggagtttcctagaatccttcaattttctctgaaagctgttttacattcctcgcatttccttaaagtatagtttctataattttgggtagaaattgacattaaattatacgtacttgatgttgcagacagtacggatatggcaagggtccgatgatggaaactataattgcaaccacgttttgaaagatcataatgctgaggtaaattggtttcaaattatgcaacacacgcagacacaagaaagtttgaatttacactcaatgacctatcctggctaccaagtctgttgcactgtgtagagaagtattagaaatgatctttagaaaatgcttgtgacccctaaaaggtttcatacatggtgactttcgaatggggatggagcaacagtgagcagttgatcctcctaacctttcgctttgcacttacatacacaacaataatattttcccttttaatggatggccaagtaatggaagtaattaaattaaattgtcaataacagggccctacctattatgaaattcggtgtgtgaaattgcttatggaattgcattaagcttttctgaaaaatctggctttattaatgcgtatagtgcagtaaagatttttacttaggttgaactaacgattctatggggtatatctagtgccattggtgaccgatatttacttattggcgggcttccatgcctctggtttgttttctttagttttttatcctgctaaaatttggagtttcgtttgtttttcctgtttaatagtgttttgatttcaggtgcaagcagttacagttcatgccacaaataattattttgtgactgcttctcttgacaacacatggtgcttttatgagttttcttctggattgtgcctcactcaggttttaatctgaatctctcttctgaccattgcaaacgttatagactatca

SEQ ID NO: 1519 - DNA, 2306 bp, Cannabis sativa
ctctctctctctctctccttatttattgtttatgccatgttctataactatgtttgtactctacatgttaaataagaatagatatataaatgaacttactaatatatatatatatatacatgttatcatagtctatatatacagttataaagatttgatatctgggtcacctaatatgggggtcttcttgttgttcagaaagaaataatgggcaatctattatgctgtataaaagttgatcagtcaacagttgctgtcaaagaaagatttggcaagtttactgaagtgcttgagccaggatgccattgtctaccatggattttgggctctcaactcgctggtcatctctctcttcggctacaacagttagatgttcgttgcgagaccaaaacaaaggttccattatcatcttcatccatgtctgaaatttccattttcttaagctgcaagcaacatcataccaaattagtaccttttaatattttgttgtgtaggataatgtgtttgtcaacgttgttgcatctgtacaataccgggttatcattgacaaggctagtgaagcttactacaaactcagtaatccccggactcaaatccaagcctatgtttttgatggtatgtatggcttttcaaaatttctattacagacaagattttaatttgtttaaatgttcaagaacaagtgttcaatgactaggttttactttgattgttcagtgatcagagctagtgttcctaagctgaacttggatgatgtttttgagcaaaagaatgaaatcgctagagctgtggaagatgagcttgaaaaggtaaaacatttatcagtatgaagaaaagtctaaaacattttcttataataattcatttttgatgattaaacaggctatgtgtgcttatggatatgaaatagttcagacactcattattgatatcgaaccagatgaacatgtcaaacgatcaatgaatgaaatcaatgcaggtaaaacacttaaccttgaatattcttgacaagttttaagagagaatttattgacctggtaaactgtatctttgtctgttagctgcaaggatgaggttggcgactaatgagagagccgaagcagagaaaatcatacagattaagcgagcagagggcgaggctgaatccaagtatctgtctggtgtaggcatagctaggcagcgacaggcgatcgttgatggcctgagagagagcgtggttggtttctccctcaacgtgccgggaaccactgccaaagatgtgttggacatggtccttctaacacagtattttgacaccatgaaagaaattggagccacctcaaagtcttcaacagtgttcatcccccatggaccaggcgtcgtgagagacgtggccactcagattcgagatgggctgcttcaggcaacctcaacctcatctcctcacagtcactcttgaggaatcgatgtacaaaatgtttgtgctgaataagttggcctacttgctaagatttatttagcaaagctctcatcatagactacattatggtgactgaaataggtcgaacaacataccatatactaaaagaatttcttgcttgttttacttattttgtccataactgaatttttgccaaaaaatgaaaaagaaaaaacaaagaacacaaggcatagggaatataaatagccatcaaaattggaaatgaagctcaactcaaaaccccctccataactggtttcatcaccctctttcaggagtgtgtcaataggagtaatagttcaaaacggtctatgacaccaagaacatttattttttacaacaagaaaaaaggaaaccgccaagaaattaataatgtaccataaagacttgtttcaaggaggaagaaaaaaacagaatccacaatttgaattaaagagaagtcagtctgaaatctgaacggactactatgctaagctcctcaatggtgaaccctaccatggtgaccaattggaaataactcactcatggcttgagaaccaaagccaatccaaccttagcactcttttcaatggccttggtgtctacatccccagaaatggtgaagaatgactttggtcgccactcgtgctggataagagcactagccttgccaaggttgttcactcgcgctttcacagaggtcaatggatccaatgcatgctgggcaccaactgtgaatgtattctcgttggatgagaagctatgggttgcctcagcaccaaccgcggtgctagtgaaaggattaacaatgtgatagtatgaggcactcaaggtgtcacctttgtcgtttctgtaacattcagaaaaa

SEQ ID NO: 1520 - DNA, 2095 bp, Cannabis sativa
cactttatatagaatagatattggctcaactaattaattgagtaataaattaagatatgctacgacgggcaagaaaattgcttttctataagcagacatgtattacaaaataattaaatcgatgcaatcaataaagtacttcgatatattattagtttaattatatcaatgctaatatattacttagtggatgtttaatgtcgatgttgaacagattataatatgttgtagttgttcatttttattaattcatctgtactctgtagctttctgatatatgtatataattgtttactgataatatgtcacatactaataaatataaacttccttcaagttgcagataatttgcagcaattaatggtcagtaaattaaaaggttttaattttatcgatcaaaatatactgtatacaaatatttaatttaaatctccctgaattatgtgggctcacaaaaattgactagaaaattatctatattctcgttaaaatgccaaacgccaacaaaatagagtacaactcaaattaggtatggaccactcgaccactaaattttagcactttcaagtgaaagggccaatttagctatgttatggggcataaccattggcgtttctattacaatgagagaacttagaaactttaacaaaaatagtacaattataaatgtcattaagaacattatcaaattcaacaaagaggtactcttttttattaagtactttgacaacatgctcacagtcacacttgacctcaatagtagagtagcctagcttcaagcaaagaagaaggccttgaaaggtagtggctttagctataggcagtgagagaaaagtcgacacaggtatcgcccctgatgcaaggttcatgccaagatgattacggagaaccacactagctaattcccactttcctattaatactatcagtaccagcatcaacatcccaatactaggcgaagtccaagtcagaggatcggcatgagtatttgatgtccaagagatagaagaatgggaagaaattaggccattagcatcctggaaccttaaaagaaattctttagactagcccacaacaccctcaacgtccaacaacttcttatgatggacccattgattacgacaaaaccaattcctccataaaataatcagcaacaaacccaactcatctttagggagaaaagttgcatgttgtttgataaaccccataagattcattctaggaagaattgactctgtaaggacaaactgtatttggaaagtcatcgaatggagactagagtaaccccataaggcatggaaagacgtctccttcccccacaccacaaaccgagcaaccaacatcaatgaaattcatcccttacatggccaagttacatttagttggaaaccaatctaagcaagcgtgccaaattaaaactttaacctttgagggaatagagaggttccacagagtactccagagagtattgtatgtgtgtgagaaaaagtgtgaaagttgcgagaatataaaaaaattaagattaacagcaacctggaaaaaaaaatctgataaccagtgtcaaattttaaaaaaataataaatataaagttgttgcaatcttgttgaaaaaaaaatggaaaaaaaaattctctcatgtaattagaaaggagaatcgggattgtgtgaaaaaaaatttcggtgacatgattggaggtataggaaagcctaaatgaccatttcaactaccttttcctaagcctaacattacaagcctagaaagaccttctgattgttggttgtgcattaatttatattagtggagaattaagtattacaagcatatgtgtagaattttcttgagttccaagaatgtccctacaccaactcaatattaatcaaaacgacagggttaatttttgacctagaattaaagccaataagatcaaacggcaagacacagcaagtcgttaaactcctacacgacaaatcgtttaaaccaaaatgatttgtcgttctcccagaaacaaaacagatcaagtgaggtaaccctagctctgatttgtaattagaatctttgagagtttgaaaccagaactctctctctctctctctc

SEQ ID NO: 1521 - DNA, 2936 bp, Cannabis sativa
aaaaactctaagtaaggaacatcatgattagtttgtggtgcttaatattgctaataatcaaatgaaacttgaaagagtaggtctgtgacacctgtctctccacacccaatacatttttacttaaatgcccattacacaaaaacttctctacttacattttgtgctataagaaggggtgtcacaagccaagtatttctcccataccaaacaccaaaaacataaccaaatcttagtgagaagagatcccttttattttgatatacagtatcagctgagatggagagaatgacaaaagcaatgttgatcctcatgacaacccttttaatggctctatcattggaagtggtagctgttgaaggtggaagagtgttgaagagcaatgaagaggttgaccacccccaaaactttggaggagtaattgctggtagtggtttcccaggtactcctgctttcgccacaggcttcggtttcggaccaaatggattctactcattccctggctcaggaaatggaatgcccacatttccaggaacacctactcatcaagcccaaaatccatgaaagaaggttcaccagctggggttaattagagtgacagccgggtcatgtattttgttatcttgggttttgttttgtttgtttttcttgtttaatttatgtgttttggactgttttagtagtctttgtgtttggtcacttgttgggtttgtgattaattaggcttgtagtgttttgcttatccaaaaagaaattatgcatgtttgctttttaatgttttaagatacattttgttgagcataaactcttaggtttttctatatatctccagcttgtagtgtctgcaatctataaggaaaaacgtaacaaaaaattggaacaaacgacgttgattatgaaaaacgacaattgagctttgtttttattttggaacagcatttaagtagtccttaccaactcaccaaatcaccataatataaatgtagtctttaccttcctctaaaatttaaaatacaaagatttgctttgccaccaaccaatttcagaggttataaatgaagcaattaagtgctttgctttgctcttcttattacattaattacatatacataaaaatacatatatccatcccacatccatgtactgattttcaatgaatagaagaaaaataagtagtgtttttcttttctttctaaaacgacagtaagatacattcacaattcacaatggtctaaaagaacatatacaaggatcactaaatgtgcacacacaagatattggttaggtcatagtacatccttgaaaaaatgtttcagtacactctttatgtattttggcaatttagaaaagttttttattctaattttttttttgttacaattgtgtatattctagttattaagattatttgtaaatttttaaattattttgaataatttacaatgtaaaaatataattcaaacaacttattgtatgcttgattaaataattttttaaattttacttttggcattgtaaattaattagaatgttttaaaaatttagatctaattctaaataactacaacatatttaattaaaaaaaataaaacgtttttctgaattccgaaaaatccattttaattaaggaagtgtacaataggatttttcaaaaatattcacatagttttaaactatagttatgtgacactctcacatataatattgttactttagtattagtactctcatcacatctcaagtacaaaccttcgacaactcaaagtcaaagatagagtctttttcaaaataaataggatggtactctcaacaagttatgggcattgatatattattagaaactctcatgtcatgatgaagctagctagatgccatccttatcaaattctttccaagagacatggagcttagatattggtctacctttctattgtgtagacaagagcatagcataacattttaagacatttagatatataaaaaaacacattttaagacattatttatgtgtgtttgaaagtaattatgtaattaatagtgtgggattaaaacagctaatagaacttgttttcgccttaatccaaggtcagtaggtttgcataggatcaccctctggaggatacgtcatatccatggccctcatgcacactttgaaatcgtgtccaaggtatccacaattataatagattttaggtaatttgtagaaacagaattgaatccattcacgtctacccctggtgatgttcaagaaaaaactagatggaattttatgatatgtatccaactcgacctgaaacttcaagaagcctgtcctggagatagttctctgatcaaccatgtcgaagcttttataaacctcggctttggctacgatcataggggtgttgactatcttcaaaaatggtgttggcaaaccattagcatgaacccaaaaaattgcttttctcatgttcactatatttcaagccccatcctcaggccattcgtgaatgattaacattttgccattgattatccacggacagttctctacaatctccacacaatccttttccttgtcaaagaaaatgccccagaggccagggctcatcgtctttaatcgccatcctcctctcaacttccatatcttccccagaatgtctttgagttgatttcgagatacccctttaccataaaaaatggctaaaactgctatttttataatctctgcatttatttcgaaatcaggttccaaatcaatggtcatatagactccaaaaaattttggcgcaggttctccaaatccccttcttttacttcattgtcctgttgggtatcagtaacttcaatatccacatctgtaaggccatttgcttcttgttcaactacaaccacctcaatgctgacattaggatcatatgccacttcttgggtgttttcaactgttggaaattatttta

SEQ ID NO: 1522 - DNA, 1324 bp, Cannabis sativa
ttgtttagttctttctatcaagaaataaaaccttgctctccttgtcgtctttgcaggtattgtgaggaaagacctttacttttgagtaacattggaatgggtgcaagactctgcacttattatcagaaatcagctccagatgatcaaacagccatttcaatgcgcagtgcaaacaacaactttggacatgttgtctccttaaatcctgctgataaatcacctttccttggagatataaaatctggttgcaatcagtcatctctagaaaccaatatgtatagagcacccttattttcccataaggttcctgcaactgattatttgctagttcgttctgcaaagggaaaactctctttaagacgcattgacagggttaatgctgttggacaacaggtacgtaccacaagagttgcagatagattgttcagcaatttggatatatggtattccaaagtgtttttttgttctctgacttgatcagaggttgaaattctgtgctgcaactagtagtgttttctggctttagttgtcactaatgtaatttttttattctccccctacattgttttttaaaagaaaaatataattggttaggaactattgtccctactccctattattccaaacaaaaagtgtaccgtgtaagtcttcataattatatatataattacggtgtactttgtaattatatatatgtatatccttttcatttccttgaatttttttgtgttgcaaaatattttcaaatgctttcaacatgatatttataatgtgtaatgaaattgtgtttgcacattttttgtttttcatttctataattgggcaattgcatgtgtatttatgcacactaaatatctttaatgttgaaacttaaaatttttatcatttaattttacagcgtttgaattgtatactctgtcacagtagtacatttttgggaaatcaatttactttgggaaacccatacaaagattttttgctgaaactaacattttaattgaatgctctttgtaggagcctctcatggaggtaatgtctcctggaactaagaaccttcaaaattatatgattaataggctcttggttcacatgtgccgtgaattccgagctgctgaaaaacgccatatgactccttgcatccgtgctgatggattgcaatcacagtttccttatctttctgaagtttttattaaaaagaagctcaaggaatatgcaaatatgcatgtgcaggtagtcatataaaattgatttactcttaggaatgtgatagattttgtacattttcttattgagtacatggcttttacttgattgtttcatgata

SEQ ID NO: 1523 - DNA, 1802 bp, Cannabis sativa
aagaatgtacaaattgtgataagtagtaaaagccaatgtttcttctagttgtactacacctcttgagatcaaacaggatattgacttcatagggtggggaacaagccagccccttaagcgttaaaataagagcaaagtggacaaaattcagttactgttttgatacggacaaactccaaaaaagttagcaatggagataaaccatgaatgaagtagaagactagcactcgtattcatgtgcatgcaagaccaagggctgcaataggtgttcccagtagcacaagcgcctctagccttggttttttagctagttcatcaggaaggtcataatcaattctgatggattatagctatttgtcgctaagtgtgctcttgacaagtggtttgagttcaaaatgtttgtcaagaacattctcattctcaatggcttaagttacaattttaaaggccatcttattcccacctctcaaagtttctaaggtcgtagtcttaggaaccgtatacttttccttgaagtactgagcaatgtaagggtcacaactagctgggaatcttcagatttgtttcatatggtccatttcttagctttgggtggtccaaatcgattcaatatacttcacccttgctcagttagctcactttagctcagttcaactcatatgaacatattttttatgctagaaatggaaataaagcttcaacagaaaatagattttttaaaaaaaaattgaatttcaaggggaaccacttatcaatttaaaattctaatgattcccctagaatcgttgagtcgtattcttcaagattcataaaaaaaaaaaattgattacctgatgaagcagaaatctcaaaaacaagataaaacaagccctagaagatttttgtaactgctataggtttgtgaggtagagggagtgactgaatgatgaaattatctatttataggtgaaaatatcatttattcctaatgcaattaggatatcactaaaacattatcttttatcagaaatatttgaaacttccaaaatcaaagagattctaagcggaagcccaataatgttggtcacgtgccaaaaagtgataccagactagtggctttgaatgaaataggcatagtccgcattggaaattcatcatgacacttgtgtctctctaacttgggggaaaaatatttgcccacaaatttgatcgatgatgtggacaccgcttttgacacatggaaataaccctaggaccctattgactcagaatttggttaactgatagtggagccttattaattgttgattctcaccatgagtaattaaaaacaataaatggtaaaggtgacacaaagacttatagaggttaggcccccttatttagtaggtaatgacctacttcccttttagttgtattcactcttgagataataccatgaagagtataggtaaaaaccttataatctttagctatgactctctttagtattataattgtgacaacaatgtgttacagataaagaaatggtgagatcttatgaagaacttatgtagagaacatgacttggtgtctaggaggcataaatagaatgtcaagattgagatatagagaagctttgaacgtgtgggagactgaattaagcatgagagaggacttgtagataccctttattgcttgtggagtgacttagccttgagagagtgatctaattccctttatattagtgtagggcttacaaaagatcccaattcaaataggtaaagatatccctttcaaagaggaatattaatatctttattgattacaaaaaaaaaaaaaaa

SEQ ID NO: 1524 - DNA, 2386 bp, Cannabis sativa
  modified_base (1801)..(1808): a, c, t, g, unknown or other
taaattcaattaaattgtgcctctatcacaattattatcaaaaccaaaacgacaagaatgaaaaggcaacagggcaaagaaccataccctgctctacttgtatgaaatttcaatgtactactttactctgatctttaaggctcataaggagccttttatcaattttttccaacattgctttatttctttattcttgtcataaacagcttccgtgttccaatataagggtacaaaaagtatggccacattaattaaggtagaaaagacaataattaagtctactaataagggcaatacatttcgttgagtttagttatttgacatttatgtcacaaaatatttgagcaaacgaattaatttaaacttaccgatctgcattgtacgaagtagacctttgtaaagcaggaacctctactttctttgtctccacaaggctgccgctaaaatattccttctcttccaatttgaccctagaaaaattagactgttccgaacgagtccccactggattccctgaaccgcgtggcagcctagccttgtattgaccaatcaacgacatcccatgatccttcaccaaagtgggaccacagtccttgaacgagaccgaaccgcacgatagcaactgcattagaaccgacgaggccttagcttttccacccccacaattctcggacgtccggttcgggcaaccatcctcctcgttcactccgttactgccgagtatcagccgtccatcagctttcaacagagactccagcgtttcgggactcgaatcggacggcggaggggaaatctcctccctgctcagctccgtgctttgactttcgtacatttggcgttgacctttctcctccggttcaaccgccgtctcgtcctcttccctaatcgcttgtcgccgccgacgtctcttgtcgtcggtctgagtagacgcgtctgcggcggctttaccgatagactcgccgatggactcggccttgtaaactttatactcatggaggtcaatcgcgctccacgactggtttctccgacgtacaaccaccggaaaatcagaatctccgctggaattttgagttgccggcggaggccggagagaccgagaagaagctgattcgagaactttaggatcgtaggctgccgggtcgagaagaagctctgagcctttgagaacgtattcatggccgtgtgcagggtatatgagatcgttctctgataaatcgtgccacacgaatccatttctgtaactcctgaaaatttcaaacccaaaacgtaaaataaatcaatcttaaaaataatcaaataattagtgtgtatggaaaaagaaaaaaacaagtggagaacgaaaacacaccgtttagaagaccaggagtacaaggtggccatgcctttgcctcggagatcatttaagcggttgataacgtctgaaacaataaaaaaacacatgagaaattctacatagaagattttctgtttggttcccgtgataaagaatgaaaagaaaaaaaaatatatattacctctgaggaagagtccttcaggtgaagaaagaatgacctccatgaaatgagggtgctccagctgaccatttctagccaaatagtaaacaactggtacttttttctctgtattaggtttgagctttggttcagtccaaaccatattccgctcgggactggttgctctgtttttccatctcttctgattttggagctgtatagtttgtcctctggcattgaccgccatttctgcttagaacaaagacgtgtaagatttagatatagactctgagagagagagagagagnnnnnnnnagagagagagagagagatgagactcaaagaattatttttggggtttagagaggtgaaaaatgtaatattggtagccgagaaaaaactgctggaaagtgactttaccaggggcatagaagagaaagaaagagacaaaagaaagaaatgaaaggaaaatcgaacaccaaaaaagagtctttattggaggtttggagggaattttatataaaagaattaaacaagtgacagtgaaagactacagtgtgaattgagagactattcgtattattaagtaagaagggacagactcatatatttaaaatttgagggatgcttcagacaacagctacccaacaaaccatgcctgtttaagatttcagtactcttcttctcactattatttttctgaatgttttttgtttttattcaattatttcttaatttaatataatttgttacgagtaacagtattctactaattgctaaacaaacctcctacctactgatatcttacattttaaaaattataattaaagattttgtgtttttggtcacaattgattaaaaacgattaatcatcacatcatctgttgtaacat

SEQ ID NO: 1525 - DNA, 1179 bp, Cannabis sativa
aaataattatttatattttattttttggtatgactaggagtgtccataaattgatttaatttaatgacaaccgactgattcaattataaccgattactaaatagtggatatctaattatgattggatcggattaaatgttatttttaaatatttgaaaaaaaaaatatgtatgagtattactataaagtacaagtgatactaacttactaagtactacttaaaaatagtaacgttttgtaattagttatcgatattttataataattattatattaaatataatattttctaccaataataatatcatatttacacaaaaataagatataggtgagtgagttagacgtaagcagttttagtttccattacgtaagcatatatataattattattatccaatttagtattaattaagtggtgaatttgaagacacatagaaattgaatcatgtgataacattgtaataatataagataagtaacatgacacctttgtaataattgaatcaataatagtagtgagattagatgttgtaaatagtggtcggatttttttatacggcataaattaaatcggcatgatgagcttataatgctacaacatcatacagtacaaattataagtatgacacgacacccgaaagatacagtacataacagtctaatttaaaagtactaataataataacttgagtatttattaacaaatatttctatttatattttaataattttctatgaaatattattgtaaaattgtataaacataacttaaactataaattgcatgaataaatatctcataaattgcaaagataaaatgaaaaattaaaaaagtataacacgaatttaaagttgtatgaataaacaagttgacccagttgaagcactacgaatttgagcatatgcacaaaattaagcatgacatgatcatgatatgatacatatttaattatagcacacggcacaacataatttatatacagcacaatgtgacacacgacacaacacaacaactccttatttgtctttaatttcattgtctttatgtatatatacatatgcttctgcagctttatcccattcccaataccaatgcaatgcaatgcaatgccatgcacttttcttattattacttttgctttttaataattactctctttattcttttattctttt

SEQ ID NO: 1526 - DNA, 2716 bp, Cannabis sativa
ttcgatcggtagtttctgtgtgggttgctttgtggattttgattgcgatttaaattactccgttgtttgctatatagatttctatgtttgtaaaaaaaaaataataataataatttgaagtgtaaaattaaaaaacacctttaaaattttaatactatcactaataattaatgattttttaatgagaaattttatatataaatcacttctatgtaatatcataatattttcttattttacttattttattgtgatcatttttgtaaccgttcctttatttatttatttatttttttgaaaggttcttataaatgaattaaagtttattcatgaagaaaaaaaagaattaattatagtatgttgattattaataaaacatgtgaagaataatataaaattaatgtaaacataaaaatcttaataataataagaattaaaatgattaatgtacgtctttaaatgaaaataaaattcatgataaaattaatatataattttgtaaaaattaacatcttatttaatttgtgctaaagtcttgttcaagcttgagacgaccctaataagtaaatgccagttacaatttttcggttgatactgcacctaaatattttctttatctaatgttgaatgatttaaattaatgaagtttgctgattttattctaaaacaaatattacttattttctctctgagcgcacttaaaaaaacaaagtaaatgaaaaagtatttcatttttgtttgtatttgttagttgatttatttatttatttgaaatagaattgattcaattcgaacaattacaaagaaaatgactcttcattaatcaaatcaaagaagtttacgaacacaaagtggtgagaccccaattaattacttaccacttactttgtaatttaaatattctcattttcaattaaatatattgctattatatatatttatattattctctaattaaatcttctatttttctaacatatatatactaagcttgtgacgtctcttagtacttttcttctattttcaaattacataaagtattgaaaaacacaaatagatacattcaaattaattattttggtcaactaagctaagcttggccaattatcccaatcgtgacgcccggaatttttcctttttggggtcatgacatccaatttaatactatctgaatttaagtaaaatatagtcccattaaacttttattcatcatcatgggattcattttcaagcatgattggctttgggtttttttaaaagggacaaaacttaagacttaattgccagaatgactaatccctatcgatctgatgataaatgatttacattatatacgtcgtgtccatattatagcaaattatgtggcatcaatcacttttaactttaattatatatgtcataccccaataatgaacatattatttaactttgtttttgggggtaaacgatacttttaggtttactaaaccttgaaagtaaagtactagctaatcaagttgggggttagttgataattaatatgggcttatgttttaaacataaaggggacccgttgccttgctcatactatacgtcacctaattaatttttgttcataaaaggtaaaatcttttttgttttgttcgttgtacggacaaaggaagtactcgaattagaaaatataaacattgtcccaagttttaagtgtggatggaatcacagattctcatacccaattcgattggaatggacctttattttatttgtttactttacggtggttctttcttctggctagacctttatttatgttttattaaactatagtactcatatcacatatgtggaataattttatagattgaacaaatacaaaagtgaaatatgtatctctagttattgaaagcaaatgctctctaatagatggtgtgagcttgggaccaatgttttatatttatatagaagtgagattttatagtaaggattttgttgtaagaatattttaataattaattaagaaataaaattaggtggctgaatatataaactcatgagtaactataaaataatgttaaccattaataagaatctaacactaataataaattagggccggcgacctcagtgcacgcataatgagaattgagaagtagctgtcttggccatctaataataaattttgacatcgtttctaatttgatcaataacatgccccataccctaccagtacgtaccattaatattaattagattattggccttatttaatatcctcacgcctctctctctctctctattggtcatgaaaatatacgtacgtaaaatgtttaatataaaacaaagtttcattctcatagcttaattaagtaaaatttaaaatacttatcatatacagaaaattatgtatataattaattatacacatgtgtactaacacgtatctgtaatactgtatcactctccatcaaaatttatttgcaacattaattatttagctacttactatatatatacacgtaattataacagtggtgtgatatcatcacacctatatatctctctgtatatatatcgatcttactactaataataatttagaagttaattaatatatatagatagtatcgtataggaatataatgcgatctcaacgaaccttcaaaagcaatctgagaaagttagataacttcattgaaagaaattatactttttgaaaagaaattacatagaaaagtat

SEQ ID NO: 1527 - DNA, 2425 bp, Cannabis sativa
tcactcactagtatccccacaaggtcatgctctgttcattttcatgattcagaatcagagttcagacttcacttattttgcaaagatatccgccaaacatgtatctttcacagcatctcaccccattccccattgcatcccataacattaaattccacatatggggacaaagaaggaaaagcttgattgatgaaactaagaaatatagagaaacaagtgacaacaataatatagtgttataggattatttatatttgcattatatgtacatgcagcccccctgcattagctccccatgtaataaataaataaataggaaagaatattaactgtttgtcgttattatctaaacattatttttcaaattaaccagggcatcataataatccgtgaagtcatttactaaaagtaagaaaatccatgcaatttacgttcccaaaggtatattatttaagagcctaccgagtagttaagccttctcttctatctgctgttcagtaatacagctttcttctacagcaaaaatatatcatggctgcctccattccaaaacttctactgctattatctataatggtcttttgcagaagttgttttggccttggaaaccattcttcttccccatcaaacaacacttccaaactagatactaatttgtcatccatcagatcaatatgcaagaccactccatacccagaaacctgttttgattcattgaagctttcgatctcgataaacatcagtccaaacatcttaacttatctccttcaatctctccaagatgcaatatctgaagctgggaaagtctccagtcttttatcaaccgctggatcacaaaggaacattgttgagaaacaaagaggagccatccaagactgtaaggatcttcaccaaatcacagtctcatctttgcaaagatcggtttcccgagtccaatcagccaactcaagaaaaatagctgacgcaagagcttatctcagtgcagctctgaccaacaagaacacatgtttagaaggcttagattctgcttctggtcctctgaaacagactctagttgattccttaactaatgcatacaaacatgtaagcaattccctttcaatgcttcccaaaccaggctccccgcaaggccataagaaccggcgacttctggggtttccaacatggatgtcgagaaaagctcgccgaattttgcagagtactggagacgagtatgacccgagtgaagtgctaacagtggatgtagatggaacagggaatttcaccaccataaccgatgccataaactttgctccaaacaacagttatgatagaacaatcatctatattaaacaaggggtctatgaagaaaacgtggaagtcccaagcaataaacctaacattgttctactcggagatggaagtgatgtgaccattataaccagtaacagaagcatgggaagtggttggtccactttcagatccgcaacccttggtaatcaaagcgtttcatcctttaaattttcatttaggctttaatcaaacacacagtgtgcaaaaattaatattgaacaaacttaatttttcttagccgtctccgccgaaggatttctagcccgagacatagccatcgagaacagcgccggaccggagaaccaccaagccgtcgctctgagagtaaacgccgacttcgccggattctacatgtgtaccatcaacggctaccaagacacattatacgcccattcattccgccaattttacagagaatgcgacatttacggaaccgtcgacttcatattcggcaacgcggccgtcgttttccaggggtgcgacgtcgtttcgaagatgccgatggcaggtcaattcactgtgatcacagctcaggcacgcgacagtgaagatgagaacaccggaatatcgatgcagaactgttcgatattagcctcggaagaactgtactcgaactcgggcagcgtgaagagctacctgggtcggccatggcggaattactcaacgacagtaattttagagtcgtacatagacgacttcatagacccagctgggtggaaggagtggtcttctgcaaaagatgaccaagccttggacacgttgtactatggtgagtacaacaattatgggccgggttcgggtacggataatcgggtcgattgggccggttaccacgtcatggattacgacgatgcgtataactttaccgtaattgagtttattactggggacgcttggcttgactccacttcatttccgtacgatgatggagtttagtaatttttttattagtactatattaaaatttatttattaaaggtacaaacaaagtccactgtggaataacatggttgtgacgcttagacatatatacactatacatcatgttttttctttatatatcaacaaaaacatgtcatgatgtgtatggaaa

SEQ ID NO: 1528 - DNA, 3501 bp, Cannabis sativa
cgaaattaatcaaaaagccttattttcttgcacacaaaaaataacatcagaaaaaaaattacaacaattatcattaatattttgtctgtgtgttaaaatttagaaacaaataaaaagaacaaacaaaattgaaaacagaaaccagtcttatatacagtgaactggaggggacagtgcttgctgatgggcagtgagagccacattcaaaaagttaccagagtaactatacgcattaggtaagcaatgcacatttgtacactcattcttggtcattaattagatatattattgttttattccagtgcttgctgatgaacaatgagagccacactcaaaaaggtaccagagtaataactacgcacattaggtaagtttacaattgtacactcattcttgtagataaattattgttttattctgtaaaatttgtatagatttgatgtgttatttgtaatgagcactattgagcgtaaagtgaaaaattgtacatatttgagcgaagtactgaaactaagtgaacaagtcgagaaacaaacaaaagtgaaaaaaatagtttgtggcactatagcgccgctcctgggatttaaaacttcggaaaatctcgcatggcgctatagccccgaccgaacaattcaatatctatcttatttttaaaatgtcatattttgcatcttttttgagctataaaagaacattataacttcgacttttagatgactagagatagatatagaaagcaacctagagatcagaaaacttattgaagatgaagatcaagggaaagagatttcaaggttaagcattatctactttcattagagtccgtttctttttctttcttattcttctgtttagttttaattatgaacataatgaattgttttgattatgattgtcattatgaacaaaacatactttctagagtgttgatgaaattaatttagattatgaattaaagtttttagattattctcatatagcattccaaatttctacattatctaatcaagtggctgccctacttgattaaaagaatacatcagttgtagagaatgttgttacatctacatcacaagaacttgagatgagtataaaacatgtacaatacatggctaatagaccttataaataacaattaccggggtgctccaatgcctaactactatcatccaggattgaaaacccacgagaacttttctttatggtaacattaaaaatatcttgcaaccgtctcttggatttaatatacaacaacacgagaaaaagttatcaaaatatattttgggtactttcatgatagagactaacaagagatttacaagaatgacataagattggataacatggagactcactgtctaatattactgctttcatggaaaatgggacaatcggccaatgttgtgagtggaacaattggccaatgttgtgagtgatgtgcaaaaatagagtaattttcctattgatacagttgttaacccaaaagaataatgtaatgtcatctcactgaggaatggtaaaatacttgatggaggtgtaaaagacaagtcaatcggtcctgaagttgaagacacggtagaagtaaaagaagagattcttaaaaagaagcctactgagaagcttatcaagaaagacaatcgtccaatgtataagctgccaattctttgaagaaacttgatgaggactttgctaagttattagaaattttaaataaaatcaacattaatattcctttcattgatgcattagagcagacgcccaattatgttaagtttatgaaagaagtattgacaaagaaaaagaaatttgagaaatatgaaactctaagcttaactgaggaatgtagcgtaataatttaaaaaaagttaccttaaaagcttaaagatccaagtaggttttctattccttgtaagattagtggtttaaaatttgagaagtttttatgttgggggttcacacaacaacgacagtgagagtcagcataccctatcaagccctcgttgggacatcaaaccttgttggatcgaactctcttcgtttgacagcaacaacccagatggctagctattgaaggttgaaaggtatttttcaatccatcaaatgacagatcaagaatatctgaaaactgttgtagggaaactttgatttggtttcaatgggagcatagtcgtcgggcatttgtgacttgggaggatctcgagatgcaaatgattcagagattcaaaccactgctggtgagtttcttgctctcaaattggaaggatccgttcgtgaatatcgtaagaaatttgaactcatagcctcatcgttagatggaatctcaaagcaaataatatcttactaataggctcaatccagatatagagcacgaaataacagttttgggcccaagtgggcttgagcaagttatagaattggctcaaaaagtggaatccaagttgatggcccaacagaagtttaagtcttccatgcgaacccctaggtctcaatttcctagagttgcaactagagctagtgcaatttattccaaacaatttcgctccttgttcaacaaattttagagatgaaggtcgactccttagggttaggttccggcgattacagaatctaagaatcaacaaaagaggtcttggggactttgttttaaatatgatgagacattctctcctagtcatcggtgcaaaaaggcagagctacaagtcattctcgtctaagaaataaatggtgacgagaaagaagaagaagacttagatggcctagctgaggcagctgaacaagaagatacaaggctggaaaatcaagttatggaagttcccttaattctgttataggtttgacagccccgataactctgaaaaattaaggggccacgttggttctcgattaatagaggttcttattgatagtgaagctactcataattttatctcaaaagttctaatacaaactttgttgcttcctatcacagccacagctccctacagtgtcgtattgggtacgggacaatcaactaagactcgaggaatatgtaaggggtgccactaactatgcaaggagttgaaataattgaagattttattcccttggatatgggcaacactgatataattttgggtaaacaatagttggaaactttgggtgtgaatcacataaattggaagactccctctggagttcatggagggtaatatggaggtaagtttacaaggagactaaactctacataggactcttatctccttaaaagctatgatgcaaacaattaaacaggagggccatggattaatcatcaaacttggggctgccaccattgaggaaaggaacgatgaaatacctgttgaaattaaagaagtattgaatgaggccaaaaaagtgtttaaaatgccaaatgaacttccaccattccagggacataaacattcatggtcggcacacgtcgatagtaagtgttcgtccatatcggtatccacatgcccaaaaggatgtcattgaataactggt

SEQ ID NO: 1529 - DNA, 3890 bp, Cannabis sativa
tttgctcgcaccgttgttttccaattttctttttcttcagtaaatgaagaaattatttaaaacatataaaaaaaatacaaattcttgataatttatttttgtttctaaattagaaagttcatattttttttttaattttttttttgtatagttggtgaatttaatgaccaaagactatttttctttccacttctcactgtcctcaaattatttagcctagatatttcatcctcaaaagaaccagttaaaccctttgtgtagtccaagttttgagttggggagtattagtaggtattagccgatatggtagtgttagctccatgattgatacatacgcagaaattctaactctgttggtggtgattatatatcgttatagaccatacaaagtccacaacaattggaaaggagcgaattagtgctttgctgtgattttggatatgactgtaaccaagccaaataggtacccgggaagctatttcggcaatgccattcaaacagctggtgagtctgagttttcgggttactcaggacgaatggacatggaaatctctgcctctgaagctccaagtgccttaacaaggaagtgcataagtttgaattctaataaagagagagccaatttctgcattcccaatcaagttcttaacttgtccaatttgtcacgaactgagagaaaggatctgttacataaattgaaagaggatcttgtacaaacacgagtagctctgaggaaacttgaattacttgccaggtcttcttccaaggacattcttacctgtagcaatggacagaatgtgccaaccattggaaagtccaggaaattctcaacaccaacttctagccagggaaagaagttgaatgctggtgttaagaaagctgaaactaatcggagttcttctgggaagtttgaatcaacaaaacagacttcattaccagacactacatttgccatgttgctgaaacaatgtgaggcattgttaaaacgattgatgaatcataggtttggatgggcatttaacaatcctgttgatgtagtgagtatgaatattccggattattttactgttattaagcatccaatggatttgggaactataaatagtaagatagcttcagggtcgtactcaaatcccatggagttttatgctgatgtgagacttactttcacaaatgcaatgacctacaatcctcctggaaatctataccatactatggctaataatatcaataaatattttgaagttaggtggaaaaatattgaaaagaatttgccgaaatttgattccgaaccgttactagcaaaatcggccaaaggtgatgccttggaaatgactcatccagtttccccctcaaaaaaaaggaaaattatggatatgcaaccggatgtaaggtctgaacctgctaaaagagtaatgacagacgaggagaaaaccaaaattgacaatgaattaagatattggctgcctgagttgccttcaaatatattagagttcctacagcaaagtagtttaaatggcagagactgtgaagaggaagagattgagattgatattgacgaattcagtgatgatattttgttcaagctgcgtaagcttttagatgaatttctggaagagaagcagaaaaaacagtcgcaagctgaaccttgtgaaatagaggtacttactattcacttttcatactaaaatggtataattctctttttcataaaataattctaattctcttgtagcatttgcaggactcagggttgagcaattcttcaatgtcaccttgcaaaggtgatgctccactgtttcattgtatagttctatttcaaaaatcagtttctaagctaggttgtatggacttttatatttctatttgtttttgacatgtattgggattttttttcttatttcaggagatgatgacccaattgatgaggatgttgatattggtggagatgagcctcctgtattaagctatcctcctgttgagatcgaaaaggatgaagagcataggatcagtaaatctacgagtcctaacaagtttggtggtaattgtggctttttatgttttgttattaccattatcagccagtggtttttgttttcacgtatttcttcaaatcccctattttacctgaaaattttggacctattcttaatctttctttaatttaagaggctatttgatctttgttttgaaaagctattcacaaaacctagcgacccagtttcatgtgtactattgataattcacaggtgagtctagctgtcctgagagtgagtgtaatggtgctaaggcgttaactttagttaacgaatctaaggtattgggcacttgattttgtttcagattgcaaattcaatttctttttctctcatgctggatgattggtgagtgatcaagctgttttttttggctactcaatgagttgttgggggtaatagtgaatgatagtactgctgtattcttcaggtgccagaaaatgtggactctggaaccgagttagacaaaaagacaaccattagtgatctcaaagaaagacatcgtaagtttccttgtcttctggaatccggttattatttctaatctcatcaatcgagatagacagaattaatttgatagaaaattgcaattagatgaaaatcgtatttctactaattaaatatcattgttttcaaacaatttggcctggcatagcatcaaattggtttgttgccatttgagttgattttaagaacagtttggctttgtctcccaactgttgccattagtctcatgtaacatacgtttttttttttggttttattttgatttctaattgcatattttgtaaattagatgtatctctgggttatgcagtaactgatagttgcctgaaccacgttgagcaacctggtgagcaaaagccaggctcttttgaaccagatatctgccaagatggtaagcatgagattaagaaagtaaacggttctgctattggttttggggtgttattttactgatcactccttgcaaaatatagtggatagtggtccaactgggaggctggtctcccctgacaagcagtatagggtagctgttttaaaggatcggttcgctgataccattttaagagcacgcgagaaaactctgaatgatgtgggtttcagttttctttttaagctgttcatgttatggctttattctcctctgtacttgatcatgtgtgatttttgtctgaaatcagggtgataaaggggatcctgaaaaattgcgccgggaaagggaggcacttgaattgctgcgtagaaaaggttgcaactgcttattaatttctgtctggttctgtgttttgttcacaaaataagcatatgctttttgtatcatgtgaggacagactaagtacagtgatcaaataagtggagaacgatgtatgcattttatttatttttactttgttaatgtctgagcagaaaaagcacggttacgagctgaagcccaggctgctgaagatgctcgaagaagagctgaattagaagctgcagccgaaattaaacggaagagggatattgagagagaggcagcacggcaggcattgctacaggtaactgttcaaaccttgttgcccagagttggtcaattttgtattcttattcaaacatttaatacattttttacagatcgaaaagtctgttgaaattgttgataccgcaaagttctttgaagatttagaaatgcttaggaagaatgcccctgcagaactgttacctatctcagtagacgatactagccctaataatgtactagatggcttagggagcttcaagttagggagtagtaacgccttggaacagcttggtttgttcatgaaggtggatgatgaggaagaagctgagccagcttgcggtactaatacc

SEQ ID NO: 1530 - DNA, 1716 bp, Cannabis sativa
aaggcttttggtgaaggtgggagttcatatgatagacttaatgatctcgttgactcctggaaatgttcaccagatttatgagttcatagtcttcttctgttattgagtctcaaagctgtagcatttgtatgagaaaatacaaatttcgaacaataactgataaaaaccaaaactaataattgttcttacaaagcagctaactaactaatactcttaatgggtgagacccttttatgagatgtcaataatgtcaaatacagttttttcattctgttgagtagagtgcttaaagcacattccttgaaacaacatcaaaggtgattccattgtcttggagtcgttgttggagatcggttggaccgaaaacaatcccgggtgtgaaaactcctcccttaggaaggttatcacgttggttcagaagaatgagagcacactgaaccagaattattggtgtggtcacatatccaatctctggacccatcactcttgtcacgatttccatgtcgggtttcgatttttcttgtgaaacaagactggtatcactgtaaccatgtccgacgaaccacatcttaaacgaagcacttttcacctcatcctccgagggacccttcttgctgaacaatccaaggctaaaaaatgagggaaatttgaagagaagccgcctcccaaaagaaaattgaccaaagataccaagaattactccaaatgtcatgacatataaaatgctcagcaacgatttagagccaaactttactccaaaatgagccggcttcaccgttgaccaataagcctcccggttaaaaatttgttctatactctcgttcttcccgggaagaccaccagggttttcagtcagtgttgaaaacgttctccgaacaacaatggcatctgcagaagggagctttaaagcccataagcctatctttttctggtgttctaaaactggccatttcggggttggcccaggaatctgaaatcaagcaagaatgtttgtcaaacatctaattatatatcttgaaagaaattcatagatcccatagtctacctgaggtaaaatttctaatcatcaatgattacaaattacaatgatcaactaatttaatactgttaactgataataaccataacttgattcacacagcaacggagtataatatgagaccatctccaatgcctagtgtaaattttataacaaatttaactcaaaagatggttcaatgcccaaattttacaattgtgcttggacaaattaacctctaaagtcaacagccattaaattttaatttttctattgaaactatatacaaaaattaatgaaatattaatttaaaaaactaaataactatcatatcactaaaggatattagtagtttctagcaccctttaaaatatcttatcgttattagttgaattaagtattagatcacatacaatttaacttaactattataggatatcattaacccttcccaaaacaacatctagcaaaactagtgcctcatattaattgttgggtatctggtgtactaataagcatggcatatactaacatgtactaaatcatcactgtcaatgtgtactgtttatatttgtttgaaaattcaaaaaaggtgcattggtgtataatatagttatttaaaaaattctacaaattttaaaagaaaaaattaaaaaggtttaacgtgtcaaaagtaagtttcagacagttaaaccata

SEQ ID NO: 1531 - DNA, 2745 bp, Cannabis sativa
aaaaaacaaaaatttgagattttaattaaaacttaggtagtgaaatttgagattacggtatatatttagctaacgcgatatgttaatgatattagcaacattattaagatacaaattaatatgtatattaattagaacaggtcttgggcataggtgggttaagtttgtgcttagggtccaaaaaaaaattctttcctttttaaaattatataatatttttattgattttaaaaaagggattatttcacaaatatccaaattaacaaaaaaattacgaaaaatacggtttcacggaattttaaatatttttacgattttctaattttatttacagaaaatacgatttttttatgttgtactcttgttaatttgttgttgactctttgttatctgtatgtttttttattgttgttttggtattatttaaatgttattttcatattacttttatgtagttttttttgttattttcgtgctatttccatagaaaattgtaaaaatatatattaaaaaaatttaaacgtaaaaatctattttttttttttacaaaaaatggtattttatataattatcttttaaaaaaatattatatttttttctaaataaaaatctaacataatttttttctatgactcactaaattttaaagccggccttaaaattaataaaaaattccaattattttttatggtattttatttatatatatacatcattttgaaaaacatcactagctagaaaaatgtaactcttaggtcaatctattgaagtcaaagattcgtgcaacaaaaaaaataagaaattgaagtcaaagaaagttacaattaccaacttaattagaagaataacaaaaagtaatagattgatagcttattaacacaaatacaatacttattacttaatattcatttatatatatgaattttaatatatcatatcacaattttcaaatatatataatcatattataggatttgccgacgtggaaaatatgtaagcataatcaaacaatgtataatttgtctattattgtgagctgaaataactatacatactaagtaatttcttgtatataattatgaaaaatgaggaaaattgtaattttttgtttagtataagatacactaaaatgatgggtgtgacgcaattgatgaggtaagcaaacttaccaaatttcgaaagtcagtcttctcggctgtttattactttatttggaaactatgaaacatgattttttggaacaaaactgcataaaaatattattggtgtttaatatttttttttgtattatattgatatcggtgtaattaagtatcagtttttatataacttaataaaataattttaaaaaatatcgttaactaatcgtgaaatgccacctataaaaagtattataggtactactaatgtccagtgacaatattctttgaaagcataaaattaaaatcactagaagaaagctcattatgatatttaaaaaaatatagttcataatatataaaattacataaaacattaatttttgaaatttttttatatttttacgttcaaagttaatatttttttttatgtttttacagtattttataaaaatataaaaaaaaaattacataaaagtaacaacaaaacaacataaaaaataatgcacaaataataaaaaatcaacaacaaaataataagagtacaacataaaaatatatataaaaaaaaacgtattttatgtaaataaaacttaaaaaacccaataaaaaaagtacatatgggtttcaccatttgcttagtatcaggcgcggagcaaatgaggggcatgtggagtcatttttcccgctcaactttttattaattacatttttatatactttgaatatttcacattttgtcttcaaaatattaatattttttatttatatttatatattttatttttatttttatcttactaaaatttgtattattctcaattaaaattatattttcattattaatactctaaataagaaattttgcccccaccaaaaaatatgactggcccagccacagcttagtatcattataaatacattataaataaaattcttgttacataccaaaaaataaataaataaataaattcaaaagcctctcattttccttgcacatattctttttactattctcgaatctttacaacataatatcatgtttatcatacataatgtaactaatattaaatattatattaatcttcaatgacttattggtttcaaagtcattattttaccattaatttgttgtgataaactttattataatgtcaagattccaacttattatataaaaaaaatacatataagaattatcagaattggatcttttaaaaagtacctatattttggatctttacatttggaaattacactattataatataaggctttacttttggattttttcaataataataaaaaacaaagacatagcattgcaaacactgtctcgtcgcatttatttaattgtcaacatatattttcagttatattaaaaatgaattaaaatgaacaaagaaaaaaaaaatattgcaaaccttttggtttcagatattcgctaataaccgaagccataaaagattgtttttgccttcagattcctttgaccatttctcttaacgctttcggttctgaattttcttaaaatcgaagttaaatacccaaatatccgaagctaatattactcaccatatatggtatcgcgatatgttggttacta

SEQ ID NO: 1532 - DNA, 1289 bp, Cannabis sativa
tatagtgcgtgtcactgaatatattaagaaccagacaacaaaggctgcagaaatcttagtggcaaagttaaagacaaattaataagaatattttctataaagaaataccatttaattatatatatataaatatatattatcataaacttacttttattttttgttttgaaaaaggagattaacttactttttaaaagcctctttatttcattaaggggcaaagaatacattacttacttaacccaccacaccagtactaaatctacatctaaatcttgttaatattttctcaatattttatatcaaattttgttatcagaaattaaaaaataatttatattatattacagtctacataatagttcgaagattttatttaaataatatttatcaattaaattaaattttaaatagttaaatatacgcgtaatttttattttgttattatgtataattaattattttaaacttagtaaaataatggttataaatataatatacattgtcataaaaaaattattagattataaattctctaataattatctaagaaatttcctaatattttttttaatttagatgagaaaaatatcattaaatttcataattacatctttttaaaagtgttaacccatacgtgtatgtgtatacatacataaaaaaaaggctagtatatattgggctcttctttttattattttctgtttttattttattacttttaattttgtggataagagggggatctctctttttcagaaattaattatagtaataatacaatatacatattattattttttctagtatagttaaaaaagatagacactatgatacaaaaattttgtactatttaaggcaaagtgttacaaaatagattcttaaggcacatgtgaaaagaattatagtgattcattggatactaattttgaccttattatatatttatatatgaatctattaaacaaattatcaagttgtatttacttaaattaatcaaaagataaagttcaacgatatattatgagaatgtgagaattatatatttatacattacatattatagtgatgtattaccaataagtgtagttttgtattatgttttagttgagccatatcaagtaataaaggaaaaaagtgtacatatatattgctagttagcttgacaattagatgaatttgccctaacaatatccaaagattggaaattaattatgacatgatcaaaagttaaaatttaattgaatattggtgtggttcttatacaaagaggattgttataaaggagt

SEQ ID NO: 1533 - DNA, 2932 bp, Cannabis sativa
tgattcttcaggtaataagttggtgagaaccttcatctttagtggctcaatttcatcaccttatttatttgtttatttatttttctccttttttgtgatgacaatatctagtggcatcattcttgtaatcatcatccacaaaattcaaccacaacaaaatgttgtaacatcaacaaccatatgccaattttctagccatatacataaaagtaagaaattgagagggaaaatatatcagaacccactttgtttggaaagaggaaatgagattcatcaaatgaatgatctattatttgccttatacattaactttattccttccaacttcatcatccaagtggaggaatcataattcacatgctttttgggtatagtactcttttttatattattattttatttctccccttgtaataatgatcctccaagacttttgtgtgtcttaagaagcttcgtggtgacacccataaacatattgtataaaagaagtggataaaaaataaaatacaatcaatcatatacccatatatatatatagataatagcaaggccaacaatacattttagatgagttgttagtcaatttaatcacgggcctcattatgaagcaaaagaagaattgcatgatatactaatgcacctttatatgtgtattgaattgctaccacttcccctccaagcatcttatgtttttggattaaattggataagaggaatttccagttttctcttatctaaaataagagatacacaagaacctacgggtatcctatgcttaccaaattgattttataggcactactttctttatatatccattttggcacctatctttgctaggtccttttttttttttgcaaattaatatagtactgcccctctaaagagggaataagtataaagggaggggagcgcctttgacagattcgctccgtgattttgtgacttttattttgcctccagttttgaagccaaaatggaatatacatacatatatatacacttagcaatatatatgccattatctgatctgcgtacccatttactatacttattagtagaccgtagaagattgtggattagagagtaaaaatattatagctttcatcgactttgttgggcttcatttactggaagagacccataatccacctccacatgcaagaggtaagatttacaacctaaataacgtggctaaaaatactagagcagaattattataagcccttttgaaaatgacgttcactaaacccatagccatggcccatgagcagctatatttataggagccatgaaaaccataaattgattgccaactgatacatagcaaaatcctcatattggatacaacaaagaactacattgagaaacgaaattaagaaagaaaaaaaaaaaccaaaagtagctaggattcatatgcattcaagattaattattgcatatttcatttattattatatagtatatatagttgagcattggatgtggtctcattttgcagtaccacttacacaaagccattggccaacgaagagagtggtacagttgagattggggttgaggctgttaaaagtttgagtggccaagccaaaaaattgggctacttcaaagcaagtatcaccttgccctatcccatacacttgattgcagtccaccttaggggtcctcaactgcttcggctttcccttgctgccaaacaccgctgcttagacaaacaaaataagtttatatataaataataatgaaaaaacaccaacacaattatatttctagctatataatcatatgtatatatagataaataagataaacttacatccaaaaatcttggcgtcagccattgacacgatgaaaatgagtgagaggactaaatacaggttaaagaacaatattgcgtgagcattattagtcttcgccatattataattgtctttcgagttgttatctaatttctatatatatcgtctttgaatatatataattataatttcaatttatattggtgagattagttacttcaattcttcaagtatttatagaaataagggttatagaaacaaaaacattgttgctccaaactgtagtggattgaaacaataagaattttcaattgtggcgattattataatatatcataaaatatatatataatgtaggatctacttagcacatttcacataacaataacatattgttacatagaccaacttatttattaacacgatatggctgttacttatggataggttggtgacaaatattcctctatattttttttggccaggtagagaaattaattgactttctatcgtacaatatatatggccgtcttaattaaataattaattaatgctattattgtttgcttaaccaatggaatattagtttttgttaaactcagatactatggaagataaaaaacttttgttgatatcaacggtcaagttaattttttttttttttttgacaaaatagtaaaacactaataaaataatagacattaatacaaaaaaatctaattagcgggttactcattcattttatataaagtattttatttacacacattaactctaatttgggacttactctactaaattaatttagtccaactccaacaaaaatagaaaccaaaaaaaaaaaaaagaaagagccaacatttagctagtatagaagggaaggaaacacactcattttttcgttgcaaattaaagattgtaaacattgttctttgctagatgaatgaaatgaagctgtgagacatttgcaatgaagtaataaaaagcaaacccatcatgtccaataatgtatatgtgatgaggactagattcggctgactggtaacgatctaactaactaaacagttgaaataaagaaactattattctagctttacatctaccataacactcattacccgaaacatagccta

SEQ ID NO: 1534 - DNA, 3676 bp, Cannabis sativa
ggggtaaagccctacaatcctagtacaattttttttttctgtgtgtaatttattattttagttatttttatatttattcaatgatatttacaataaatatttattattattattaaattattaaacattttaatgtgtgcagggtcatgcaattacaattattgtgctcttctttatgggatgtttgacaaaattgattaaattttgcactaaaactttttggctttgattcatttaagggaaaaatgatagctaggttgattgaattcttgaaaaggacttacttggctcatattgattgggcttgaaaaactgctttggccacacacagcaatgctttttaaagtcaacattttttggcattttgattattcaaactgagaaaaccgaaatacaaagcatttgtactaatgggatatctctttttatttgtaatttcatagtttctttgtacaagcaaagttgtctaattttatcaggcaaagtgacaggtggcttatcataaatcaggaagaaattgatccactatctcttatctactagtctgttgtctattttatacatgtgatgaaacagttttaagttactttaacttcattgaacaagatttggtgattgagtagctttatctaatgggaaacccgatgcttctgcaagctctgaaaattctagctcaccactcagaacctgccaaattgcacaagctttttcagcacttttattgaaaggataaagatgagctgaattttgggatgggatggaatgggagggtccaatggggatatagatataccattatgttgtagataatagataagagattttattggattaaaatcataggcatgtgtgatgtgatgtgatatgcttaccttcccattaatcacccatgttgggaaaccttcaattccaacttctgcacatgatttctccattaaagttccttttttgaatccattagggaagcattccacataattcaaatgctttgctgcttcacgtccaaacatctgttacagtagtaacaccaaagagtttcatttaatattaacaggattgaaaacagtggcaaaacatgcacctatataaaagctaagcaaagtaacaaagaagagtgagttttatcagcctagtccatggggacagaaaagcgaaaatccaataacagttaagacacatatttcacatagggaatatatggaagcctatatagataaactttaaacatagttcagagagatgaagtacctctttttgttctaaacagtgtgaacaccagaatgccccatacattttcgcacctattgaattcaaatgctttgctagagatatagcaaaaggagttgattctgaggttatctcagttggaaagtatggaaggttaatattatccatgctgttgataaataaaaaaggaaaaatagcaaaagaaagaaaaataaatcagtatgtatgaacgatcaaaaatctccttatgcctcaatcaataggtaacaagttcatggttaagtttttcccacatgaaattttaacattatagtctcagtaaattatcagtcatgattcttatctccatcaatacatattttttttaactaactttcccgcttaactatattcgaagaccaataatccatgctaattgctaggaaggtattcaggagaaactcaaacttcagcttggcaaactacaagcctcactatttgtatgtattgggttgaagactaccccattatgcatgtataaataaaatttactaaaagttgaaaatcaattcaaattcagcaagagacaaaataccaaattaacaaggaacaagataaatcaccttgagggaccagaacgagagttactatatgatgagttcagagtaacaatcaccaaaccggctacaaagagttgtaaacccaattcttttttaatctctggcaacccaaaatcctacagcaaaagccccaacaatcaattatatgatctatttgttaagtaatctataagaacacagtatcaaagaagatcaacatacacccaccttaagagtaatgaaaaataagctgaacgatagcagagccgagaggagacaataggagcaagatgacccagaaaacttagtgcttaaaaggtaaaggaagtatccactggcagctgccatggaagtagtagtactaagtaaaactaaacgagcatcagtttggttaagtccaaaaggcaagctcttttgagtaaactgtaaaccaagtacggtaactaatccatatgcaaccattccaataactggaagaggaacaacacctgagaatattaaaaggaaaactaccattgaaacattttgtgggaaatttcaatacctcaagatcaatctgttcaaggcaaagattaaacaaaacagagataataacaatgaaacaatcaacaaagcaaagaactaaaacagattacattgaaaatacacaatgcacaaggtttatcgtcatggaacttttattgaatgaagcttttaagtacaatcttcacagtcaagaatggaactttagggtgcgtttggaactaactgtaattaaactatattttaatatacaaggtttgtttagatttgaggtgataattacttgtgaatttctattatgttcggcaaaatagttagaaattaaactgaaaaatagttagtaaatatttaaaatagaaagtttttagtaattacacccaattctcacaagggaggggcatgagaatcggagggtgtaattgaaaccattgaattaccttaaagatgccaaatcgtataattacatctaattacactcaaatcaattctcacaacatgtgttaacttaacactctctttcttctctcactctctgagattctccagcttgttccaactggttcaagtaatgataaccagtttatatagggtaaagggggaaggagagttacaagtggagttagttaagttagttaggatttaaccaaatcaataaatggttaagtatttcaaaaatacatttcaaaaacacattgcctgcattgcttaatgaagatgatttgagtaaaagaaagtaccgaaaatttgagcataatcgctattgagtatgtcgctgcaagaaccgcctccaattgggcaaaacacactggaattggtgagctttaggtatgtcaaatacgtcgtttccaataacccaatcgctccgagtccgctatacaaattatacgacaaatctctcggagaaggagaagaaaacggagacgatgaagaagacgtcgtcgtatttggttccggttcggaatcttgagaggagcatcttagaggaagcaacagggttctacatccacgaagccaggtaaaagctttgttctttttctgacaaatggtcaagctgagtcgatctgaacaaggattgaagtgaggaagagacgaccgccatgagaatgagggagttgagaagcttgccatggtcgccattgactctctcagtctctgttcttccgaacaagatctcatggagacgaaggtgtggacttttgacttgggcttttcattgggccaggtccttcgtcttcggcccaatttttaacttctaagttagttttatctaaaaatattttcaaaaataccattattcttagctttttgtaacagaaatatgaccaccgatcaagtcttttcgaaaaatc

SEQ ID NO: 1535 - DNA, 3108 bp, Cannabis sativa
caaattgacaaactaactaagcatacctcactttcggttagaggacgatcagcagatataacaaaaagaagcaagtctgcacggggcacaaattcctcagtaaggcgttgttgcctctgaagaatcacatttgttccaggtgtatcaactatgttcatctgcttccacataaactaaataaattagctccattttgatctcatcttctaccaaaaccttggtagcaaataaggttgtgcacaattttctttttccccctttccaaacaatcattgtgacagaaaagaataataatagcaactctatgttcacccactgccgccaatttcagtttatacacagaatatattaacagcacaaaaaagtgagtaaattagctaagtttgtgtgtactccatgtctaaacctacaatatctgagtaggaaacaatggcaatcgctacgtaggtaccagaaaagactaaaactaccttgagtaagcaaaccaccatctaaggtacccacccgtcttgggtgtgactagctattggcatatatatgcacatacaggtatggtttattactaaaataggtatatgactcacccctttaagaataggagcaggaaggtagcatataaattgaccatctggatgcctttcacaatgttgttcttcaccagaattcaagttgaaatgccgcaggaaagtgatctcattagttgtaggaacaaccccatcttttagatatcttcttccaagaagcgcattaataacagttgacttcccggagttaaactcaccctgatattaaaatataaaaccccaaaaagaagatattaggaacacttaaattttgagcaacattcccatacaagtttctagaaagccagctaaattttctcatcatgaaacttatatttctcttattattatatataaattaataggaaagaaaattcttattgtcagagattagaaattagaatgacaagaccaagaacaatgaagcttgaacccaaattgacaattggctctataattatccacaagatatgagagtaatcatgttatttcaccctcaaaatcaaaaagagaagaagctatattaaagatcaggagaacaatggccaaggttataaagtaagaaaatagacgagacaaactaacattagccaaaaaaaaattgtatatttgattgatcctgcatggtttttatgttaaggatctaacaaaagcaatttgggcaggacatgatgagtataggacccaaaaattgctataggttcaatgaatcagtagcagactcaaatggatgaagtatttaggagattcggtacatataaggatgctaccatacttattttgatatcactgttgaacaaagtcgaacaaaggtcagcttagttttaaattctttcaaggaaaaaagaggatttttgtgaaaataagagctaatacccatgtatatcctggaaccagaagttgttgaagttcagcacacaattaccactatagccagcaaaaaaggttcatcaatctgagaaactgcatcactaagaagcgaaacctcctccatctgataaaaaaaaaatacaaatttacaggattcagattcaacaaatactgcacttaataatattcaagaaagttaaaattttgataattatcaacttcaactaccaaataatttaattaaaagatcaccagtggagcagctttccgaatgacatctattgctttaagcaacactgatttctctctttctatgaactgtttttctcgttcctccaactttacaaagccagcaattctttcttcagcagaatcactaacaatgacatcttgggattttttatttattgtgtatacatcattgaacaaatggttcaaaacatcaacactgaacttctcgaaaccattcaaagaagtaactaatccactagcaccgaatctgagcaattttgatgcctcagtaaccaacttgtcctcatcatatgaattaaacaggacaaaaatcggtatcttgacattttcacatacagagttcagaacaacatccacatttttctcgtcattaaaattgtaaataataaaatcagctccttcagagttagatgcatctaaagcagcttccacagattgcacatttcttgccaccaaaggaaggaccactgaatcagacttagaatccatcattgtattccttgctacaataacaggaaggcctataaccaaattcacaacgcacaagttacttactttcctatagaattaagtttttataatgtagagtgaattgaacagactaagctatcattgcccagaaactaaaatcacgtaaatatgactatatattatttttatacaagttagaacaccttgatcagagagcacaactccactagccttagctgcggcggcaatatcgactcgttcagaaaccaacaaataggcgcggtctctaattacggcctttaacttgcaagcggcttcgtagaccttcccaccagtagtttggccgctggcattgagaatgacaatcccgacccatttggacacagccctgtcgatcaaatccaatgcagcatcatcacccaagacatcctctgggtccaactggagtacaaaattgggaactttgatctcaggccgcttgtagcccccggggaagagagtccttggcgggtcttgcctctgcaggtcccatcgacggttctggtcagaaaactgatatgggttttgggagattgaccttataggtaaaagagtacggcgggggtggtgtttgaagcgagatgggtggatttgcagaaatggggttgggatgaaaaggagtggacaagtagtaggagtagtagaagcctgagaaaagagaaagggaaccatgggagtgatgaaatagaaaaactgggaggtgtagatgcacctcacagaaactggaatggtaccgttgggatctgtagcgggaaatggagtttgctggactggacgaggaaggaaggcttatcggtaaacgggattccaatcttatcttttcgacaatgaaatcactactagtcttacgttagtagtaaatggggtttttattagacacattttttaacttatttacctttttttttttttt

SEQ ID NO: 1536 - DNA, 1876 bp, Cannabis sativa
aggttgctattagtaaattaaattggacagaaatttttgaatttaataatcttaataattcaagtgaaatttttaacaatttaaaaatttcaaaaaatgcaatttagtacatgttaaagtgctgaagagaaacatccttattaacttataatttttcctaaaaataaacaagtagtgaagtaattggttgtttcaactttttgttgtggtcaagtactagtttcaaactttcatgtagactgtagtagtggcagtagtagtagtcatcgtcttaaataactattttattttaaacaagttggagacatgtgattctagaagttgatatgctcacagtgaactagattagagttgggtgttgtatcttaagacttaagagtcaggagcctaatttataggtttcagaagcatgttgcccagctaggatatagtactactattaatattactcttatttattatataaagcacaccatagaaattaaatataaaattaatcacacatcttttaattatgactttgagaattttaaaaagaggtggaaaaaaaaaaaaaaaaaccaacaacaaccattgagatgaaaactaattatcaacttaggcggcagtgtagttattaagttaaaaaaagaaataataataacaatggaactaattatcaaaatggcatatattttggcaaagtatatgaacagagcttaagtttattccagctcatttcttcttttggtgttttgaaaatttaagaaccatgcactttcaccaacgatgtgacagattcataaacaagtttttgaccatcttaatgaaaaacaataatggttttttcctggttagtattgtatttattaattaaaagaagctatagcctataggtagatatatcctggtaaaaaaaaaaagtgtggttgaaactgaagttcctcaatattaaatgtcaaaaggacatactgtttggcatatgtaatggttaatagatgattaatagcgcccgaaacttcttcaataactaaattataaataataaaattcattataattttggattctaaagtgttaattaggacacttaagccttattcagagggcaaaattaaaataatctattgtctcatgtttggattgaatcaattaaaaaaaaacttatagctaagagtgtttataaaatagttcaattcaattcgtacgattcgattcaatcaaattcaatctgtaaagtgtaaatatctgtacttttacagattggattgaaaaatctaaaatttgtacttatgcaaattggatattgattgacattaagtaaaagtaacccatataatccaatctacacacatttatataaattttttaaaaattatatatataattaatattttatgtaaaaaataaaactttaaaaatcaaacacatataatataaatatattttaagtttaatagatgaaatgtttatttaatttttatatgtatttatatataatttaaacaaaattaaatattttttgtacatattttttgtacatataattattttttattattttttaaaaaattttaaaaaatttattattttatttattttaatttgttgttaaagacataaaataataataatttattttactttattgttagttatgtgacactactacaatatggaatatgggtctttagaagctttttttttttcaaacaattttataaaaatggaagctacaaggtgtaaaaataccagtatggttcaaaattgatatttaaagacagtttcttgtaaaaatcgtaggtatatatattgtaaatactctttagaggcaattttagaatcaggtatttaggatatgtgtcgagccatctatggcgtctgttatttaaaaata

SEQ ID NO: 1537 - DNA, 4413 bp, Cannabis sativa
aaaaaaaaaaaaaaaattgctatcaatatctatatccacttttcttttctttaaataataatagataagtttttataaaaataaaaaaaaccaattacatttcttgtttttaaattttttattcacaaaaataaaaataaaaatatattctataaccacttttattttctatttttaaaagtagaaaacagaagcgtgtttcgtaaatttcagttgaggtccgggtctcaggttggggctatagggttcggcttcgaagtccgagttcagggttcacgttaagggacgtggttcgagtctagagtcaagtccaattcggggttcaaggcaagggtccgggttaagggacgaggtccaggtcggagtctgggggtcggtccacggtccaggtccgagtcagagtctgaatctggggatgaggcctgagtcaagggtcggggtcttgaccgaggccgagattcaattcttgatttgggtcctggtctgggttcggggttcggggtctgggtccagaggcaaggtctaggtacgggttgaggtgaggggtgtgagtcgagcaccggatccgaatcccaaagtcaagttgcggtcggagtccaaaatattgattaaaaaaaaattaaataaattttgaaagtgatttttttagttttcaaaatttaaaaaatgaaaatagttttataaaatatatttttaattaaaaaacaaaaaattaattaaaaaaaatagtataaacgaaccccataacatacaactttaatagaacataacatgtcctaaatcaatcccctttacataatttcctaactcgttaaaatatattgtccttgggttaataaaagggtttgaattccaatcacaatttttttttgggagagattatatttatctttgagaaactagcttgtagtgacaatatcattaataatatagaattcttgattaattagccaattaaaagagaataaagtataagtcccttctaatttatacgttgtcctcaaaattgttaaaaaatcaaaagagtgagaaagagaccaacacgaccacaagaccacactagtaaaataacagtcacaaaataatatccaatatttgataactattttactctagaaactcttgtataattagattagttcaatgaactatatttgatattggacatatatataataataatatagttacaattacaaagtgtcatagtttgttgtttcttccttccttccctaattttttataatatttaactacgtgggtaatctagacatcctaactaaagtcatcaccaaaataaaggcaataaggctctttaaaccataatgatgtagagggctagctaacattatttaagattactgttagttgtagtataataatatgtaggaactagattttggtccccattttatatgttaaacacatatattaattggttaagtggggaataaaaagaaagcattgcatcattaggtacacataatacattccattcttaacccaataaaaatatcaaataagtaataaaaattatggttcgaggtggtcggtatgaatatatctctttgctttagacccaccaagcttcatgcttctaataataacaatcactaaccacaaaatcctccttttctttctcaaatccagataatcattcatatctttttcctctttatattataggacatagccactaaagcacaaatatatatatttataaaagtatttatatacattgtcattcatcaattcacataatttgatgtcacaaattacatttaaataaaattaattaaagaagggctttttgctcacctttaaatcattaataaacaattgactaattaagtaacttgggtaaggatggattcattcttataataggattttgtaacatttattttattttatttttaggaaagaaaataattcagaaaagggagtactaaaatgggccctaccaaaagagcagaggtggcacagtaggcggcgcgtgagagcaaattactaaaagtgaaaaggaagaaacaaaaagaaaacaacaaaaactatcctagagacagcgatggatgtaatcaatgaaatgaaagaaaaactatattatcaaatcaataaataaataaagggaatcatgaagaagagggaaaagggcaaaaatggatattatagtcattgtactattatggtcgatagataataatatacttatacattgagagaggcagtgaagcatgggccgcccttggtgtggtgacaaagctgagttttttttttgcttctttttcatattaatgagttacatgaagaaaattcttttaaaaacaaataaataaagttacatgaaaaaaaaataaaacttggttggggggtggggtacatctcccacaaactaaagggatatacattaatgttgtatggtggaggtggttttataagttggattggacttttgatgataagcaaaacgtgcccaaattataaaaattatattaaaaataaaaaatcatcaaaagagttaaaggggaattcccaatcccatgtcattttattagccatatgataattctagaaatttgcataaggtatcacagcgcaattagtcaaattgacgtggaaatttcttttattgattatataaaaaatgagatcaattgatgttgaaagcataaaaaaatgaacatttaaatgagttattagtttaacaatccctgaggcttgcttaaaagttaaaactgtattggcctatttgggaactttcacatgtaaagaataatgctttggtattaatatactgcactacttacttaattactcttcctttaataaactataagtctaaaaatctatgtttaactaattgctaaactaataatattatcaaaacaaaaaaattgctaacctaataatagtactaaaattgaaatatatacatttttaagattaaacttatttattattaaaaaatatttatatttatattataatcacttttattagatttatttaattttatggaaaattttctattattttaatttataattatcaaattaaaaaaatatatttaattttttaaaaaataatatttttattagtggaggctatagcaccccacccacattaatactagtgggtccatccttgacaccaaactaattaattataaccaactatatggtagcattagcattgcatgcatgccaattaatgtgaagctcaattataagaataagaataagaataagaataatggttaaacattatatgtttagttcttctctttaaatggttttatgaattgcaatgctctaaatcaacaaacgaattgaggtttatttttaccatttataaacattaattagtcaagttattgataaataaatttaaacaagataaatattattaattctagtataggtttgacttatttgatcattattgctttaagaaaaatgttaaaagatataactttcggtctcgtatggttattggtgaattaagtattgagttttatgtaatttaagaaaatagcttttagaccaatatcgctaatttattgtaagacgtcacctataaaaggtactcacacaaatttaaaggtaccttttataataaaagaaataatattctagaaaagagtagttgatgacaaagatcatgagaacttaggcaaattaatcaacgtatctcaatatcaacgttttatgactaaaataaagaagaagaattatttgtacatgcaataaaataatgtccaccgaaactatgttataagatgatcaaatccaaagttaattaattacacataacatatatatgaccatttggaaaaaggaggagtatatttcagtaatattttgccattctaattaagctacaattggattcatcatcatcaaattatttacgattagacaagtaaagcaggcaccatccacatgcaacattaatatttgggaaacaaacaataattgagttacaacaataataccacaaaagatttataaataaaatgatgatggatttaaatatcagagggtcgggattttggcatcaaattagatgagaatgagatgagttcccatgataagacatgcagcctttagtgcgccctttgtctgatttgcatatatattgtaaaataaattaataaaaaagaaaatgcatatatatatatatttatgtaatgaaaaaaattgtatgttaaaattgtggtgaggacaaacatcattgctggtacgacctttctctctcatcttaaaaaagcttactcggatttgacatctacatcacgaggaaattagagagaatcagcagaagcagcagcagcagctgtgatcaactctctaccttttcctctccgcataccaccacagcatttctaatatttctcaatttatactttgttta

SEQ ID NO: 1538 - DNA, 1568 bp, Cannabis sativa
agaggagaccatatgtataaattattaatgtcttaacgtttaaatattgaatctttttttttcagtttttcttttttttttttactattttttattatgtgatgggtttggcttttcttatttactaaaaaatataaaaaaaattgtaattttttaataatttaattataagaaaaaacattaatttagacgttgcattcaaacctaatatatattttcatgccagtctagtaattctattttctttattcaaagaaaaaaaaaccactcatcttctacatttttcttttcaacatattagtgttgtcaaagaattttatacaagtaaaaatattttatatggactaacataattaagtgttgcttactcagtgttggtatttgcgtataataactataatcagtaattcatagtattattatcaggctataatgagataaacattacatagtaacatgttcaggacccatagacacattctaaaacgtttttagtcagcccatggagctaaaacaactactcctacattgggcatgtaggcccatttttgacccataattcctcataaaagggatgtgcccttttatttagtaattaatgtgaaatgtgtgtttctaagatatgtgaacagtgtaaaagagttgtgttcatcaaatccttgcatctcattcttctcttttgagtgagtagatttcatgattaaaggagcacaagtgatgatatattaagacaatggtgatttacaaggtaatatattttattcactaatattttgatgccttaaatatggtggtatttttgataattattgagtataattgtcatattatataatctttgattaatattgtagtgctcaattaatttttaacaattgataccaagactttggtcatctgatttactgctaaaattattttttttaacttttatattttttacccatacatttttgaatactcacggttggttttgggtaaaaccattttaattttttttttttagattttgcatttttatatgaaatttaaactttgaaccttcttaggctgttgcaataattttattacaagtgttttaagtatgttaactaaagacaatggagaatttttttttattttttgacaaacccatatatggtcaaaaaagtgtaatatatttttgagtttccagagtttctaggctaaaatgggtaccgaaaagggattgtgtacgaaaaatggtgaaattcctctcgaatggcgtcgaaaatggagcactggaggtcgtgttcagtcggttgaaaaatagggttcgaagtcgaatcgcacgacctgtgcgcccagttgaaaaagcagggatgacctcaaacaacttcgtttcgatctctattagaccaaacaacgtcttttttattgaaggggctgcattttttgtttctggcaaacgacatgtcgtttttggaaaacgacatgtcttatgattatcaagaaaaaaatattaaaattttaaaagtgcgtgtgtggcccaaattggaccaacttttcactatttcttttccatttttaattttttaaattaattgcgt

SEQ ID NO: 1539 - DNA, 1910 bp, Cannabis sativa
agaaagaggaaaagaaaaagttttgagatttacacacacctttcaaattctttttagattttgtctttttggaattttattgtgaaagaatttagaccttgttttttttcataagctgaatactacttgtgtttacactagatgataattatatatagatgcagggtatacaacaaaactaaaaaacaaccaatccttaataaaaacaagttatccaaacagggaagaataacaattgaaacactggtgttcacctttacaatcattatatttaaagtaagacaacatctcaattatctcttatatatatagatgaaagaaaatgatatttggcatcaaagttggttatgtgcatttggtatacatagaagatttgaagattatggcttaactctgtatgtttttgtttcttatctgtgataagattatggccttggcagcaatacccattgattggtttgtgatggtttatgtcaataacaactataacttttatcaggttcagtaatggaggaagggttagtagattcagaaccttttcctccacaaggccctcaacactcagcttcattcgggcactggatttccacattaaggaaaagggcatgtgaagcatacagaagaaagccaatctcatactggtttcttctagttctgagtagtagtgcaatgcttgtggcattccctgcttcaagcctcctatctcgtctttatttccaaaatggtggaaccagcaaatggatcatttcgtgggctgcggttgcagggtggcctataacagctctcatcctagttccaacatacttagtctgtaaaacacttcccactcctttaaccttgaagctcacttttgcatacattgtgcttggtttcttaagtgctgcagacaatcttatgtatgcatatgcatatgcttacctccctgcatccactgctgcccttttggcatcatcttccttaatcttctcagcattgtttggatatcttcttgtgaagaataagatcaatgcttcgattataaatgccattgttattatcacagctgccatgaccatcatagcattggactcagattcagacagatatggtaatataagcaatagacaatacataatgggattcatatgggacattctaggttctgctcttcatggcctcattttcgcactctcagaactagtttttgttaaaatgctaggcagaatatccttccatgttgtgttggaacaacaactcatggtctcagtattcgcctttctattcaccaccattggaatgattttaaacaatgactttcaaggaatggcatccgaagctaaagttttcgaaggtgggaaaacttcctactacctagttctcatatggagcaccatcaccttccagctcggggtgttgggagcaacggctgtgctgtttttgtcttccactgttcttgctggtattctaaatgcagtgagagtaccccttaccagcattgcagctgtcatacttatgcacgatccgatgagcggtttcaagatcctctcacttactgtaacattttggggttttggttcttatatttatggcagttcatcagcaagtaaaggccccatatccacatgaaaaatgcatagtagtattagaggtttcatggcagtcagtttattatatattactcctccattatattatcaataaacatcagtatttatgtaatttatccacaaacaatgtaaatttattcatgtatcattttataattaagtgtacaaaattacttaaatgagatgaattttctgactaagatgacacattccaactcaacacacaagaattggaagtcatttctacagttgaagagacaagctgtagcttcttctaaattctaattcttttagccaatgagtaaagtgaagttggtggccatt

SEQ ID NO: 1540 - DNA, 1552 bp, Cannabis sativa
catcacctactttcccatctatgatctttttatatccttttgactgttatctgtattaattttttacctatttctcactaaaatctaaaggttttaatttgttggaattttattattaccaggaagaattcctgttgcagttaaagctattggtaactatagcactgctgctgttactgaggagctcatccaaccatctattggtgttgattatactaagcttttgattaatggaaaatttgtggattcagcttcaggtgagattttctaccttgttgttgttgttgttctgatttgtaaaacaaaagggcttaaaattgtaccataatattttcttaatgtaacaatgtaacatttactgtttctcttatggtctcagggaaaacctttccaacatttgatcccaggactggagatttgattgcaaacgttgctgaaggcgatgcagaagatataaaccgtgcagtttctgctgctcgaaatgcctttgatgaaggcccatggccaaagatgactgcttatgtatgtaactattaactgtttgcttatttcatttgctctatgttactaactaaatacttcaatggagtttgttaggatccctacattgaccaactatgagactagttagtagtatataattacttgggcaccctccttttttaggctacctcctcttaggagtgagttctaccccagtagtagttgtatcaagtggtatcagagtcatgcaccctcaagtggggccgccgtggacatcccctccaaaagggggtgtatagctaagatcccagtatgagattggttgtatcaagtttctaacaacatacaaatttataccatccacaggaaaggtcctgcatactcttacgttttgctgacttgcttgaaaagcacaatgatgaacttgcaaagcttgagacttgggacaatgggaagccatatgaacaggctgctaaaattgaggtacctatggtggtacgtcttatccgctactatgcaggtactcctgttaaacatggcttaaaaactccattatttgtagtgatattcctataaaatcttaacatgcttataatgccttaggttgggtggataagattcatggtttgacagctccagcagatggacagtatcatttgcaaactttgcatgaaccaattggtgtttgtggtcagattattccatggaactttccacttctcatgcttgcttggaagctggggcctgcattagcttgtggaaacactgttgttttgaaaacagcagaacaaactccactttctgctttctatgctgtaaagctgttgcatgaggtacctcatgaaacttatcacatttttgtttttagctttctactttgtatgtgtatatatttgggtaagtctatagtagactccctgattgggtgtttaagtacattttttggcatccataagagcttttagtgccaaaaataagtttcaaacagttactttaaaacagtcacgagtgcagcaaaatatttgaaccttacttttagtactgcaaattattcggaattttctgaaaa

SEQ ID NO: 1541 - DNA, 1635 bp, Cannabis sativa
ctctcaacctcactacatgacttttggggatgtaggtggaatctcatgataagacatatattgcgtcctacaatatacgagcccaccttgaacctcgtgtcaccacttataggtcgaaaatgggctccaatccctgctattttgggaacttttgtagtctctggccttgttcacgagctcatttattactacatagcacgcgtgactcccacgtgggaagtgacatcattcttcatactacatggattgtgctacacaatcgagatttgtttgaaaaagactttgattgacaagtggcaaattcctaaggtgatatcaagaatgttgactgttgggtttgtaacattgaccggaatttggttgttctttccacaattttttaggtgcaaggccgatgttaagttggtccaagagtatgcatattttggtacccttttgaaaaatatgatagtgccatacatatcaaaatgaataactctaaaacaagatataagttagaacattaatatcaaagatttgaaagaaaatcttttgtcatgtaacctaaaaaaaaaattgcattttggtgctaatctggccaaattgtaagacattgaaatttattaattttatgcatgtagacaaatgcctttgattgctttggtgtcatcttctataattaatttgaattttccaaagcactatgcaagatcaaccactttcacataatagaatattaatatttcaaaagagaggaataaaaaaatatataagaagcaaattaatatatatatatatatattatcatgatccaaacataagatgccaaagcacttaacttcatataattattcaaaccatatattttgtttaaatacaaaagtctgtctaaagtgctggatctcatattaattataattattccaaagtcttgatccctaaaagctttggttcttctccactttgcaaaagaggttgatcaaggtaaaatctcttctttcttcatcaaatgcttcatatatatgattttgactctttattatgatctttttaatgatatcaatctttgtttgaacatcaaataaaattagaaagaaagaaggggaaagaaaaaatggagggtgaaatgaacaacttcatagaggtatggtttttagctttggtttctttatcttattgctatgttatgagtaaattaatctcaaaaggtattaaaagactcatcttttttctcccaataatatgtctctttctctatctccctctcaaactaaattcagttaatttagttggtacaactagcttcttcctttcatggctagcaaatttcaaactcttactcttagcttttaacaaaggccctttagctacttcaaacccatcaccaatctcttttggtcgttttattgttatagcttctttccctattgagatccaagaaaacaacacaaacccatctaaagaaaagtctaacaataaaataccaataattagtttcacaataaagactcttcttttggccattttaattcgagtttgtgattacaaagaccaaattaaccccaatgtagttttggttctttattgttttttagtttatcttttacttgaaaccattttggtctttgtggccattatggttcgagtcgtggctgg

SEQ ID NO: 1542 - DNA, 966 bp, Cannabis sativa
tttagagggattacaaagaagatttttgcatgatccttaggtcacttctatattttgccttctgccaagcttcttatggcttactctctccccacctctgttgtttcaattactccagtgcagttttcaggacacgagaaatttggtttttctaattttagtattttgttcattcttctttcgatgatctgtggtaatggttttacatgtgagttaaccacttaaagggtcagttgtcttctgactttatatatcttaattcatcagagttctccctttgaaggagcaccagaggagttcgatcagactatattttccgtgcagccggacagaactattggctcagttgaaggaattgctcttaactttataaaggagcaacaaaggtaaatacttgtctacacctcacttaccattgaataggcgagtaaactattatttaggttttattatagatgtacataccgcacaattgctttctggtaatagatgtacataccacactagtcttcaagtttcagaacatgttgtcaaccaaaacatttccatcatattgtctaactattctgttaaattcagtgcaatcgttcttttggcttcttagctttagatcattgtttgatagacctttccctaaggcttatgtgaggtgtacagcgagtgactagttgggtactttgtggctgagattgttggtttgcagtgtttttcagtcagtttcttgttagtagtttacaaccaaaatgattgccagtgttccgtaattcattgactgattggagagtggctaaggtgactgttgtatatcgactataatctgtttttgagactagaactgaacaataaagagctttccttggaggagtgctagcatagttttgactaaatactggaatctttgcacattcgtgcattaacatatgcatatttagatagaattctttatgttaattgttacgtgaattt

SEQ ID NO: 1543 - DNA, 1770 bp, Cannabis sativa
tcaaaatggagagtgaataaaatatgaggtcaatgtgcttaatgctatcaacagaatatttgatatagtttatttagtaagatttttctttcaaagcacactcaacaaaatgtggttaatcagttattgccaatgaaaataaaattagtgttgaaaggaaatgatcaagtgtacttttatcttaagaatggtcattaagattggtagccataccattaccattgattctgtattatgtttttgtccaaggtaagaccactcttgacttttagtcttttttgttgactcattagatcaagctatggaaaaagtagcagaagatttgagagatatcaacagcaagtatgagcaggacaagaaacggtgggcagtggcaatcaatgatttgcaggaaaaaattgaggtagcaattaaaatgcatgtgattgcagatcagcatcaacgtaaaggaattttactctcgttgatctaagtttattgacacaaatctctgattgcgtttcttatgcagcttatgaggaaagagcattctaaactttcacacgaggcacatgaatgtgccgattccattcctgatttgaataatatggtttctgcagttcaagctctgggtatgtttgatttactttaatattttcttttaaacttgtgcatgtttgctcttactttcattttctgttctcaatgtatttacatggacttcgggaatattactacagttgcacagtgtgaagatctgaaaatgaagtacagtgaagagcaggccaaaagaaaaaagctcttcaacgaaattcaggaagctaaaggtatattttttttttcatatttcctgatgtatcatggtttcttatacacaataaagttcatatatatatatcttgaattgttttaggcaatattagagttttttgtcgctgccgcccattaaataagggggagttagcagctgggtgcacgacagttgtagactttgatgcagcaaaggatgggtgtcttgggattttaagtactgctgcctctaaaaagtctttcaagtttgataaagtttacacaccaaaagacaatcaaggtattgtagttatatagtttgattgcctatcatgattttgtttgctgaaacaattatgaacatagttattgattgtgttgacagatgatgtgtttgcggacgcttcaccaatggtgatttcagtgctagatggctacaatgtctgtatatttgcatatggacaaacaggaactgggaagacttttactatggagggtactgaacagaacaggggagtaaattataggactcttgagcagctgttccaaatttcgaaggaaaggagtgaactgtttacgtacgacatatctgttagtgtacttgaagtctacaacgagcagattagagacttattagctacatcaccaacatcaaagaagtgagattactctttctttttcttgaacatagtcaactgaattggctgactttgcctaaacatttttatcttttgtgttattgtttgttagattggagataaagcaagcctcagaagggtctcatcatgttccaggaattgtagaagcgaaagttaccaacattgatcaagtctggactgtattgcaggctggaagcaatggtagagctgttggtagcaataatgttaatgagcatagcagtcgatcccactggtaaggattctaaattttctttggcaactaagttgcaagtatgtttggtttgttggaatgggtattgtaatggaatcaagttacccatta

SEQ ID NO: 1544 - DNA, 1941 bp, Cannabis sativa
aaaaaaaaggtcagaaattcactacacacccaccaatgccatcatgaggttttgataaagcctataacagaaaaaactgactgataaaataaaagtaaaatagatagataataataataaactaaaaaagaaagtaatacaggggcatttctgtggaagaccattctctgtaaattcttcaaatcaaaatacaaaaatttaaggtcttcttctccactgtcatcctagttacccttctaccatgtttttgtttttccttgtctactaatatcggcatgatccttggcgagacgagcaaaccaaccttacgaggcttaataaacaaattgaaggccaacatttacaggttttgttctcttcattcattcatctgatgaaggcttgtaatccaacatctcctttatgtttaaccgaatcgaaggccccattgatgagcatataaatgcactcttccagtaaacacctttggctcctgatggtttatttgtttctaccgatttctgtcatattcaagtgtcgaaaaacatgttagtttcttttgttagctgaaagtgagtgaattcaatacaatgaatgaaacgaagaagacatactattgcagcaagcaagtttataataagatcttcctcggaaaagtcaatctttccaaaaggcaaatgaactatcccggttttgtccgctctgaattcaacctttccctgcttgaattctgcaatagcctgaagaaaaaaaaaaataatggagaccggactcagtcaaaactaaaaccaactgcatctacaacaaaaaaatatttcgctacattgaaataaggttttcaatttctccattttccctgtcaagattcatagtttagatttagacagacatgcatttttgtgaaagtttaggaaagactcgaagtcccacttaaagcgactacacatttatcggaaaagctctagcaagttgctaagagaaagtgatattctttaaatcgtacctgagggatattaggggtcactgtgccagctttgggattcggcatgagccctcttggtccaagaatttttcccaggctagccacctaagacgaatatggaaatcattaaaatgtcttatttattcaccgattattgcatgttatgtttaagcagttcatataatttagttaagacaagatgttcagagcaacaccttaggcatcatatctggtgaagcaatcaacttatcaaactccataaatccacccttaatctgctctatcaaatcttctccacccaccaaatcagctccagcgttctttgcttcatcgaatctttctcctgtagttataataatatctagtcaatacaagcatgtggaagaagaataaaacgaaaactcaatcatagcacaaagagtccatgaacctttcaaagaaaattaatttacacaaataactaggtaaaaccgttttacataaaataagcactcaattgtagtcgaaagagaacttttacaaatggattcctatggagaaatcatgagcattagccttaaccgacaccaaggttgcttggaaatgcagcccataaaacaaatccacttacgggaaaatcatcaagattacaagcacaagctcataacctatacaccaaacatacgaaaaatggtacacttgatatcctaagtgtcttgttttcagtttgcggatattgaaaacggggaagggccaacataacatggaaaacatatgattaaaacatttcctaaacttacatctgccgaatatcatgtaaaaagagtctaattggttctttaatctactcatacttaccccaccataaaaccttaagcttgtaaatgaaataagtatgtaagtcgaaatagagagaagcaaattagcaacaaccttgagtaagaacagccactttgacagtctgtccagttcccttaggaagatttacctattaaagaaaa

SEQ ID NO: 1545 - DNA, 1150 bp, Cannabis sativa
ttcaccattgcctattttcctgcataggcccttttccagcacccctcgagcatctaaaatagctttccaaaaacccgagtcaccaccatttctttcaatagtaaggaagtttctgcctcgaatatatttagcattcactacctggccccaaacactggttttatctgtgagcgctttccacgcccatttagccaaaaaggctttgtttataacctcagtgcttctaaatcccagcccacctcgaagttttggttggcacagattattccaggcaataaggtgaattttcctcttatcattagtatccccccaccaaaagtctctaaggcatttatctaccttttgagcaatatttctaggtatcgggtctgaggcagcaacatatgaggttagggaggatccaacagattgtattagacaggctcttcccgcctttgagaggagcctagttttccagatctttaccctttggagggccctatcaactaggaaatatagatccttagaccgattgagtgatttgaaaagcggtagacccaaatatgttgcatccttcttcattcttttcatattgagaaggtctgcaatttcccttgccaccccagtagacactcccttagaaaagtacaccgttgatttatgatagttcaccgcttgtcccgacgcagaacagtattcttgaagacattttaggaaaccagtagcttccttcacagtcgctttgccaaataacattacatcatctgcaaacattaagtgagtgatggccggtccatccctagagattttgaatccttgaatgtgtccttcattttttctttccgtaatgagtctagacaggacatccgccgcaatgataaatagagcaggtgaaagaagatcgccttgtcgaagaccacacgagggagagatcataccttgaaccgaaccgtttatgagtagccccatcttctgaacaacaatgcatttttctacccatttgacaaacgtttggtgaaatccgagccctttaagggtagccacaataaagttccaatccatcttatcataggctttttccatatctaattttatcatcataaagcccttttttcctttctttttcttcatggaatgaataatttcctgggccaccgctgtattttccgca

SEQ ID NO: 1546 - DNA, 3783 bp, Cannabis sativa
tctctctctctctctctatttttgcaggtcaacgaaggttcatgtcgatggagcttcgagtttcatgttggggccaccatggtcacaagaaagagagaagaagaaatcaagagagagagaaatagatgcgataagattttcagagaagaagaaaaaaagaaaaaggagaatcttttttttcttttttaaaattttaaaattttttaatttatttttttaattattaatattaggtggacaataaaattttgccatgtgtacacttatgtacacagtggcactctattttgacacttaacagaccaaagttgacagaaagagtacaaatcaaaacagtttggaggttggggattcaaccctaattatttcggtctagggggttgatcgtgtcaaactatcatttgtaactttatttttaattttttttttcaagtaacaatatcaaatacctaaaattgattcgtcgacttcagttattgattataggcacatagcttgttgtaacactttatacaaatatatactaaaataatgtggtctagattgaatgaggtccttccttttaatccatggaatcaaggtttttttttatcaagaatagactcttagctcacaacatcttagtctttcaagatttgcttaaatgttacactcggaaaaacatttcagctaaatgtctcatgaaagtcgatttaagtaagacttataatatgattgactcagaatttgttgaacgccttcttaatggcctctgtttctcaacaaaatttattaatggattatagtttgtcctcaaggtaccttgtatactctattgttaaatggaagactggaaccttcataggtgaaaatgggctacattaaggggatcagatttcactattgttatttattttggttattgactatctcactaggtgtctattccaagcttctcattctaaacgctttaggtttcattctatatgtaagtctcttaactttattaatttctactctacagaggactttgttatgttttgtaaaggcaatgttccttctttgaaaattgtccaagaaacttttgatgagttttgtgcagccatagggttatctacaaatgggtccaaatcttccattcattttgaaggggggaacgaaagaaagcaagaaatgcttgggatatcgaagatggatgaaggttctttcccttgcgagtgcaacataggccaacaaaatggaggtcaccatgatggaattattagaaaagttaagaaaaaattacatagctgagcgacttgtcatctttcatttgtgggtcgtttttagcttattcattctgccttgttgggtgtccgtaattattgggtggggatttttatattacctcagaaagtcaatactttaattgacaaattatgtcgtgatttcttatgggcagcaatagaaatcgcagtaaacttcactttggttcttggaagcatgtgtgcttgactaaggactatagtggtttgggtttttgaaaaaggaagaagtggaacattgctttgatgacaaagtatatttggcctgttagtaccaaacaagattgcttatgggatcggtggatcaatttggcgtatctacagacgatgggttttggtctttgactcctaattttgatgctagttggtatgtcaaaaagctaattaaactcagagattgtattgacaaactagcaatgatgattgttggggtcttgggtagatacaaggtgaaaagctattatcattcttttatttgcctggacaaagttaagtaccataagttggtttggcatagatttactgttccaaagcatagatttattttctggcagactattaacaattaacaattaatttgttgactcgtgacctgattgacaagttcatgcctattaactctcttgtgtgtcttgtttgtgatcttgaaaatttataataaaaaatgattttattgtataaatgaattactttataaattatgatatatgtgcataaagttttaatcacccaaagtcacatgtcccactcttaatttttgtggttaagaaaacgtaccacctcaaaacggtaccgttacttcttttctacgtacgttaatttattatcatctcatgagaaacgttttttctttttttgtcataataatgttcaaaacgtttttagtacatcttaaaatcatcataattcaatatttttggaccattcaaaaataaggtccgttgaagaaaacggattaattaataaaaacgtaaattaaatgattgaccgttacaaatttaacatttatcaataaactaaacatatttgaaaaagatttacgtacaaataaatagattagaataataataataataatcaacacaatttgccatattatagaacacaatttgccaagtaataatcaacaaattaaaattcatcttttttcctaaacaaaatatgtattcaactcataaattatgagatatttttaaaatgaatatacaattgaagaaaatattcttataaataaatcaaaaaaatcaatattccactttcttactaatcgaaaagagagagagaagagagatcaaattggcaaaacaatgaattataatgaccaaaattcaattttgtataacaaatatagttcccatcaaattaataattaataacaatgaaagaaaaaaaaaaacaaaataaacaaattgtatatttatatatatatataggactaataattaaggtatatgatatagcttagaaggctttaaatcacgagtaacattaaaataattaagtgtcctaatccacttttcttgattcttcaacaaatgaacagcaatagtattaggccaaagttcatgtgtacacccagttcttggctctggataattgtacattgaccacttagcattaattctatttttacctctatgcccttctttaatccaatcaccaaaagtcttatcttcaggcccttctaagtgattcctaggaatctctgattccttaatccattcaactatatcccatgaaaccatgtatcccattcctgacatgtaatgcttaaaagggtccatactaggacaagggatcacataaccatagtacaagtcttcttttgatgcacctctaagtgaatccactaagttttcgagtcgaaaataagtgtcgtcgtcggctttcatgacataatggtaaggagggtaatctttatttgttgtgtcgtttaacatttcgggtaaactagagaagtaagtgtaggttttacctttgttcatgttctctttacaatcgaggattatgatgtcgtcgtgtctcattatttccaatgctactaggactttttggtcttcttttgttaggttgcaaaagacgaatttgacatcgattctggctccagccggttgtgattgtgtgccatagattaggcggaggaagtggcggcgatggtattgatcaggtagggtcaatatccctatgagtatgcgaatttcgtcgtttttgttatcttctttgtctgaagagttgttgttgttaaacgacatagaatggttggtgtcattttgttgagggcaacgacctaattttaagaggtacttatcgaaacgaacttcattaatcgaagccaaagcacaaagacaacaaatgaagaacaaggagtagagtatgaagcctcgacgatctgtcgttttgttgtttcttagtaccatttggttttgcattctaatttagagaaaaaggcttagaaagaaataatgtgtatttctttcttttgagagaggtttgggtttgg

SEQ ID NO: 1547 - DNA, 1608 bp, Cannabis sativa
gcttcttccctgtcctctaacttccccagtttgtcatatacaattgccttcaaataaaaagcttctgctgccaactcatgatactgcaaaatcataatcataatgattcgtattatgacagcactaaaactccgcctttaagaataaaaaatatcgacacctaaggtgtgtttatgcagcacaagtgaaaactaaagagttaagagggccaattatctgaggtatattatagatatatatcataaaagggaaataatgacacattttggatgaaaggtagagatacaggagactggagagaattgaatgttgtcctagactagaattgaatgcagcagtaaaccataagttataagaaaattatcgtgcctttcgtttattgcatgttgtaattgtaacacaaggaatacagaaatgcacttacctctagtacttgaagttcgtcagaagcttgactcaaaggatcgagcacaatctcggcattttcagaaactggagaggaattcaagataggaaaataagtacattatgaggtcaatgttatcagatggcttgtattgtaatccatcaaaaaatttcaagaataagaaccaagatatttatgactgataaatgctatcaactctaacaaaacttttcaagaataagaacatgatatttatgattcataattataaagatagtgttaagtttcaactttaaaaattgcttaaggagttaggaagtacttgaaaagtttggatcagacagatagcattttgcttctacaatataggcccgtgcacggagctccaaacctccatgaccaagtattgttggaaggaccccatgtataagagacaatgccctttttgcatggtttgatccaagtgaaagccacaattccgccaatgtcagtacggctgatgctcttagaagatccaagttaaatgattggcagaaggaaaggctcgccaatgcataagggagacctaaaacaggatttcctgatctctggaaaaataaataaacaaaaccagaccttaattttacgtttacaataaagtgaacttaagcaaggaaaatgaaaagacaactatacagtgtgcagaatggttttgcttatttcattttctgtttggtttttcttacattacatgtttacgcctgtgggcatgtcgggagaaagtagtagcaaggtgggaggttattttaatactctaggcaaagtatatattatatgttaaactattgtaccttgtgaatttcagcaagtaaaagaagagtagttgcattttccacttgtagattgaatttgtaacacatgcaaaagagggagtgtgcgacctctgcagcctgtaaagacataagataaaggtaagcatgtgtgtttttcataaggcagtgaaacaagcatatcaaaacaactactgttgttacagcccacacacagaagaaaaaatggaaaaaaaaaaacaactatgttatgcagggctaaaaaaaatggtttttatcaagaaaccataataattcttttgaatttaaaaatcctagcgttgtcatgtcaagaaaaatacacataagaaaagaagcaaaggaaaattagagcaaacggaactgataagtgtg

SEQ ID NO: 1548 - DNA, 2504 bp, Cannabis sativa
tccctttctacaaactcccccccagaaaaagcaaagcaaaaaagcagagcaagaaacactaagtaaaattttgaaagattaaatactctcaccaatgctgataatgtgattaatttttacttgtctattcctgaaagcttaaaatgtaagcagtcagacattcagtccatcttagagacaagatgccaagagacaaacaaatttttcaggatacagaacatcatgcctgaaaatattaaggtgtcctccttaacaccagaaatatctgtgcgaactaaatgagaaggaacagcagacaaattccttttccctttccttgtagaaggcttcgtgaaagtttttttactctgttgcactcccccagaatcagtacccttgtgagtggtgccattaccagtctgtactagctctataaatgctgcaattaaatagcaaaaggaaaagaaaaaaaaaaagatttaactgtgaactgatgaacaaattggcattgcatactactctttatatcctaattcttttaaaaatgaaatcatggaacagtgtaaatttgataaaaaaaataataaacgaaaaattgagtttctacacatcaaagacacaatacaaataattgggaaaatgtgcaaatcttttaaaaatttaccctaagtaacaccggattatccccccacccctctcattcgttatctatatctatctatcacctgaactatactcactgcctcactgatggagctcctccacacagcgatgttgcccccgcaacaccgaagaacctctgcaaactacagccgatgaatatctgctattaataccgaagatgaaaaattggtgggtgtggttgaagagagggatgagagaaaacaagagaatagggggagattatggccagggtactttaggtagtttctgaaacattagaatatgtttccacttttaagagtgaggggatacttttgtattatgtgtctttcaatgcatagaaacttaaaatctttcaaaataaaacactaacataatctctaaactagacacaaacacaagtgcagtaacatacattgaacatcaaggcattcatgccaaggcttgtcgtatctaactctgtcaatacgtggaaacctcaggctgtatggtgctgcaaaaacctacaagacagcaacataataaatgaaaacgaaaagaaaaacctatcaggtcatggaatggcatacaaggcaacatacatatgtaatatattcagtttatccaacaaactgaaacctgatttggttgtaaggacatacctcagaccttatagttcggatgtcactggtaatagaaagtataattgatctgcaatccaagggaaaggagagggtaactgaacaaaaatgtaaaagaacatatatttgaaaattcacaaaatacaatagaatttctctaacttctcagggctgtcaatccagacgtctggtctttctttggaattgtttgtgacatgataaaagtttggtggagctttctttggataatcatatttcctggcagaacataagagaagagttcaactaagtttcacaagaaaggcgaaaaataacaaatttaaaaattaaagtgactttagccagctatgtgattatgatttggagttacattatcagtcccaactaagccttcaccgaaatcaagagatggtccccaaaaatcagtttaaaaaaaaaaaaaacttgtgcagcatgcttcccactaaaacgagtaacagtacctgaaataaggcttcaacttgtttacaacagcatctaactcctcatcagagagtccagtacccactctgcagaatgaaataaatctgcaatataatttatattagtaaagaaaggtgttaatcatcagttagcctattctggattcaaaaagatctcatacgactcgtaacatacattcatttggcagttgaagatgcaatgcatagaaaacattaatatgagactcgtaacatatattcatttggcagttgaagatgcaatgcatagaaaacattaaacagccaaacacgaaataacacagatacagcctaaaattcttccatgccttaaaagataataagttttactttttgaaaaaagacagaggtcacctcccaaatgcttcacttgtggcggacagttaaacaaatattggccaaggaaaatttataaatacataaatatttagagcacataggtatattgtaaacatcatttcaaaaatttccaggttctttctatattgtttcttcatttaaaagaaaatattgaatgcataggtgcataataaaataattttatctcatcaaattggttaggaagtgatggcaacctgagtatctgctggctgtgcaaatcatgttgcattgcgtgtcaggaaaatgaaataattaacaataccaagctactagaaaatcgtcattctctatgttgggagacattttttgtggaagcaagcacaaaatcgcaacacttttccttaaagtagggttagttggt

SEQ ID NO: 1549 - DNA, 2714 bp, Cannabis sativa
tggaaaagaaaaggtataattttgcaaacttgtactcaaaaaccataaaaatgaaaaatctgcaacaatctatgtgggtcactcaggcccaatattgggttactgacacgaagagatccaaagtccaaaccctaaccgaaaagcggagggaggagggagttagggcttatgaagaagggtgatgaggagtacgagacagtgtagtaaatcagagtgaaccgaaccagcgttaccggaagaattctctcaaagcttccacagagtagtgggagagctggaacccaatacccatggcgttggctttcgatgagtacggaaggccattcataatcatcaaagagcaggagcagaagaccaggttgagaggtatcgatgctcagaaggccaacatttctgctggtaaagcagtcgctcaaatcctcaagacctctcttggtcccaagggcatggacaagatgctccagagtcccgatggcgatgttaccatctgtaagttttgctctctcgatctttctctaatgttctcttctgcgctgagcttattcagtggaaaatatgcatatttctcatttctggtaaatagtgggttttaagtgtttgatttcttttgtgatttactttgtggatctattttggtaaagaatcaaatgtgaaatgagatgggtactttctgtaatttggagtttgtatttctaaatatctggtcccttggcatatagaaggtagaagtttcaagcttttttgaccccttgattaaaaatgggtttctgtacttgtatttagaagttcttaggttgttatatatgtaggaggttcttgaactttatgatccgttgtataaaccctaaaccctcagtctagcaatatgttagtggtaagctaactattttaatattctttgtttggctcttatttatgcagcaaatgatggtgcaacaattttggagatgatggatgttgacaaccaaatagcgaaattaatggttgagctatctcgtagtcaggattacgaaattggtgatggaacaactggggttgttgtcttggctggttcacttctggagcaggctgagaggctactagaacgtggtattcatccaattcgagttgctgagggctatgaaatggcctcaagaatagctgttgagcatctggagcgaatagctactaaatacgaatttgatgcttcaaatatagagcctctagttcaaacttgtatgacgacattatcatcaaagatgtaagtaatgctatttatgctggtctattgatgtttctctttttattggacaccaggatgtgattgacaaaaccttttcagttccatgttagaatgttgcttctgttggtcggattgggcacggtattgcttaataagtagaatttatttgttgcacaatgcacagtcattcgtgtgattagcttatcaccagtcttgtgggagttttctgtcaaatttctatcttaagccatgaaactcaacaactctttaatatacttacttgcgttatgtactttttcattatgaataatactatctgtttaatattgcagtgtgaaccgatgtaagcgggctttggctgagattgctgttaaagcagttcttgccgtagcagatttggaaaggaaggatgtgaatttggaattaataaaggttgaaggtaaagtagggggtaaactggaagatactgagctgatatatggaattatccttgacaaggatatgagtcatcctcagatgcctaagcaaattgaagatgcgaaaatcgctatcttgacatgcccctttgagccaccgaagccaaaaactaaacataaggttgatattgatactgtggagaagttccaaactttgcgtgggcaagaacaaaagtactttgacgacatggttcaacaatgcaaggtgacattgccttttcttttttccctgtggtcatatcaacttttaatcattgaagaagaacaatgtcttgacatttattcttgtagttattcaacttttaattgaagaagaacaatgtcttgacagttattcttgtagttgcactttgattacggtttctagattttaagggttttaggctctgtttcatctgctgatgcagttggttgtaatttttattgtgtagactgtaaagctgattgttttttattgttttatttcatttttatatatttattttcaggatgtaggtgctaccttggtaatctgtcaatggggttttgatgatgaagcaaatcatcttctgatgcaccgaaacttacctgcagtacgatgggttggtggtgtagagttggaactaattgcaatagctactggtgggtctcatataaattttatgtaacttgaatttattatgcttttttcaaatgttttctcacttgataggtatcattgtcctcttttctggctatttgttcaaattattaattgtaatgcactttcttaggtggaagaattgtgccaagattccaggagttgactcctgagaaattgggaaaggtacatttggattattttctttcttggattatttaataataatttggttaacaataatcaacaataaactgttgattttctttaattaggctggaattgttcgagagaaagcatttggtacaacaaaagatcgaatgctgtacattgagcactgtgcaaattcaagggctgtaactgtatttattcgtggaggtagcttttttatcatgtt

SEQ ID NO: 1550 - DNA, 2436 bp, Cannabis sativa
tataaatatatatttcctaatatataatctgcatcgtcttccttcaacacacatatgtaaatataaatattaagtatgtatgaataattccctactaactttatgaataggttcatgagctgtgttatattaattataattatttatatgtatctatatattaaactgctttaattagtgtctatttcatcatctatatgtgtgtcacatgcaaatgttattttaaaatttgacatgcatattgttacattattgggctattcatggaaagaaaaatgggcgaaaagctggcttaaatctattggctaatgcctgttccctaaaatcgtatcacataatttttaaaaaactaatatttaggtaaattgaattcatgctaaagaaattcaaggaaggaagacactagctaatcattaataatttctaataattaatttagataatgagtatagagagaaaaataaataaataaataaataaaggcaaagaagtggctgtgtcacatgccgaaattggactgaattaagatataactattaactacatgatgcagcttgtgagtggagatacatgttctgccaattttaatattgatcaaatatattaataattaagcaaaaggaaatgaatggaaaagatagtgattaagccaagctgttatattatataaacattatatttataatacattatatatctacacatttatgggattaaaaaagaaaaagaaaaacataagtaggaaaaaaaaaaaaaagccaagctgttgatcagttatatagaagggaccctaatgtgaatgcttgccatgattgtcgggttagctagcccaaagaatcatatttattttattaattaattagataaagattccctcatttactattattataattatttaattaagaacatttaaactaaattatatgaaatatatatacgcgtgaagttgataattaggagtcggcatatacataagacacaacaaacaaagagggaaaagtgtcaatatttataatatttaggatgcttacattaatattaattatacttcaatttggatcatgcatggagaatattaattataaatttaagttttgtcgatattcattataaatcaaactatattttggaagtgcaaggaagtgttgacaaaattataatttattagtttatacaaataaatttttttctgaaattggtatgaaccttaatagcgtacgtaatttatacacaccagaaaccaccacgtatatttctggtttcatttaatcattagaaagcaatgtcttttattaaataaaattatgaaacacaatgctagagatgtctttcaaactctgaacaaaagagaaattaaagccaaactagttacaaattgtaaaacaaagaaacaggctcaaagctaacattttacttatttcatgaaaattccactagttattgttgtatttatcttttttttcaatctataaatagagaaaaaaaaaatccaaaaacaaataaaaaagaaaaaaatatataaaagtatttgtgagtaatacatgtgtgggagaatctgagggtcacatgggtgagagtgagagagccacgccaagagagaaaaaggccccgcgtttcccggcccaactaaaactccaaataaaaggtgatcacgtgacttttccttctttaccaccaacatcctccttctcttctctctctatgttatctctttctctctcatcagcaccaataccaacacaaacacaaacatagcagtagtaataccaatattattaacttagataatcgggatctgtgccctaatcatcacctctcaatattaatctttgtcaattttttgataccaggtcaacgtctaactgctcctccgtcaactttcacttcaccctcacgtgactaactagtttttcttgtcctccgtaccatgactcaaattcacgtactccaaagtaaatattggtaaaattctctatctgatcttttgacaaataataataataataataaagttaattaagattttttttttttctcaactttaacatgtactaaattatgtttcttaaattttcttagccgtttaaaatttttccttagatttaagaacttttgtctaatttcattattgtttcagtgattgtttatgtattatacgctccccaaattttgatatctaccaaattatgtctcttaaattatgatatgtattaaatcatacccttaaactttcatctattagaatatgtttattaaaattagacaaaaatccttaaatttaataatctcaataattcaaaaaaaatttaatgaaattacaaaaatttaagaaacataatttagtacatattaaactataataatatttatgaacattattatttcccctctctcaactcgtgcaaagtgactctcaatacttttttctctttt

SEQ ID NO: 1551 - DNA, 2816 bp, Cannabis sativa
ttttttaatgtttttatgatatgttgagatttgaaatatgtataatgagattagcagtattcataaagaagttttttcatcatttttatttttttttctttatatttttacagattggaaagaaaataatgtattttgtcatatgaataatatcatatatacctggaaagatacatgtaatgattttaattccagggaatattcttatattcttatatgatttatatagttttccctttttctttttgtatttgaaatttgaaattttgttccttataatgattttaatcttcatttttcttattaggttcaaccccatctgataatatttgctgtaaaatcataattgggttgctgcagtgactgtctaagaagggtcaaattacatcatcatcatcatcctctttcagaattcttttggtgtttcaaaattccagggaatgctgaaagatgtgctttgaggctgagaactattcctttaagattaatgagcttgtagctcctcctattgggttgccaattttctttatctatgatgagattgggcacttaaatctcaccccaaaccagttctgtgctcatatacaccacaataatgttgcaaggaatccaagggaacacatcttgtcaaaacatgatgtgtgtgaagatggttaaacaattgacctttttagtgtaggtaagtataataaagcctctcactatcagcatcatattaactatatttaagtatatatatatataattatatatatagtttgtgagtttagaaatggagaagaaggggagtattttgatgcagaggtatgaactagggaggatgttaggccaaggaacctttgctaaggtctattatggaaggaatttaaaaacaggaatgagtgttgctattaaggttgttgataaagaaaaggtgttgaaagttgggatgattgatcaaatcaagagagaaatttctgttatgaggctaattagacatcctaatgtggttgagctttatgaggttatggcaagtaagactaagatttactttgtgatggagtatgttaaaggtggtgagctttttaacaaggtttctaaaggaaagcttaaggaagatactgcgagaaagtattttcagcagctaatttttgctgttgattattgtcatagtagaggtgtttgtcaccgtgatcttaaacccgaaaaccttttgttggatgagaatggaaatcttaaggtttctgatttcgggttgagttcacttgctgagtctaagcatcaagatgggttgctccacacaacttgtggcacccctgcctatgtttcccctgaagttattaaccgaaaaggctatgatggtgctaaagctgatatttggtcatgtggggtgatcttgtttgttctgttggctggttatctcccattccatgacttgaatttaatggagatgtataggaagattggcaaaggtgaattcaagttcccgaactggtttgccccagaagtacgaaagttgatttcgaagatgttggatcctaatccaagaacaaggatttccatagaaaagataatggataactcttggtttcgaaaggggttagagaagaagcctgtgattgttgaaaaagatgatgagaatgaaccaccatcccctattgatactgatgcaattttcggatgcaatgaagatatgagctctgccacaactactactactgatttaaagccagatttagcaaagccttgtaacttgaatgcttttgatatcatatcatattcttcaggctttgacttgtctggtttatttgttgagaatgagagaaaaaaagagatgagattcacttcagacaagcctgcttttgccatcatttctaagctggaagacattgccaaacgtctgagattgaagataaagaagaaagatggagggttgttgaagcttgaagggtccaaggaaggaaggaaaggagtagtcgaaatcgatacagagatctttgaaatcactcctcactttcatttggttgaaatgaagaaatcaaatggtgatacattggagtatcagaagataatgaaacaggacataagaccaggtttgaaggacatcatttggacttggcaaggtgagcaaccaaagcaactcgagccaccgctacccccgccaccaccaccagcagctgagcagccttcagatccactcccagttcaaattgtcattccacaagaatcataaaaatgtgctatgtttttctttattattataacagaacttttgtatttaagcttggtgaataatttgtgtgaatgctgtaatagtgtgagctatgaaatattaccaactttatttttctagtaaaatgattccatccccacttttccctttgcatattattggacaatattcctcagtggccatgaaaaaggttccatctttgcctctaaaatttgttatgatacaattactttaacatgtggtgtgagttggtggatggagctatgagagttgggactgttttggtatgtggtcctcttgtgctctttacttctcttggtcctgttttatgcattgaattgatactttggcattaataagagaaaagtaaagatttcaaaaattagagacaacatcactatctatacttgtatatatttgctccatttaaattgatggtgtaaagatgatattattgatatggtacaataattgaatgttaaatttaatatataattgaattttgcaatttatattgtaatttttaatttatgttgccttcttaagtgatgtgttgtccaagctcactaccaacacatcatctatgaaggcaaattcaaagaga

SEQ ID NO: 1552 - DNA, 1409 bp, Cannabis sativa
aaaataacattttttattattaaattataaagaaaatgtaaataggttgggtcccatcaaaattatttgcaggaaataacaaataagaaaccgacaactaacagttctcacaacaatagtcatttcgcggaaaccgagctaagacatccacctataacagaagacaccaaacggcaacctgtccatatctcatttcgccgttaaaagtaacggaaagcagttgtgggcctgggcctggacctcactcaggtcccgaggggaacctcacgtgggccacatacacgcactctccattactcagtcagcaacgccacctgtcctctctttctcaacctttcaaacgaggcggcccatctcacgcgcccccacgcgtcatttaaaacaaggtcggtgcagcgaaaccctcctacacgacacctcactatcctctctctcccctactgggccccacctacccttcacgttctcatctcttcatttctttctctctatatatataaccccttcgttgcttacaataccagacccgacccggtttattatagagacccgattagaaaaacaagatcaaacctcctccttcttcttcctcggaagaaaaggtcaccggaaattaaaaaaaatattcttaaaaagaaaaggagggttttcacgataaatatttgtttttttattattatttttcttttttatatataattatatataggaaatctaatttaattaaataattttggctatggcaacggaggtgttgaggccacaagattgtttgattgaccggattagagttcctccaccggtgacgttttctcgccggaggaataactatggatatcctaactcgacttgtaacggtaataataattattattattatggaaatagtaacggtagtaacagttacgtaaacggtagatctagccggaaccggttggagaagccggagcagaggagatcgatctcgaagaggtcgagctctgatgatcttaagacggtgaagctggataaggttacaattttgaggcgtggtgagtcgcttgattcgaagatcaagagcgagcctttgatgaaggaagctggtggtggtttggccgtgtgtggtactcagaggattggtcctgagccaaaaatggtgccgaagagggtagggattgtagatctgaagtttcctgtggccggaaaggtcgacgtgtacgctggatctgcttttgcgttttcaccggcgccgggttcgcttcctttgccgtcgttctcgaagatgaagcaggttccgactatcgttgatgattctgctacaagagatctgaggcgtttgcttcgaatcgaatgatatgtcacgaaatgaactataataataataaaaaaatcaaccaggtgaagatccagatctgaagatcggaaaaaaa

SEQ ID NO: 1553 - DNA, 4580 bp, Cannabis sativa
attttcataattgaacagtaaaaagaaacatcgggcctccactttcacataaagggaagagaaaatagtacctgaagaagatgccttaaaaggcaatgcaatatggtctgagcttgaggagttggctcaaaacatggaaattctgtacaggctgaaaatgacattctttgggaaacaccaacaacaacaccagcatttggaagaagccctaaaggatatacctcacgatcgaattccagctccgggtccaactaaagaataatgttgagttacttcacaaaccggagtaaatagaccaaacttatagcttcccaagattacccccaatttgtaagaagcatataaagtttcacaacttacaaaaccttatgttgtttctttaaaaaaaaaaatgaatataattttccataaaaagcttgaatgtgaagccagcaatttagtaatgacctcaccttgaaaataactaaaattgcacactaaatgggacagggaaattcggaaaagaaaaacaatactaagaatgaagataagcttttactatttgcaaaacctgctacatttagcaccaaaaaataagcataataaagtttgctatatgcacgtacctgtaagaaatcctcctgcttaaaaggatcggcacccaaagaaggataccaaacctgtaaaaataaacttccaaccagaataaatatcagacaagaaaaagaaacagaactaaggcagaaaatcacttagtatacgagatctcgcataagatcaaagataaaatactgaacttgatgactcattacctgcatccctctatgtccataatcaaaccaagatacttcctcaattaaatttgttttctcttctgattgaccacaagtaacccaaaataattcaacagaatcagttagttccctttcacgtccatcatccaaatcaagaagagaaagctccccatttactctcattatcaaacacctagcaatgcaaacattcgttataactatgtatctagctatttgcagacaatacaatatcatttaaatcagcaatacctagcaggctctcttgccaggcaatcagaattagagccagtgtgattatttgaaatacactctcttggaagctgatcagggatgaagcgcattgacgctggatggctctttgcagtcattatcgaaagttctcgtactgtagaaagctgtttgtcattttatcacttaaaaatgtatgaagaatataatcttttacaaaattattcacatatagaatgcaagttaaatcaaaaccatgcggctatcagcaaataggtaataatttgaaggacatcttaatggaaagtaactgcaaagcattctttacctgtaaatctggagtggtagatggtgtcaattcaccaactaattttacatggaatatatggacatcaaatgggcgataagtgaccagtatataatcttgatagacatccatcaccattggtttggcaagcaatgattttcgacaaagcaaggagctctgatcaagatgatatctagggtaaaaaagcaattcatacctgaaatcataatatcataataacagtatcagcaattcagttatgcaaaattaaccctcccaccccaccacaaaaaaaataaataaataaaagaattaaataaaaaaaatttaaaaacagctcaacatcacaaaattaatagggtaaaatttattatcaattaacaagataggcatatgaaaaatgaaaatactagatgtacacaataataaacaataatgactgagaaacagcattgcaagattttagtaaaggaactaatatgaatagctatctcacgtgttagaggagtcaatgtagttgcagacaacaacaatcttccccatccataacaaaccttgacactgaatcctctgttcctgcgtaacatcgccaaatactctccacttccttaaacgaatatcatatatgattaacccatgcaaaccagcaacagctaaatacattccatcttggctagctgccacatgttgaactggccaattttgggaaatatatgatacctgaacaaaagcaaaaccatgttagagacattaatttatattaaaagtaatgaaaaccaaaacagggtaatgtatcaaagttgtgttttgaagtcattactggaaggttaagatgtagcattttaagttcatcagtatcttcagactggacaacaagcaatcgatcatcaccataaatcacttgacgaacatatgttgagccagaaactcctctattgaggcaacatttaccgaaagaaaatgcaacaattctctccgtacactgttcctcgagggtataaagcctatatccatgttcatcccactgcatcattgatgtgccactcattaaaggttcatatttacactcccggttaggcttaaccactggagaggataccgaacttaaaccaacttgacggactgttgacatcaaacgacaaccagaaacagaccaaactgtaagtcctctcaacttccaacccactgcaaaagcagagttatctggggtccatgcaatgcagctaacaggcccagtgtcatccatagaatatctgcaaattataaatacatcagtcatgaactatctgacaaccaattcacatagatcatagtgtatggtaccccaaacttacccccagtcatacaaagacacagtacggataagtgatgtagattctcccaaatcatataactcaacaagccctctcttggtaccaacagcaaggatttgttgctccgaagcaactgaagcacataaagcatcaccagaaccaagctttctttcagcttttatatcttctacttgctttaaacctttcttgcttactgaacatgacaatagttgcccattggagaataagacaaatagtaatctcattggcaagcatagctccagctggacaatggtagagtttctgggaacattatgcttggtaatcaatgattctgaatgccctccagtaataccattatccaaagaaagtgatgatagatcaatcccattgacatcacgtggaaaggaatcaagttcaaaagccccgtaaaactggacatgaaagcaatgtaaatcctcggcacttcgttaaaaaagttgtatatcatttaaaggactgtacatcagaaaagaaaaaaaaaatccaacattgtaatgaaacatttcattacctcccccttccaagagatgctatacaaggacccattagaaagtccaagaagcatatgtttggtatcacagacaatattgctcctggagagggcacattacaaagaaaaataaaaaaatcaagatcacaagaaaataattttcaagacaaatatctgcaaaaaaatatgaaacaaatagctactgtgtgaaataaggttagcaacaagataccgatattaattcattacgaaagctatgaaagttatgaaagctatgcatgtacatgcagaagttatgaaagcttaggatattcaacataaagtcgtatagattaactttacagaaaattcaactttacaaacagatgctattaatattaatttccaattagttgaaatttagaataacaaaataaactctggattccatatgttgataaatactgtaaaaaaaagtattgctccctatgagtagctactatcaatgaaacttttaaaaaaaatagaaatcaagctctttaggtgagaatgggaggcacgaatttcagtaattatgaactatttatgcctctagtttttgtgaggtttgaccttataaactaaggcccaagtctagacttagggtttaaacattaaacagaaaaaccacatcatttaaattttgaatccgagaaatgggttgaaacgttctataagaagaaatccagcagctaaacacatacagagagcttgggatagattttgaataacaatttgtttaagaccctagctcttgaagacgaaatagctagtacttaaactggcctattttaacattgcgcctgtggtttgcttatgaatcaaattgttcttttgagtcaaagaagaaagccacttacacagtcaagtctttttgtgcaaatggcacttgctcactgataagtagagatatattagcaagaaacaatccagagggttgcttccctccaacttgtatttttttatctgtaaactggaccttgaaaagttgaagaacgaaagaagatgtctgccaaaagaataaataaacaaaaccaagaatgaatactagaaataacaagtaagaaacctttgcacaaaaaaaaaatcttgccaactcacaataacaaattaaactactgtctacacaaaatcaatgaaaaacttacaagaacggcaattaatttggtatcaggactccatacagcttgcgaattctctccttccttcttcagtgaatttgaatccctcttgtacttccccaatctaactttatgctgagtaatatatacaaaacaaaaaaagtgtcaaatctctatgaataacttgaactaaaccatttactttcaaagaactacacttctctttactctttcgaaagaaaaaaaaaaaatagaactacactcaaa

SEQ ID NO: 1554 - DNA, 2740 bp, Cannabis sativa
aacagatgaagactttttcccagcaacatctctgaatcgtaagttgccttgatcagacactaaagcatatattacaccattcatatggcccttaccgatcacccccacaacactcttgcttttgttaacagctttactacgtttcagggaccacgctagatactgacatacacagccagaggcagacaacgcttagtggttgagccagagaaccttataaatgttaaaaataaaaacacgacgaaacagactgtaacttctagaaacaagtggaaactttctttattatcaatggttatggtgcactgactgagtcctcattatggtgttttttattgtaattttaagttcaagggacgaatgtattatgcattctctccaagaggagtggttgggtttgtatcattattatttgtttgtattataggaccacactctactaattatcagtaaaaaaacttacagtgtctcgttcatgtataagaggctggagaaggtttggatatgaaaaactaagcttctcatagagctgaaacgtgctgtcatctgtacttgattcctgccaaaaaaagaaaaagaaaaaataaaacggaagaaagcaagttttataacatgtcagcgtgtatttttttctaactgtatgaatttcatatttatttaaattagataagacaacagaacttcagctatatgtacttaatataaatcaaagcagtgacacaggataatactacagtatatgtatagtgttcaatatatgatcatatcctcttatggacatagtctaataggtttagaacattttccttttcttatttctattcaggtgggaaaaaatagtctttaaggaaaattatatataaaattggatttttggaattcctttatggtccactagtaaaattcagatgtgtatagggtaaatatgagcgggggaggggggaaacattttccatggttaattcaggatgcataattagatttgggagacaagttgtcacatgtcaccactttttagaaaaggcttattggctctataattgcaggtggaacaaaaatgtcatggagcatatgcagaggtgaaaaaagtgatttaagttctatgttctttttttagtctgcagaaattggtaaatgaggaaaaagaaaacatgaaacgtccctatctgaattctccttgcattgaacaggaaaaatataaatctaaccctcctgaaacttcacaaagtgaaaaaaaaaaaaaatggaaacgacaaacaactatggtaaaagagaaaccttgaatttatttacagacagatcagaaggcgatgttatcccacgaacaactgatgtcactaagccaagtttctcagtccatgtcagagaattccaagccctttcaagctgtggaaataaattatacactattaaataacatgaaaatatgactgaagttattaaagtcgaaataataactcatgtagccccatggcttggcccctcaaatttggtgacatacagttatttcaattggcctgtctcccaaaactatttgagcaccaacttcttcagacgcttttcgagcagctcggaactgcgattataaaataaagaaaaccaaaaatggagcataagtacggataattgtcatgaagatgattactactactgcttatatttatgcagacttgactttattaactcaaaagactcaaatacctcatcaccaaatgggcggttgacatcagaagagagctttgaagagaaaaccgccaaaagcaagcgtagagctaatgcagtttgacctcctgtaaatgtaatataagtaactgtaattgaaaagcatactcctttctcaagaattatgacaaacaagtcaaatacattgttttggtcacgtacccaagtctatgctacgcccaacagcaccaaagaaacctgttccgctcaaagagaacatgtttgatcgtaagcctggaccttgctcatcaccatcagaagtgtacataatcccagctctgaaaatgaactctgcaacaatttaagttcagatgtgcaattgaaatcaccaaacagaacacttaaattttaacttagtaatcattttatgaaaacaacaaatcccccataaaccaaattacacttgcctgcttcgacagagctcaacaaccacattatcgggcttaatggctcggacaacgcgctcaacctccatagccgattcctgagaaatatgggtggtaccaactaaccaaattgtctctggctctacgaactcggctctccatggcggaacaggaccaaaaagccttttctcaattaaaaccaagttgccactacttgctaagtcaagcaattcagggtgagattttgctattaaagcgttggactctcccaatatatctgatctgaaatcgaagtccgggggtggaggtttgatggaaaccttggagggtttgaaagctgggctctttagcctaactgggtttgtatgaaatagtggaaacgaagttggattcatagttttcatggatcaaactgataaagccacaaatgggtttttcctctgatttacggttaagctattttcagccctcaaataagcggttgttagtggtttgaattttagataaggcaataactcgcttctctcgtattattaacggtcactttttgttttactaacagatatcaacggactgatatgtaaggaaaattttacactggggtgcgatgcaccaaaactgaatttgatttt

SEQ ID NO: 1555 - DNA, 2464 bp, Cannabis sativa
  modified_base (1535)..(1543): a, c, t, g, unknown or other
ttttttttttttttcttttaaacagtggtgtttttgtatagatataaagttgtgaaggtggaggcaaatgacattgaagatggcgaggtaatgaaattggatattaggaggagaattgacctaggagatttttgaattggaaaatgtgtaaaatggtagcagggtgagatgtacaagagtaattgaattagcataagttcatttatgggacaaaaattaagttttgggttggcctttgactttctgatgtaaaagaatctattagtgttgttttccaatagtgtgagggaatggagtatgtggctgttcttctttagaatgttttacactcatgaactagttttttctttctaaaactttaggatcatccactttaattgctttctggtcagtggaatacttttgatatatggttaaagtttgtgaatttcctcattcccatcccatgtgcatatatactggtgttttcattatgttgatggtgatatctaattagattcttcctgcttcctgctatatatatatatatataaatagattctgggtaagcttaatcattgaaaacagatcagctaattcatattattgcatgaatgcatcatgggattgtactagaatgatggctaaatgattgcaccaatttatttcttttcatttccctttaaatattttatcaattcagttgattatcatattacaatgacttcaattgatatcctcaccaaacacagtgagtcatttttctaccaggctacaagagtattctgtagagacggccattgccatggttgttgacggaagtgccaaactaaagattaacaccgaacatctaaggaacctgagtttgagaatcggctccttctaccagtttattggggaactacttatccaacctgataatgaggtatctggtttataacatcagtttgattctcttgtatcatatatacatacatcttaccatttagatcgactcttcttattttcaggcaatcttacaggtgcgtgttggtaggaacgtcgatggcattaaccttgatctctatcgtcagtccttacagctgctaagacaattccaggctgatcataaatagaacccaacaacttgatacagttctagttttgaaaggctcacatgggcttttctttttcactctgattaaggtatcatagtaacttgacttgaatcatatttgaaatgccggtcaaccaatgatttttaccattattttgactatttcttgagactaaattattgtaaatatatgatcttgattgtgctagtctgaaattcattctcccataaatgatgctaactctgtaaatgaaaataggttaataaggtagtcatagttatatagacaccaagaaaagtggattttcaagtttttttaagggcttctccaatgagactctaaaatcccaaaaatagtagagttttgacaccagtggtgcctagcactttttataggtagcgttcgacgattggttagcgatattttttatttttttaaaagttatatgagactcgatannnnnnnnnactaataacagtatgacatcaaggagagttttaggcactagtagtgtctttttacaattcttgggaaataaagattgacaaagttttattctgtctaatcatcttctgacataaaactgtcatataattcaaaattggtatctcatcaatactatttagtaagattgttaattggtttgtttagtttacgggcacatctaatccaacataattaggtagtttttggttggttcaaaatattgaattcactagtgatattttctctcattttactttcttggttaaaaatattacaccttttttttcttcttctttctttatttgatttcatatattttgttattttggattcttcgattcttatgcattcatctcccatttataaatatttaaacaacctaatgcctttattgtaaaatgttcaatgttcccaactaatttggcagaataatataattctagataatcttttcttttctttataagattttattactaataaaagtaaaaacctgactctatttaatagtatctagctgaagttgagaaaattctttttttttttagtaatttataaagttatttattttattttttttaactcatagtcattaaagttgtcatgtgagtcatggaatggagctaacacattattacatgtgatgtagatttgcactaacacaacttttttttttaattaataatgattatattttacaacaaatttaattagaaagacaggattgagatttaaaatcaaaaagtcaaaaaaagattgaaaagctaacagtgcaatctaagtgatttgggaaattggggtagtgcagtcataaccattaaacgcaattcaaataattttttatttactaccaatctttggcgttaaatgttgattggatcatattatatacataaaaagag

SEQ ID NO: 1556 - DNA, 1669 bp, Cannabis sativa
tctctctctctctctctcggccctactaggaagaatccaacaattcttcatgcttcttaggtgttcttcttcaaggattcaagggatttgggtggtgtaatcttgaggtaaaccctagacttcattatttatattttatttaatgttttcttaaggtttaagcatgtaatttttagttttttctactgttcaaattaggttttgttatagtttgatttctgggatttagttgagtagaaatcgagtgactagagatggttttactggtttggtgtgtggttgagcaagtttgactttggctctataatggtgtttttaaattttgtgcaattttgttgttgttcttgtttgaaaattattgttgggtgttattttaggtagtctcgaaagtttggtagaatttgggtttgatttgagagagtcgtgaagttttttgggatttttgctatgattcggtttactagttctgctggagctgtagaaccggctaattatttcactgggcgagaccccaaaacaggttatccatttgggaaattcggtttaccattttgggtagttttcagagccttaatttttgtgttttatcgataattagggtattaacatgctagttaatgatagaaaaacttttgattttgtgtttagattcccgaaaaggagttttagcaagttgttttcccatttacgtgaatgtgacatagggtatccattcaacgcgtgatttttcgttcaagtcgaccgatacacttgaattcagagacgaggtaagactagcatagaatgtatttatatatgaatatgtgtatgtgcaatatatgcatgctgattatgtgatatgtatgctgccaacactagtgcggttgtagtactgagtgcattggtacagtgtatgatgtttaacgggtacaatacggtgttaccaacactagtatggttaagtacgtagtgtgtgtggtacaacacttagtggtactcgaggtacggtgcaaaccttaccaacactagtacagtagcagtatgtagtgcctgtggtacaatggttgtaccttagttattgaacattcttactcatctgataaggcttgtggataggtgtatgggcacctaaatacaagttggtaatacatatatattgtatgttatatgcttttcttactgactttattgactcataaatattgctttcatgtgtaggtaaagaaaggccaaagctgaacaacagtgagtttagagcttggggacgattgtacatgtcgagacgatgggacttggagggttcggtcttgcgacaacttgggcttcaatttgtagtcgatgtgcgacatgtttgtaaaagttattttgtatatgaatgtatagtgtaaaaacgagattttaattttgtgtgaatatatgtatatgtttataaaagtttaaagataaatcaaaattttaatttatcatgattttcgagaaaactctttaatgagcataggtgtgcactatacttagaaagtcactgtagcgtgcctaatctttagggcgttacaggctgcgctggaaaaagcttactggtgtgttatccctacttttgccaacaaaaatgcaccgataaaagtaacatttctcgtagtgtcagtttcatgaaatgttggggcgatagggaagccattcgtggctttcattt

SEQ ID NO: 1557 - DNA, 3536 bp, Cannabis sativa
ttcctgtttaatgtatatgtatatatacaggcctacattccaccttttattattaattaagagtgaaaaaagattacagaaaaacaatttaatgttgatcccaattattaattatattatttattttcattatatatatatatatatattacttactagaaatttattaaatgggctagatatatagagagagagagagttgttcaataatagaagagaatgagatgaaagtgagtggagatgattaaattttgattgggtgcctggctgagcagctttttcttttgttatataatttaaacatgtgatagtggaaatcagagggcagcccactgttgctgttttaattagggtttatctccttaacaaggatttgcatgtatacaaaaattaagatatgtatgagcaagcgagtgcgttctgatcgagcgtacacgccctttgtttgtatatttttgtataccattatactgcgtgagttggacgatcctcaaccgtttgatcctatcgcttacgcaattattaatctatacgtttccataaaaaataatcagttttcttttgggatttcgactagcaattaaatactaagtttttttttaatatgtttggtaaggaaagggtgactgtttttttattctttttatcccttattattcctaatgctatctcattttttttaatgattacacatcttctgtaaagtggaaatatatattatccttaaaaacagctaaaacaagatcaatccttaattattatagttaatttaacacaattattacgtgtttcttgagttaactcgtttcggttgatcaactttttgttaaacttgtgaaaaagattttcaccacgcttttccctgcacgtgcttatggcaaacaattggccgcaaacacgcatatacctatttactttgtaattatataaaaaagaaataaattatttattattatcagtacagttaataatttcagtaatagtatatatatatgtacgtatacaaatattatatatatacatatgcccaaacaactgataaattgccaatttcggaaaaagaactaaaaggttggtgaatcatttcaaagtgaatcagtcccatcacatgtacccaaaatagatagctcaaataattaaacatgtagtactcataatgaaggtatgagattcaagttttttctggctacctagatacatatagcatgttatagtttgttgatccccaaatatatggaaaatgttcataatccacaaattaatgaatatattaagctcggctgtagactatattcccgtgtaaattaaagtaaattaatagtagtatctcatgatgacatgaattttgttaacattgtgggttttctcataataagttcgagagcgtttggatgttaaaaacgtactcatatataccaggattacacacactgcggcactgtgctactacaataagtatttttttttttgaactggtataattaataagcatcttataggttagcttgtaaccataaaaaaataaaataaaataaaagaagaaaaattaaggtatatggccacaagacccacacatatatatatatatacatatatattaatatgggaataatggttttttttttttttctttaaacatgcaccgcaagttaattgatagaataaagataattttttttaataaaaatttgttgtattataaattaagcaaattaactatcaaaatataacttgaagatctgaaaagacaaaccctcactaaaccgaaaactaaaaaagaataagtctaacaaaaataataaaaacattgtttaaagaaataagtagacgcttacaatcagaaataatcaaagcaaatataaaaaaagcacttgatgtgtatgattcaattgcataaataattacttgacaatcagaaaataaattagtactaagattatctggtttttttttcctttctaaagtggtgataagaagataaattggtactaagattatctcaaaaagaatggtgttattcgtggtttcggcggaatgtttgttaaactcttaaacgttttatgaatgtttaccatataataagcacagtaaaatctaatttaatttatatatgttttttcctttatcaagaaaagtttctttatacgttatagctttcaattaaagtttaagcttgttcagtctaataacaacaaaagtaattgattatgtgtatcattttaccttcaataagcatatccacgtcacagcataaaattccgacatgaaaagaaattaattgtcattcactaaattgcttacacaaattaataattcttaaaaaaaagacgtagatagctatctagcgggtagacaagagaatttaaagtaaagaaccttgctccctgattggtcttttatatgatatcaattaggcttatagtgattcaggggaacaaattgaaaagcctaatcaagtatgcgaatttaaattaaaagaagcttaacattgaagaattccttgtgttgtgactaaaaaaatgactaatcattagaatgatattttttaaaaaagaaaaaaaaaactttaattgttaaatcttgctggttggtatcacttggcacctgctttttataattttattttattttttatcatttttaatgactttgtttgaattgattggccaaagggtatattataccatatacctctcccatccatggaattcaattctcaactctctcctgagatatggttacttattagttaaaaaaacgaacaaacatttatataaaaaggaatacttcaaaggaaaagcatattggcatcattgtgatgttagtaaagtaatatatgtgtgtgttaatatatctatgactttcagcaacttcaatcatactttaatgggaaaaccttttttttttccttgttttggctaatcaatggccaaaccatgtttgtcttctgtcacaagctcttttgaacatgcttaaaaagcttggcctttttcttttcacctttggagatacctgattttacaacaaaagttatccatccacaaaaaaacagtttcaggccttaaagggctttaaacagttcatatatacataattgtttacaggtttgatataatttgtccaaagaaaaaaaaaagaaatgggcatagtatcgtttgagattcttataagtgagtacagctagctagctttgtccattacaaccactttttctttttaacctctttgaatctagcagtaatgtttatctctcctcctctagaagactgatgaactatccatataataggaaaaaggttggtagtttcaggtcaagattgtttaaagtttattattttcagtacattacttgatatctaatacgaaaagttgatggctttaagggaaataaaagctttcaaagtatgatgaaaaagtggcagaagatttcccttttattattatttattttggttcattatattcatcaagcatgaaggtaacatcatcattatatatgctttgattctcatgatctgtggtttgaaaatttgaga

SEQ ID NO: 1558 - DNA, 1486 bp, Cannabis sativa
ttatatgctatactagtttctaaatagtgattaggactaaatttgccattccgaaatgtttgattttctcaccttaagatgtcgaagcgagtcctttgatggctggccatggtgaaggtagtaatgggtaacatcataaatcacataacccaataaaccaccaccaaacaaagcaggagtagtagaaggtgtagcaaaaagcttaaccatgttccagaactgccaggataagaatgtaaattttgattttgatttcccatgttacaatcaaattctatatgagctctataagtggaatgatatcctaatgatattcctagtaatcaagtaccacaaccatttgtaacagaacccatggtagaaaaatctatctaaatttaaagacataaaattcataaagaactgttcctttctagccacaagaaaaggcaccagattcagagacaaaagttgaagaagcaaggggataaatacatactggtgtcaatagaacagcagtcgcagctggaggaaaaacaagacgcaacccatccatgggatgtttatgatgacagccatggagaagataatgtacagtgtttcccctgtatgcaatcatgacaaaagttggtaaatcgaaaagacttttaaaatcaaacaaataaacttaagcacagagaaaaggagagcatcactaaccagtagctctttgtttcgatgtgaaaaaggaaacgatgcaatgtgtattcaagcaacgtccatatgaatatacctaatcccaccatgagagctatctcaggaaatgtatggcccattagtacggatttggagatgaaatagcagacaactgggagccagataagaggaattacccaccaggccgtcttggtcaagaactataatacaaagaaatggtcagaatacactctcaaataatggatgaatttagccagccagataagaggaatatcataaatactactacgttcaaacagtgataacagcgatatatagtacctacctcccagaaatcactttcgaaaaaacgaggaccttccttggtcggaataggctggtgcacccattcttgataagcatctccaagatgaccaacctatgagaaaagttggtgcaatttaattacagtaaattagccagaagatagtttctgggactaatctgtatccatacagattgaaataggtaaagacattcaagaggatgagagatataagagtgttcatagttatactaataaaataagaaaaaacccttatatctaaaggcatactgctgaaataattacacataaaaaccgatttttgcaacctattttgttcggaaattaatgtaaataaatgtcaatgtgacattacctgaaatacaagaggtttattcaaatcaacggtaaactcctgagcaaccatgtttatatataggatctacagtcctgctgaaaaagaaaaacaaaatggatgagaaaattataaacaataataataagttt

SEQ ID NO: 1559 - DNA, 2998 bp, Cannabis sativa
accagaccagaccagacccattgaacaaagctcagtaaaggattaggtttgtatttacacgtcaaattcgtcagctttggtctcccttaaaaaccacacacaaataattacctctctgttctcttctacctaacctaataacacacacaccacacccttcttcccaaaactcacaccaaactgctccaaccctccctccttatccgtactattattcaataagtacaactctttaaatttgacgtttcaatggattgatcacttttaatttttcagaaaatttgcaataaaaaataaaatccaaacaaataaatagtctactaaattatttgtatttggcccaactgttcaaatgaaccaacttttggatggagcattgaaccatcattttcatttaagaatgctgtgcctttatgcttgtttacacactcagatttactgcaactatttattattaatgtattgactttcacgggcagtgaaactgtaccaaggcttgttggtgcatatttatcagtaccctttattcaaattacgatcaaagaacattgatttgaatcatttgatgatatcgacgatgtataaagtagttaaaatgtaacaaaaatttgggcacaaaaaaagaaaagaaaaaaagaaaaggcatgtgttaaggggtccaattatttatttaagcaattgggaaagaaggtctatttatgctgtgtttgtgctcagaaatattgaggactggtttgtatttatacgagcagtagtgtttgaagaagacgcataccaaaccccacaaagtgcccttgtttgttctgaaaatggggtccctttttttttttaaccaaaatcaaatttctaaaacactcgaaacgttctttccacaatgacacctgaatggtcacgatcaataggacaataaacagagcattatgcagcaccagaccactccttcattgtcatcctctgagagtcctggccccattgattcatgcagtgagtgcagatttggaaaattggcttgctcttctttccaagtcatctctgtttagcatgagatgcagatgtaatttctctcgtgtcaagacacaaaacagagaaagagagaaagagaaagatagagagagagagacttagtgtgtgtgtgtgtgattgattaacgaaagggacatgcattaaagccataatcaaaagcatggaggagaaaaagactatagcaattgtcatagatcaatgcttttactatgtcattttctcctacgagggattttaacggattaaatgaatgaaagagatggagttgcagattacttactagtaagagttaattgggtgttcttcaaaaattaattacagtgagctaaaccaagtaaagatgacataaattcatatgtcatgttttttacgtcaatagaattaatgatagttttgagtgctcagtaaaattgcagattaaacagttttggttggtggtgtcacaagtaagaaattgagaaaaggagctttaaaaaagaataataagtgaatatgtaatgtagttaagtaactcttaatcaaaagctaaaagaaattaatagcaaaactaaacccattgattcaaatgtacatgcaaaattacagacacaaagagggagagtgcattcttccattccctcgagttttcaattcccttttctacaattagtcatattcgagattcaaatctataagaaaaacccccaataaataaataaaaaaaaagagagagaagcccactataacgttaagaaagttgaaaaaaactagacaaactaccaaatgaacaaagcaagttttctgtcccaaaaatcttcaaaagcctctgataatgcagtaactttaatgcttagatatcgaaatcagagttacactgagttttgcatatctgaatcaataagaagaagcatcgaacaaagaacatcaatggctgagaataggtatgtattgccatggttccaaaccagagataaaagacctggtaaaagaaccaatgaccccaattgaggtgaaaaaaaacccattaacgccatgacgaaactgtcaaaagagggacatcattccatgccaaagatagaaaggcaggtgaagattcaaccagagaaaataaagaactgtaattatagttccataaaaggatcttagcttggctaacagcgtaatgacttagcttcactggttgaaattcacaaccttccattaaagctttccattcctttctatcttccattcgttctcttttcgttctaggatcctctggcccaactacacaaccaattcgacgaccaaacaaaaccctttcaacctgaagcctttcaggcgattcacggcttaaattaggctccaatgattcaaacacagccgtgtagtacttcaaagcgttcttgaaacgagtcataaacccaacttggttcaaactagcttcgtattcacctaaagtaacaatctttgggtttagtgatttagccaatctgagagcagtatgtacagccattggagtctcgtctaagaggttatacaattgaagcatgaaattcactgccaagacctcgtcttcttcgaccctaaagcttgactcgttaagttcactaatcggtattagaataggttcaaacacgaagttcaattcaagaagcttcgcgaactcggagagacgattaccggtggcgaccaaggacgccgccggtgttctgccgagggcaagagctggtatgccggataatctaatcttagtgggctttccggtgggccgagtcgctagggcttgtaaaagggcagcccactgaaccccttgaacgattccgaaatcaactatatggatcttactagctctttcagtggcttcgagtatggcttgattcgcagtcaaatgggcgaatttggagtacggacaagcgtcgtttaaagccttgtaagggagtgtgaaatcttcagaagaagcactttcgtaaatggcggagcagcttttctccgccggtagagaaactctgttata

SEQ ID NO: 1560 - DNA, 1259 bp, Cannabis sativa
aagtttttgtaaagtactataatgcaggaagaatttcacaccgaacaaaataaatattagataatggaagtttttaacctgtccatcagcaatgatcaatagaacatggtattagccatggctttgcttgactatagtcatggccatctcaatcacaggcgcgaaagatgtagttcctgcagccaaatagggagaaaaacaatcacacagattaactaaacattaggaggaaacatctttgtcatgtgatgatggtacatattaatatgagaggtaagtatgttaactcaaattccatagtcaaaacaaaaactcaaacacaatcctttttctgtgaactcaccatctccaaatccataacatggaattaagttatcctcatcaaaagctgataaagtctttccaaatgattgacattgcttgttcatatggatttagatcatttcctacatggtgtaagcttttatggttgaatgaccttgaacctttacatatcagagagaattagagtttttatttaagcatttataatatctttctttcaagtatattctggtatagttaaacatgtccaaaccatcatcatgaaaccaaacctgtccattcattgctctctgtgaaatctattccaacaattagattagaagattcaagcccagcatgtgcaagagcagaggtaacctgtggattaaataagttcaaactcttagttttgcagaccaaaaaaaccaacttactttcactacatttttccttatattatactgagaattctgtaatataacttatcaattcagaatatgaagccataccactttacagtttataggcacttctttttccatgtcatttttgttttaagaatcttacttttatacatatgctgaagttgactttaagtcaatcacaacaattcatctatttgtaggactaaaagatggaaagacacacatacttacagataaagaatttgcaagataataaatggcaccgcaaacatgcttcctgaatactctacagagagctttttccattttcattcctaattagtattggaattaatacacataatacatgtatatagactagtgtggactaaacacaaattaatcatatactgtttttttaattttctttaataagagtatttgtaaaaatttttgttacaatttaaagttaatagaaatttctacttagaattctataataataaaaaaaacctgtaaataaacgtgtaattagtattggaattaatacac

SEQ ID NO: 1561 - DNA, 2054 bp, Cannabis sativa
taattgaaaacatgaatatgattgtgatgtactaacctgaatatgatcaaaaacatgaagatgattgtgatgtattttcggtggttgacatttggacgaggcaggacttgcaggcgcacagcattttgtttgcttttcctcatctggaaagatctaagagcagagagaagccgtgaatctttaaaaattttgatcaagttatacactttctctggtccaatacatatcatcaaattttatttattctttatacatgaatttcagtcaaaggagaacaaaatatacataaaaagaaggaatggaggattttgttgagagttagaaaaatacacacttgtatttttcaattgtgatatagtatcgagctgatttctttttattttggcttactcttccacccctcttgaacatagacaacacctcaatgctgcaaaaattaatttaaagcacagataaagtaataagagcttaacagagaaaacctatataagaatagcatataagatcgagctcatataaaaaaattgattgattttcatttcagacagtattacaggagtaaataaccagtacctttgagtgccagggaaaaagttataatcacgagccttttgcaatgcatttggaaatttggccagaaattttgttgtgtgacagatccgatatgtgaaaagttgaaaggctacacagttgtggaatgatcccagtgaaggagttggacctaaggcttaaaatcaacaaagagctcatatatttttctcctagccaagttggaatttctccaaaaacacttattctcacttagatcaagactaactaaaatcactgcagttttttaaggaagatggaatttcacctaagaagttattctttgacaataccaaaaatctgatattactaaggaaacctattgaactggggattgtaccaaaaagactgttatttgacacatctactatgtacaagaatgatatcattccgaaaatcagtaatttcatcagagttaattatttgagattaccaaggttgtcaatactgttagcttactgatggacctggcaatggttcctgtgatagtttctggagatgtcttaatctgagagaaagggcatcacttcacctatatttggaagaattggaccaaaaaaatgattatccctcaactacaatatggtaatattggatgaccataagggtatgggaccctcataaaggtttgagctcaagtcaacagtggaaggattgttgaagcttaaaacaataagcaacatctaatttgtctagttgcaaattgagttgccaaaaacaatctggattgacccctgaaatactagcattattgagtaccacttttttttttgattaaatattgagtaaccactttggttgacttgttttgacttttaaaccatggtggaacaagacctaattgactatatctaatttcactatttgtgttctgagctgatattgagatcagcaaattgttagctcactcaagcttgaaagcttttggacttctgttatggcaccttcaaaattgttctcctttatttctaacacaaccaatgttgacaagtgtcccagatttgttggaatgttgccacccaattgattatttgacaggtaatttatttctcacttgataaatttccaatggatgctggaaagaaattgaggaatccaactttgcagatgttaacttaccaaacaacaagtttggaattttccaaatctagaaatatccaaagtatcacaagaaactgtaactgataattattggtttcactaaatccaaaaactgcaaatagaccaaattaagcaagtgcaccaaactccatttctaaaattggttcagttatatataattataactaaataaatacactaaaaacaactctgaattacttaaagctaattgtaacaacaatgacctacaacagaaatcaagtacaaatcactcacctaatttggaattccaagattcttcctttacacattgacaaaatctctccattgaaattaaaaaagaataatcttgaaacagacaaaaa

SEQ ID NO: 1562 - DNA, 890 bp, Cannabis sativa
tgactctgaaccataaaaaatggttggttaaacttttgggagtatgattttgacattcaatatcgtccaagcgcaagaaaccgagcggcttatgccttgtctcgagtgcagccagttgtgtgttctgtgctgacatcgactacatggctggactggtcgatagtggagcgtgaaatcaaccaagattcgttcctctctcgagtagtgactgatttggaacaaggaaggaagttttgggtttcactttggagaaaaaatgcttgttgtaccgtaggcgtcttgtcttggttgctacatcatctctgattttgcatttttcgcatgagtaccatagctctcctattgggggccattatggggagtactgcacctatcttcgcctttaagaggatgtgtattcgatgggcatgaaggcccaagtgggtgactttgttcgagcttgcaaagtttgccaaaggaataaacatttggctatgtctcccggggggctgctccaaccattggagctgcctgctcaggtgtgggaggacttgactatggacttcattgaggggctgccaaaatccgagggggtggatacaatacttgtggtggtggatcgtttaaataagtacaaccccttaattcctcttaaacatccctttacaggccgcacagttgctgaagcttttctccatcatgtggtcaagcttcatggccttctgagaaccattgtttcaaatggagatagagtatttttgagtcacttctgggctgagttgttacgtttatagggtactgagatccatcatagtaccgcttatcacccacaaatagatggacaattcaaagtggtcaatcattgtcttgagacttatctccgttgtttggcttcggaccgtcctaaagct

SEQ ID NO: 1563 - DNA, 1663 bp, Cannabis sativa
atgtctacaggaactcttccataatcctaaagataatgctttaggttcaagctacatggaggaaaaaaaatctctacatgtgaacctaaagacaattcttgtaactctcaaacaaaataaaaatacacgtcaaattcacctttttgtaaggtaaaatgcaaaatctcacagcagtaacccatccaaattatggttaaataatcttttctatctttatgtgacacaatcttgggcctgctttccaataaatcatagcctagttcttccttttatcattgcatcacttcaccacccataaacctcacacataagaacaatttgctcccaattcttgatagcatgcaatgcaccacaaactaccacaactgatgccactaaaaccatcaaatcgctagagtttatttgcaaaaccattcacttgacatccacatctcccaatgtaactttagtgcatgtgcaaaaaaaaaaaaaataggatgtttaaatcgattttatacaaacactaatttatttccaaaagctaacgagtataactgtacaaccacatcatattgcctcgcaggctccatgtggagagaccaaccccaagtaaatcttattcatgtattaaagtgtcctttcaacatacatcttaaaatgaaattcatgaattgcttgtccatactcaaagaagttaagtacaacaagggattaaataatgtaccttctcctgtccctgagcaggccttggtaaacgttcagcttcaatgtcatacttcaaaaccctgaaacattcaagccgctcctccaaaaataatgcgtaagtacgcacccaagcagagcaatcccaggctgaaaaggtaaattaaataaataccacaattagaaactctgtatcaatcacctaaacagatcaaccttaccttaccatctacatatgcatatatacacaattggtgtagggacagaatatgatcaagtcaagtttatttataacttttaattaatagttacaatggcaaaggagaatagttatagaggaattgatatcaggattcaatattaacctatcgggcttgaatcatccttgaaattagaaagttgaagaattcgtgctctttgggagaaatttacaagttcctctctgaaagtagggtcaccctctctcaatgtcctatggatgactattaaagttttcaatgccacctgtcaaacaaaaccactaaaaatatgaacagacttatatgttatacagcttattcccagttataataagttcacacacttctgtaatttattaatctaaatgaaaatggtgaacaagatctggataaaagattaagcggaattgcttaagaaatttgtaagcttcggttttcttggtgggaagaccaaaaacaactataataaacaagtgaacggataatgatacagtctaaattgtatagcattcataatcaacaagtgaataagccagaaaaatcagtatgaataaataaagggaactaaccaacaactacacaataaaaaccaagttaaaaattcccacccacaacaattcaaaacattttaagtttaaatccaactactttccatttaagttgactgcactacagtaaaagcatcaacaatccacctctactatattcaaggataggaaatctccacaaaaacaaaagcagaa

SEQ ID NO: 1564 - DNA, 4830 bp, Cannabis sativa
attccataattttttaattttttcgaactttttcggatatttaggacaatatactttacatgatattttgaattcacgtatcatttctcaaagggtaaatactattttggactatatgttttgcaaaagttacaaattggactctgtattttccaaaataagattatgagcttaatttttaacaattttcttttaatacgaccaacttaaaaacaattcctaacacgaatagataccgaaaatataaacagttttgtcataatacttttcgggttattatttaacattttatcatttaacgaaacaaaaagttcaatcagtaacttttacaaaatatacggttcaaatgtatttaccctttctcaaaataaaacaaccaccaaatttttgaaaaacaaaataatgatccataaaaatatatatattttttttttttaaaaaaaaaaacctagattaagtaaattttatttttttttaacatttttggatatttaaaatatacctttacaaattcacatgatattttgaattcagacatcatttttcaagtattaatcaattttatatacaacattgaatattgagccatttaattaaatttaaaagacctattatttgatcaagtaaatattgcatcgtgaagtgaaccaatagtataatgaacatctcgtgccatcccaagagccaaaaggtggcaaaatttcccaaaaagaacaaatacgtttgaataactaaagatcaaatgaaaatacatgtttacagattgcttggacagacatatccaccacaaaaacatatcgctggctgttaagatacaggtaaacgaatcgaatctataaaaattaatgtcctaaaactgaggcatgaagagataaagaacaggagcttggattccagataacccccatctgcaactcccacacctctctttttaagctcctctaaacttggcctcgtatacttgaggttgctgcaaagaatattgtaaaggatgttcatgaaacacaatactgataacaaaaatgaaataattctactcttattcgattatataaatgacaatgtctggggcaacatatattaccatgaacaaggcaaagatctgtctgcctgcaaaccatctcagatgcattgaacgttgggcagcagctgctgcttccacagtttcaaaccgtaaataaacacacccagcactatttctgcgtaacaaaacaattgaattaaaaaatctgctgagattaggattaaagctataagagtctgcagggattaggaagttatctacaatatcaaaaagaaatataaccaagcaagtaaaacaattaatctatacactttctacaatatcattcaactacaaaaaatccagtgaattcagtattcatttcttaaacatgagaataaaaatacataaatcatgcacaagactaatcaaatccgtttgtccacataaatttatcagcatagaaacctaaaatgagatacaacaacgctagcacacacaagaacaggaacagatttacttgcaagtatttatatacttacttgtcaacataaatatgtatcaccctgccacatttagaacattcttcttctacatcatctttaatatccgcatcaaaatcaggatccctctgcaataaccccccagaaaaaggtcaatattaatacgtaatgttctcgtcaatttttttcctattaaaacacatacactagaaaagacaataacactacaaacctcagtagcaggatcaaacatattctttagcagtaaacattcactaggagttccaatggggactgaggctgcaactgaaagaccttgagcagctactgcagtttgtccattaattggcaagtttatggcactttgatttggagcagacccattcagtgcaggtactccaagagaccccacaatactgcaaatgtcaaagataataccatgcagagagtaagtgagagaatatgtgagagagtgactgcgtgacccagttataaaagattgttgagtcagacgaacctagtggcaataccagtgcggtctagtttctgcataagtaatgctctcgattgagcattcaaagcctgcatggagaatgtgatgagtaaaagaattagtcataaaattgagtgttctttgagaacccaatcattgatttatcatatatgatgccagaggcattaaaataaataaaagtaatttcaattgagcattcagaaaatcattatacaagtttccctaaattcattggaaaagcggtatgcaggaaatttctaaagaatgaatccaacttaaaatgtcttatggaaaattgtggctacactattggtacaaaattatctacccgaggaagcaagaccgatatctttataactaagaaacaatgatgaatacaaagttgctttttttcctttacgattttaggcattataataaaggcaatctaaaattatgtgtaacaaatcttgttcaaaacgaaataacttaccaacccaccgccttcatcgtcatcaaaatctgcagattttgccccagcatcttgtgctccaacatgatctgtaacagatgaaacctacacaagcaatttacttgaatgtgagactcatttggaagaaaaagaatagttaatgtttattaaaagaggcaaaacaaactaccaacaagaaaaacaataaactacaagaacacatggtcccataaatataataatggtcaagctaaaggattaatggaaaagaagatgctaccttaagagttcgaccggcaatctccaattttccattcaaactctgagcagcctttgcatgttctagttgagcaaactaatgtaagaatgaacagatgaacaagtcattatcaaacataaattaaccacgaccttatgtagaaacaagtattagcaagttaccactgacctgaacaaacccaaaacccttgcactgtcctgtttcaagatcaagtggcaattgcacaagttccacaggaccaaatgattcaaatatctgagatattaccacatgggagaaagaaatcagtttgataaacaaagcaaatatgaggaaaaaactaaagcaaaataagtacatatcttaaatatagccatcacttttaattctcctgactgcctatagatataatttgcttgctttgcacacgacttagggactttccatcattctttattaatatgttaattaatactcaatatatgtttcatatccactctatatttcaatgaaattccttaatatttaaagcaaagtacatggttactctacctctctaagatgaacctcggtcatgttaaaatgtaaattgccaacgtataattttctgtcaactgcaccatatggtcctataccacctgtgactccagtagtagtgttggattgaacaaggttcttttcagcctcagaaggtttaaccattacaggttgtccaagaagtagttgtccagagagagctattgccattggtacagacatcgcatcataaaattcaatatacctgcagtttcatcagtctcaaataagttcaaaagcttatgaatctgcggttattgcattcaaaacttacaacgcatatagcattgggaaataaaaaccctagtgcagagagctcaagctgagtttcttttgatgaatctgatgactcataagaaaatgttagctcatcatagtaattataaagatatgcttgacaaactgaccaagaaaaacatcagaagggctgttactaacagtgttcgttgatgtgttttggggagttcaaaaccaaaatgattaagaggattaattttaatcagagtccattctttaaatttgtatagaatctaaaatgattaagccaggccgacttttaattttggaaatgcttcaaaatcaaactctaccaagttgactcagtgcctcccaatccaagaataggaacagaatggtgcactacacacgtagtggaagaaaactggaaagaggaattttaggttcatgttgtctaccttgagtacgcagcatgaattgtttaaacatgagtgcaaggtattcccatcatccctcatcataatcgcaatgctagtccatttaagaatacagttaaacttgattctagaaagctgtgatattaataactactttacaaattgcatgcccataaaaatataacaattttatataaacacacatacccaactccttttgatcgtctagagttcctgtccatgatcagccgcacatccctaacctgaacataggaaaagaaaaagaaaaaactgtaatcccaaacaatgaaaaatattgcagaagaaagagatatgcgaccttgagactacatataaaacacctaatttgggcagttcagaagacagccaacaaactcaagagcatcactcacccccccatttacagaatgttgacacacaaaatacttactacactatttgtaactgaaggcaggagatcatgtactgcaataagaagcaaattaattttaatacatgcatccataagcaattcattcaacagaattacaagtactcttaagacgtattatgcacatattccaactgcatgcaaacaaatgaaaaatagagggaatacgataggattcactctaaaggaagtactatcaattacagaaggggagagagagatgaacagtataaatgttcatattattatactctgcgcaaactacaaggacaataaaatcaccaaccttgccagcttttgagaaaaactcataaacatctctctcatttgccttcaggggcatctgtcacgatgcagaagtcaagaataaatcagagaatagcaaacatattggagaga

SEQ ID NO: 1565 - DNA, 3579 bp, Cannabis sativa
aatttaataacttaaaccaattaagaactaccacgtggcaaaacttcaacataattattgtaaaaaaataattaatatttatagtgcaaattacttaaatatttaaaatcaattttttttagcaattttcctctttaccgaacataagaaaattggttctttttcacagtttccttcccaatcttttctttttttcacaaaattccaatttccaaacataggcatgcatagtgtttctcaatttttatcgccaaaaaatacttcaaagaaacatccctggtaagctaaattgccaatcactaaaaataaaaaacaaaaaattaacattttggagacattcaatgatgtttaggccttatttcaattccctcaacaattaaacctcctctaaggtgctgacccttcacttccctgaggctgatctttagctcctcaccattacagttattgaaaaagcttcccaattcaatcttgatccaaccattatctccctcaccaaagactatactttcttcatctttaagcaaccttgacctcaaagcccccatttcctttagaaaatgcacacgttggaaataatgtttccttcttccttcttgaggactcaagttcactttgccaactgctttgaaatcaccaacttcaactgaaacctcagaaggtagaaaatctaatccgtatgcgcggtccgcgaacctcacaaccatataggctgtgtaaagtgtgtttggggagagcattttggtgttcacagtgccacaaatttctagccaccacattgttatgagctcagctacttctgcaaacctgagtttttcttgttaattccatttgttttattattttcatgtagaaaaaaaaaaaaggaaaaggttatagctaatttattatttaattagattagatccatgtttctagtgatcaagaaatttgagaagagaatagaccttgattcaggaattggtttccaagtccaatataaaggatgacttgcccatgttatagagagctcccttgcactcagcataatgcatttcttatttgttgatttttctatccaaaatatctgaggcaaagatttgtatttttggaggggaacaaagaaatgttgacaatcatattcatcagcatattcataacaatatagatttaaattcaaatgctatataatatatcaaggtttttcactttaaaaattttgggttaaatttatttggtaaatccattacacatattaacctaaaataagccacttgagcaacaacaggcagcgcaacaaatatgaactcttatcactagaattcatatttgatccaccgcctgtccatgcacaagcaaattaaaaaaactactactaatacatatttaatattctcctaatattatatcaaagacttcaagttagctatgtacagatagtagttgtataatcacatgtaataagtcaatgcttaatatatatgatcaacttctattatagcgtactttcagcctttaacaatatctataaatatatatataatctatctagaaagagctatcgctgtttaaaaatatattgattttatatttcgaagtatatatcatggggggaatcatatctttttgggagaatgactagactgtttctcaaatcacataagattgcattagctttctcattgatcacgatagcatcatctttttggggctctaatttgactatacccttttcaaaggtctttgtttggtaatgtgattactaagatcttactgtataaactagaaagcactatctagcacaatgtgtagacataggactttgacccaatctgtagctacaaatggtgcctacatctaacggctctctctctttctaggaatctatccttaaacaaaaaggattcttattacacattttataaccacgtcttgaaaatcttatcaacattaatcaattataaagacttgaccaatgagagcaatgaatcattagtataatctctcataaacactttttttttttttttttttcaagcagtctttaggaatgaagccaaaacgttacttttgctttcagaaattcttttttggaaatgtacttccaacgtggctgtaaaatgtagaataaaatcctttcaagtgtaatgagaaattccaagaaagagagagagctgttacatctaagcaccatctagagctagcaaattgagcaaaagttcaatgtttgcacattatgtaactaataagttacctatacgtaatagataaatataccaatacgtatagattcatatgtatctctatgtgtgtaccctttgtagagcagcatttgttttcccaacattattaagcaatgatgaaaattttatagttaggaaagtgattttgtactactaactattatgaccatataatctaaaaatgtaccttcttaccaccatcaattagacatggactgcataacttgaaaaacaactgcttgttggaggagtaaacaataggaaacaccaatcttgataaaatttctttgagatcagatggcagaaaatgatcccaaagactatccgaatcggccatggcacgaacacaagacgaggctagagacgaacgacatgcatcttgaggcgaagtgagtgacaaaatgtgtgcaaaacagtcttcaggtaaccgatctaaattcatgattttcactcgtttttttccttttacaagttcactttgaatttgttttataatgaggaagaaaatgttgttggatgtgattattggtattggaataggggtaaaccgtttatataggacttggacaatgatattacgttaatatgacaacatttgtgttttgcaggatttggtccaaaaatgacaacatgaagtgaacagatgaggacatcggtgacaaaaaatggtattcatgtgagaaattatatggtcagtagaatgccaacgatgccatacatctgaaataagtccctatctctaacatttaatgaccatatatatgtatcatatatgaatatgatcaactacaactatacaccaacttcgttttactttgtattcttgtccttcaaaacaagaacctcttctttttcttttattatcttctttatatatctacattatattatatattatattgtattttttatactcacttttaataagaacaaaacactgaaagaatcatgcataaagtaaccgaaaaaaaaagcaacacaacacctttatatcttttgttgattatgcttaaactaacttgttcttttcttattcttcgctcaacactcgtttcctccgcattataatctgcttgtttcaaaaacggtgtcgttcgttcttaatgtcccgtgtatattgtatagtccgttcataatatgcattattgtcataactcgtaagatttgatgaaaatctaattcctaatgtaattgtaataataggtttaaattacttaacaaatcagtttttctttgttagagaaaaaaaataaaattaatcatatgtgcaacatcaaattacactgattcctaacgtaacaatttttttaagccaatcatatttatctaaaagcaatatcatgtcattgtgtgttaa

SEQ ID NO: 1566 - DNA, 2081 bp, Cannabis sativa
cttacttacgccatcaactaaaagtaaatcaacaataaatggatcccatcaagttgtgaatcattgagttggaggataagtttagaaaatatccagatggggaacatgggaaattacctggttatgactccgatgaggagaccgagccatttcttcctgatattctgaattcgaaaggcttgaagtgaaccttcaaaggcatccttgcagcaccttggaatttgggggacaagatctttgagaagtgatacgtgcgaggagatttggcagtgtgatagatgttgaaaatcatgtgaaactccgtggaagaaaggaagtgaccattcacccccttaaaagctatggcaaagcatgtcaacctaatataagccatcagggagagttggagaggtgcaataccaaactaggcaagtatgtcaataaaaatggattgagagataaagtgacgctagctgccataatgtgttcaatgaaggctaccccccaccccctcttggaggggtgcgacggtgaattcatcttgccccagcttgggcaatgctaagtcattagttgtacgtattttaaaggtgtctattaccctacgaataccatctatggacatggtgctcttgacatctacatagacgaagggtacttcactaggcaatggaaggacttgtcacctaggaaggtaagaagaagagcgcctgtgggatgcgacaagatgcctcagttgcttaggtggagtcatacctgcagacacataaaagtgatgctaagcatgaggcacatattttctatctcctttgggcctctttgtgagcctaaggcttgaccctgggtacccccgggaataaggatggagtagacatgattccatgctcctcgcccaaagaagatcaggaagccttgaaaggggatggaatatcaggcttaggagggagagaactctcaaggaatctcagatggtttgaagattcaacaagtgaagctctaagcctaaaacgatacacgtcggagtaggctaccagaaattttgttctctactcaaaacagaatgaatttcagctttgaccctctcaacatgctctctatggttaataatgtgttcaaagtgattgatcctcttagatattaatctaacatatctagcatgtaggctctcttgagtgccctccttatcaaacgacaaaatattaatgatattggccgtagaaaatatcactttttagggttgcgcccaaatgagacccaggacggaatagtttaaagagacacgctaccttaacaccatcacctaagaggtaaaatcaagatattgagtttactatataatacacacgggggtgtatgccccagtgcaagtgcaagtgatgcaattagtgccacaatggcaacacacaaactacaactgcaagcattctagaaacgtaacttaaagacaacaaaaatggggggaatagagataagtgtggtacctcttggaacatgaagggtcatagaagtggggtaactaagttcaaagtgagcaagatgcctgttacgtagatcaaagtgcaaacattaaaatgctaacctaatatcaagggtgacacatgtcatgtgtggtagcgacaagagtggagattaccccattatattcaaaaaagtatataaaaatatataaatatatctaaataatagaaataagaagtgaaaaagtgaccttaggagggatcgaactcaaaacctattagacaaggcaagaaggatttaccactacaccaaagtaatgttttaaagtaaaaattcaagtaagggaggccccctatatagtaggcacatccttgagaaatacaaagaagctaagattcccactgcaacaaggctaattccttaattcacttaatcggcaagaaaactaattaaaaaaattcttgtagattgggggtaatggttaactccaaaaattagcgttgataactctcgagattaatcacctaataaccaaatgataaataaggattaatttgattatcctactaactcggcatgcatttctcaaagttacggtacttaggatacatcaaagtagctccaaaaccaaccccgtgagttgt

SEQ ID NO: 1567 - DNA, 5479 bp, Cannabis sativa
attatttacaaaatgttacttctagatagtactaaacactactaatactttataacaatattcatataataataacaaacattataaacacataaggaaaaactaattttttttaatattgttgtattactaattaagccaaagctattcccaattccctatgtgcttaattagattattatcctatttaaggtgaaattaataattaaaaagtgatttaaattatatgatgagttgggaggcaagggcacgtgtcatggggtaatgggtgaaagtgaaagtgaaagtgagtatataatatctgtaatgtgtactatatatatatgtatatgcaatgcatgtaatctaccaatgtaatgtggttgggatgacaaaaaaaatagagtgagagtgagaccatagcacgtgtcatggtcttatgtcttcttaaactacatataccatcatcaaattcaaatcatatcatattatataatagagagaatgagaatgaattttgtccccttttgtatgaaaaaccaaatgcattttgttatgtattataattttttttatatatatttagattatagtggaatggaccctagtttcagtttgatgtaatttagtttttaatcggccgttaaattaatttagttttaatttgttgtagacacaacctcaaacaagaacaaaacacacaatataaattcgatagaattgattagcaatcaataactaaaaatagaactggttcgatcaagaaatcaataaccaaaagagagataaaaataaagaacacaaacacatactctaatccacagtcgaaaccagcgtcaacgactcttcaatctctttatacaacttgtttcaaattctgtacaatcataggttctaagaatttaacactcaacaatgaacattgttctcactaggctctctctctgtttctaactctagcatttacaattatgggaatataatgaattagcaaaaggggaggagaaccttaaatactaagtgagtcgagatagaaaagtccagctctaaaatattgagttctaactgttatttctgttataggtccatttagtcgtttgagtccaatagcattttaccaactataacaatcatccaccttggtaaacatgcttgagatttagcatcttgagtgggttcaatttgaaatatcagcagctaaatatgttgaacaagcttaaacaatgtctaaacttgctttaaaggacatacttagtaaatatatctgttgcattgtcctttatttcttctccacttgaattttatttctaccaatggcatctctgatgaagtgaagtttaatgtctatgtgtttagacctctcatgaaacatcgaatttttcatctattgcaggacactgtgattgtcacatagcacaataattttctctgaattgtaccccaatttctgtgaatcccctcaaccatatggcttctttgattgcttctatagcagctatatacttagcctctgtacttaataatgccaccacctttttggagatttgactcccaactgatgcatccacccaatgatttaaatgcataacctatcaatgatctaattgtctctaaactcccaacattatttgagtccacatacccttcaatcttagttttgtaatatgtgtctgcattgttcattaatccaaggtccagggcgcctttggcatacctcattatttatttaagagccttccaatattcaaatcctagatctaaaatgaatttgctagtaaccattgagtacatattaagcttccaatacatgaagcatagggtattctgtccatttcctctctttcttcctcgtgcttgttattgtgatagcttgaagtgtggtgcaagaggtgttgtaatagatctaactattttgtcatgtttaacttgttcagaaccttttcaaggtagcttttttgagatgaggacaagtgctttggtcttgttcttattatggcaattaccagaattctcttatcaacacctaaatctttcattttaaactctgagcttaattgttccttgagttttctaatttttaatctatccttgcctattatcaaaatgtcatctacatataacagagcgtataggttgttggtatagtagacacatggatcatagttgctccttgtatagcctatgtgagtcataagctcattgaaccgtaggttccactatcttggtgcctgcttgaggccatataaagatttctgcaaaaaggcacaccttgattgagactgctgctcttgaacccttctagttcaagtatttaaccatgtatattttctctcaaaccttccatgcaacaaggctgtcttacatccatttgatccatatccatatcatacttggaaaccttggccatgattactcgaatggatatttgtttcacaactagtaagaaaatatatgtgaaatctataccttctctctgattgaatcccttggctagaagccttgccttgtacctgattggttcacctggtaatccctcattgtgtttgaaaatccacttgtagcctataaatttctgtcctggtggctttctcacttttatccaagtctttttcttgatcaataaagtcatttcttcattgataacctgagtccatttatcaatatcactgctattcatagcctcttagtaggttgctgattcagtaccttcaatctcttcaaaagtgttcaaggcaaatgatgtgtaatcaacatgtctatgtctatttagaggattgatttctcttatgtctctttctagacaattgatggatgtcaagcttagtctgccctatgtcatcactagaaataacctgattgtcatcatcattgtcttatgtgtgacctgatgcaatggtttcttcaaattctactggtaggtttctctataacctagtatcaccggtcttatttgcattatttgtatccatctatgtcatagccatctagtcttctttgaacaccacatctctactgatgatatatttcttgtgtccctcttttaaacaccataatatgtagccttttactttattgggataacccaagaacatgcattttagggcccttgggtggagtttttattgccttatgtgaacaaaatcaagacaaccaaacactcttaaatggtctagcttaggtggatttcctatccacaattcttgtggagttttcaaataaataatagtggatggacacctatttatgagataacatgttatctttactgcctctctccaatacttttgtataagtttgctccttttagcatacacctgacactctcaataagtgtcctattcatcctctcagcaagaccattttgctgagggattttgggaactattttgtgtctagaaatgtccttcttgtcacagtaagcattgaataagcctgagcgaatttcaattccattgtctgttctcaatttttcgaccttcttccttgtttgagtctcaaccagtttcttccgtttgataaaagtttcaaaggcctcatcttttattattaaaagaaatacctaaactttcctggagaagtcatccacaatacttaggaaataattggcaccacctagtgactgaacccttgaagcttcccataaatctgaatgcacacatgccaatggttccttggttgtgtgcatttcaacagagaacttgaccttgtagctctttcccatgacacattctttgcaaaacttcagtttgccatcttatttcttttttaggagaccttgtttattcaattcaaccaagcctctctcactgacatgacctaatctcatgtgccatagcttggtgttgtcaacaccagctcttccaactgtagcatcaacactgccttctgtagtgattgcatacttcttgttgtatgtcttcccaactagaacataaatgccattcttgagttcatccttcatgacagccataaatcccttcaaaaccttgagtgaactttctatcttaataaaatagccttttgagatcaaaaccccaaaagataatagatttcttttgagtgcagggacaaatttgacatttgtgattattcttgatactctatcatgcattttgatcaccactgatccaatgccctcaaccctgccaactttgttgtccccaagcattaataatccactagtccatgccttgaattcacaaaagaacaacttttgaggagtcatgtggaaagaacaacctgagtcaagaatccattcctagccaattccttgacttgagaccaacaaaacatcagctaaatcataaccatgtgatgcaacactagcatctcctttttctctccttttattcctttttcagtttttccacaaagtcttgcattcatccctgtaatgaccctctttcttatagtaataacattatcttcttgccttagattttgatttggatttctaactatggtgagtgttctttctattgttgttgcctttgcagttgccattgttactcttgttcccaccaaaccttgaacctatgttctctgatctacctcgagcaaacaaaccattcttgtcctcagatcttttctgtatttcttttgaattccaagcatcttttacctcgagcaaacaaactattcttgtcaaggtatcttttccatacaatatagtatccacaaaatgttcataacttttaggcaatgaattgagtaaaagaatacattgaccctcatcttcaatcttgacctcgatattattgagatccaagatgatttttttgaattcatctaaatattttcttagttccatgctttcatccatcttgagagtgtagagcttcttcttgggataaagtttattggcaagtgatttcttcacgtagatttcatctaatttctcccaaagatcaatagcagtgtcctcacttcacacttccctcaacaccacatctccaagactcaagagtattgcattgtgtgcctttaattctatctccctcaccttcttcttgtcatccttgagacccttacgctcttctctgtcaattgctttagaaatctcttgatgaacaaaaaaaaccttcaatttgattctccataagccaaagtcattggctcctatgaacttatccacttcaaaccttgcggaagccatttgagatcaaatcttgatctttcttcaaacctcgacaatgtgcttgatggcccccaaaacccaagctcggatgccacttattttaaacataatctcaaacaagaccaaaacacacaatacaaacaagatagaatgattaacaatcaattaccaaaatcagacctggttcggtcaatgaattaataaccaaaacagagatgaaaaataaaaaacacaaacacatatgtggttcaagtgagagttaattagacaccactctaatccacggccaaaatcagtctcaagggcttttcaatctctttattcaacttgtttcaaattttgtacaataatggagtcttgctc

SEQ ID NO: 1568 - DNA, 1242 bp, Cannabis sativa
agagagagagagagagaaaacatggaagaagagtatgaagatggaacaaaagggttaaaaaaatggtataaacttgactgactctcccccaaaaaaagaaagtaaaacaaaaggttaaaggcagcaaaaacatgagctcaaaagccaggtagggtgagataatagaggaagagagagagagaagagagagaaagagagagaggtttgttcataaagagaggaattttgcaaatgtcacaagattctcaggagataaagacgattgagcagtggagatggtccgaaatgcaaggtttggagctcgtgtctgcttctcctagtcctacttttgagccatttaaaggcaacccatcaacgcaaacggcaatggctttggctatggcttcttctcaacccacaacaactaaagagccagtcagacttgatgatgaggaagaaggaaaacgagaaccccaactgggtctcgacacagcttccaaaacagaagaagaagcaatggagaatagcaacaacaataacgatgaacagcctaagaaagactctaatggcggtggcggtagtagtagtagtggtagtggtggcagtagtggggagaagcctgagccttatccggcagctgggttcggtgagctttttcgattcgctgatagtttggattatgttctgatgacaattgggtcgcttggagctatcgtccatggctgctctttgcctctctttcttcgattctttgccgatcttgttaattcctttggctccaatgccaatgacacggacaagatgatgcaagaggttctaaaggtactacacataatccttcatcactatccatttctttctttcttaagaaaaaagctcttatcttgatcgttctatgttttcttttcttgtgttttcacagtatgcattatattttctagtcgttggagctgcaatatgggcatcttcgtgggctggtgagttcaaactggattatgggtcttttggattttggcttaaattttcttgtggagtttaaaaatggtgttatttttttggttgcagagatatcttgttggatgtggactggagaaagacaatcaaccaggatgagaattaagtaccttgaagctgctttgaaccaagatattcaatacttcgatactgaagttcgaacatcagacgttgttttcgccataaacactgatgctgttatggtccaagatgccattagtgaaaaggtgaagcatagcatagaactgg

SEQ ID NO: 1569 - DNA, 1712 bp, Cannabis sativa
taaaaatgtaaaagaaaaaattaagttaaaaatataaaaaatttacaaaacaaccaatattataagttcattttcctttcaaaacaattataataatcatatattataagttcatacatcaatatttttaaattataaaatcccaaatcaaaatttctaaattaattttttttgaaagaaaaatttaaaaattattgttcccaaaataaaatgcatcagcaccaaaaatagttaattaattcttatttattttaacaaatataatattaattattaactttgaaagaatgttaaaaaaactcaaatgcctaattaacaaaatagagtactatgtataactaattttcattttaattttgatggtatattttcataagattcacaaattacgctaaccataaccgattacggcaaaaataacaaaaataattccaataactctaatcatttttcttggtaagggtattatagtaattacataactataaatccaattatttatccataaaaatatttaatttattttatctatatattttcacaagctaagttttgacttagaaaatatgggttgagatttacacgtcgagaatccagagaataagacccacatatataaatattaataatatgaatatctacgaactcataaagcaaggtctcataaatttcaacgcttttcttttcttcttcttcttctttcaatcctaatccaaaaacccatttttccacaccatttcttcttgactcaaatcaataattactctttgaatttcgattcataattttgtcaaatatatatatatatatatatttatttcacattctttatgctgcttcaaaattaaatctctcattcctctgttttatcatcatcaagtttcaatttttcctacattttcccgctgattttctcgagaaaatatctgggtcattgctaaattttttgatgggtgtttatcttttccgttccaaaaatcatttccatttctgggtatctctataatgaaggagaagaatcttatcctataagcctcatcatcatcaccatcataattaatttttatttattttctctccttttaagcttaaatgttacttctacaaatttttctcaccttgtcatttttttctcccaagataaattctgggttttgattaatttttgttataattttttgggtttgggaaaaaaatttgaaagatgggaggatgttgtagtacaagtaagcataatcgtaggcgtggagggtattttggggatgatttttttgaagagaaaccatatgaagattatgatgaagaagatgatatgagatatggtgaaaaaggtgctcgtataaggcttagaggctcttctaaatttacatcaatgtatacacaacaaggaagaaaagggatcaatcaagatgccatgaccatttgggaggtatttttttttaattataattctatttgatttcatagttacaatctctttcattgttttcttcttctttgtttcatcatgagttttttttcaatattttgagaaaaagaaaaggaaaaattggtccacatatgttttcattagcaataattagtattaattgtaatttttactctgtccaatcaagttttactttttttgataatacttaaggtataatttagccaattaatgtagttttaattaaaatttaagataaacgtgtttacgttttttctttttt

SEQ ID NO: 1570 - DNA, 1722 bp, Cannabis sativa
gcttttcctacctctacctctagctcataccattcaataactcaaaaaataaatagaaggttggagggatttcgagttttacagttacagttagtgtagcctcatacttgtatggtcatctttacttgatcaaaaacctgtacagtattttttcttggcaaaatgttttaatgggttagaatccaatactttgatttctttttctcatacttcccttttcatgaatcaactactgccccttgctcctatcactatcggctaggaatttggagatgccacataaactggacggatcctattgggtgaaggccttgctatcaacccatctgtggcccagcccactgattctccatcgcttttaacatggttgaactccctttccacatattctagagacatttgcagcctccctcctggtttgcagtccacagaagcacttcctgcttcgatccctgcattcgtttcaagccaataaagataattgacatgaaacaaagccttgagcatgtcatgttgggagcagctttctttaagcaccacctgtttcattccaatccaaccgttcaaattggcaagagatgaaaaagatattattcatcagtctccacttttaggctcttagcataaaggaaaagagaacccaccttttgtcctattacaattaatagttatatgtgcactttaaaaacatctaaaaagtatacataatataaaagtgttattctttaagaaaagaatgaataaaataagaagcacatagtaattcatcaaacatatctagtatcaggaaaccatttgtgtggatcagtattcctccttgtataaatataccatggagaagtgatatatatatataaatatatatatttgtaactttttcatgcagaaacaaccctcatacatttaatatgaaattagatggtttccaaatatttattattttcttgtgaaatactttcatttttcaatcatatttattgggtaagtccataaatcaagtctagtgttgactgtaatataaggatgtaaagtaaaatgcctggtatgtgaatggacaaactcaatggcctcttaaacttaaacttacacagtattttccattgtgttctgttaaaacgtaaccctcattttcatacagactgaacagtgcaagtgcatcctccttgtttttgacaacatcactgagcttagatccaagctgcaatcgattctcaatttcagcagctgcaaccatcgcttcagaagatagtatggttggtggttcctaaagtcagcatccaaacaatataaatacaatcagagtacgtgatcacaagcaaaaatataatattcaaaaaatgaatttaggctctatcatgagaaatatgattctaatcacttttccataaaccgcacaatgcaatctccaaatgataatgccgaatggagaaactagcttctcactgagtttaataacatgattgtctttgtctatctgtccagctaaaatatatcctcagcaataaatattatactaaagtcgtaaacaccgttgtcaatcacaccacctatcctcacaatcagcactagcctatgatgttacaacattcaaccaacccctttttttaactttccacttttgtgtatattcacaagctatgtatatgcatataaattcatttatattctcatgcagctctatttaaatttcaatcatcaacaaccactagttgaatatctttt

SEQ ID NO: 1571 - DNA, 3193 bp, Cannabis sativa
aacagtaatcatatggtaaaatcctatcttacaattgtacttttccaacattggatatgtaatgtttttattgctgtttatagatttatatatggcctcttatttcagtgatacactctcgtgttgagaatgacattgcaaaggacattatgacaagttaaaacatgttgagattggatatgtaatgtttgcatatatgtattactcatgaattgtctctactgtttatggtttttttctctgttctgcacattgagtcatttcaaattagtacttttgtttctcagtgtagctattattggattttgaaatgaaaatcctcctccaatccaatataaacaagtagtgaatgttcatattattatttggtaatattgagtatgagaaatgttaaaaggcaccggtggtgtttagcacctccatgtattattatcgcaattagtccaattaaatattgggtttcatgtagtttaacgtaataacttttagagagtatcgttagctaattgtaagataacatgtttacaggtgttagacactgttgcccaatagcaatgcttattacaaatttgtgcattgcatcgatatctgcatacacaactgtaatttaatttgtgaattgtcgatttgtcattctttgaataacatcaacttctctaaatttcatcaagagtttgattccgtttgatttatgggggtcatgtgaatttgttgggaggagtcttaccgtagtgttgaaaaaaaatgtcgaatatttttttttttcaaatttatttttgtaggtgtgttcgctatgtttacaatatactatttttttttgtaagtttttgaaaaaatttaaattgttttttaaacacccatgataaatgaattttatttttggtattgtaattaacactctttttatagtaatttttgaaaaatgacactttttttgtatctaggaaataattttctttaaactgcttatagtgttttcttctatttgaattgaagcatccattttgtttttttatcccttactactttcatggccatgcaaaattttaatattttacttaacaattttaatttggtacaaatgataattaattcaaatccaatgtgtgcttaagaatcctccatttagcttaattacaataataattgcacttgaaatatctaaaaccaaaccagaaaagagaatcactcagttcagttgtattaatataaatcttaagttccattctagttaataattttaatcttttctctgttttcattcttgctaattttgaaagtagaagctaatttttttttttttttgtataaaaaatttaaataaataaaaaatgaaatatcacataatttagattagaatctatataaaagttttacgagagaaatgaagtaattatatttatagagatttaaaaggaagattaggagaaggttagactgaggttttttgtgaattttggcagtgtaacagcttgagaatcaaaattcatatcccttttcagtgataaaatgaccttatttttttttggtggttatgcaaatgggctggaataccaggtctaatatgatgctaaacattgttaaaactcagtgattacaaagatatagatatacctatattttttcttattgcccataaaggcataaaaaaagtagatgtcagagtagtgagtgtaggaatacaattttgctttattgaaaatttgttttgccacttgagcgcggaagaaacctaccaatttacttttcttgtttgtttaatgaaagtaggaaattcgaacaaaaattacaaactatataaataaaaataaaatattaaacaagcgattgggcgagaattaataccactcttatccttattcgatttaacattcgagtgaaaaatgtcatctctatatcatcgcctcattccttgagtagtcaagggatttccaccctattataagtgtaataaataagtcatattatttacttgcatagtataaagatatatattatgaaaaaagtacgcatggtacttagcattataagtttatcctattttatttcagtaattgttatacaaaatcagtaacgattcataagatgttactttgtaatagtgttctgagatttgaaaacaaacttaaaaagctacgtacatataacacttgcatcttctgtattactgtaactactaacacagagttagttgatactcattgcttcttctcagtccaaacttcaggagaagaagttcacgactcgtaagccttctacttccacgtggtattactccgtcaggctttaggccatcgtgaaaaatttcccattgctatctctcgagtctgggtcgtgtctcgagcgtcatgcctatgctcctatttattacattagagtatgttgaaaagtattgaatgaatgaatgaatgaatggagattgagggtaacaaaatgatatattggtaggtagcacaaaaatcttgaacaataatgattatgatttgttagatatatctttggtaacttggtagagtaacctaacctacggtattgaatctatccacgtacaaacccaacttagaagaatatctcaacatagattcccttcttgccctcaaattacactaaaattttggcctttttcataacacactctcttccttctttccttcttttttgtcttttctcttctcatttccacctatatatatttccttaacccttttcaacaatcaaaactcattttttttttctacatctcttaattcctattctccaaaacaccacaagggttttctcacttttcttctcactttcatttttctttctcaagaaaaacaataatgacaatgtcaaaagagattaccggaaactatgtgatgaagcctttgatgatggaagtcgccccggccttgcttgacttttcgacatggaagtactcgaaatgccccgaattggagactattgtggaagatatacacgaggaattcgacgaagatgatgagaataataacaattatgatgatcttaatgctacttattattatgttcaatataataagttagtaacttagattgcagtgttaggacgtatttggctagccaatatgaattattaaaaatcataagacgtagaaaatattgttccaaattttaattagttggaaaatgagtgtcattaacttgtaataataatgttattattagtact

SEQ ID NO: 1572 - DNA, 3590 bp, Cannabis sativa
acatattgccattacaattaggcttttagccccttagccgttaaaaatttcttttgagaaagattaacaaataaaaaaaaatatctaattttactagtagaagttcgatgtgcggatgaaagttcgttcaaaagacacaatttggtacatatcaaaattcgaaggcatgatttggtagatattaaaattgggtagcacgatttagtatatgaataatggccacattagtaaaattgaatggaattggataaaaaaaaaattaaatctagtagtctcaataattcagaaaaaattttatattacattttaaaaatatgtgtaccgatgtaatcctttgtgtttttgataattagtaattctaaagttgagcacgtttggaaagttaatgtgtaaagtgtaatttggaattgagtgtatttcataataattatgtatgtggagttaattgaggagtttcaattatatttttcaatttgtatgactcgatgataattgaatgtgattgcacaatattactatatttagataattagtattattaaaaatacgtttgaaaagtcataatgtaattagatttaagtataattggaactaattatacattttggcagatgttatttgaacatgtgattgaaagtaattgagagtttcaattactctctgtaattagtatatacgccactccactttaactacaattttctaaattttacaatctcaaaatccatgacataacaagaatatatgcttagagagagtgccatcatttgttgaaatcaaaatatctgcatgtcacaatttgtattgaattcccgaagtgatacattctcgaagaatcgtatattctttcatgttaacaattatattctagtaacctcgtcatatatatatatatgtataatcacaccttaatatgtttgagaaagaacaattaacaatggctaagggctgtgtcaagttgcttggaatgtaagtaagtccttctcccatgagacttcattggtctttgaagcatacaatcatgagtttctttccaatccaaacaaagatgttatgcagttcaaacccgaatccgaatagagatagtttcaaatggttgaatgagggtgattttatagagctaaatgtcctaagaattttcacccacaaatcattgagaagttgtgaactttattaccactaatggcttgagtgaggtcataagcctcatcatccattttcatcttgtcaatctccatcatttctagaatatctaaagctggtttctgagcataactgtatatcctcaacaaagatttatacaatggcaaactcgcgaaacccaaatcgtggatagccttgacataccaacacgcaccttcaacatccccttccttctcgaaatactctgctatggccattacaacaccatctgatggcctccaatggcaatatctcatcaaagagaatgctttcttcattgcatcaagggctttctccatcttttcggttttcacccacccttccatgaggatctcccaagttttataatttgggcatccccctttctccaatgtttggagatgaaacgattcagctttttccatcaatccattcctaacataagcaccgagaaggatatttgaaacccgaatatcaaacctacgacggttggattcccactccatgaaaactctctcagcttctttgatctcacctagctttaccaagcacagcattaggctcatgtaatctgcacaattgattctttcacttaatgctttacgagcattccaaacccgaagaacttcattcttgttgttcaacgaggcatactgtgttatgagaaagttataaccaagaggattaaagcttgacagtttatcctcagcctttctaagagccaaactagctttttcaaaatgccctgctttcatataaacattagctaaagttgaaagactactccatccaagctcaacaccaccatctcgaatcatttctttgtaaaccatctcaacagaagagaccccagatatctcaccacaggcattcatccaaaggttgtaggacaaaacattcaagggtattctgttatgcttcatttcctgtataacacgaagtacttttccgaattgagaggttgccatgtacagcttcatcatctcattgtacggatgagaattcacaacaagtcccgagccatttaactctgacatgaaagcctcagctttctcagtgtccctttccttaacataaccccggagaagagaaaagctagcagctttacacgatgcagtgcctgagattttgcttctgtaatattcttcagcttccactagacccttgatgttgatgattaactccatcttcatggcatgatctgttggtgacattaagaacccgttttgagtttccatccagttcattatctgacatttcaatagaggaatataaatatagttagagaaaaagtaaaacgaactagagccaagattcggaattgaatttggaacctggagagcgtggttgtggcgtttcagcttcaagagttgggtggataagcgacgaagttcgtgaaaggaaaccttatagccatgatcaacccagttctcaagcacagtggctgcacaaccaaaagggtacttgagcctcaaaatcttgcccttgaaatcgcttttggttctcgttatgaattcattggaggactcatctgccattagtgaactattgtaagaacatattgatctcctaagacaatttgtcacatccagttgaagcatgaagctgcatatttcagacacccaaaagagtgattcaaaaaagccaaagaaactgttcaataaagagaggtaaagagaaatgtgagctcaccttctgatatcagcaacaaataagcgaatcgccatggaaaagccagcttcttcttccctgaatttgttttaaggtaaagagatgaagtttttacctaaaaaacaatttccttgacaactattgagtttcaaacttccaagaactcatttcaagtgctttatcaaagaattgccacagaattgttgaatttttaacataaacaactcaatttaattgcattatcaaagaagccccaaattgaaatgaaattagagagagaaagcttaagcttaatttaattccatacatgtatagtttctttccaattccaatcaaagctaaagcttcttcaagtatagttcatgtttctcaatttgacctaaatggaaataccaggaaaaatcaactaggtgaaaattacaaaccctactgttttccctctcaaatttgtaaaaaatatatactggcttttccatcatctccaaactcatatataaaatttagggttttaggtttttcaatctcatatgacgaaaaccccaaataaaaaccaaaactttataatcaatacataagaaaacaaacctgtaactctaatggtagcaaagccaggttagcacagacgagcgattggcgaacacgcgccgccgttgtatggtggaggctggagtttgcaaacgtctatggtagaagaagtagaaagacattgataaaacgacatgtcgtttatcaaaattccaacgacaaatcgattatac

SEQ ID NO: 1573 - DNA, 1388 bp, Cannabis sativa
ttggagagtttaccatcacattcttcctgtagccattaacttgtttcttaggaaagccatctctcaaccttgttgttccatctgtaggaatccaacagaaactgttactcatgccttgttagattgtcccagagttgctaaaatttagaaagcttccccgcttcaaaatttttatgtttctaatagacatgttgatataaaggaatttatgctaaatggttttgatcagctgagcaaagaaaatttaagcttattgttaactattatgtgtgccatttggaactctagaaataaaaagttatttgcaaattcggatatggctcctattgatgttatggcttggattaactctttcatttcagattaccaggaagctatgtgtaatgtaaacaggtataaagcagttcacaatcagcaagcaactggcatagagaagacagttcctcaaaactgctatcagcttaacatggatgcagcactttgtgctgagcacatgaagttaggatttggagcagttattaaggattggcagggtaatttggtggtaggtttatctatccctgcagcaggaaacttacagcctacgatggcaaaagccttagctttaagagctggtttgatttggtgtcatcatatcaaaattcttttggcagtagttgacgctgattcaaagatgctggtaaacagagttcttggtcgaaagagtgatcttttagcactctcggacgtggttgaagacatcagaagttctttgtctcttttccctaatgttatccttcggcataccagtaaacagtttaattgtaatgctcatagtttggctcgaagggcactagggcaggatgaagaattatgctggaatgttttagttctagttctgtagcttcttttcctgaagcattttccgtcaaaataaataaataaataaataattattcaaaaataaattataactttataaatataaataaataatttgagtaaaaaagaaaacatgttaagagttactgaacatatgttttaagattttaagtaagtaaaaaaaattaattatgaatagaacataataattatactagtacatataattgaaagaaaagtatcacataataatactttaattatatgccagaaatttcaagtattaaagaactatatgtgttgtcgacaagagaccaaaccttaactaataaaaaccgaccacaaaccacaataattttggatttggattacatcggcagctaatagtggaataaaattcataaagaattatcattaataaaggaggagaaaaaaaaaggagttgttagaaaatgattggaggaatgatatgataattagatagttccaaagatttactaaactatgaataataattaacttttgtg

SEQ ID NO: 1574 - DNA, 2659 bp, Cannabis sativa
agttgtcacacactaacccaaccccttcgacgtgagaggagtggcggcaaatgcaattccaaaaattagagacacacagagaaagaccttttcactgtaacaatggaggactccacctccccacctttcaatttggggattttgggtactctctctcaccaccagattcaagagatcatcgatagctacaacggcttctgctctgccaccaacgtgcttctccacggcgccggggatctttctatcggttccgagttcatcgttcacgtccacggcctctgcaagcacggcctcgactctttggttcgggaccactttctccgagttcttgaggtgaccaatttcactcttggaccatcaaagttcctttatgttttccgggaaagcgatgatttttcttttactcttgtttggtttctacctgtttgaaaactagggttaattcgatttagtcttgtttaacaggaaacctttcagaaaaatggtgtcttcaaattttgggggcatttcgattcttgcgccaatgcttctgaactggaaatgaaaaactctcatgtacgttagaatatatcagtaatgagtttcaaaaatctctcatgggtttatttatccatttactaataggtgtttcgtgcaatattttaaagccagaatggggaggatgaaattcaagaagtactttgcaaagctctagaagagataacaacggagaagcaatatcaagagaagtgtttgttaatgctggttcatgctttacagtctttcgaggatcatgtttctggaggaagccacaattcagatgcagagagagtttacctcctttctaagtatcaaatgcttgtgtcttcggttctgatggctacccttcctcgtcattttccaggtatataaaatatgaatatatgtactcaatgacacatttggtgctgatttgatcatttaagttcgcattttgaatttggatgacgaaggttttccatcagatgagacgtgtactttaatttggtgtttatgtgaacgtttattgtttccacctttcaatttctgtccttttgattacacccatcttttctttttcttctcatgccaatcttcttagatatgcttgactggtattttaaggaacgattggaggagctaagtactatcatggctggagatgatagtgaatttcaagatggggatggaattggttcacatgaaaggagcaaagtatcctgtggggctggtcaaatggaaattgatgattcctctggccatggcaggttctcagaaaataataagttggtgaaaaacattgggaaggttgtttgcgatctaagaaatcttgggtttacatctatgacggaagatgcctatgcttctgctatattttttcttctcaaggttaaaatttggacctctattgcactaagcatctttcttatcttattttactttcccactccctttgatatatccagcatcttcttctgtacaagtgtgctaaattcgacctattccatgttctcattataaataaactaatctctgggagtctgggtcatttctaatatgctgtccacatgcaggccaaagtacatgatcttgctggtgatgattacaggagttctgttttggaatccattaaagggtggatacaggttgctttcttgagctctctccacttttccagtttacagattaagaacaattggcaatgctgaagttattgttaattaaactgtttctatttatctatgtagtgtgtaatactggaggtttacttttcaatagtttttcttaacgcagaaagcatttaatttgacaaagaaaacaaatataatttaaaatgaatgaaatgtctagtgcactaaggtaagttcgtgggcattttgtttgaaataccattgaccaattatgaaggctctttatttttttttttgaccaattatgaaggctctttatttattttttgaccaatcatgaaggctctttcatcattagtagttatgtgttctttccttggaatattattggatacgttagtatatatcatattcttcctattttagaccaaattaatttgagatagtgaccaaaatgctgttatcttttctgcaaaacatgaaattacacttcatggtgatattatttcttatcgtctgctatgaccttgatcttgtaacttctccttcatgctaggatctatgtatgagcatacgctaagatatttgcaacatcctttttctatttccttttttgctctcccctgatgtatttattcatgcattgaatatgcattgtgcaggctgtgcctcttcagtttttgcatgcccttcttgcttatcttggtgactccattagttatgacagtgtttcttctggacttaaatcgcctttggcttcacacccttcgtcattctatcctggaattgatacaccttctgaagggcttgtaagatggcaattgcgactagaatattttgcttatgaaacacttcaaaatctaagaatagccaaattatttgaaattattgttgactacccggataggtaaattttacagcttttttaattctttaattatcaaatggatgacggggatgttttactttcttgcttactgtgcaaggtgataaggatttcattgtcatctttctgacatatataaaaatct

SEQ ID NO: 1575 - DNA, 2762 bp, Cannabis sativa
aaaaaaaaaaaaagagataataattatctagttggcatacttaccaacatagcaggagcagaagttccataaattctgacaaacatacgcagaatattgaaattattctctaaaacatcatcctgcatgttgaaacgatccatgtttcaaaatcgaaaagcaaaaaactataatggatagatatgtagtctagtagtcgaaccacctcatagtcaaacctgcaatacaatagtatctaagttagcagtaaatatacctggatccagaccttctaatgattttgcaaaaacaaattagaagtataaacaataaatggccaaagcataaacaataaaaaggaaaagaaaaaggctcacagatcatctgctacttccactaggaactcggagattgaaaggaaatccatatgcacctcattaaccttcatgatagcttcgaagaaaataaaattaaatggaacttgtaggaacaaatttgaaaactttgaaatcaggttcaaaattgttaaaagaaagacaaatgatgtcaataaactgtttagaaatgtcgggaattgctttacatacacaagtttcactcaagcaagttacctgcattcctctcaattggtatagaagaaggttcagcactctatagtcgaaagatttgagatgaatcgcccttatcacatctttaacagatatctgacaagcagcagatacttatcagaaacgaaacggggagaggatgctatgaaaaccaattacataaaattaaaggatgaactgattacggtaacagctaaaacctttgaataagcatacctcctttccgtcaaccaaagcacgacaaagcattctttcaagagtccaatactcttctccatgcttgaattcttcttgtattcttaacaaatcaaacagacaaatacagtaaaatacaccaaagtgatactttaccctcttccccacttgttaatataaaatattgtgaggaaaaaaaaaacctataatacctctcagtcaaaagtccatgacaaccaagtagaacagctagtggtctaaatggatcgtctttaaaaacttttatgaatttggcaatcaaccctgggtctgtttcctataaaaatgcgtaataatatcatcagaaagaaagtgaataaacatatcttcaagttacaagtttctaacctaaagttgttactgtaatcacctcgtatcctttttctgaaaccttcaccccattgtgtggtgaaggcagtatcttctcgttcaaactatccagctgcaaaaacaaatccgaagtccaaaagatatcaagctcaatcatgctttcaagatcaatatggatagcttttcacgatcttacaaatttcagaaaagctgtttagaaaacaaatttgcatgaaaacaaaggtacttaatttaggatttccactcaatgatacaagaatagaatttattatacactgcttcggtttggggttacctgatatatataactttctgtaaaagaaagcacaggtaagtatttgaatagtgcctgcggttcatttacttccatcccatgaaacataaaataagatctgcactgcaaaatccataaatttcaatcaagtctgaattttagaatacatcctttcttcagaagaaacagaactacttacaaaatcttcaagggttgaatttgcccgctgcattgcgtcaagcccaatcacagccatctctccataatcagacttgtctacacagttttgctccaactcctctccaaaaacatgctgttgaaagcctttacaaaatagaagagtgaaagttcagaatgcctccaaaaatgaaatatgtgaatgcagattacagcacatactcatgcctaacctttgggagaaaatataaacagtaaaaatgcacaaccccccaaatttcagataagcctatgatttttgtcttcaaggaaaataaaagcaacaacatatttagcacaaagcaaaatatagcacacacccgtttctagaataaaaatactcagacaagtaacattgagaatacatttccaaattcatgaaacctagataattatgcctactaatgtttaaaggtaaagactttgtattcagcaggacaaaatgaaactggaatataaagcagccaaacataaacacacaaataaaaaaaaataatacaaacaatcacaagcatcatattgcaattagctatacataagcttctaagtagttaacatagcattgggaagaaaaaaaaaagaatgccaacgacaaataatcagaacacctttttcagtgaggcaagttgcggctttctcaagaaacccagaagaaatctacgaaaccaattccaaacaagcgtaactcagttcatttaataaaggctgagtattaaaaagaagaagtaaattcgagaaacaatgcaagaacagcactctacctttggaatgaattcagaaaccaaagcacacttctttcccaagtcaagttctccacaaggttgaatcttcggaccgtttaatgtgttcccaaaatgagaaaagaaaattgaaactcgtgggacgaaaaaagaaatggtagcaagcaatgagatcaaaatcaaataaatgagtagcgattggtgatatttatagaaaggttttaccatgaaaaggatgaagttggagacgaagcgattagattcgtggtcggatgaattggatatgatgccgtgtgactgcattaacgtcatcgtggtctgcaactcttctagcttccttaagctttccatttctctgtt

SEQ ID NO: 1576 - DNA, 1325 bp, Cannabis sativa
gagatactaaccaatggctcagttggaacactgaccacacgaggtgcctccctaatatactcttccatcgtattaagaaaggattgtggaggctggataagcatagacataatgttgagtttccatatttagataattgccaaaaaaattaataataatacaaaacaaattgaaacattagttatagcaatacctctctcaaaacagggaactggaaattcctagcaagctcaagtcctttgcaaacttcataaaaatcagagaggttggaagcctgtagcaaaggtaatagtcatacaactgctattattattcctcttcttttaaataagaaagaatcgaaaagaaaaatgattccaactcacctgctggccagctcgcttatagatatcaagggccttgacagcttcatgtcttggcatctcaaaaaactgcaattggaacaatcacagattactttcagcaaaaataaaagtttgttggaatccaatacccccttctcaattaacaaagtgcattaccttatcaacaagattaattattccatcatttacagcacaataaattttaaagctctctttaagcacctgaaaagttcacaagattaacaaagcgagtgatgaagtcaatacgttttcattgtctgatgctatgagtatcattaaaacacaaccagagaaaagaacaaaaaaattaatcaaaaccgatattatcactacgtgtaagaaaaagtttagatttgtcaatttaaaaactaaagctgtagacccaaaaccaatatcaacatagaaattaaaccaaaaaggagatgcgataaataccagagcaagggcatattgtataacataattgtgaacagctgctccttcaggctgcagagtcataaatgaaacatcagcaaattttgcacaagtaataataaattacaaaccattaaaaaatagataataaatctatacgccaatcaggtataaaatgattatccaagggttccaaatgttttacccggcaaccaataagacgatagagcagctgctgcaacgctggcaattgctccaacagttcttcactgtccaactctctggtcctgccatatccctgctaatgaaatgaaagagaaataagattaaatcctcagttcagttcagttactcagacctattttgaaatataacacacaccaactctagaagtcacgataaattttaaaatgcattgttcatcactgtatctgatacctgcctgacaatgaaaactaaaatagtattgtaaattacaataaaaagcaggctccatataatacaaaactagtagctatcaatcat

SEQ ID NO: 1577 - DNA, 3794 bp, Cannabis sativa
tactccatctaagttcaacacacataataaataccatatgatagtattaatgctcatttctccaaaaaaaaaaaactccaacagtaaaataatttagggaaataagagaaactcctaacaattaagttgagtttactttgaaggaataaaaatatagcaaaggaatagaatagaataaaataaaatttaaaatgtatcaaatattaatataaaatattattattattttattatttcatattagaatggtatgttctcctactttaaaataaaatagtgatattttaatactttaaaatgtaattaaataaaatattaaaataaaaattatttcatttcaatttatgttagattccatttcattatctccaagcaaatgaaaaagactttccacatgctacacaattactcaaataaaacgaggtgcaatactagtgaagtgacccataatgtttttgaattgtagacaaaggtttagttagaagaaataaaaatacaaaattaaaagtgagaatgagactagaaagtattacagtgtttcttatattgcaatgatttttcatttcatctaaaaatgtaataggcattttatcaaaatataatactttaaaatgcaactaaataaaataattaaaaaaaataatgtttctattctatcccattttctttacccctccaactaaacattataaaatctttcacatttaaactatacagtaaaagctgtgtttcctaaggaagagctcagcataggaaagaaagaattgggtgtcacttaaatacttaccgccactcgctgttgattaagaccaccgtttgcgctgactaatatgtagccgttatttttcttaggcctacctgtttcaataagattgactgaattgatgatgataaggtatatccagtaacctcaagagttctcccgttcattcataaatataataattcaaaatcaagaacaaaaaatgatcaaataccaagacttgttgaaacatttttatctgcacaaggtttccatgcagcagcttgctgatatggctcttcccaaagatttgaaggctcttgtttaaattcattctatacaaaaggtttagatttcagttacgtcgaaaatttcttacacataaaatcatatgttaaaagtcatgaaataaacctcgataagaacacttgaagccatgttcaaaagccggtcatacatatggattggagaagtatttttgccttcataggctaccctgttttcttcctatagtagggtacagcagcaaacaatttatgactagttaatcaagtttgaataaaaatatttacttaaacatacagtcctacatctaaacaatagccatgttttgagtaacctgtaccttaagcccacttgattttctttgatcagtagaaattctctgagcattcatggaatcagaaatagataacataacagagtcaagcaagaaaaggaagcacataaacacaaacattaaagctattggtttgagatgctttcgaatccaaatatgccttttccctacaaagtgtcctttgccgtatttgccgaaatcattcttgtatccataaaacttttctggtttcgaactccaatagtagtctactcctgacattcttcttccaagaggggattcattcccagcttctggacgtggacttcttggggatccttgctttcccattataatgatactatatatttaagtatctattcaacaagaataagataaacccatctttcgtttcagattgtcatcaaacttttggcaaaattgaacacagaaactcaacttattttacttctattatgttatatgaatatgaaaatctacccaatagcaaatcccaggtttgatgactcaaaagtgagttgaaaaataaaagaacagtagccttcaaatgtatcaattcaaagttgaaaatggtaggaatgaattagaaatgaagcgaagcagtagttgaaatggaagtgtgaaagtagatgagtgctgcgtaagcgtgacttgtaaactcaacaatacttttcacaaaccaaccttatatatgtagttataagagaaacatcctaccagccaactagaaaaccaatgttttgttttgggtttgctcagtttagtaaaccatttccagttaaatttctgtataattgggtacgaagtctgcgtttctgtaattttataatatagttgatgttggtgggtgatataaactaactaacggaagcttgataaagaaacagttcgacttaaaaaaatactaatactaaatttctctaagcttgatagagaaagagtaattaattatggtccgtggctctaccattacggtatagacaaagcagtgctaccggccaagtcaagttccttgcctacaacaatacgcaacataatactttttttttccttttgaccatggttcacaacaattcacaacgtgggaatattttattaggtcttcttagatgcacccctaaaagagatgtaacaatgccacctttttctatttcagcattcaaaaattcagtctaatttttttttttcatatatagttatttagtacatcgtgcaaaatttagagaaatttaaaatgatttacagtatagaaaacaatgttcaaacagtctatttcgcatgcttataaaataaaagagtcgtgcgtactacaaaccctgttaaatatttttaaatttctcaaacttttgcaggtgtcttaaataattataatatatggccaaaattaaactaaaaaattctcccagatgccaaaattgatagaagtgcattggtatacctctcttagggggtcattgtacaattttcctattttattttagagaatttaaataattttcttaaaaaattaaattgtatataatttggtaacaaatcttaaatttctgtaggttgttaaagttctattatagggttcttaattaagttctaggttatctcttttgagcttatacattaacaaatatcttattattttaattaagttaatcaaatataaagatttaacattttctctttgatagagctttctccctttcctcttcaagaagtctcttttagggtttcttatcctcccttgggccccccagccagatctggacggtagcgctctagagtcttatttctggcgtgtttcgtgttgtggaagaagtcccttcatggtgggtttcgatgttgacgtgttaggtgggtgtcagacgtcgttttttgggaccagttccatggcaccttttattttaggtgactgaccaccgctcttggagactggccctctcaactgaaattattcttgcctccagcttgaggttgttggtggttctatcctattaggcggcgtggtagcaatggtggtgggcttctcttggctctcattatttcatttttgggcttaacggttggttgtggtactcctcaagcgtgtgctttggctaagatgtgttgttttacttcctcttttttcagatctcagtgtgttctcgtgggttagtatttaggcatcttggctcttgtgcatactggcttgaggttagcttttagagtgttgtagatgtagaagggggactcaggtcttagccaaacagaggtgcttcccttgtcctagcaccttcaccatttagaaccacaatgggggattgagtgtggacttttctagtaggaagttggcaacgatgctttgcttttcgcctgcttgttatgggctttcgagagacctcctctatatttcagcggagttctttgaaatttttctattttatttgcttacttattttttgt

SEQ ID NO: 1578 - DNA, 2755 bp, Cannabis sativa
aataataattttgattaaaatagtataaaaaaatttaaccaaaaaaaaaaaagaaagctttccacatttaggtagcgtttagtggaaggaataaaaacataagaatatgaatagaaataaaaataagaataggaatagaataaaattaaaattaaaattaaaatgcatacaaaaattgataaaaaaattattaaattttcttatcatgcatttgaatgttttttcttctatttcaaaatagaatagtcattccagtaaaaatactattctattaaaatgaaattccaatactttaatatgcaactaaacaaaataataaaatgaaaattatttcatttcatttctattttattttattacctccaaccaaacgtcaccttaaagatctctctattcattctctattataaagagtcattatttgtatggttggaggctatggcggacatcaattttctatcatatagagagtattttttgtgtagttggagctagtggtgggatttgaatccttaatatttatcatatatgtaatttaatttaattattgcactaaatttaatattatgtctgtaaatatcatctttattataaatatatatgttataattaattaaaatgtatatatttttttttaaggatcatcttgcttttatgtggatccgttcttcattgaaatttcttatttaaagacttattcattattttagctaaaaaaaatatatttagagagcataattaaaaatgaactaactagatgggatttgatttgttgtgaatctagctatgaaggtgaaaaagggttggtgtcctgcaaggagaaatagcagtgagctcagaaggggttttgttaatgacaagtgtaagctctattaggttgtagcttatagggactcaagaaaaaaacctaaagcaatggatttagtcccacatcgaaaatagagaatgattaatgtaaaaggtgataagataaagatggaaagaatggtaagtagtaagcatgatccttcaggcagaaacgggatgtgatgagtggtctaatcttgctatgtgtgcaagatgagtgtttgccccaagcctgttacgacatgggacactcttttgaaccatctgatccctacttttaattcagttttaattttttaaaacaatgttttgattgaattagttaagaaatagttattaatttttttatatatataatatgaatatttgtttgatctgtttgttgctgtgggtgtggtattactattctgttattttctaattttttttttaaaaatttcgttagtacaaattttgttattttcttaaataagtcacgattttagattattggatctagacagaaatatttaaaattacagttttacaaacattaagtacctgctaaaaataaacattagttttatgccgtttacaaactgctaaaaataaacattgattttatgccgcttacaaacttaaaacattaagtacttatgtcgctatttaccttttatatatagattattatttacacagacaaatagccaaaaaatgaatttttttttttctttttctgtttccactaaccaagaaataaaaatctccttacattggattaaccaataatgttcagaaggtacaatgaattcaattttgttgaaatggtatacctataatgtgtacacaaagcaattcagaatgaataagaagttgaaagtcaccataatagagtctagccatcccaaaatttcagccttttttattcacttcagtgtctcatttcttcgcctttgaaaacctgaggcacctatatttttctccactaacagtgatttcaagagctccatcttgattatcttgattcgatgcagttcccatcaagacgcttttctccttttcgaggttttctttctccatctttagtcttgcttcttgacgcgcaatctctgcctgagacgacaagggaaagggaaaatgttaaactttgaatggtcaaacaaatcatactctcatgtcacacctgcactgatatacaagtaaggtgttgatagatggagaaaaaaagatttttgagtaacaacattcaccagagaacaatcacaaatgatggaatgagtgttccacctatatatgcttcttctgattatcattatcaacacttttcatagagtataagcaaactagaaattagtataaaaatagaactggacaatattatgcatctcaatattgcatttctgaaacacaatttccaatgaacacagtagacaagaaaaataaagcattatgttgaagttttgtcttaaaaaaatcatcgatattaaggctagctcaagcaggaaggtgagagagtagtctaaagttcaagttcaacaaaaaaaatgtcatagaaaagaactatgaaaaaatcgatcagtttccgtgaatgagtagtagaaaaatgagaccatttattgggacacttgatgcatgaaactaaacgcatgatcattgattattaagcttcaatcatttgttgttcaaagaagcacaccataaacctaaatactcaaacacccctttttcaatcagaagaaagagatacgtgcccaacacttctacccaaggaaagaaagacaaattactcactctcttcataagatgtttgcttcatctttaaattagtaagataaacaactaagtcgaactctgattcaaggattctcaaaaataccatacaacttatccaagaaggtaagcacacggtcaatcatgtaatttgcttcca

SEQ ID NO: 1579 - DNA, 3444 bp, Cannabis sativa
atggctttggggtttaagtgtcatgaactccaaaagcagtaagggactcattactatgaattagctgtttgcaaaatttcaactctctcctaagtttctctttatttgtctagttggtgattaccgcagttgtaaaaagattatatatatggagagtggtaaattatttatcatagcgacttcaaaactgccgagacaatttattatttagttctgagacaattcattatatatggagagtggtaaattatttatcataagcttgatttttgtacttaaattattcatctggcatgctacttcttagatttaaggtacaaaagaatggttttctaatataattttgttgtcttcacttaaaatatgctttttatatttaatgtttgattttattatcacccgatttcctgggttctgactaccattagtatttatgataactacctccctctccatgctctatattcaaatttaaaagtttggttgctgtattgcttcctccaatagaacagaagtggcaaagttatgtagggcctttaccttgattacttacatcaacaaaatgagaaacttttcggatatctcagcaatataatggcatttttttttggctgagcaaaaaggataaagttaaaaacatcgattgaagccttgtttgaaacgatacattagatcggatactttaatattttaacagtatgttgatgcaaatagcataaaataattcatataattaccaattcaatccatccaccaagcatgaatattttgttacttaaagaaactttgggatagttgtgtcattggccaatggctagaagaaagaaaacaaaaagtttgttgatgctaaactctttccatcaaccttctatcagacttcaaactgacccccacatcggacacaatcagacctatcaaaacccctccatcgaacccccatcggacccatgtcttctaccttgcaaactttggtatagttgtgtcattttatccattccccataataataatcctttctactttcctgagaatggaaatagaaataaaatttaaaaaatacgtaacaaaaataaattaataaaaacgttattaaattttttcaagcgttagcaataatatttgttttaattttaaaataaaataatcattctactaaaatgataaaaaaaaaacattctaatgaagtgacaatcgaataatttaaaatgcaaccaaacaaaaaaataaaataaaaattatttcctttgtattctattctattacctcccatcaaattcaaatgccacctaaatattgaaattctttccaaataaaagttgaagctctattattaatgtcaatcactcagattcaattgtcaaacatctatccaggacatacatggagaaaagcaagaaaatacactctaaacaatccttcatcaagatctagtggtatttcacagttggatcaaagcgaaggaacactgaattcttcaaaataaagaaagctacaggcatatatcactggaccctgtactgcaccctcaagttttttcacttactacccttgatcacaatgaagtgactctttaagccaatttaaagatcattttccttttcttcttctgtttcttcaggttcaggttcaccagcattcatagcctggtaaaggtactcctgagcctcagatagagcagattcttttgcatcaacagcatagaggatcttctttactgctactgccatctgcacaaaaagaagggcaatgcataaaataaaatgttaaaaaacgagtagaaaagatgaatactacccttccaagaatcttaccgggatatcctccaattctgaaccctgacaaagtatttctatatcccttagttttgcgaagtaaaaatctctttccttctccaaaacgtcgacagagagtttcagatcagtaatctgcacaacaaaagaatgcaaaaagcatctttatcacaatagatatgcaaaactgtcatcactctagactacccaaacatgtaacaataccacacattcaacagattgtagatttagaaacaaaagattacacatcaaaagatgaaacaacacaaatacattgtatgatagtttctctgtttattccactgacagatagaagaatataagcatataatgaagcaaccatccaaataccaagggaaagtaagcatatagcattttcactaataagattcaatgtcttcgtaagactaatatgaatacctcgctggataaagcctcaatttgattggaagaatcagcagcagctgatgctggataggttttcccttgctttggtcctatagcaagaaacatcagaataccatgaaaagggcagaagagtctagaaacaaaaccaggggagagaagaactagaaaagaaaaacatgggtgaaagctgaccagaggttctcaggccagcagcgtcacctgagctggagttatgcatgttattcgtttgcagtgattttgaattcttctgtgaacctttgctattccgttctttcccacccttgactctccgttcaacaggattataattccttcaagcaacgtaaaacaagtgttaaaaaataaataaaataaggaatggttcgggacataaacaacagaacatactcattcataatgccaccatttacagaatcacagtagcgcttaagccattgtaagaactccaagttgtccaaaggcctgcctttaacaagtctgttgacttcaaggtgctgcagcaaaaggatagaacatcgaatggattaatagaattgaatatacaaaagggagggaggggcagaaaaaggaggcagagagtttgctagaaaaactagaaaagattgtttacaacgaattctcgatagatgcctaagtcaataagatcatctaggcttgtttaccaccaagtacaccaatgcagtgttgcctacatcttggtaggcatgaaaccagattggacagaaatagagtttagatcaacaataatatgtttttcaccttataataaatgcatttagctgtatattagtatgaatatattgacctcatacacacccaacggaagcattctttagcaactaaatcttcacaaggggaacacaaaaagagaaaaacagggaccactataattacatgaaacaaaggagttgataaaaataccttttcaattttcagcttattgaatacttcctgcaagaccttatagttttgaatcatatcatattctgtctttgcatcgaaattgacctacaggatagaaaacaagttagcgaatgcaatacatgcggaaaaccattaaaatatgctactaatcaagacagaagcatgttcttaccttgtgcattggaacaactcctggataagtcatgtcaatcatctgacattgcacagcaccagatgcagcctgaccacaatgttaacgacccaatatgaattaatataa

SEQ ID NO: 1580 - DNA, 6633 bp, Cannabis sativa
atagtaaacaattttggttcaaaatctaacaaatggtaaaataataattaaataatgaattagtttgggaaattaaaaataataaatatatgataaaatggttttgattttttatttttttggcagaaatgaagcacaaaaattaataggaatcctgataactattaaataatgaacatgtttatccttaatgtatttaattttctcaggaaacaaacaagatcttgagggaatgatatatctctattatctcataacatgggatggaatagaggaagatcaatccatgcacatatattattagtttaaactaaaagtaataaagatccgaaagccccaaaagtttatatatgaagaaaaactaacttgaaaagctaagcaggtcataccaaaaacaaagctaataggaaagcttgctcaccaaaaattatatacccaaaagggccaaaacaaattaattagacatcaaaattttttatttttttataaaataataattcatatattcgttaaaagaatgaaacaagctcaaccttaaaattatacccaaattaaacaaaaaaatgtgctatttcaaaatactaagagataaacaaaatcgaaaaatactttaacgagccttttaatttaatttttttttcctaagattttttctttttaatttcccgtctactttcgtgctctttctcccaaaaaaaaagaacccctaaagagaaaatcaattctctacccttctagatcataaacacttttttcttactgtttcaaattttttaggctatttttatcaattctatgagcaaaaaatggactgttgaagaagaaagagaaaaaaaaaaagaaaaaaaggagtaattggattaaggtggatgtaatcagtatgacaatagtgtcaaattgttataaaaaaataggctaattagtaatttttccaccgaacttcgacatataccaaattatgtcttttaaacttttttggtcgtttaaattcaaatggcataatttattacatgtcaaaattcagtaaaaaaattgctaattaacctaaaaaaatattatttaataacaaccctggatcaaataaaatagaatctaatagttataaactattaagggtattatatatatatatatatatatttagaaaaaggtaccttaatatataaaataggtataacctaattgtagtgtgtcatcttaaattggttgccctaataatattctggttacatctctatgtgtgtgagtgactgccactctaagtctccaaccatctctcccaccatggtatatatatttgtgatattaatttcttaattaacaaaaatattttaccatttcatttacatcttaaaaattaaaatggcatggagagattccacttcaacggtcacaaaaaaaaaaaaaactatcaaatgcttctataattatgaaatagtccaattaagatcaaacataattatgtggttaagtggtgcaatattcactcttttttctttatctcaaaaatgtgggtcgctttatatatattttttccttttaaatcataggggtcataataatcttgacacaaaatcatgatctaatttcactgtaatttcttgctcttttttctttggtggtaattgatttgaataaaacaaatttgattatacatatgcaatgaacacaattaaacatcaaaaagtagggggaacatggtggttatgggattaaagttcactaattatggcttattccaaggccttaagactttctcttgctacccaacaaagtttctttttttttttttcaaggcttggaaaataagctttttacaacactaataacaaactttgatggctcaatcctaactactacttttcaggcatattcttttcgaagctgtgggtctctataatggatttgttttgttgttcatccatgtgtattaaacatttttctcctcattagcttagatttatatgggtaccacaccaaaaaaaaaaaagagtgcctattgacaattgatcttgaatttacagtacttttaggtctcgtttggtggggtaataggatatactattgtactagacgataaagcctaagagagaataagaaaattactcatatttgccacatatatatggcttttgaaatttctcataattgaggtttatcttgaaagttttagggtgcacccaagaatgatgtatcggtgcccttattgtgtttttgtaaataattttattattttggactttattaaaacaaaattattaaaaatttgagctctgagaattattttgtatcattttaaaaaatacaaggtttaatttataatttaataaaataaaaagtcgaatcagtaacttttataaatataaggtccaaaataatattgaaaaattctataatgcacccctttaaaagggatgcaccgatacatctctatctgttttagtattcgaaataattttttagtcaaatttattctcgtggctatgtaaattatagttatttaagacatctttcaaaattttaagaaatacagaaaagtttaatacgccaaaaattgcattcaaacagtgtgttgtacgtgtgactattttattttatagcgtgtaaaatagattgtttgaacattattttctatattataaattatttcgaatttctcaaaatattataaaatatcttaaatagctataacatacatgaatataaaaaaaaatagactaaatttttttctgagcactaaaataagtaaaaagtatatcagtacattcttttaagaaggtgcattgcagacccaatagtattaactctaattttgatttgtttttatataataaaaaataatatagttatttaagatatcatataaattttaatatgttttattcaattaggatttaaactagtattataaattcattaaaaacaaccaaactagcattataaattattttaaatttccaaaaatttgctatatgtatacaaagtaataactatccgagagtattaaaatattaatacataaagagtttataggaggtgagattttaaatttattatatttcacttaattgactggacaattgcaacaagattcatctttgaaagactttatatagaacaatagaaagaattaaactatcattacactaaattattccattctaaatgaattaaaatgctaattgagttaatatctctaatatgtctttcaatttcataatcaaaatatataagaaaatccaattatatcactctatgtctatccgaccacatggccaaaaagtaaagaaaaattgaatcattgatagcttttactgatcatggattgattacatagcaaaaaatagctgttgaagtgaaaaatttagaagattagaaataatgatggtgcatgaaaagaaagaaaattcaatatttatttcatctatcttttgttgtgtagtgattaagagagtgaaaagtataagccattccatatgatcataatactatgcaccaccaagaatattttctcatattttttttcaagtacttttatcatgatgtctccaacgcatgagcaactcaattattagtaccttcatcatcaagaaactagtctagcaacaaaacaattgtagatgtaactaaattagttcactatatttcttaatttacaaccaacaaaatacagattttctaagttactctaattttatatgatcaaaaaatatggtaccatatataattagagaatattagaggttgcatgtagtgatgtgatgtgatgcagattgtcatgtagtcttaattatcaggatttttttccttcattcttactactctcttaactaattgttcaacgtctgggccaccttcattgttttcaatcaccagtaatgatcactttttctcattataaatacccttttgatcctaatgactttccataagcaaagtaaaaagatacagagagagagagagagagagagagagcaattacagtagtaacagagttccaagtatggcttttggtgttgcactcttctcttcacttctcatattttcagtggttttctcaggggtcaatgcactcgactggaattattatgcgaaaacttgcccaaatgttgattcaattgtcactaacgccgtcaaggctgcagtttccagagacaacactatccctgccacactcctccggatgcatttccatgattgtttcataagggtaatactgcagaggaaattaactgtcaaatgtagtttttacccttcattttgattgatctaaactgagttctctctcccctaattctgacttgttctttttcttatagggttgtgatggttctgtgttgttagactcgaaggggaacaacaaagctgagaaagatgcaacgccaaatctttctctgcatggattttttgtcattgacaatgcaaagaaagcagtggaaaaggcctgccctggtgtggtctcctgtgctgatatattggctatggcagcaagggatgctattgtgttggtaagctaacaaactcagtattattagtatgatatcatgcaactatactttacagtaacggcaaagaagaatggtaagtttaagatcttactcacatcatcatcatctaatctttgcagtctgggggtccaaattggtatgtgccaaaaggaaggaaagatgggagagtatcgagggctagtgataccagcacattgccatctccagccttcaacttagctcaactgcagcagagcttcggtcaaagaggtctttcattggaagatctagcggctctttcaggtaagccaaatccacacagcctagaagttgacaagtttccattagccttctttaatcagcttatctgattctttctttcaactgcaggagcgcatacgctaggattttcccactgtgcctcgttccaaaacagaatccacaacttcagtgccacacacgatgtcgatcctaatttacatccaacttttgcatcaaagttgaagggtaaatgtccacttcataacaaggcgaagaatgccggtgtccccatggatccttcttcaaaaacttttgacaacacctactatcagctgatcttgcagaggaaaaccctcttcgcttcagaccactctttgctcgaacttcctaagactaaagagctggtttacagatttgccagatcaaagcaagccttctggaaggcttttgtgaagtctgttactaagatgagtaacatcagtggtggtggacgggaaattaggaaagattgcagggtagtaaattaagggtcttttgcatggttgtggtaaattactgagatcaggggtaatcataaaatggatctttctataataataataggttatgtgaacaggaataacaccctgttgggcaaagagaatggaagctattttgttagtgataaaagtactgatgatcgatattccaatgtcgggaattaaaaggtttataaaatcagtactgtaaaaagttacacggatgaagaaaattgaagttaatttttttttcccctgttcctatatgttatcagtgaatgatcttaatcttctttccatatctatttccatttcctttttcttatttctttcttcaaacttgcttttccaaataactaaataatgaagagaaaaaggaaaaatctcacttgcaccaagaagaaaatactgacttaaagccctctttcattaaatgagcagaagatgccaatattatttatgtgtgtgatggactaattacatttctatctactattaggagaaccatcaatacaaaatataaatatgaaataaagatcctaaaaactaaaatttaagctcactcacttcagtgtttagaacaatctctgccagttgaaggttgccactaagcccagatgccttttgagatggcatgaatgaaaagctgtctagaagcttgacgcacttcaatccccattttaccatcaagaactcaataagatgatgcccactgcatgtaatttgagaactacttaaacatatatatatatatacatatgaaaaatgtgtgccataggaaaataccttctattatgatatgttgttatgaatactgctccaggagagctttcgagcaagaaagtgacggttgcaaagagatcatcgaaggctaccaccacagattaacacattttacttcacactgaaagaaagattgaggggaagatttaaaattaaattatcctaccaccagtgtcatataatacatcagcaccaagaataattgttggagacaagctgaatatagatgcatcccaaaccccccatgtcaatcccaatatctgcaaaacaaaacaaaaacttctgagaagcatttcaaatcccatgacatacaaaaacatattctaaacttcaaaattgttccactagatgtgtgagctagcaatgttccagaccagtagatgttgcatgaggaagcaatgaggatcaggcaactaaagagtcacaggaagagaaataaaaatgtagaaaaacgtataaaagaagatggtttacattacagttaagctcattcaagtgacacactcttctcatgttgtccagcacctaccatacaaagcaacaaggcaataagagacaagatatcaacaacgttggccatatac

SEQ ID NO: 1581 - DNA, 1942 bp, Cannabis sativa
aaaaaaaaaaaaagaaagccacctcaactcaacatcctcaaaagtcaagacaagactacccgcacatcttgtccaagattattaattattttttctatataattataaattacgtacaaagaaagcttaacaaaaaaaacctctttcattataattgacttaattgatagtactatataataaatcagattcaaagaatcttaaacataaacttcttgaatattcactacctacctatataatataacatgtgtgtacaaacaaaaataattttctttctttacaaggtattattatttgtatgctgccaaattagaacaataagtgcctttgagttgaatttgatttatgccaagtggatttttctatttaattttaaagttaataaaaaattaattttaatggtgaaaaatggccaaaaaaagaatctaaatttgtgtagcctagcctagccatgcataataatggttgtctaaatctaaatgtgacattactgctacacaaaacaaacataaaatatgcatgtattatgcaccacaaatttatttatacacttttctttcgcaacatgacataattgtagctacataaagaaactatatcattttcaaaattaacaaattacaaaaaagaaaaatatatataatatatatttatagaagaaaaatccaaccagaggatagtgacttatcagaggaaattttatttgttatcatgtgagattctcacatcttatttttgttttcaacgagaataaaataatcagatatatagtaatagtaatgcctaattttgcataaccaaaccaacttaaccaagaatttttgctcacgagtcattagtatattttaaagttttgccagcttattaattgtaattgttgaccaacattatagtttacagttgcttttaattatttgattaataatttatacatgtttaaaaattcatacaatgtttctagtgtttgtttttatttttatttttttttgtatcttctatttttgttttagtttttttttttttcctcttgtttttattagtaaattaacaatgaataagaaatattttaaagaaaatccttatcgtcctacatcttctatagctttcaattattcattctttggaaaagagaaaatcaaaatatttaaaaccgatcgatcattgaagattcagagattctaatttcgaacttgatgataaaaattttgagatacacaaagtgtcgaaggtattatttatgttgtttttcagttgttttaagagttttttttctctgatttatatcttttgcgcattttaatttatttgttgttatgtatttcgtattttttgttttttattgtatgcatatttttaatattttttaatagttgttttgttgtaatctagcttgttcttttgagtctttttttttaaaaaaaaaaaaaaaaaaaagtagtgttaccccaaacctattatttactaattttctcatctccatcattttcaaaattttcttcttcttcttaggctttctttttcaatttttttcttcatttgtttgaaagattgatccacttttttcaattgtagttaccattaatttttactcttctcatctccatcatctttaaaattttcttcaacttctttttcagtttttattttttttatttgtgcatgttcagtctcagatatcaatttgagattttgttcatcactctctgattttgctaaattttatatgttttgttgttctatatgtgttattcggtgtttaatattatatacttgatttttacattttttttaacagttgttttttagttgttcaatattgtttttttaatatatttagggtaagagaaaatttttcaaggtgaagattctctttcaaaagaggtttggtattttttatttttttgtgattttattttatagttttactgttattttatat

SEQ ID NO: 1582 - DNA, 949 bp, Cannabis sativa
ttaagaattaaaagatccacaagtttagtaagaattatgtgatatttgacatttgatcgtttgtatttgattttgacatatgctaattgtaggtataaataaactagatttgaataaatatttttgtcatttctttcaatatattaatcacaaaaacaaagtggagatttgagttgccatccttcacaaaaaaactattatgatcaaattataggtcccacttaaaattacattacctttttaacactttctcttccggattagctttacaaatctctaaatccacagaaaattataaaagaaacaataaaaagacccttaaagaacaaaatccaagatttggaattcaactatataaaatatataaaaaaaaaaacttgttttatttttgtatttggtctttttgttaaaaccataaatgaaggttgctgctatatagcttaaaagtgtaagtaaatcaagttcaaatctattatgagaattgcattattatatatgatacatacatattactatgaaataataatataaaaatttattatgtacaaatctattattagagaagataaaaacaaacaatttaggcagagaattacatgctggcaacaacagatggaagctcttcaggttctacatctgacccctctgttgtagatacagactgcaaaacacacatgaataaacaaaaaagccttattatctacaaattccatattaactgatgctaaaccaagtaattactaacactaacctcaacaacctttaatttttgttgtgaaagataactgtccaatgcaccatttccatacaggattttggccccacaaccttggccgccttccaaccccacagcctcttcatcaaccacaactgcatcgattatgtcattgccggttctaacatccggtatctgaaaataaccatggcaaaaacattaatgattgtgatc

SEQ ID NO: 1583 - DNA, 2420 bp, Cannabis sativa
aaaaaaaaatgtaatttttctttaattaggatacatggaagacataaataaaaacatgtaatatgaattatatctaaattatatttttataaattcaaaaagaaatatatgtgacaaaatttgaggaaaattgtaaataaaattttgagtatttattcagcaattaattatgtgatgatttaataattaattctgagtgtgtatcttttgaaactactgttgaaacatgtggtagtagctatagtttctgcaatatatggctataatttttgtttgcattgattattgtgctatatattgatagacctatatatatgtataggaataggagagattctctttattaattatatatattaatagtaggtggattctaattaatggtgtatatttatttagagaaatgctaaagggcaccagtggtgcctagtaccttcctatatgtcaatatcgctattggtacaactaagtatcaggtcttatataatttaatataatagtttttagggagtatcgctggccaatcgcaacgcgatatgtcgcaaagatactaggcaccactggtacctaatagcaatgctcatttattttggctgattatttagtctcagtcaaagaaaaaaatggtgataaattattaaaggaaaaaaataaatgaaaaggaaaatcgatattaaatattgttgatttaagttaccaaaagtgtgaaaagactagggagtttgtataaaccaaattatgtatagggctcatttttagatgacctgtttttttgtcataaatataaactatttatataattaaataaatacatatatttccttgtaaatatatatgtcatattttaagtggtggaactaagaagtgaaaattttaatttatcaaaaaagaaaaggtcactaattagtattaattagtgaaacatagtattacgtttacgtacgtacgtaattatcattaatgatgtaataatttagttaggattaatattttatcaatatgaacttagtactcatagctgatcctctagattttttcttaatgagttgttggctcatttttctgaaaatattctaaataattaacacagattttaattaattttcaaaggaagaaatatattcattttttaattgtgacatatgttttttattctagtatcataaccctgtaattcctaatatgttgttacctgtaatatatataaaagatatttcaacgtgaatatatatagagtatgatatatatatatataattacattagaatacaagaaaaattatatgtatatatatatatacacaccatgttatatactgaatttttaaatattaaaaaggtatttctgaaccgccgtgattgtagatattgtgatatattaggtgagtatggttagaaataatgaaatggaatgaaatattgaaaagaaataatttttatttttggttatattttaaagtattaaaatgttattatgcaatatttttttgtttactttgaaatagaagtaatcagagttctaatacaaaaagagaaatatttcaataatttgttatcaatttttttaatgaattaccatttatttctatttctgttcatatttctatgtttttaatttttccaatcaaacgctgagaaaaatttgattcattcttaatattgtgttttcggatccctagtaaactaattagggtttttgtgtacatgagttacaaaaacatatttaggtcattaaatcactcattattaataatcatgaaaccaataacaatttgttcaaaattggttattactctggttttgattaattaatctcactacatagctaggcaattggaacaatgtatccttgtaatttcttaactatacatatatatatatattataattagttaaattaaagttgatatataatgtatgggacacgattttgtcccgtgatgtactttcatggaatgtattttgtaatgtacgatagtcgttaaatgggggacttatttgatctgaactggggttgatctaagagtaattagggttaaaaaatggtaacgtaccctgagatccatttaatattctctgacacatatctaatatatttatatatattgatgatatatgaaacttgaatgacttggttgaagcatgattcatgaaacttcaatcacaaaaatatgtatggtcccctaccattttttttttcctttttatttttttgttattgacatccactaataaatcatatcaaattatattcttctcatgtcaaaaacaataatttaaaggaaaaaaaatatagcctttattacctatatatatagtattagtagggacacatgattaggcttttaattaacagtgctcaccacttatatttgctaaattgctagctagctaggacccttttataatcaataatttttt

SEQ ID NO: 1584 - DNA, 5122 bp, Cannabis sativa
cagccgctgctcgccggcagtggaaggtcggcgatcttgtgcttgctaaagtcaagggtttccctgcttggccggccacggtatgtgctttaagttaaatagacataatttgattgtttctatatattatgattgattgacctagttgggtgatgaattggggttttagtttctcttttgggttgcttatggtttttgtgctcttagtttctttgtgcccgggggtttgatgtgggttttgttagtagttagttttgtagatctggttgaagcttttctttcttttggggaatatacgaggtttaactatgaattttgagtttttatgctattctctttgtttcgttgaactaccttttgtacgcgatgaacactcaatttgacagcagttgtgcttatcaccttattctggtgacaggtaagtgaaccggagaagtggggctaccctgctgattggaagaaagtactcgtttactttttcggaacccaacagatgtaagtatttgctgcagtaatttcaattttttgtatactttatatgtaacgggttcgcatttttgggttttatgaagtgcatgcttgataagtttcttcttttcttccgagttaggtttaggaatggatgttagatacaaattttatcttgattttatgttagtgttacttcttgatgtagtgtagtttgattaagtgcatagaatgattatctttccttttcttttcttatttgcaagtatttgctggtttatttatatcgttggattgatattcttttgttgtggtatgtacttcattatcagttacagatatttctctgtttccgtatttctttttctatggatttgggacctagttattcaatttatttacattttactttcgctatatgtttttcttgagcaaggctgttcttgaaagtaagtctatggaatttgaatgatgaattaaagttcaatgtataacatttaagggatatctgtccaagtttattgcctttttaacttataagttcagccaggacaataaactcacctgcacagaggtgtggttgattttactgttagcaccagtgaagtaagttatatttgaatcaccattcattttcttgtttttagatgtatattcatttgtgtggatagacatgaaagtattgggtcttggtttcattgtcagattatgtattgatgcattattagatttgaactgctatttattgtggtgttatgatttctgttatttaggagctggccatatgacaattaattaatatttgaaatgtcattgttatatcttctttcatctttttggttaagataagaaataactcatttcaatgtaaagctaggagctaaaatattttgagtctaatcagccctaacactgcaccaacattaaagcagaaaaaattactcttattccctcaataaattattttctagtggtactatgttcaaatccccttcccctatgtcaattgattataccccccgtgtacacaatcaatcaatttattttctttatctttaaagaccatcatttctttccaaccacacaacccacgtaacactgcaccaaaacataaagctacgtgctaaaatatttcgagtctaatcagcccttactctgcatcaacattaaagcagctaatattaccatctttcattccctagtggtgctatgttccaacttcaaatccccttccccattgtaaattgattatagtctgttatacatagtcaagttacttttctttaacttcaaagaccatcctttctttccaaccacacagccgacataacccccaaaactgcactatctcaaaaaatcatttatattttgtgagaattcataatttctaacaaagtcttaaataatgaagttgtacaagcttctttgagtaccccataccaaaccaaataatgccaaaatgttttgtcataaagatatggtaaaatcactatgaatagtatgtgatctgcagacttaaaacttagaacacaccaattcagaaggaaagcttgactcattataaccagaaagtatgaactcccgtgaacctgctagttctatgtatagttcacggtggaggaacttccatgaactttccattggccctagcttgtgaggataggtgaattgataaggacctacactacaatatgcttaataaggacctacactacaatatgctagatttttctccctcccaaagtttttaggatgttgatggaaccataagtgttttattattatattcaagtgactggacataaaatttcattaaaacattatattcaatatcatgtcctttttagcaatccacatacatgatgggggtgggggtcttagtttaaaaaatcacatcatttagtataagttttgaattgttccaaccattaattatacacagaatgcttgtattgaagaactgcacgttctattcttgattagaaaagagtttgattgttatcattgtaaacaacatggctacaaagctgtaaattttgaaatttcccaaccatttcgacaattatatgtagggaacaacaattagcaaacataataaacttattagagcaacaaattctcccactaggaatcatagatttataactccagtgaagttgtccatactgaagttagaggagcgaatattattaaccacttagtattaataacagtgactgaatgtaaatatattaggggagaatgtgctgacttaattgaccaaatttatagttgatagactctctctaggtgatgagttaatactttgtgtttgaactacaattgcaatttacagtacagatttgcatcacaaacagtgtcaaaatgagatttttagttcaacataatagaacaaaaatgtgaagcctagacaactttattttttcttgcataaacattttaaatatatgaaacggtaggcaaacttcagtgtgattgtaggtatttacttagtagtttcatatggagaagctggcctaagttccatcttgttctagggtgaatgagcttatttatttgtgcaagtccaatgaaattcatccaatattgtgtaaaaagcttttaaataacatgtcctagaatgtacagcttacatgcatcataaggtttatctgttatatgctcataatatttctggtgactttctttatcctttactttataagatttacaatacctaatcttaagaagctatttaagtcaatattcttcacatactggatagtgcatggttagtttttgttgctttacctgtgttttttaatttttttgttattggatgatatgatgggcattctcatgattgtattgtataaatatatactcaaaacctcatggtattctaatatgatcagataccaggcatgatagtgcctattcgtagtatggtcagaaaacaaaatctctttaaaacattaaataaccatacaacaatcccataaaactcaccgatatcttttttgtcataataacttctcttattctcaagccacaaagccggccacacaatcatttctgctacctttctaagcaattgcttcattttggatgccacattaaatccattcaagacttttatcttctaaatcaaacatagttaaaacatctacttagtcaagaggtatgcctcatgccacactaaatttgttcaagatttcaaactataaattttctctgaattcatagtgaagaaaagtatgatcagtagactctccatgtgatttacaccgccatttacaaaagtaaaacataggatctactcaaagttctaagatagcgaaatgaatttacaaagtagtctctaaatattcctttgtgtaatatcttatgttaatactgagttgtctttgaaaaattatagatagattttacttcaaactggtgaaaaagttgtaccaaaatggtgttaactcgaacatggtcttaaggggctaattagaatctagtatctatcttaggctactagattttatgtttttttaaaatcagaacttcaatgtgattttcaaaccttgtgctttattatgtcaatttttatgaaataagttcatattttattttatgatgagttttggctgtcttctcctttcatgtatcgttaagttttattataatgtttttatttcgatatctttgcctcaatccaatttgtgattcgattgaggaaaatgcctctatttctgattaggttttttttaaaccttgatttgcacaacacatatcatcctatcctgaggacaaacacttatagggtctgtttttttgctccatgtaatcattgacattaatgtgattcaaagattgcaattaaacaaatatcttaactttatttgggactgagttctttcttaaagtttctctatcacttaattctgaagattcatccatcgtcagctagcaagccttccaaagaatgactttcacgaaaacacttcactactatcccttaatcagactcttctgcaagtattaactccttccaatttctgcaacaacttgattaaagctgttatatctctgtcttcgagatttctagcaaaatgtaaatgccattcctggacctacatgcaggggtttcattttttctccttttataatatgtacatatatatcattgtatatatacctgattaacaaaaacaaatggtagttacttaaaaacgaaaaagaaagtagtagttttagtgatgtagtggcccaactgaatttgggtccatttattaaaaaaaattgacaaaagaaaaaagtccaaaagaaaaaccaaaagacaaatgacacatcaaattacaattatacaattgcaattttttacttatgatctccccatcgtgatatgtcattctttgttttcttttatggagcatttttttggaccctaactttttattggatttgatttgggactcttttgggtttggtagaataaattgtttctttattgatgatatatggtcaaacacttttatatatcaatataaattgttacaaagctatttaaatatcttgaatttttatgttttatgttttcaaaaaaaattatattttgtgcaccctaaagttaaatcctggatccgacccttcctactcactccattttcttcaaaaaaaaaaaaaa

SEQ ID NO: 1585 - DNA, 1771 bp, Cannabis sativa
aaatataatgtcattattacttgttgtaagactttagtgaccaacatttagtatttaatgtcctctttcgattgttgtggaccaactgagctgaccaaaccccatatctaatctagccgttacttcatcattttgcttacgtggtaataaaaattttcaaatcccaaaatcgttacgttacctaaccttgtaaagaaactatttaaaaataaatttgaccgttaacttgaatttcagcaatacacaaacctcgtcctctgtttcgtttctcacctcttattattcaaagcacaaacatttctcgaacgaagaatggctttcgattacgctttcacagacgaggaaatggagatcgacgagaccgtcggttacccaagagcatatgcaaggctctgccgcgatcgtatttctagtccgtacagtcatggacctccatttactttcatgccttactgtctccacgaacacgaggtatggcattgagttctcctcgattttccatttcaatttcaataaatttatttgggttttcgtctaattatgcttcggattcggaaagtgacaatctttcagtaattgatgttttcttcattcaatgtctacaatggaagaagcgtgggttttcttgctaatttattgttcgtataaaaactttacttggattaaagtttcttaacttatgaggagctgttttcatataatttcattgtacttgaattgaatgcataagatggtgtgattgtaattaatgttaatgaatggtttagtttagcttcttttcctgtgctttaatgtttgtttttgccttttttgtgtttttcttaggttttgagagcaatggatctagaacaactcttccctatctttgacccaaaagcaaaacacactggaaaaattaagctttttgttagtctcttgtggaagcagctcagtcatcttgggtaaggcacttgaacatttcttaccgttataatactttattgtgaccaaaacattaatgtttataacttttctttcttcaattcaggaatgctggttttgatccagctgtaattcgagttgacccatatgggaatgtcctatactttcatgctgattctgcttctcctctagcttgggatatagatcactggtttccttgctcaagttagtacactactatttaccatctctctctctctctctctctctctctctctcttcatccatcctcttctcctgctcaaatatatatttatgttgttgtctgtaacaggaggaggattgaccgtaccaagcaatttgaggatattacaatggcaagcttgcaagaagaagcataacaagctggagtttctcattccatggtgggattttcaattgggcatttctgtaaaccagttcttgtcaatatttgcttcttcaaactcagatttcaggtggggtttaaataaagtttctatatttacattacatgcataggaaggaagttcaaagccattgattttctgacaatatctcatttctcttaaatcattttcaggcacagggcattctcctttttgttctctgaaggtgaaagtgaggaattgaactcttcgcagacagttgaatctcattcattcccacagccttttgttgaatcaaaagaaaaacttggtcttgctccagcagccattgttgcatctagaagggaatcctttgcctcctcaacttcaatggctttgcagtccttggattctaataggcttaggccacgttctccagcatttggttagtaatattactaagc

SEQ ID NO: 1586 - DNA, 1432 bp, Cannabis sativa
taggactgggtgggacttgagcacgtagtagactctgcgcttgaacgtctcttctaagcttttccgaagttattaatcactcactcataactcacccaccaccaaaccaaaccaaaccaaacccaattctcacactgcccacctacctcttctctctacccttcattgggattgggttaattgtatctaaattcgacagagtagagtaaaagcttcaccatggccaggaagaagatcagagagtacgactccaagagactcctcaaggagcatctcaagcgccttgccgccatcgaccttcagatctcctctgctcaggtttcaatacccatttctctgttttttctgtttttgtatttagtaattgaaatttgaatccttgttttttgtattgtaatggctgatgagtaatgaatgtagtagaattggttcgaaattgtgattggatgggtattgttttaggtgaatgaagcaacggattttactgagttgacgaatcagcagccatggctttcgtccacaaggttggttgtgaaaccagatatgttgtttgggaagcgtgggaagagtggtttggttgctttgaacttggatcttgctcaggttgctgagtttgttaaagcacgtctgggaaaggaggtgattatttttgcttaatttataaatttgagattcaaatgtgcctgcttttctacattgtttgtaataattgaataaatttcaggttgagatgggtggctgcaaggcaccaataacaacttttattgttgagccatttgttccccacaatcaagagtattacctttcaatagtttctgacagacttggctctaccattagcttttcagaatgtggaggtattgagattgaagagaactgggataaggtatgttagtgtgaaaatgtctctgatgttttcattgtgtggatttttgttcttctttggattaaatcttctcttaccacttatggaaatgaattgactaaattatgccatttttttcaactgttgtgacatacttcaggttaagactatattccttcctactgaaaaatcattgacgctggagtcatgcgctccattgatagctacacttcctttggaggtaggtttgaacgtagcttgggttatagttaggtgataactgtttattttatcttttgatggagatcagagtatgccatcttcataggtcttccagaaatatggaaaaaagtaagttaagttgttgactatggatgctagtttttactgttcggcgtagtctcaactaatttagcctaattgttgacaacccctagctaaagatatagtcaccaccaagcttatccaccgttgacaacccccggctaaagactttgtcaccaaggttatgtactgtttggcattttctcaactccctagctaaaaactgtgtttagcatacgagaa

SEQ ID NO: 1587 - DNA, 4538 bp, Cannabis sativa
ctgcaaaactgtagcttgccagtcgctccattcgatattatcctagaaaacaagcaaagtttgttaggcaacatttaaaaaattaaccttattggaaccaaaaagatcagcatcacaattctcttgatcatatgtcgaaagtagagaacagaatactcaaaacaaaaatattagggccacctgaatcagggttattactggtatgttcaaaaagcttgcacgttaattttgaagtcaacattcaaaattaaaacaaaaaactcaaaaaatattcatcttaatatccctagacatgatctaatcttaaaatatcagtcacagctcacaggacaagataaccacctgaaaaaattcctggatgcggctctggcagttccttaattgaacaagcttattagcaattcttgtaatatgtccaatgtttcctgcccgtggtgcacgttttccaggggctggtattgttggctacaggatcaatgcaagttacacatgatcagaatctgaataaatgaacagccaaatagatactaatatacaacatatttttctttggaatctcaactcatgaaaaagaaattgataatggacgaaaactataataactatgacaatttgtaattcaatgacacaaatgagaaaattatatacaaatataataaagcatatagcaggcaactgaatttatttacctttacaacatcaccagaaagaacaggatgtctatctgattggagaattttcccaatcaaatcacactcccgaagaagatggttaacaatttcatcactcttgctatccaagcaagacaaaatgatactttctacatgatgatgcaattgattattgtaagggtacctgcatgaattgaaaaacacaaacaagttagcgaaacataagttcattacattttaatcaccaaagttgtctctcttacaatgatgatggaagttgtaattactttccaaccatcaatttgagaagcaaggtaatttaggacacaatatgcaatagcatttttaaagcaaaagaaatgcaattactttaacttagtcattcagagctacatatgatgtaacagcttactcgaagaaaagatcaatgactcgtctaatggttcctgagttgactaattccctctctgcagcttcattagcagatctcaatagaacagcaatgaactcaacaatctgaatgatacaaaggaaccagttaagccagcaattagagatccaatagtacattcagatagttatcagactctttatgtagaaagagaaaatatttttaaaaatataaaaataataaaaggagagaagaaaaaagatgacaatgaacagtggtccggccccaatggtatcaaaagaaacgaattgctcttaagcttaaatatacatcattcaaatgctaaacaaactaaccaacctttaaacggtgttttccaagagggggcctcaattctccatatgttgtgggtaaacatttttcatcagatgacacatttaaaagcattagcaagtcacctgcagaacagacatttgtaatttaaaatccaggagggatataattaataaagactcaaggaaagatctcgtaataaacaatacacaattttaaggcctataagcacaaccataatgccagcatttactccaacatctacatgtcacaaagttgtttaaaatattaggaatttacatattgaagcccttcaagttccaaggactgatacgaatatatagcaacaggaactccaaatgagaagctttgactaatagttccttacagaagtacaacactctcagtctcagctaccaatattttttctaaaacatgttttcagaagtaattgtacatcaaataatagtatccctgcacaagactaacatctctataaaacggaagcattgaagttcagaaatgaacaaatgaaaattgtaaccggtacataataagcatcatcagatgaagaacataaaaaaataacactttgcagaaactacagcaatagacaggcaaacactcaccgagttttggaagcatcgcaccgacagtctctggagtaacagggattgaagtatcgtacatatgttggctacgaaaagaatgaaataagggagaagcagccatggatcttttcggatccaacaaagatatacaaacagaaagtgagttcacaaggccagatttcgaatgtgaatcctccaaagcatgagcaaaaattcttgctacgaaactgcaagcaaaattatttataagaaattcaaatcacttcactttattatgaggacatgatgacacaaaataagaaaaccaacacaaaccttggactagaaagtttagtggccaaggcagacggagaatttcgagttatagcacagagagtctcagcagcattagcatgcacttcaggagggcactgattagaaaaggagaatgaaattgttagataaggcttcattgtaagccagaccgattgccaatcagctaaaagtagtcttaccttgaaatggggctagttttttttttaatttatttattcaatcaattcaaaagactaagacacacaagcactgtttccaaatagttgatttaacaaaatatattataataagataagcactacaactagaaagaacaaaaactaaaatttaaggacacaaaagacagccaaatgctgtattcctgggatgctacattcaaaacacaattattcactaaagaaattatgtttcataagctaaaaagtgagaacctttgttcatttatgtgagttctgattacttgtagcgagaatgtgctttctgactttttgtatttgaaaattgctgatttcatttatcaaaaatagaaaataagggcatgttccttaccgaagggctcaatttatccacaatcatttctagcaaattactctcagccaaccattgcattacatcaataaaattgggatatacatgatcatcagcaccaacaagtcgaactaaaacctgtgtaatgaagcatatcacatatcaaactcaagcaaatatattatcctgaaaaaatatcattttgatctcaggaatcactactgcactgcccaaaaaaaaaaagagtttctcacctccatgatggaagtaattcctatcaagtcaactaattgacgaaaaacatcctggtgggcctgaaaagttaaatgtaaaataaaaaagagttcaggaatagatatgaaatcagatagttaattaaatcatacagttctccatataatctacaatttactattaaaccagtttacgccttttatggcatcattaaggtcataagctgatcagctgttgctgcaaccaaagttcaaggagactgactctaatgacaatctgaactgatgatgcttataaaacaatggggtattacttacttgaacataattcatcagtggcacagttttccttatcatgaggcacacaacaacctgaaatgccacataaaacatcatcaagtactagttttcccacaaatgaaagtacaacaaattattctagggaataattttgtaccttgctaaaatacccagcaagcaacgcactgtggtgacgattgggttccaagaaggagaaaagtatattcatcagctggaaacataagaaccacaatcaacacaaagggaaaatgacactattgaaaatcaaacaataagttctgtgcgaaaattcacctcctcttcttcaacaagagtcttcaaaataacatcaatttcacatgtaaaaatctcacatgatatgaatggaaacctaaaagaagccatttttcaataaacaaatcattaaaagtcaataggataaaatcaaatagtgactgtaaaacattaaaaccgcatacttgaaggctcgtttgctttctgcttcttcagaaggttcttcgacaatataacgcaacaattgttccacttgagctctatcccgtagactgaaagcatgaaaaaaaaattaaaaaaagtgaaaatgatctaggttttgtattccagttatttcaagctgatattaattaaatttccccggaattactaaagtctagaacttgcaccaatggcaaatacgcctatgcaaatcgcaaaacataaacatgatagtttttaagcagaagaatcaagggaacatacaaattaatgagacgactgttcaaagctttgcattcttggataatttcctcttcatccaaaagctcctccaaagtgaaattctccttgtctagtatcgactccacctgcagattgcaattacgaaaataggaatcaagaaacgataacaggttaggccaatatcataagcttaatcacttaaagttcaatttaaacaaatgcccattgcataaacatgtacatacatagctaatcaaaaggggaagacacagtaatatgaaaataaaggcagatgtattataaagtctactgcccacccaccattgaagcccctaaaaaggcttaaatccttcttctttttcactcaatatgctcataaatccagccatacaacttaaccacacacaaaatatatata

SEQ ID NO: 1588 - DNA, 3051 bp, Cannabis sativa
ggaatttcaaataatagaactcacataaaggtcttgggaatgttctattggactatcttgaagtcacataaatatttactgttagaaattttatcattaaactttgagggaataggaggattataaccaaatacacaaaatacatatacaacaagattacataggaagaagaaaaccccttaaaggcttgaacaaaatcaagaacctttgttttaaaagtcattttttctcacacatggatacttagggaaactctaaaaatgctcttaaagatttatcaaatctcatatgcttagtgtagtgtctaaagatgaacatatcttcacaaggttataaccacaacaagtgatttcaactatgtatcacaagtgaacaatatgacttttatttgtagagttttcactcttatttaaacatgaatgatcaccataaaacctttggatgttactaatattatattgggcgtttatagacttaaataagtgattttgaagttataggagctattaaaactgagcacaacgttcataaaacgttaaaaaatacatgttgaaaaacatttcaaaatctggtaacaagtaactaattaccaattttttcagcatttaacaaaacaactccaaatggttcaaaacttcacacattggctttatatcatttatacaccctataaatgatagaaataagcccccaacaactatattttcatagttgccatttaatcatattgaaataccattagtaactcaattttatagagatgaattacaaattttatgatcatgaatataaaggattcataaatccttttataccataatttacacatatgtaacttcatatttgtatgttacaatttgacaaacaattgtttaatctaaatattatactatataagataatataacatttacactatcatatattctcagtaagagtatatggatgtataacacaaacatatgacagcctcatacatggcacaaacaaatattgaatctttgaacacttgaggaacaagctctaactttatgctattaaaattttttcttcacataactcatcaatagtggacacggagtccaagagtgatcactcgagcagttgaaaagtttatctaagtaaaaagtttcccaagagcaagaaatggtgtaagggcttacagtctgactttttgaatattgatgatgaccacttcaagatattaatgaagaaggggaatccattggaatttctcatattaaaaaatgtaactatctaaagagttaacacaattgactgacttaactatattaatgctatatgttcatgtatatatcaacattcatacataaatacttcatgattggccataaaaagcatagattgagttcaatgttgcacaagtattaacatgtagtaataactaaatataactcataaaagtgcttgatcatgtgctaatgaatgacatagttctattgttgtttgggaaaagacagccatgaatgacaacaatttcaaagagaagttatagcttacctgcttaagctagctatgattccaaaccaatctgggggagaagttgaaatctttgcatcaaaaggttttcaacaaaatattaaatattcaattcatatataaatgaaaaaggtaaagctctaactgtgagtttaaacataaaaggaacttagacataatcaaaagtaagcaagatatgttaaaacttcagagaagaaattggtgtaggccacagaggatgcacaagagtggagatgcataagcacgatggaaaatatctactgccatctttcttaagcttgcaaactttttccttagtctgttcatcgatattgtatcgataaactctgcgcctgccacgcaacaaaaataccacattttcatcatcaggatgtaagccaatcacacaccattttttactcgaccatttcctctctataacatggtgaaccagataccacataacatcgttctctccatcattgctatcattcctataccttaattcccatattttcataacaaaaccatcaccttcagttttaataagctgtgaaaggtgcagcctccctcggaccagtccaagacgcaccattgtatcacaagagaaatctaggcctaccaagaaatctgagggaaaatcaatgaaacgacagtgtttaggatgatatatatctttaaagggatcaaaggcaacaattctgtatagatatccccattcggaatcctgctctgcccaatgtaggattccattgctaacaaggggagtaatttgagaatttatatgacccccaatttcgagagaaaattgggttaatttagaccattctccagcctcagaacaaaatgtcattgatttgtaaggaatcgtacgaccgaaatcaacatgccatattatcaagaccttgtacctgatttgatcgagttgtgttatgttgttgggatcataatcatcgctcaataccaatccaccatgtgtagagtaacatttgtaggagatgggaggcttgggaagcttaatccactgcttggtgaatggattacagatgatgaaaaatcgagtcttctcgtgacgcccaagcagtaacaaatctccataggctgcataaatttgaatatctgtccatggcagaaaatcaagatagccttcggaggaagacatttgacctctttcatcacacaataactcgcagaagggtgctgtcattgttaaattctccaccctaattagtaacgtaaaggaaaaagattgggataaggagcgaagtcgtactagttgttgttggcggaattcaatggaagtaatgatagataaccagcgcttgcaaacggggccacattggaatagagctcgagaatcatgcagccggagaaatatttccatcaacgaatcgtcggtaagcattgaatccaacaatgaaacttcccgacgaccatggtttcgcttcttctttttcttacggacggggacagagacacacatgggtcgagccaccattgtcgactctggttcttgattggcttctctagcagccattgtcgggttgatgg

SEQ ID NO: 1589 - DNA, 1211 bp, Cannabis sativa
aagagactccacataagagaagttgccctcagtattatggatgtaaaactcataaaatgtctacatggccaagtcacgacactcgaccatgaagtcaacctgactgtgtaaggcagaatccaatgtcttctgcttttccttggaagtagcttctgttgcattcacctcgttcctcagcttggaaacctctgcggtcataacagtcacctcctgattgcaaacaccaagcagctaacccacactgtcatgctggtcctgtagctccctcaccttcttatccgcctcctctaaatttgtatccacctcgtcaagctctttgtccttcgtagcaagttaggcatccttgtcctcaagtcttttacctgaaggctacagttgtgcctctaactcaggcacagacatggccaagttttatgaatctccgagacaaagaaagaactaaggttagtaaaacctgcacaaagtagctgcacaaagtagttgcacaacacatgggtaatattatgcactaggcaagtctaaaagatcttaccaaggcaaaatctctcaaaacattggatgtcaggcagtccaaggaatcaccctccgattcgggaagatggtcaccggcaacaagattacacctgtcaatgtagttgtgggtaacttctttttctttgttcattgtaccagaagaagtttccagaccttgcctttggtagcctttgttgggcgcctttcgaggagaatttgatctcagaaacggataggctgattggccagaggtgagcctgaaagaggtggaggcagaggggtccgagtcacgtttagggtagcctctatcctagcaaccttattttgagcacgcctgccagagcggctgctccatgttcgcttcatcaagtccttgatcctggaagtcatgtctgcaaaagaaaaatagcaaggtcaaaatgcaagtaataaatacaaaatgcaagtgaaggtaaaagaattactaccatcagtatcctcaagataatctaaccaaggagtatcacccgaaggcccttcgtcctcaaacgaagactcactgtccgagccacctcggccaaggaggcctcttcatcatactttctcctctccttctcagctgtaggcctttttcctctactcttctcatttccaacaggagtattacctaggtcctcagggggattggctagaatagcaacaccatcacccaaagggta

SEQ ID NO: 1590 - DNA, 3171 bp, Cannabis sativa
acacactaagctgaaaagattctaactttcactggcagagtatacaaaattttaagctcatttcgattttgtagacaggttatacttaagcaatgtctctaaagtaaaaataccattccctaaaggtgatgatcatgatcaagaattgggtttctaagccatgaaataaaaaacgcaaacttatatcctaacaagaaagattcaatctgccttgttgccatcgatttaagcctatgctcggtattctgcaaagctaaaaaaacatcatcacagaatatagagagtacctaaggttgttattttctttctggttcaatgaaaactcagttatagttcttttaaccagttatagttcaaagcagcaaagactataagaccatttacagctattcgatatccacataaaagaaaacatctcaccacattgaattctaccatcattttcatctaaagcatcaacacaagaacaagcatatgccttaatttcacccttaaataatcaaaacccagaattcaaaatcacccatttactaacttcaaacacaaaacccataagagatgaactcaagattgttttgtagaaatagtctttaccgaaatttgtcttagcaaaataaccacgtttgatcacacaagcgaccaaaactacactttggatcataataccatataatacaatacggtataataggatgaatcaactagaggtttcaataatcaaaatccagaattcaacatcactcatttagattagtaactaataaccataaaagatgaactcaaacaaagtacctgaatttctccattgttgattacatctttgccaagtggttctcctttcaacacaacaaccggaagcttatcaaaatcccatcccaaaaccctgcaaatagccatagccaaagctctatgggaatcacaactctcatttttggaaacagcaatcaaatgctgaacaaaccctaaacaggtcttaaacttcctcccacaattcttcttccctaacccataacaaaccaagcaacaaaactcacccttctcacaattttcttggtaatattttctcaattcacaatcttccaacaaaaccctcaaaaaaaattgatacttttcgtctccatttccaacccaatagtcttcttcttcttccttagaatcattatcgccagacttgtccaagaattccttgaaagcattggccgcatagtgctgaagtttcagggtaaagttcgtacctttatcctctgccgtgtccgaccgggtcgagattccggcaccggagttggttttgggcaaatgggcatccgaatttgaaggtgggttgggctttaagagtttgtttgggggattcggaggttgttgtggaagctttcttttgggtccagaaatgggtttagtaaaaggaggaccttggtgccaaagagagtggaggtagatgacctcgtctctgagtctctgttcttcataaggatccataggaggctttcccggcgccggcgcagttactgttaatcgctctgtaataagtacttctgagaaatgtgatggttttggtttgatttggggtgtagtttgaaattttttgtttttgcaaaatggtccttaaacaaaaataaaatatcaagaggggcttaaggtaaaaaaaaaaatcgactaattaataaaagtgcgtttgttaatatatttttaatcaatttttttttatttttttaatatgaaaagtgaaaatattttcaaaaaatatgttctataaaactgttttcactttttaattttttaattaaaaatcaaaattttgaaaactaaaaaaatttacttttacaatttttttaaataatttttttttttttatttctaattaatattttgaactccaacctcaatctggaccttaggattcagattccagccccgaccccaatcccgtgacaactccgatcttaagtccagacctagactcgacttaaataaaattaaaaaaataaaatataaaaaaaaattatataacacacttttgttttttgtttttaaattaaaacataaaaatggttatagaataaatttttattttttaaaaacacaaattttatttttatttttatgattaaaaaattaaaaaataaaaatgttaccaaatactccataagatttttgtctaactttgacatgtactaaattatatctccaaatttttaattttaagaacttttatctaattttatttagttttactaatgtgatgattgtttatactaaatcgtgctctcccaaatttgatatctatcaaatcatatccacttgaattttgacatgtattaaatcgtatactttaaaatttcatccgcaatctataagtaaattaaacgcacgtcaaaatttgaaaagtaaaaatttaattagtctttttttattaatcaaaattcaatttttttttaataaattaacagagcacttaacaaaaggtcaaaaaatattagataacttagataaaagcacacaatattcctcaaccaacaatttaaaaataggaattgagatttaaataacttgaacacacatgagaatgtagaaaaggagtttatcttgtattttgtgttcataattctttcaaaaatagttttttatataaatttttgatagaattggttaaattttcaactgttaaaaattttgattggttggttaagttgtgtagttaaagtttatatatgttaaatttttttttttttggttggttaaagtttgctaccattaaaaattttgattttaaaattattaactattaaagatttcagttaactgattataatttttggtcaaatttttcaatctataaaatttttgattggttggttaaagttttttaactattaaaatttttgatctgatggttaaagtttttaactataaaaaatcttgatttgctggttaaatttttagattgattagttaaatttttcaaccgttaaaaattttgatcggttgcttaaaattttttaactgctaaaaattttaatcatctcgtgaaattttttagttaaaatttttggtcagttggttataatttttgaccagctaaatttgttttgattagctccaaaaattttgatggactttttgaattttttttacaaaatagtgtcaaaatgtgacatttagcagtctcgtgtt

SEQ ID NO: 1591 - DNA, 2868 bp, Cannabis sativa
cttgggagccagttgaagcaaatagtgggctcgattcatgaatataatcaaactaaaatatttcgaggtgtcatgatattggctacaaattatgatatattaagggttttctcagctctgccttcagatttgaaaaaaagttttatttttcatattgctgatcatggaatatgaagatatttgtactaattattactgtttttacactctgttttgctatcaatttgttttgatttctgttttggttatctgtttgatttattgttcaatgaacatctaattttaataaattgccagttttaggtataagcgggctaggttcgtgtttagggcctacattttttaggagtcaaacatatttatgaaatgtctcatttgatttttgtttaagtaaaattaagtttatcataaacaataaatatttacaacgtggttggttgaggttaggggtgttcataaaatagccgatccaatccaatttgcacgatctaataccattcaatccgtaaagtgtggatatccatggtgcctagtaacgtaatatcgctattggtgcaattcaatatcgagtaccacattttttaattaataaatattatagagtttaattaaccaattataagacgtcatgtcatagaggtgctagacaccttggtgtaggggtgacaattcgtgttcgtgggtggtatttgtgtcatgtcgagacctatgtataacaggtatgtatatgctcgactcgaacacaatctgtttaataattgtgtcagaaaataaaagccaaacacgacccgtttataaaggggtcgacacgacatgtaaaacttaggtacctacggagtgacactaacctggcacataacggagaggtacctacggaagttccaagagtataacagaaggtatttttaccgctaaaaatacgatttaggtatttatctgctactcggtataaaacttaagtatttttgcgacaaattactctaaagattataaaaaatactaattatttaatttatttttttcttccaaaacgttggtttcttattattgctttttgtttcttaagttcttatttatatggaattgatttatttagtacaataaattttattattatttttttaaatgaaaaaggactcaaatacgcccttttgactagtggagaaccattttcatcatttaattaatatatttagcatgaaataaaattagactttatataattgaatgtttaggcattaattagatatatatatatatatatatacatactagcaatggctgcattgggtcaaatctttcatcttttaatttaattatatttcaatcattttttttttatagataagcaatggctgcatttggagtgaatctttcatcttctttggcagaaatgagagtgaagattgagagcctttcagctactatgaatgaattggaaatcattaaagatcttatggaagctatttatgcagaaaaccctaattacaaccatgcagataataataataataataatatcactaatttgcaaggtcaacttgggagggagttgactgagttatatggccatccaattagtagtactaattatgctacaatttttagagcaatctccatcatagctgcaaatcatgattttttgagggttttcttagctatgcctaaagattggaagaaaaagtgcattagtgatattggtcatgacaatggaaaaataatataacaagttgttatatgtatttggttgtgcttgtgacatctatagtatgctataatttagtattgagactattttatttcctatcaatttgaaaaaaaaaagtttaaaattaattaattagtaattagttaggggttctttgtaattttatttcaattgctatcaatttgctttgactcttttattttttagcatagttatgttatgggacatcactatgagataatgttaatgattctatataatttttattaaaataaaataattaggactatatacaattgaactatgataataaaagttaagatggttgttatattaaattagaattctataattcccaatgtgtttaatactagtaccaataataataacatataatatataattttgtatatctaaaaaagaatgctaaagtatttagtatgttatgtattaatattactattggttcaaattaagtatcaggtgtcataatttaatataatatttttaaggagtatcgctaatcaattgtaagacggcatgtctaaaagttttaagacactattatcaaaactttataaagttgtaattaataaaaagagaatgaattgattttttctttcaaaaaaattaataatttaaagttcaatttgctaatttgggaagcaatatacaagcttatatatttgggattttttttaaaaaaatgaaaataataaacaatttgcaaaaatataattcaaaattacaatacaaaaaaacatttgaaattctatatctaaaggcactaatgatgtttagcaccattaataaaagagcagtgttataggtatcattagtgctcaatatcttttataagtggcgtcttacaattagttagtaatattttttaaaagctatttttttaagttatatgagactcaatacttaattataccaaaaactaacacgaaaaaaaatactaattactaataatgtcttttagcacttatcttgtaaattaattatccagcactcaatacttaattaattgcaccctttttagcaacctttcaaattctacagccaaaattacttatctatttgaggtaaaaatataatcacattttacatttatttataattttaatttagaccttgcctcttcattccctttattt

SEQ ID NO: 1592 - DNA, 1169 bp, Cannabis sativa
cgctcttccgatctgactaggaacctcttgaggcatttcttcattttgattttcttcttcggggataggagcctctggttgttgatttcgatgaggaagagaaggcagttgcccatacaaatgtggtggcttaaggttgcgtaacaatacccaataaagctttcgtttaggctgcacttgattgtcgtaaggatactatgcacaccatgggcgagacacagttgagttataactcctgccagcccaattccagcatgtgtagcccctgagaccatgttatcaaagctttgtcgaattatacccctaactggcaaggtaatccccttcataatcgcatacacaaatcagagcgtatccatttgaatgcatgaaaaatgtttactaggcacgagcctagcactaaaaaaaaacatccaagcttaagccacttggtttaactcacagtgatagagtagatggggctcgtcatgcacctcatgaaacctcattcccagaaaaccaactgtttctgccatatccacatagtcatatactttctgtcatcaaacatcttacagtgctcgtcattaaccattcaaaacccaaacagtctatgaatggattcaattgttacacgcacatatgttttatggactttcactttcccgttcctctgctcaggccaatttgccaaaaattcaagagccaaagtttgattgactctctcttggacatctaccaatttctcccactttcgattttgaatttgttgccttatactttcgaatagtggttgatttggtatgggattttcttcatattcaataccttggtccacaatgaaagccttcttttgtaattcaaaatatctctcttgtgccttttgattgacaaatatgtcccttttaaaattggtcctcgaagtcggtgtttgagggtttgatgatgaagcacccgatgtcccggctctagtacgcttggaacccattgagaaattgcgaagttatcttttaaaaattctcgagaaattttgacagcacctccccttaatttcttcacttcccaaaattttaattgttcaccaaaaacacaccataatactccaacaacaataaaaatccaaaatatccaacaaaatttctcaaaagaaatccacaaacccccaaatataattgcaaattattcaaact

SEQ ID NO: 1593 - DNA, 3080 bp, Cannabis sativa
aaagaaaagaactaaattgttggatgtattcctccaaccacagtaaaccaattgaatatagctatattatgaaaagtcaaggagttacattctacatgacagtttattttcgatgactatatatcaagtatacatataatatatatatgtgtacttttgtatgtatatatatatatataaattataatggacacagcaacccatttgtggggaaccccaacagaagaagcggtgggtggtgaaataagggtaggggtccttctgtgttggttgtccagaagcagataaccattggagacaattatgccccaaaacattaataataatttgtaaccaaccatatattataataaccttactaccatatagatatattttcatatctatgtagcccaaaatacaaaaatatgtcaaatcccatttctcaaatttattacaatttatttcttgatcacaggcagtaacacatggtctgcggctttaattaaacttttattaataccattcttactaaacattattctattaaattgtgtcacttcttatttattttcttacaatgattctcaattggaccacacctatttcaagcttatatatattatgattatttatacacactacttgtaaattgaagaaaccaaaaacctgtctaagagatttgagagtatactattgtactttaaaaaatggctgccacaaatgagaagcagaagaaggccggattcatgtccctttataagccggcggcagccaccaccaccgcgacgtatcaatttcatctgccggagccaaagaagggcagtgataagggtggcaattacatctcacgaagctggtttttcatgagaaaaccaagaggaggaggaggagtacgtagtaataaagatgatcaagttgaaaaggccatccaacaaggaggcagtggcggtggcggtggtggcgatggtggttgtggtggtggagaagtggtgccagtggtagctgatcagggaagaaaatcagtgtcacatgttgaaaccaatttgagatcagttgttggatttctacaagtgaaggttttggtgagtgacatgcctagtttcatgcaagtgcatgcctttagatgtgctaggcgtactcatgataccttggaaaagtttagtgcaaaacacatggcttataatatcaaaaaggtacttaattaataattactaattacatttctccccattctctgcaaatataatttctgttaacatatatgttaacagaaagactataattactagcattatgtgcatatatgataatatgaagctgcagaagctggctattgcatattcattcaattattacatattcgtaaagtcaaagactataatgagtcatgaataatatctctagctatatattacagtttttgtgaaaagattgtaagaatgctttttagaagtacgtgtattgaatctggatctctttcattgtatataaatgccatgtgtttttgagtatggggcagctagcttatgatgagaagcttttccattctgaagattttcactgcagagttttgtgttaaaatatataacttggaatttggatctatctatcatcgccttattcatttcatttttctattagattacaaattttgtcaggatcaaatgttacaaacttcttcaaacaacccatgtggctgtaataataaaaaaatacataatattaatttcatctctaatcatctataccaacaactaattatattcaattgactacaaaagtagttacaaaaggcactaaatcatttatttttttataaatataattaccactctggcttttcacacttaattataaatggtccatgtaatgcttagtagagtatacattttgataaatttattgtgattataaatttataaatactatgtcctgataaagttaatgaataaagtttaattatcgaacttatctcataaaaaaaatgtatttacagccatagatataatatagtatattgaacagcagagtaatgtgatttttgatgcaggaatttgacaaagtacatgggccagcgtggcactgcattgtgggctcaagttttgggtcgtttgtgacccatggaactggttgtttcctctacttctcaatagagaaactccacattttattatttaaaactaaaattgagaaagcagcagattaatattattaattatcaaaaaaaaaaaaagcagattaatattattattaattttattttattatatatataaatatagtccaggccagtactattttccctagaattaatgtaaatccattttactctctgtattaagaaccttgcacatggttaatatttatatattctgcacattctctactgtaaattttatttggttcaagtttttgctggaatgattgaccgactaaaaacgagtagattaataatggactatactacaatttcgacttttatcttcccattttttttgaatgaaaagaataaaaacgaagataaaaatgttttatatcatttttagttgagcacttaacctttatttttggttataaagaaaataaataaataaacaaaaagttgtcaaagacatagacctatacatacaaacctatgtcttcagttattatgtttttatctctttggaaaaagatgatcgaataaacttttcattttctctactgtcattctctttctgaaccaaaaatttcactgaactcaaaccactctttgctccataaaccttgattatgcctcatgttttttaaaaatctttaatatttcttagaaatatttactacatactacttttcctccaaaatttacattaacttttcataaccgacacaaccaccatactcagctcgaaccacaatttgctccataaccatggttttgcctcattttgttctaaaattcttttatatttcttaaggatatttactacttatactaactttttttttcaaagattacatttatattttaataaggaaatttttaaatttatactttctttactctttttttttttcatctttactttctttatttattaaattttctattttttctt

SEQ ID NO: 1594 - DNA, 3083 bp, Cannabis sativa
  modified_base (1821)..(1836): a, c, t, g, unknown or other
  modified_base (2365)..(2367): a, c, t, g, unknown or other
gcaacgcacgtgccctacactagttgtagttatatgtgcatagtaacccaaattgtttttatcattaatttacatgttttatttgagaatataaaaaggtatttttccttcaaattttagctgaaaaaaaccagatcttctaaattattaccaatattaaatatcctttttataaactattaccataccaaatcgtgtaatttttatcaaaacaaatacgtttagtcatagtataaatttgggataaaatataatcgtagatatattttaaaatataaaattattgataatttattaaaaatcttatatttcactaatctttaaaattaatatttaaagtgtaaattttttgaatttagctcaagtgctcgtaaaaggttttaaatttgaatcacaaattatgtattataatatataaacatttaaataaaaaaataaagtcagttaagacataaaatcttatgacaaaattaatgtacaaaataaatgagaaaagtatttgatcataaaaaaaaaagtgaagccatgcatgcatcttctagaagatgtgtcttgtctttatgactatgagtaaaaagtccaacgaaatccccatgaaacatgttggagtaatattgatagaattttacaaaaagacttatatattttagagaatatacttatataatatcttatatttttttcaaaaaaaatatatttagtatattgtatttttaataatacttatttgatattttatattttgaaattatacatatttactaccttaaaataaaatttgattaatacaattttattaatttgatcaaacgatttcatttttctacaattaaataattaaatttaaattcataaattaaagacagttaaattatattgatacaattttattaaataaatttaaatttaaagtattaaatatgtatgattttaaaatacaagatgtcaaataaacattattaaaaatacagtgtactaaatttgtatttatataaaacataaagtaccaaatatatagacaccctataaggattaatatcattttggactctgtattttgtaaaaattattgattactctctattttgttaaatgataaaataaattatgtattttctaaaatagtataaataagacttgaaatagtccaatttgtcatttattaaaatagagggttcaatcaataatttttgcgaaacatggaatttaaaatggtatttacccgtattaatttaaaaaaaaaaaaagaatattttcatttttaatgtttgtttttggtaaagtttacaaaaatataattttcctttaaagaaaatatatcattttgagaaagctaaatatatatatatatatatatttatatataaataatcagtttagattaggtaaccaattacctcttttgggtaattagttatttatattttttttttttttcatatttttaattaaatttttacataaaataactttttttttttttgaagaaaaataatatttttacacaaattacataaaagctcataaactatataattttaactttaaaaaatatataaaatatgtgactcaattagggtttctttaacaattgcaatagaagacccaatcaaggcttaattcaaactaaatctttgtttgggtttttttatttttctactttaaaatattattttttttttttgcatttttacggaattctacgcaaaaacccatatagcaactagcagagcaatctaaatcgcaaccaaaattcgtatagcaactcacatagaaactattggagaaaccaccaaaacaatccaaaccgtaaatttaaannnnnnnnnnnnnnnntaatatataaagtaattttcctatctgtttttatttgtttagtttggcaccattgctccttgtaatttgtacaacctcacaagcaatctttgctagccacccttttaaacttgtccttataaattaatcaaaatatgatagtattttctcattttttccatcacaatatgcaagagcttgtttggtatggtgataaaatgggaagaaaagaaaagtggagaagataaaaatgagtgtgcttagaatgagagaaaaatatgtagaaaaaaaaaatagatagaaaagataggaatgacacctaccaaaatttatctataaaaaaatggagagaaaatgaaagaagacaaatatagttttattttcacttcataaggttataattacaccaaattttaataatttttattttatttaaaatgtatctttaatttttactattttttttctgatattctcaaaaaatatatttataaaataaaaataaaatatactttaaatattaagataaaaaaaaaattaaaataaaaannnatatgaaattttattaaaaaaatatatgtatatgattataaaaaaaatgtgataataaaataaaactaaatattgatattaaaaaatatgatgtgaaaaaaaaatctaaaaaatatcaaaattaatttaagttaattattttttagaagtttgttcatttatacatctcaaagtatttttttatacgataaaatttgtaaaaattataaatatacacagtaaatatcctaagcgcaactcacacaacagtccaactcaattcgcaatttacatcgcaacctacgcaacaacccaactcaattcacaattcacattgcaacccacacaacaacccaaatcgtaacgcaagttcaaaaaaaaaaatgtaaaattaaaaaagaaaaaagtgtaacttaaagtacatggggtaattactaggggtgtacatcggtcggtttgatcggtttacgttatattttatttaactcaatgtaaagatcgggttacaaaaatttaagtgtaacccgtccaattaagaaaaaaaagtttcacccgcccaataaattcggtttagtcgagttaatccgtccaaaccgagcactaatattttcttattttcatattcaatttttatattttaattattgtgataatgagataaatataaggattgaatttcaagttcaaatcacctgtcataaaaaaaaaatagtagtttgaacttttttttttttttt

SEQ ID NO: 1595 - DNA, 3664 bp, Cannabis sativa
gtttcattttcttttgacacttccaacttccaagataatattgcttaaatattaacatgcattttgtgattatgtccttagaaatataagatagaaaacataattcaaaacacatatagattaaggtggtaatgctgctaatatgatattttttttttttgaaagggaatgctcatatgattactcattacttttttattttatatatcatggccataaaaaggacttgtcctaactttgtctggtagagagagagagagagagagagagagagagaatggtacctgtattggagtccaaccacaggggtctggatagagatctgagccattccaccagttacccacaaagccttgaataacagaatacaaagcttcttgttctgttttctccattggagctattaccatttctccttctccatagcaccgagcattcaaacaaagtataaagatgacaataattttggttgtagtaaaacacttcatgaggatacaaagtaaaaaaaatgtaaaatgatattaagagatggattagataaagaaagggagtagatatacagagaaagctcccttgagctaacttgtaataatatatagtttcacaaaatttcgggatgaaattagtagctagcttgggttacaaaactagaaaaacaatgaaacagacaagcaatagaggaaaaacatactaggatgctattttgatgagaagtactgaaacgggttcttttataggaaagttaatatattgttttaggacccagataaagcttgagagctaagagccaaaaaagtgtttaataaaacaagtacacttatataatagggtagaaatgagaagagaaaagcttaaagtaggaggaaattatcaaaaccaaaggtatatattgcatttctcgtgtttatggaattgaaaaagtagggaagtatgtatatatatatataacagaagttacaatggagagaacaaacaacacaatatccaagcgcagttttcaaagctgttttgagcaataacaataatgaacgacagcaatatcttattttcatatatatatatataaaatatatatgtaatgtgagatgagtagtaactgaaagggttttgatgatgaaagcgataggaaaggttattaacctttttatacagttcgatacaattagagaaccacatgtcatttcagaattacattgctctgttatcatcatcaattaatgtaaattggttttgttgttttaaattataataataatttatgcatctttgaaaaaaagaaaaaaaaaagaaaactaaatatgcttttggcattaagtttgaataaatgagctgacaaataatgtgtttaaaaaggtttatttatttattttgtcacagttttaagagatttaagtagataagatgtgtatgtaataataatgtggggtagggtatagggtagggaatagggattatgataagttggggtgtgtagggcataggacttaggatgagtcaggtttttggagggactagtatatactatacagtttcattcagctaagagctaaagcaggggaccatttcaccgtatggtaattctcaatcattatttattggccatgcaatgcaataatgcaaatcaaagagatatatacttatgcatgtaaaatcgtaaattaattcatgcagtgcacagtgcaggaggacaggacaaaacttatttgggttttcttttctattcactttaatctctctttgctgttttcttcttcttctgtacgtaggtgctttggtttcttgccttttattaattgtctctcgtgaaaacaaattggacgaaacaaggaaggacgaagctaattttgtgtatttattatgacatatgtatatagtatatatacgtatcgaagagcacacgaggatgcctttccaattaatgatataactacaaacttcttttatattttttttttatttaaggacttatatattaaacaatatataatttaggactcgaacttcctcctcctaatagtcaagtgccacaaatttcttttaaagttattgacatttttcttttatttatattattttggataaatacaagttttcttctaaaaaaattgaacttgtttacttttgtcccttcttttatttgattaagataaatttatgtgattgttataattgagtatcttttgtcttttttttttcttggtaaatcggaatgttgttattaatcactttcaaaaacactatataataccatgtatgttccttacaaagatttgtgtaaagcttccagccactctctatcctttttactcatttattttctatagattcatataatccaacctacacaaacaaaatgcataatcttcctttcaaagtgagtgatcccatttatcaaagaattaatgccaatcaaaaaaacctttctttttccttttgaagcttacaaattttggatccacttcatcacttgttgcagctcgattttctggtgcttaatccctgtccattcacacactttctgcagcaatcaaaaaacaggtggcaatggctttcaaacctgtctccacaaaccaggcagtccatggagttaattaagaactccacaatgatacaacttgtctctagtagaaagtctatgattcagcactaaccaacttatgactgtgttaagggacataaaacctatcctaaatatcagcaaatatccaaatttttgaagtaccttgcttcaatttaaagcaaagatcagcaatagttaaattatacgggtggaattcaatctaaaacgaggcaagtatcaacttctctttaatttgaaccactttattccaatatcagctatcatatgtgagaactttgtagtcccatcagtcttggtcctggtcctaattgagatatactatattaacccatttaaagcatagcttatctttcattttttgtagtgatagcccaaacatgttccccaattgcactaagaatccaaagcacaatatccttgaacccttaactaccatccttccaagtatccccataagaaacattaccaaggccattggataagttagttccttttcacagataagctcggcacacctgaataattttttgaatcacaacttttggcacaataataatttgggaccaataaaagtttattgataacaacactgaattgataagaacaatttttcctgcataagaaagttgtctagagttccaagtaggaatccagcttgtcatcttttcaactaaattcttacaattatttattttgagaatctatttgtaaaaaatttaatcccaaggaactttaaagggaggtttctctttaaaaaaccaggcatatatactattccatcgagagaaaaggaatccatacctgctccatacacagctgacttcccaaggttagctttaagaccaacagaatataaatgaaaaaaaaaacattaagcttcttagtagaagagtagttgacttaaaatctcctttgccaaaaagaagcaagttattagcaaaacataatgtgtgagactcaagctttggcatctcaagtgaaacttgaaatcagaaagctttttaattcttgccataatcttggataaatattccataacaatgacaaacataagggagacattggatcaccttatcaaaggtc

SEQ ID NO: 1596 - DNA, 2298 bp, Cannabis sativa
gccgtaaaaaaaaatatgaataaaagacaatggcttcttcccaccttccagccacaaaggggtagcctttagggtggccttggggtggctgtccctgcaagcctgtaatgattgatgtcatcttccgtacaatcgctgtgtcttcactgtaactctcatagcatcttccccatcgagggtctctgcatacctgtcataataatattcgcaagagagaggaggcccattaaaaatagccacgaggatagtcatctgatactcaattctcatcagtcattatcatctaaaaaactcatcattcttttacactgaactatcaatttgagaaataaaaagaaacaagagataagaaatgtacaagtttgccatcatagcagaaaataagtaaaaccacattgtacttccgtgattcgtatattgaaataagagtatagcggcactacctagttttataatattaaactccatacttaattgtactaatagtcatataatatcttaggtggctctaagtattagtggtgtcttttagtatttcttttgaaaaaattattgaaaacagaaccaaccatgcatccgatactgtacttgtcaaaaacaaaagttttctcagaggcaaatttccttaaaatttgcttctttaaagtaaatcttgctcctactctaacgaaataagttggataacagtgattagtatctctgtaatgaaaacttacagccacacaaggagcaaaagtatagtggatgccacttgctctgacttccagtgctgttgcggtaccaatctttagtgccaattctgcatccctatccccaatttaaacataagacacaaaaaaatctgacaaaagttcacactcttcattctacagtattttgttttaaatgtgtgtataagataaagttagtttgcctacttatttttagtattaacacaagttttttttttttttttacaaattcaattgagtggagtagtgtgtaatttcaatgtcaacgtctagtaaaatgcacatataaaagacagggaacttatgtacccacttagtagtgccactgttattcttttttcatatatataaaagacaggcaagatgtgacaaaatggtaaaatttgacttttccaatttggttctcttcttcagtgagagaaacatgtttcatttcctgtaatttagtacccgaaacttgtatgatggttttctatactaatccaactatttatagtacaaaaaaaactattcatacttttctttaatatcatttagtagcccgaggaatttgctttagagaatctctccataatcttctctatgagggagctcaacatactaatcaataataaatagacatagagccaacaaattaaaatcaaaagagactaaaatggagtgttaaaccaacctggtagctccaagaccaacattatgaggaaacactgtggcgccataaacgttattgttaccatgaaccgcatctgacccatatacgatcggcaccccaagctcagaatccagtgccaacttctggaacccatcaatcatatcggcccagtccgacgataatgccttttcaaaaggcgcactgccaccggaattaagtacactccctgcaaatatagaatataattattattattatgtacaagtatatttaattgatcaagaaagaacttcaataatcaaacaaagcaagatacaaaacaaaggcacaacgcctcaatataatataaaaattaggtacatatatttttttgtaatcataatttaactaaattttaaaaacgaggagatgaaaatcatttaccaatggcgtaatctctaatggcctctggagtgacaaccttacgctcgatctgggtcatctggccgattttctgatccagagtcattctggataaaaggtctctgactcgagcttcaatgggtgcgctcggattcttgtataagcagctcaattcctccattttcgctaatgtttccgaaggagagagtggattcctacaggtaagttgtaactatagtccctgtagtactacgatacctgtagactatttctgttgactttagatttattatcttaatctaagataaactccttgtaacaatggtcattgggtacttctaaactactcccaaaatagttgatatcgtattcgtacacccctcatcgatttttgtcgattattacctcttcataattgtgcatggatatagtcatttaataccacttgcaatttctttttttaaaaaaattaattgtatattaaaaatataatatattattatttaaaattta

SEQ ID NO: 1597 - DNA, 1568 bp, Cannabis sativa
gcctattgtattgtaactttccagttaattaatataatagcattttatcaaaaaaaaaaaaagaagtgtatacaactttctctgattttctcctttgtttttctctaatatgttgctgtctttatactccttggaagattttctgagcgtaagtgaaattgtgttagagggaagtgtgagagaggaagagaggttttgatgaagtgggtgtggagttgtttgaactcaaatggtgaattaaagatttgaagaagatgaagatgttgttcagtgggtaaatgaaggtggtcgttttgatggtgaacagaagaagatgatgataatcacctatatttcaatcacatatacttcaccacatgctacttgtttatacgttgtagaacacttccacttattgggtttttttgagatcctatgtcagaaaattccaatatatatctcattcctttaaattgatacttgataatctaaattgttaattaatcattttgtaatttctaatactaattattaaaaaaaacaagaatttggtgagtcacatggtaaacactagtatccaaaagtatccaagatactaactggtagtgaacttgttttttagcctgctaaccactttaccattattattaataattgaactttcaagcctaagcccaactccaaattatataattatatatatatatataaatatataaccattcaatattgaatcttccttgcaatttctctgtaggttgttacccttttaaccttctgtcttgaaagttgcattacataatatttagatatagaatctagaatttataataataataatattaatgaataattattgaggaaggtgatttgggcagccatcaatggtatggaccctcttttgtctcccctttcacctttacctaattaatcaattaaaaattataatagtcttactctttcttctttccatatcatataaatatagttaaatatatgtatacatacatcaaatcacaacaaaaactctcctcacttatatttcttccttattttatttttctgcagtatactatgtaacatgtttgaagaattaagatattgtaaattatagcattttttttttccttttattataagaaaaaggaaaaataatcaatggctggaatgcttcctggtgttgaatgtgccaggagaagaagatttcatcaaagtggagggagctgtgattccatgggtgcaccctcatcatcttgtggaaggactaggagatcttccttttgtttgtatacaagcaaccatgaaactcatacaacctcagcttcaatattggtaattttcttcttcaccatacaactaatatggttttttttttctttaattttgatattttgctaaaaatctttgttttggggtggtatttttgaaaacaaaaaataaaataatggaaaagaagaaaagaacaatgttttcaaatcagttttaccaagatgatgagaagttaggagtagtagccagagaagccaaagaaagattggatgaaaggttgagaacacaaagaaaatctgaaccaaaaaggtaaattatat

SEQ ID NO: 1598 - DNA, 1386 bp, Cannabis sativa
tttattataatttagtgcatttttgaagcagagagttttgagtggcattgagctgaaacttgtatcaatttcccctttgttattcctacactccttatttgaactgaaatttctgttcttgttcattctgtagtttttcacactactttactctgtgttctatatagtaatctgggaagaattacatttgactggattacttatctcctaacaaagttgcaattattgcattctaaaagttttgacttttgagtggtcccttatatcatgatatcgaaactgggatttgtattacttttctataaatacgtacacttatttttgctcttatagtgtgtagggttggtaaggtatggcatgtaatcttgaagaatatgatgatgtttccatatggccgcctcaagttgaaagatatttcatcgccttgttgcttaaggaatctaagaaaagtttacatacttccaccctagatagaaaaacgtggaaagccatagacaatgatttgttctcgaatttcggaaggagatatgaccttgccaagttgaaatcaaagttcaatcgattgagaaagatgcatcgtgagttctcaagtatcttgtcccaaactggtgctgaatatgatcctgaaactaatcttattcgtgctgatgatgatttttgggatgcctacttgaaagtaatgctaatgtgcctcagctactttttgtcatttgtttttatagtctgtttatctggaaattattgattgtatcggttttaatttgcagagacaccctggtgcaaagcggtatcaaaggaaaggatgtgctcattacaagttgcttgatcaaatcttcaagactctatccacaacaaaccgacctccaccctatgcagcaacccattccccatcaaaatctgaggatgagcagcgggtagaagaacctgaaactgtagcagatgattttgagccaactgccaacgttgctgataccaatgagtctgggacttctgctactgttgcacgttgtcaagctattcatcctcttgaaaatgttcggccaacaaaacaatataggacctcagagcagttaggggcagataacacacacgggggatggaccaacaatgtgaattctaaaatcgaagtaactttggggccatttgaccgagttcataggagtagtgagatgtcatcagattatgatccttactctgtaactgagtgcatggatgtattggaatccattccaaatgtggcaaatgcttcttacttgaaggcaatggatagatttttgattcccgagtggagacaaatgttcatcaagatgtcagagggaagacgatgtatgtggttggagagtttgaaaagctaatcagtactcttacctaggagactaatgagat

SEQ ID NO: 1599 - DNA, 2503 bp, Cannabis sativa
tcaatagaaaatttggtatttttcttagatcgctgacatttcctcttttttaattatttgtttatattagtgaaaatattaaaaaaaaaatagaaaaatgaaaataaaataataaataaagtcaggccactgagtttacgatgagagagccaaaaaaaaaaaaaccaaaaccaccaaaaacccagcgaagccaaaccaagcacagactcaacactaaacacaactcctccactccatatatatatatatagtcttactactactgctactctctctttctccgtcgaaactcaatccctagatcgccaaccatggctgcatcaaagagagctcgggaccgccatgttatggactccgtctacccagtcattgaactcctcttccttctcatcgcttgttctgagctctgcgatgccgctacagtcgtcgatgtttaccgtctaattcaatacgatatctctggtgtcccctttggatctcgactcgctggactcaaccaccacgctgcttctatgcatttccctccctcctccgatctctcccgtactgttctcatcatccctctccgtgaactcaacatctcattcgttaaaggtaacgataattgtctcattttgtctaactcataggggtactgcggtgtttgaatgtttgacctgatctgaattttgattgattggaattgatagtccaagatattgggattcttgcgattttattgtggtgagagggaaaaaaaaagtcttttactttaaagctgatgattggcgttagtgaggtatataaataaaaaaaaataaaaaattgagctttgtgtttgtgcgaagagatcatcatggattgaatcgaatatgtttagtgccatgggatctagctagttgagtacgtgactgtaacttagtattgattctatattctgattgggttttggtatttttgataaaccctgatcgagattatgatttttgtttctgtttttggccactgttgcagaatacatttctcaaagacaacctcttggggggttgttgtttctacttccccagatgtttaattatgagaataaaggtggcggcggcggcgtggacagtaatcatcttgaacatgggagtgaggagctcaggaatgtactcaacgaacttgaacggttactcatacactcaaatataccagtgagtaatttcctttaaagttgatgatctcttactggcttatgatgacactgtagtctttattttgtcacttgtaaagtaaattggtgatggcctgagctatatgtttggattagaatttatttctagctaaatcctttttgtagtgttttaacccatcttagatgaataattattctcacattccacgagtacttttttccaatactgcatgctaatataccactctttagtaatatttttacagtagaatccatttatttaaatctgtggaatccttcttaagcttgccagacagcagaatgccttttcctgtagtttgtaggaaacagtaaagtctgtatatatttgaccgagcttgttgagtccatataaacacaccctcacagatagtttaagcctcaaatcttatattaaaaatctttttcttcttaaattgtaaacttaaatacttgtaataataataaaaaaaaaaccttcaattaaatgtttgaactagcagtatcaagtattttcatgtagtatattctaattttatgaataaagtactattccaggcactattttaggcccaatatttaggaaagttactttttttgcaccaaacttatgttatagctagtttgttgggcacaacacttcaaaggggcctgaaacaagaataataagtgaggcattagcctcatcgtaatgttgagtcaccccttttctaggatccttctctttcttaatacgtaagccttaaggtgttctttgaacgcctcattctgagtctagctttaaaaaaatctttttaaacattacacactagacattggatactgttgatcttgtgacaactttgaagtaaattctcttatatttaattgatttgatgtcatagtaacattagtttttgaactgctcttaccctatacatcttgctttgctattattttatagtttagtctgataggtagtcatgtgacactacactagagctggatgtgtttacgaatgtactttaaaatcccttgtgtctaacacttcttttatgtatcagtatcctgtgtattttacttttgaggatagtgacactgaagctgttttggctgatattaagaggaatgatgccactggtcagcctgccactgcaactactggcgggtaaatgtctaactttgttgccattaaattatgactttttctttggagattcaatctagagtgctctttaatgtacatagattttgtgacatttttgtcactgacttgttcttctatgtattatataacattgaaaactttgcaatgtatgactgtaaactagatgcttgcgtaatctttgacta

SEQ ID NO: 1600 - DNA, 1711 bp, Cannabis sativa
aaaaatttattttaaaaaaaaaagtaaaattttttatatattttcatatgtattggccctgatttgtgagctggctccaccattaccagtaatgtatagttttataatatcagtaatgttatagttttagaattaatacatctaattaaggagagttaagatgattagattacttatccaataattaaagactactatagagacagttgactgaataaataatagtataggtagtaaaaataaaataatgttgttataattatgagggttatttactttgctacctgtaaagaataataagtaattaatgtaaaagatatccgtacataacttagagtgtggctaacttcatatataggtagccacaccagaaatattggagctggagctataataattaagctctcaacaaatgctaaaagagtattatttggtctctagtattttcgtacgtgtcaatattattattgatacaattaaatattatatttttcataatttaatataataatttttaaaaaatatcaataatcaatcacacgacaacacctttaaaaaatagtagagactactagtacataataccaatactcctcaataatacttagctatatgtttttctcgctttaaatcggtccccgtatagaccgtacctgtatgatgtatctaatcatacataattatatttattttcaaaaattgaaaagttaggtcagtgtcatgtatgtgtgacaatgcagagtcatttggaattataaaaaaatattgaatattttataaaatgcttttataatacatttttttaaaagggatccttcgatgaataataatgggcacaaatttttttttgtgtgctatatatatttaaagtaaaatataagtattattaagtttctttttataaaattttacaaaaatattattttttacaatgcaaaaaaatatactatgtaaaaattttgggtcttgagtttaggtgggccctaaccacgagcctagcgcctcttaccagtttcggtatctgagaaattttttttagtttaatttttttatggtcgtctatgttgtagctatttaaaaatcttgaaaaattttgagagattcagaaacatttaacatttcaaaaatatggttcaaacaatttattgcacgcaaaactcttttattttatatgagtgtgaaataaattatttgaaccctattttctacgtggtttctcaaaattttgcagacatcataaataactaaaacatagataactataaaaaaaaaaaaattaaattaatttttttttccaaatgccaaaaaaaaaaaaaatagaaatacatcaatgacaaatgcccaaaaaactagaaatacatcaatgaaccctgttagtaagtgcattgttaaaatattttcagttctatattacattcttataacattggaatctactaatagtttatgatatagaattattatataaatattcaagactttaaaacgttgttaatatggacttcgaattttaacgacgaaattttaatgttacattgttttaatatatatttttcttgtatatatttgtattttttttggatttcatgaaattatattatatttattttaattttcctgaaaataaaattacgaatttattgtacttttcggatttcattatttttagtaggggatttgattttctttctttttcaaatccaagatctaa

SEQ ID NO: 1601 - DNA, 4049 bp, Cannabis sativa
  modified_base (2086)..(2087): a, c, t, g, unknown or other
cacctctggcttcccactaaaaagagtcccaactctcagtctcgaattcaacatcgcaagtaagtgttgctagtgatttggcccccttttttattgtcttctcattttacaaattaatcttatttttcattccttttagattctctccctcgatcaacattaactctggagctagaagtaaggcaagccttctatgattcattattagaagaaaagttacaagttggagagcttgtgatcattaaaaatgtttagggggccaacctgatagcttctcactagagaattgaaaatttgacagtgaaagatctaattagtaatcttttccatggtgaccctagcattgtgaaggaagccattgttgttatcacttttgaagaggccttaaagatcattaagtttgatgagaaatggttggcgaattggcactgtcagtactcggagaagttaagctgaagagctcactattcgtttcaaggatgctatcttgaacaagggtactcctagaccgagtacttctgggagtggtaagacaccattcccgtgtagttagggctttgtcttttgcaaactttgatcgttttagctaaggcaagtttgattcttactttttgctcttagatcaccgtatatatcccatcaataattatctagatatggtagatgacatcattaggagcccaaatcacttaatctcaccaacacatgaggtctgggtggataatcttagaaaaatgttgtatcctgggttcttccaatatggaagcctcttaggcagagaagatatgacccaattcgccagtaggaaccccaattatgctaagataaatggtttgaaccttacttgtgtgctgattttacccaatttgttataatgcttccatccttgttgtttgaatttgttactttgtccttttcctttgcagatcaaccacctaagcttcaaatgggtttggtgaataaatttcttagcaccatccattaaggatcagacgaggtgaaagacctagccaaaggtggtcatgataagggaaaagttgtgcaaccatctgatgctggagcaaagaaaccagcacttccagcgaaactcttggaacctgttgaaagggctctagatgctggagctgagaaaccagcacttccaatagaactcttggaagttgtacaagaggctacagcttcaaatgttgttgcatgtcctccatccacttttgttgcaatggattctacttctcgaggaaaagaggatgaaattcccattgccatagttcttccacaacaaaatcctattgtgattgatggtgatggggaagattacagagatggtgatggggaagatgatgtagaagatgatggaaagttcaatgaaccactccctaccatcttcatcaaacctagagtaggctcagacatagctctgtttgcagcaaacttgttggacctaaatgctgttacatgtagcatcttatgttctaataagcttgtcataatggagagtatggatccactctttgtggctgatagtcttaagactcaagtgcctgcagttagttcattgattctttattgaattacatctcttattacatttttgaaatatacctaatctcatttatcttatttttcaagcaagtttgacagctttgagatgctcttccctggttaacaatctcgcttatgaggttgaaaccttgaaggctgaatgcgaccaagctgttcaacaaagggaagaagctatcaaagctttaaacgatattacaatagccacattgcatttgcttttactatttttaatgaagtggctattgtataaaaaaatgtaacatatttgtttgtaggtacagtcttaatatgaaataacaaggaaaaaagaggtgcttccttttatataagaaatagggtaaataccattttggactctgttttttgcaaaagttaccaattaaacactctgttttgttaaatgacaaaatgtatcctatatttttcaaaattgtacaaatacctgaactgatttttggtgaaaataaaatttaataataatccgatctaaaggtgttataacaaaactgtttacattttctgnntctgttcgtgttagaaattttcttcaagttggctatattaaaaaaaaatagttatcaaaaattaagctcagggtgctatttaacaaaatagagagtttaattaataacttttgtaaaacacagagtccaaaatagtatttagctgaaaaagaacatatttttaaggtgaaaaagaaataataaattattgtaatattttcattgtttttttctataaatatggaattttgattctattgaattgaatcaatttcaatctttttcctcggaagtcaaagcaaaattaaatatattttccagcactatatacatcatatgtacttaaaaatagagtccctagaaattaaagtggatatgaggatagtaaggaattataacctgagcatctgcccagatgaaactagcatattctgaacgtgagaaaaggctaaggcagtagtccttttagaattgcctttgagcttgctctatacctatgtcatgagatgattaagtaacaagctaagaaatgagcagtgtatataagcacaaacatactgatgctgttatatgacatacctcatcatccactcgcacattgtagatctgaattgtggaatcatccattccaatagcaataatattgttatcttgaggatgtaaagcaagaaatgttgcaacacagggtggaggcatgaaagttgtcattgtctttacttaccaacaagaagttaatattcgtcggatgcaaatcaagataaacaccgagcaatattggggtcaaacgttaccttaaatgtcatcatattggaaagggatatcttcccagcagatgttgacattacataagaatcattcttggacaaagcaaagtaatgaacagcctcttcaggattagtgtcagcgacatcattggtcattaaaataccatttgttgcttgccacagttgaggtgatacattggttgtcgcctgaaataataaaagcaaataaaaacaaaaacagtaaggtaatggaattcttcaaaatgccaaaaaaaactctctaaacccgtaaatcttataaagtaaaatccacaaagatcaattactgagaactacatttataaagtaaaataccttacatataatcactatggatgaaatagtagttgttgtactgaagctcattacggtcatgacagccagctcatacagttgaccccagtttctataaaatttatgaacgcatctataaatcatgtgaaacaattttttttttttggtcttcctagatggaatccatgcacaaatgagaaaataagattttgctagactcatgcatcttaatgcatctcataaataatatgattttttttttgtggttatcgaagaagcaaatctccttcccactcaatctgaataaaataagaaattcttattatggtttaccaatatttcaaaggattagagaattagagaatcagagtgacaataaatcctcaagctcctgaggaacatgttttttttcttggtaaaaagtagtacattgggataaataataggtatattgaatgtcatttgttaataatttctatctaatctcaaagctccatactgtcctctatgattgtgtaacgatagtgaaatcaaacaaatactatgcattaagtaatgatccttttagctacgcattataagaaattagtattatttgtataaacaagtataaaaaacaaccaacaaatactatgatttgaaaaaaaaaaaaattgaaacaaatactgaagaacatgaaactttaaatgggtctttaatgacacaaggtgtatctcctcactcaccatcctaacacttccattttggtttccaataggatcaagtggtatctcctcactcaccattatgcatcacataaatccacaaagatcaattttttcacaattttttaatccaattctcgtttctaatattttcttttcccgtatctattctatataaagtg

SEQ ID NO: 1602 - DNA, 2132 bp, Cannabis sativa
ctctctctctctctctcatataatcaaaaatatggagtttcaacctaatacttctcttcatctaagcctaccttacaatcttaacaacaacaataacaacaataattataacaatataaataataatgatcactatgatcatcatcaagttaacctaaatcttgttcttgatcactcatcatcatcttcttcctcctcttcactaagtccttcagatcctccaaaggtgttctcatgcaactattgccagagaaaattttacagttcccaagccctaggtggtcaccaaaacgctcacaagctagagagaactttggctaagaaaagccgagagctaacatcggctttaactagggctcatcacaacggttcttcctctgcaggcttcaaccatggacccgctcggtcaagtagcactagaagtggctcagctcagcctaggcaaagtctccacccaccgcaccatgggaactggcccgtacttgatcaccaacaccatggattttactcgggtcaatatggtaattgtgaccatcatgatcatgacatgattagttctaattggtcttcaagacctaatcatcatctacatcatcatcatcatgttcaggaagagattgctcagcttgatttgtctttgaggctttaaaataataataataaaaaaaaggttttattatgattgagtaacataatttgtttagtgtttttttaatgctattttcaattttcttatttgactcttttttttttcttcatattatatattctgaaaatattatctctgagtattttgtatggattaatggtaactttgatgaggaagatgtagttaccgaattattaattaaacatctacattaattattattgttattacttcctatcttgatcatcaattaaggcattaaacaaaattaaagctaccaaaaactaatataattaggtaaaatcattaatttgttctcactatcttaaattattccaattatgtttcattgtgaaaaaaaaaatcttaattatcatttcagtttgaatagttaaaagaaaatcagttctaaataaatggttcatcattttacctttacaattaattatagtagatatatattaattattaatttgtgtatgtgtatgtgtgtaatagtgaagatgagtatgggttgggtataaacaggcagagacgttggtgtaagtaagtggcttttttgaatatatatgtgagctgacaagatgagaaagaagtatgggaattatatgtgtagactgtaccaacgtttactatatcacaaaagtgtttcacatgtcaccaacactacatctacatctacatacatgcatgcactactactactcatcatatctatccatatatattagcagtcttgttccacattctaaagcaatataggaaaaatgtgtaagtgttttagtatatcctttatttgtttcggtattcaagagagtttttaaatctaacagtgttcattatcgtacatgttgttgtagttattttagatgatcagctgtaaattttttaaaaaaattctaaattatttacagtgttaaaaacaaaattcaaacaattgtcattatttattaaaaactttgacaaatttgattatacattaccgtcacttcaaatgtgtcgtaaatgcaatggagttttgagagttacctgccttagtaacactttttgatctcggacacaaaaatcatttcgtggcactttgaaaatgaagcaaaatatcttcttcttcttcttcttttttgatgaattatcagctgatgattgtattgcagttcaatatctttacacttcaagcacccatatcattatagatattttggccccgattggctaaattttttattagctaaaagtataagtataaactttatcttatttttaccatttggataattaattattacatgaagattttttttttttggttgacaaaaagtacttttcaaagtgtttgggtatcatcaaaaaaatcttttgtgagtaaattaagaattatatagattattttaatttttaaaatagcttctcaaaagtcctttttggagaagctacaaatcctgacttcttccaataggactcttaaattaaaaaaaaaaaaaaa

SEQ ID NO: 1603 - DNA, 1834 bp, Cannabis sativa
gttaatcagtctctcaacaacttttttcaaatgttgtggtggatattatatacttaaagagcttaatagttttgcttataattaatttcaaaggattgctaagtctgcaactaattatcttgttttcctttctagatatctctttggatgacagacagtaggttcttaaaaatatcaccaagtgatgcagcggttagagaattgatccacaaagttcatggacttgatcgtgccgaaaactacttcaacaacatgtcacgaaagttaaaaacgcaccatgtatatgctgctcttctaaggagctatgttagagagaattctgttgacaaagcagaaaccattatggaggaaattagaaatttaggtgaggcagtgtcatctttaccttacaatgtattgatcaacctctatgctaagaatggaagctttgataagattgacatgttgatgaaagagatggaagttaagggtatacctcatgacaagtatactttgagaaaccgaatgtctgcctatgttgcagcatctgatgttgctgggatgaaaaagatcatgaataggatggaggaagagcccaacctttatgttaactggaaagtgtacgcattggcagccagtggatatctgaaggttggcttgactaaggaggctttgaaaatgctagggaaactcgaacaggacattgataaaatgaatcctaaaagtcagaaaacaggacatatgtttcttctcactctctattctaatactggtaatggagaggagctttacagaatttggaacaagtacaaaccaaattatgggccaactgaggctccatatgcctgcatgataagatgtctttcgaagttggatgatattgagggtgctgagaagatttttaaggaatgggaatcacagtgctcaatttatgacttcagggtggttaatagtattcttattgcttattgcaggaagggtcttttggaagaggcagaatcattattaaacaaagctgctgtggaaggaagaattccatacgctggctcatggagtatcttggcgaatgggtttgtggagaaaaatcaaatgtctagagcagttgaaatgttgaagaagtcactagtgatcggtcgaaaaggatggatgtcaaatcctgttactttggctgcttgtctagattacttgaaggatcaaggagatgttgaaggaatggaagaaatcataagattactaaggactagtgaggtttttagtgtggatacttttgagagattgttgagcacttgtgatgcagctggagaatcattttcaggggttctttgtccaaacgtaagtgggtctaatcatggtgcaaaaaggaaccaaatcaacacggatgattttagtattgatgatgaaacaaatgagattcttggaacaaggtaatgttaccggagatgatgcagtggaactgcccagtgatttaatcgaggtcctccaattattcttttgttctgttagtcacactttgacattatgtttgcatgtatcaatgtctgagcgctcattcccggcttctacgtttgagaataaccatgagaaattatactaaatggccaaaaacatggtataatggagctaaatgtcctcatcttaaaattagtggggaaatgaacctttgatattattgattacctaaattatcttttgctacacacaattttcatatttcccatattctttttgactagtttatatttttttgacctggcaaacacaattatataatacatataatatattttagatttagaagcatatcacccaagtacatctatgttagtttaaaagttttgttaaaattatttttatt

SEQ ID NO: 1604 - DNA, 2348 bp, Cannabis sativa
gcgataactagaataaaaacgacaccgcagactataacgataattagtcgattgttctttttgggagatgagtcaatatttgctgaatttttaggtttcgaatcaggattgggaccggcaagattattgttcaggctcattttgaagatctccactccattcaagattgcgtcgacgtaagtagatttccaatctttttcatttccttgcagggcaatagagaggttcattctcttctcttcattgttgttaaacattgggactaggtattccctaacatatggaatgtatttaccaccagcccataaaataacatccgctgcatcctctgctgtttgattggctatgtatatataaaacaaccgatcaccagtcttgttcatttcaaatacaatctcgcaaaagtgcaaccttaccctgtagttaaattgagaatccacggggtattcccatgtgagcttgaagcgcttcatcatttctctatcttcaatacctaatgttctggcagttcggtagagatcagttggtgctgtgtaattggggagcttatttgagaattctatagtagcggaagtgttgatgggcataagactatgtcccggatttgttaggtacggaccgtcaagatcccaattcctgaaaaatcccgtgtcacgattgggtgtaataggtataccgccaccaatattcattcgatacacagtctccatagcggtgtcgtttttgaactgcgtgacggccctattaagattcaagttaagtagaccatgttcagggtacgcgttattatatagatctgccggcaacggtaccacttcgattccattgattagagcaaaggcacctgaaattaaattactaggagtgaactttatgctcatcgaattcgaactctccacgtttacgtagtattctttcacaacgactttttctccaaaaaactcagcattgagagaaacactgaagttgcttaggagagtgtatttatcgactttaactgagaaaaaagcttttgaaatactgaagttttggtatgtatccgagtaaaagtgcaaccgaacgaactttggccctgcggttaccggtatggtgtaagtgaattctgagaacgagagacgtgctgtttgataaggtactggatctattccgtcgtcgagtgaggcaactgggttgtggaattcgccattacccccaatacttaaggaaaacagtttagagttaatatctccctgccaattccgatcgtcacgtgcggttttggtagtcgcttcagagccacagtctattgctgtccctttttcatggatgtaagctaaacatagctgtttaccagcaaatccaacagtgaatatgagaaagatgaggaaagaatgaaatgggattggaatcatatttgagtgtaggagcttacgacaattaatatatttgaggtcactcatttcgtgttttaaaaataaaaagaggggctaataatatacgataagggagaacactttcaatgaagattcaaaccagcctatttccctggcgatttaaactttataatattaaataaatcaaataataatagtcaataccaaataataataaattttttataaatttatcaatttttcaagtatctttttttaaatatgtgaaatattttcaatttataatatcttttcaacctttgaggatatatgatgatgattttttttcataataataatttattttaggctaattagcaagttttaatttattttaggctaattataactaattagcaatttttttcataatatatgtgaaatatttgtttttattctttatgttacacaaacggttatattttaattataaccggattgagttatttattttcattcattatattatagaattggatctatttttatttatatttgagacatatacttctggtgactttttgtgtaacttttttcgatgacggtgacttttccggtaacttttctaacgacactaacttttcccattagcttttccgtcgtcaacgactttccgataaaacttattattatttacaaataaaggatttctatcttttttcacaaaaaaaatagtataaaaaaactcatataaatgtaagaaaaaaaaatacataacccttagcattatttatttatgccatacaaaaataaactcttataattttctcatatatagtgtaatttattaattaattaaaaacaacaataaaacttgacttaatatacagtataaaaatacaatatttttttaaaaaaattccgtccatgtaaaaaagaaaaagtatataataaaaaaagcataaaattaataaaatgtgaggtaacattttgatg

SEQ ID NO: 1605 - DNA, 1462 bp, Cannabis sativa
ttgagtgtaatcctctttgtcaaatatattttgaaaattcatgatgattgttcaaacacatacatagtacataatattcattaaggataggaaaataaattgttcccccaaaatcaaaaacatttaaagaaactatagctatattatattttgacccaaaaaaaaaaaactaacttctcaattggtttacagtgtggcatctgaaatggcttggatttccttcttgcttctcaccacacagtgactcttactgttgaaatcgagtttatccaaatcctctacgattcccaggtagccatacaaaacactttccaacttttctgattctgtcaattctcgagtatctcggtgagtgttattatggtcagttgagttggtttgttgtagctcgagtctcccatgtttgttctctgcataatgcttgtgaagcctttctgcttcttgcaaacccgagagtgtagcgttgaatatcgctactaaaatactctgattcgcagcctttccccgaaacaccttagtcttctccccattaaatcccatatctgtaattataatataaacaataattttaacagtaaaagcataaacaatgtttatggatgcttaccatttgaaagaatgaatcactatttaaggagacttacctcgaagaatagcttcatacatttgaatgctaacaatcacccgttcatctagattgcgattagctatggagatattttgaatgattacaacaggaggccagataattaagtcctctctcaaagcagtggcttcggcacgaggcaaaatctgcagaacccaaggagtattaggggctgttgcactgttccaacccaatagtacacaaagcgctttgtgaaaccccaaatgctctgctctaagctcccttttgtgtgatgttaaagcatgttttaccagctccaatggacataaaaactctttggagctgcagtgtttagtcgagaaaccaagagtaaccattaaccagaaaatcaacaacttgtctaggaagaggtaatattgttcttcaatgtttcaagtaccaaacaagttttcggttttgttaaagaaaatcccaataatataactactgttattaccacacaaaaatctaactaaacatttttacagaataagatatgatgaaagatagcttattactagcttagctgaaggtatgcactaagttaagtatcgaaaaatgttgactgttcaagaacctgtgaaacagaaaaacaccaactgatttggtttgatcagtttactcggtggatcgattctcttgaacagactaagccaatattgtattagagtttaaacaatgaagaacatgagtcatgctgcatgaaactaatattagagcttgtctttgtcttctttcttggtcaacaagaaagaagagaaaacaatctgtagtgagaaagatttacaacattgatgatgtcctgattctttccct

SEQ ID NO: 1606 - DNA, 4735 bp, Cannabis sativa
tatttgttgtacgtatgttattaattacttaggcatgagattgttggagtagtaacagaggtgggaagcaaagtggaaaagttcaaaattggtgacaaagttggggtgggatgcttggtgggatcttgtcgttcatgcgaggattgcaccaacgacctagagaactactgcgccaagatggtactcacctatggtggcgccaagtacttcgacggaaccaccacttatggcggctactgcgatctcatggtggccgatgagcatttcatcgttctggttcctaacaacattgcccttgatgccgctgctcctctcctctgtgctgggattacagtttatagccctttgaaatattatggtcttgataaaccaggtgtccatgttggcatagttggtctaggtggcctaggacacgtggcagtcaagtttgccaaggctatgggagctaaggttactgtgattagtacctctcctaacaagaaggatgaagctatacaacgtcttggtgctgattcttttttggtcagcagtgaccaagctcagatcaaggtgcgtatctttctatttcttcaaattatatagctgttgtgtttaagaaaaaaaatgtttgggatgagaattaatgttatttctatgttgagagtgcttgttgtggttgtcgtcttgtacagaaaaggacttaaaccattttaattagagcgttttttatgattttaacaaatgagtttgaattgattaaagttatggtggtttgttaatttaaaagttctagtcaatatgaagtgttcttttcacttgttattctttttctccagttaaaatgatgaagtgttcttataatgtttaatagcgacaaaaaaaaatgtatagattttttgttttatgtcacagaaaatgttgaaaattctaaaaaccaagcattatgagaaaatccctaccctccctttatttcttatcatatttaaaggtgagtggcagaatttttctttccggcaaaaaatagaataaaataataaattatcatgttagaaattatccctaacaacaatgtaatagtgggcagaatggaatatgttcattgaaatggataagaatgtatggatttgttagaggtaaacctaatcctaatgtgtgcagtgtgcttgtctactatctaattaaataaagattactctggttgcgactgtgagcttttttttttcctttccattatttgttgctttaactttttgtgggtgaaggctgctacgagcaccatggatggcatcattgacactgtttctgccttccaccctctgctgcctttgatcggtcttttaaaaactcatggaaagctggttatggttggtgctcctgacaaagcactcgagttgccaattttaccattgatattcggtaagtacatgtacattatatcccattaaagagtaatgctgtcccttgctgccatgtggctcgggattgggattcaaaagagatgcaaatcccattatactaattggtcaacaacagtgtttaagtgccaaactaactctttggctgtacaattataggaagaaaggctgtggttggaagttgcgtaggaggaatgaaggaaacacaagagatgattgattttgcagccaagcacaacataacaccagacattgaggttgttcccatgaattatgttaacactgctctacagcgtcttgctaaaggagatgttagatatcgctttgttattgatataggaaacacattgaactctaccatgtaagaccaagacaccatgttatctaaaaaagactaagagaccatgcaatttccttcgttcttttttcccctttattgtaacttcatacaataataatcagttgattggtcctgaaaaatccactttctgagatgtttgaattagtatctttaatcatcttacatgacttgtcaagcaattaagttcacatagaaatagacccttttaaaacaactatgttatgattcttatgaatatgtaaacgtgtatgatgtgcttgttttcttttgttaattttcgttcaccaaaaatagtcctaaaattttgaaagcatttatgaaagcaagaaaaagaaattaaagaacaatgcagcacttggggatatgttgaggtataaattgattactatcaataagtttaagctagaacctagaaatcaagactccccgtcttagaggacccagaacaactaccagatgagccatatgaagtcccactcgaaccatcaattggggcttgattaagacattccaagaccaaaaatcttcgcttctgtaactttattgacagtgtggttgcctcaagaatcactggaacctgctcacaaaatcgagtaaatggacaacaaatcagcccgatagctacagtgaaatgatacgtgtccatttgaccagattaatctaccatgttgataagcgtttgtaacaagaatatttgaagtgagatattaacaacaaactcaatgactttaaggtaaaagggttcttcttgtcaatccgaaaagtgaactaaatcaagaaggttgagcaccaaatagtacagaaaaccaagtgaacggattggtgctttactacgtgtatgcatgaacacatcatcaagtgcactagaagcactgaatataaaagaaaggctcaaagtgtgactaaaaagacatcaattatgatgaagcaaattttactgtacctgtgtattaaaacgagcaactttgtgcacattaagcaggccaaccatgtcttggtaaccggtgagaagttttgccaattccttgtcttcatctgaatcagttattcatctaagagttactattttagagctattaagagggcaaagcagatgtaaaagctgattatagacctggaattgctttgacagatagcaaggtgtctgacatgtgctgcaaccgtttggacgtagatggtgaaagaagagtcgatgggaaggtcacaacagccactgcatttgaagaccgcaccatcccttttaaagatctaataaaggaaagcatatcccattcctgaatgccaacagtacgaaaaataaggtaccctaaacaagaattgtatttgaataacagtgaaagaagaatatatatttgatttcagaaagaacatctataacttacaataactcaataaaatttaaggctaagcaaaaaactactgaatcgacaaccaaagagagtactgtaattgccactaaccatggtggaagataaacactgtggagcacaaaatgactgaactgcaatgcgaccagcaacagaaacattgccatcatttctagaatggagcaaaccaaacggaaaatgttaatgttccaaactaaattaaggatactacagtaacactcacattatgcctacatgaattgtttttcattcagctcaaaataatatggctcacacactcttcctgggcacaatactaaaagctaataagaaacagagaataatattaaaagagcatacacaccagcaatcttgatttctaaagtaacattaaatatttgaagaaagtttagaagtaggcagtctcctggataacctattggaagctacatagtacaccatcaaagaattgttacacacacacaaaagtggccttaagtttcactaagcctgcatcttcagcaagagcacacaacacattttccctataatacaaataaaaggctagttcaacaatctcacaatgcagctcaaataaaaataacttcgaaaaccagacttgggtactaccagataactttgattttctgccagaagaacataaatgaccaaccttgaaagttgagataagaatgcagcacagcgatcttgaagcgcaactagattcggagcatcttgggtgctgacacaatctatctgctttccacttaaaaattgtctctccatgggtttccgtaagtcaaattcattgcaaaactcttgtttactatctaaaaacaatccaaaacatcatcatattgcacaaaatgatgcctcattgttgaactatctattcagctcaagtcacagttctcattagacaaatagattttgaagaccaatgagacaagataatttaactaaaatcatacttacccctattactatctaagttatgctgattttcatcaaaatactttttgtactgccaagctatcctcagtcctttctcctgaagtttttccaagagaactagtgagcaattagttttcacaccaaataccaaccaaataaaattgaataagaaaaggaaagaaccttaacctgttcagactcacgcttactagacttgctgtctttggaagaaccagggctaggtaaagtacccagaaatcctctagggtctttagaaggactagcatagagaagaggttggttgtggacaaggccttgagacatgaaatttctcaacaaaagcatatgatgtggtgcttctgcatcttccatcaccataactaggcttcctaaaggaaacccaccacctaaaatctctgtacatttcgaaaaaaaaaaatgaagtacaaaacaaataaatcataagatttaacagacaagaagaaactttaatgcttaaattggacattatgcaatcaatagaatattactatcaaggtctggtattccggacgagatgaaggttgtgccattaggaccatgtttaagaccaggagtttgagaagatgaagcggctgaaaaattgcgagagaagctgcttgtccgggtcttgcaagcag

SEQ ID NO: 1607 - DNA, 2518 bp, Cannabis sativa
  modified_base (559)..(582): a, c, t, g, unknown or other
gaaacttcaatttccaaaataataaagacaattgttttgaattagtatatttatgaaacgcgttattgattatgtaacatcatgatctagcctgttgtaattaaattctacatctaaaaggtataaatttgttctgtaaaagaaagtacaaatttgatctcacgatcaattgcaacatttatttatctattgaggtttctaatgctacacaaaatctgtgtcgtataattagtaaactcgagtctaattggtcatactttaagaaaatgatcagataatatccatgcacatgtgttgttaaagagttttacattgataatgcattgaaattaaataacatatataagatatatgagctacttatcttattgtcaattaattttgagataaaacttcatgcatcttaccgtacactcacctattctactaatttaaccatacacttacgcattctaacaaaaacggacaatcacctatagacctacacatactaacattttaaaaagaaaaaaaaattacatgaaaaataaaattaagagtaaattattattattattannnnnnnnnnnnnnnnnnnnnnnnttattattattattattatcacataaaaagtacctaagatccataatgcattaaaagatcaagttcaaaataattttctgataatattcagaagaaaaaaaatctaaacaacagaaataaagaagcaaaaaagtaagttaaaagaagacagtgaagatcaaaaacaagtcaatttggcagaaatagtaaatagaaataaccattttttttaataaaacgaccaaatatttcattgatgagaaaagtcaaaagtatattagtcatatcaatgcaaggaaggaaattatgcgaattaagtaaataaaaataaccattaattttgaaagaaaaaaaaatagacatagtgtgaaactattttacaatatcattgacgacacgatatcacttttctttttctttttcttactcaattaatttctaatttagaattagaaatgaactcctacatgggatgcgtgaacacattatttcaataacttattaaataataaaattgataaataataacaatagtcttcttatcccttgtgcgtgaacctggcaaaccttcatcatctaactggaatttttttgttattatttttaataaatagttggaattttccctcaattattaattatatcaacagggaccaaatgagccatacttgaaatgtccctcccaagcaaaattataaccaaagtctcatcatttttttaattttattttattatatttttcaatggactttgtattgagtctgcaaacaaaagggttatatattataatagtcaactactttaaaatcaatatttgagttcaaaatccttcataattaaaccaaaaaaaaagtaggtccactctcgtgaagagatgggtctcatagtatggtccatacattaaggaggttgtgcattgtctctccatttcttcttttcaaagtctatggatgtgaacctctaatacatggccttttcttttcttttctttttttcaaacaaaacaatgaaaaaaaaaaaaaaagctaaaagcaaatggattggaaacaaagacgttctcaaacttcataatggtttttttaagcatatgtcaaatcttagaacccttttagttgacatgcaatgatgatagaatagagaggctaattaataaatttaagcttatatataatgagatacattgctttagggaatagattgaagccactccttaagacaggtatctatcactcttgctctttttttcatgtgctacttattattgtgttgtgtataaaagaaaatgcttgtggtacttgttccaactatgaaaccttatttctcaataaacaaaaacaaaatctagtactcttttgtgtggacctgtcatcaagatttttccttcttttctttgttttaaataaacaaataaaatagtgatgaggaacttgagaaattcatccacttgcccaatcaattgaaaatgaggtagacaagtttttctcctttcacagtccctaccctataatatgatcttcatttagcaatgtcactaggcccagtcataagcaccatctgtcagcccatcaaaaagcaggcatgacaactatgtagatagatacatagttaaattttatagaactaaccatagacttggaacactctaaactaagaattattcaagctaatataattgtaattaatagcataatatcaattagtaaattatgtcttggctgaggcagacttgatacctaatacccactggtggacttagaaatttttgccaaccgaagcaaaattttaaatatattttttatttaatatattagatcttaaatatagtaaaagagttcttcctgttaccctcaaccgtcaaaaattcaaacttttctcttcaaaatctgaaataaaatatgtcaatgataaaatttgaatcctaaatttttttaagaagaaaaatagataaatttattat

SEQ ID NO: 1608 - DNA, 1726 bp, Cannabis sativa
agggcataaaacccaacagttacgaagagtggtctaaattccagagtaccgccaacaagaagaactcaggtgacgttcaacaatgacaccgagctgcaaaatttacgggaagtagtggctcaagttcaaagccacactaacacacttcgtcacgaccaagctgatacccggtaagctatgaatgaggcctttgctcaaccaaaaaggctcttccaagaattgatggataaacaggtggagagcttaaggacccaacaagcattgatcaatcaccagtcaagcgaaaccatgaagttaataaggcagttcaatcaacgtacaagacatcaattgtaggtagacatccctattatttgagatcccctccattgaaaggaatcgtacatcctgcctacgaataaccacgggtcagaagttccattgactcacacctaggatcctttacgccccgaatcgtccaatcctaggccacatacaatgtgggccaagaggtagacggtcaggagttgtcaggtcagaatattggcaaaaaattcagaacttctgaccccatgtgggaacacctgagtagcaaaatgcagaattttaggaccctatatccatttatgatcaaaatgggcatgttcagtatatccaatatgttctgtacacgatcctacaacatggtcaaactacaactgcttgcactcagtcatattcaagtaacaatgatgattgagcaaatagcgcaatcttgtgctcaaaggtaaagagatcagcgtacccagagagaaattccattggccaacactaaaaatgcaagaaggtctcttggaaaatccatctttgagaggataggaacctaacctgtcgatctcaaacacacattaaatcagaagagagaacaaaggactggggtagttcccccaaatgtacaatccattaatgtggataattatgcgtcggttgggactcaaggaggacagcacatgacttaggtcgagcaacatgcaaaacaagttgatctatgggtggaagcccaactagatcatcttaaaagcttagttgaagtttgactggtaccaaactcactgaccttgaacttgactaagcaacagtttcacccttcactgcttggataaatgctctccctcttctgcccaaatttaaaattcatacctagaaggtgtataatagaaaagacgaccccttataccatataaagaattttgagctgaaaataaatttgcagccaacatattgcaatgtatgttgcagagtctttccaacaacgttagtagaggcaactcaacaatggtatttcaaattaacaccggggaagtttgattcatgggattcgttcatatcagagttcaacacacaattcccgtctttcaggccactcccattacacttggaggacttgttcaaagttaagcagctcccaaatgagccactcaaagatcacataagtcaattcatgactgaggccacaagagtaagaggattgactaaagaaggaagacttgctgccgtgctcggaggaattatgccattgggagatttgtggaaagacatcaagaggcttatggtgaactccatggtagaattcttggacaaggcagatggattcattaagttggaggagggagtacggaatgctgctcctagggtagtttccaccggccaaaaacaaaataccagcatgtctttgagtgctctagcccctgttgacctcagatttagc

SEQ ID NO: 1609 - DNA, 1166 bp, Cannabis sativa
tttctgtaaaattcaagtgcctacttattaaatccaactaacccacatctagggcggagcgtggttatcaccgccgtgtttcctaatctaaactcgtctttgtgcgcgcgtgagatatgttgaactaaaaagagttttagtttcattctgttttaacgagttcactatccataacacaagactgtcggttcattttagataaactaaaccagaattaactaacgtgcgccaaaaatagacaatctttcagatctagagacgcattgcgccattgttgcttaattaagctttttctttttctcttatgaacaaagaaaattatgagaaatgtaatacgtaccacgtcagcaagagaaggaccgggtgaagaagcatcatctgagttgggtccgggagcttcgcccggaggagcaggtgggctaagcatatcaggagctggggctggagacggagacttactatgcttcttactcttcttcttgctaggagctggagcaggtacctcgacggcgggtggtgcggcggcaggagctggaggagtagcagcaacaggtgctggagttggaggagagctgaccggaaccggagctggaggagagctgacaggaactggagctggtggagcgctgactggagcagctttaggtggggaagatgctggagccttagcaactggggctggcgccgctggtttcggtggagaagctaccggagcagaagctggtggagtcgatgtgggtgatgcgactggagcaggagattttggcttagtgggtgcgactgctggggaagtagttggagcaggagtggtgggggtagtagtagtagttggagctggagcagctggtgtttttgatggtgctgcggccggagattggcctccgactccggcgaccacaatgcagatcaatgctactatgaatgcacctctcgtatccatggcttcactcttttggatttagaaagaagaagaagaagagtgatgaaaaacgaaaggacggtgtgattaaaaggtagtgtgttggacatatataggcctgttaaaggcccatatcatcaacggtcggaagataataaatctggaccgtcagatgttgaggataaaaaaagatgagatgggggcccattttgataagtgggcccaaagtagccgtttgttcaacgtg

SEQ ID NO: 1610 - DNA, 1392 bp, Cannabis sativa
gatattcacacttgcacactacatggttctattcattataagcctcactgctgcatttatgccaaattgaatttgtaaactttttatcaagtatgcatgaaaatgatgtttaaagcaaattatagagttcttaatagttcaaatcttttgtgaaggactaaagataggtagagagggaagtagattttgatcttttcaagcagtgatggtagaagtgtggtggtcccttttagctgccatccccgctgttgttgcagggcaagcttttagaatgaagaaaaagcatgctgaagagcagagattgcagagtgcccggggtagggagaagaattctgatgagatttttgtatgtgagagggtgtgtacatcaaagagaatgctgaaaaaggttggggcattctcaaaggatccaatccctgatacctgtgtcactgtctgtggagtatctgagcttgaagcttgtgctgatgcatgtgctcgcactgtttgcgttaatcaacatcaagtaccaaattggaacgatatctgcctccgaagatgccagagtgaatgtctcaaactctccggttcccattttccttagttcagtttttgtacaacttgaatgacgaaaaatgtacggcatcagtagtttgttggtagtgcttgttactctgatatctgaagcaattgtgcaggtggttttatcatcagtcacttttatgctccagacattgactcaaattagtttcagtgattctttagagagcttttctgcaatattaagaatttgaagttttttggggaaacatgagttttatgagctttatttgcactgtacattttatgttattttcactctcctgtttcatgccctcattttgcaaaatcattccttcaattattactattttgccaaaatagcttttgtatcatgtttcagagtaacattttgagtttaaccttttatccactgcaactaccaaccttatttatgcgacaacaaaggacaaaattagccttctattgttggagttagtagcagtaaaggtaaaaatacgtaataagcattaagctgtaatccttcaaaactagacaagtacaatgatcattggagaattttgccatttctccttcctggcttttttcttgtaatgctgtttactgaacagtttcttggagatcataaaatgtcaggggattcaaaatatctttcctctttcttattcttgctggaaggatatttgggctaaaaacttcattgtcttcaccgcaaaacctttctgtgattcctctcacataatgtcctcgtctgtcatcctgctaatagaatttggttctactgctctcatttaaatctcatgatacttcaatggttttgatttattctgcatattattaagtcaaaaattt

SEQ ID NO: 1611 - DNA, 2358 bp, Cannabis sativa
aaaaaaaaaaaaaaaaagatcattttccttcgaacatttacaatttttctgtgatcaattattttgaagtgtaattgagcgcttatgttttgaggataacgacatttagaggttgttttattctgggaacaccattcttgataaactatcgtgcactctttgtgcacaactacaaaatatcctaaagaaattgacagttcgctattgaactagaattatcaatcgataaagaaagcgacatagttcacaactcatccagaattatcaatcggtaaacccattccaatttatttttacagtgtaacaccaattaccaaatcatttcacaccctagtgaaccaaatgataattattggtttctcttctattaagttattaaattcctttcccattacagagaaatccaacaatataatagtaacataaaggaaaataaaattagtataaaaaaaatccttaaaaggtgtccttttgtgaagacaaagccaagaatgaaaccccactcacattgaaaggacttgaccatgtaatcttcggcacaataaagatatataactagtgaactaatcactcacaataaagataatgtacaaaattaattaatcaagacaaaaatacaaacaaaatcataaccccaaaataaagtggatccgaacctagtttgtattctttaaccaaacaacagaagggacttaaaaggaagctcaagtgggaaagaaaagggcctaaatattctcaataaaccaaaaggaaatgaaagccctctttttttgaaattaaagaaaacgtgtatgctacaggaatattttgggagaatcttgaagaagtaggtggtttacaatctggatgaatctgtcagctttcctagaaaacacaaaactctactaaattactgcaaactgagaaatatttcacatcggagaaaaactaccaaaaaaaaaaaaccaaaaaccaaaaaaccaaaaccaagctcatgaatctaggttacaactttcttaataagatggaataaaaagctacaaaggctatgagtgcaacacgtagagttgagggtgataagactgttcttggtgagtctcccattgccaaaccagccaaccatgtcccatctgctaaaagggttcctccggatccacttccagtacccgacccggatcctgcttctggatatgttacctcgggttgttgctgttgttgtcctggatccgaatacgttgccccggattgtgaccctgctgctgttggcgtagtatctcttgtggatttttggctgaacagtcccacgagcataaaattagataactaattaatataaagtaatattttcaaaaaaaaaaaaaagttaatataaagtaatgattcaatctagcaaagcaacgacttgatgatgttattatttcatcagatactttgtccagattctctactctgacacataaatatgggcaatgaatgacggaaaggctaaacccaactacctcaattaaaataatacactctaagaaaatattatagggagattaataaaaccattaaaagggaatatttggcaccatggcatgaattaaacataaaacgatgatagatctaaaaaaaaaaaaaaaaaatgaataggtagattcagtggagcatttcctaacactacttacactaatactaacccaaaataacgttaaagattagatatttgaacaaatgaacttgaaagagacctactttcccaaagaaaaacagaaaagaaacaaattattctaaaactaaactatcaataaaaagcgacccaaagcatgagtaacaaacactaaacactaaagcttaaaagaaacaaataccttggtgaagatggacaaaacgtcaccgtataatcagctcccgtacacgtaaacgtactggtggcatcatcgtaggcgtagctatacgatctgggacacgcggacttaaacatctcagagtaaactgacggcctacaagtggcgggtgtaccatacgcgccgctgcaacagtattctggggtcccgaaagcctcgcacgcgctcttacacgcgttaccgttcccgaccctcaactccgacgggcattgctggttcaagtcggtggggcaacccgtggaggcgcacaggcccgacccgccagttccttcaacgaccatgggcaagttatagccgtcgacgaggctgacgtcgtagaagtcctgcccgccggttcctaaagtgaactcggcgagggtcgctggcggtgcagctccggcgccgttgcactcgaccacgccagaaccacagtctccggtgagacaggacccggatcctgattcatcaaaagtacaacccgtccgaccccaaaaacgacccgaccaacccg

SEQ ID NO: 1612 - DNA, 3152 bp, Cannabis sativa
taaggacttacaataccagcaatccaaactcctgagctaattaagaagtggctaaccttgacttaccttctaattatagcttgtaattgagctcttttaacgttatcagtggaagggaagcaagttctgtcccactcctcaggtttatcatttttgcctctcataagcaattctttcagacagttttcttcattctcatgcaactggagagcctttatttgctctttcatgatcaacaggggtccaatgaaccactcaaacaccttgtctttgggtccatttctcctcgtcagctccacatcatcagcttgtgattcgattaaacataaataagtaaatcatgatctgaacagaaatcaacattaatgagcaacggacaagttaaagtaaggtacatacagatcattaacccagatgagtggcactttgctgatctaagcagacattgtaatatagaccaagcaggcagtttcacgcttaacttcttacaatcacccgttaaaatgcattctccgatgtccttgagacttaccaaaccatcgcgaataagtatcctgccattcacctcacaagatttaaatagccagtcccacacctgacattaaaaaatcagaagtattattttcacatgtacacagaaaaaaaaatattgattttctgtatcttggagtgtccttgcctgcattggtttatactgttgaattgcccatttcaatgttcttgaaccttctgaaacaagttttgaagtgagtgagccctctctctctagttttgaggtgattgaatcatcctttccattttttgcttctttgttgcggttgtcatctagcttgtctccgaccgaaccagagttaacgtctctactgtacttaggcctggctgtcacaagcaaatcttattagtaaaatccaaaaacagaataataggcattctattgtgagatgtacaaattgtttattagatcattcttcatctcaacaggagttgtaaccaaaaattgacaacacacaataataatacaaccgtgtacctcgggaggcaggatccctctttcaagtagagcaaatcatttacatattcatcaaacaaggagaccaccgatatgacaaatgcaagtcccagacaaagtgagtcttcctggaaaatttgtctaacttttaagataaattttcatacgaatactgacagaacctaacaacataacaataacattcaaaactaagataattaactctataaatagacaacaaaagatgcttcttagcagacctgatgaacaacaactccactgtatagccccagaaagaagctagagacaatagcacccatcactgctccaacaacagccagaggccataagataatggcaaggccagcaaatggtacacacaccgtctctaagaaaggcccttctctgccaatcaaatcttctaaaagcctcttccaacctttaaacaacatgtatggacttttccacaaagcaacggctgtaatcaaagggacatctactgcgacaccaatcaagcagactaacaaacagcttggcaattttgagacactatcatagaacaaataacatatctagaggttttacttccacgtttcaagttcttgtaaacaaatcaaatgaaatgaaataaaatagaatttcttacttgatctccattggcttttcatcctcaggtatttgagcaattaattcatccatgtaggagaaataagagtggaagcaaaaatctattaaatctagaaccacaatgcagcttcccttgatagtagaccaacaaccatcctggtagaaaagagagctcatgattgtgcttctaaaaagccttattatgatcatctggcatgaattcgcttaataatacaagattagaagcaactattcaacttttgctgatgatggtgggatggccaagcaaaatgaaaatctacacttttactacttatgttatgtataaatcctactatagaccatccaaagccataacagagaaacttacaactaagtacaatttgtgtaagaccctttaactaaatcacattatatctcagtaaccataggttgtcagtcaaatgtcaatttgtatagtgttagcttcggtaaccaaactatacttctagcaaagaaagaaagaacatagtattaaaaaaaagaaaaagaaacatacagcaaagcagtggaagaatttttcactgaagttatgacccttagcctcaaatgtagcaataagaggagcaaaaacaccatacccaactccacccaaaacacttgcaacaatcccaatacatggccagaggactgaagggactggcagtaataccaaagcaagaaccttcagaaccatcccaagtctcttgctcctgaaattattaggacaacgtcacaaacaactttgcgactctcatactaacattaacataaacatttaaaatgatgaaaaaaaaaagaaaaagaaaaaagaaatatgagaagagaagctcactgactttgccacacagtaataagtccagataaaatgagcaggccaaagaccaattatcacagctgaattcccaaccacaatgatagctaccacgattggccctattattgcagctgaaacgcaacatagaaaataactcaaaaaacagtttggctatctcacatcaatccataccaagaaaaaagcaaacgaaaagaatccactacaggtgtaatgtaaactacaccatcattttccaaagaaatatatgaaagtaaagtagtgaaaagatacgaaagatggtaaaatttagataggtacgtacctttgaggaggccaagtgtgaaaagcaataagaagaaaggcaagaatgagatgaagctccataggccggccagaaacccctgtggaacctccattagaggtgggtatgaaaataatgtagtggcagtctggcaagagttgaagagagagggaaattggttgtttgataatggaaattgaggaagtacaaaatttttgtgggggttaacaagtgtccataaaggagagagtgttgaaacgaagggggggttacgtggagagtttagatgattgagatggacacgtggctaccagggaactcgaataccgtgatgttgtatctgccacgggcagttgggacagcaactcgccgcccctcct

SEQ ID NO: 1613 - DNA, 2200 bp, Cannabis sativa
taataataataaaggctatatataacataagtgttctggtcagtgactcagtgttcatgctgcaacaaggttccaaaactcttgtacataataaaaggtagcagctctaatttgtaaccaaatatatacatagtaaactccatgataaacagacaaaatcatacaaaagaagagctgccatcaaaagggtatgtgtccaaggaactattctgttttcaacttatgtacagaaaaaagaaccttccattacaaaagcactgaccatgaccaccatccccaactaaacaaagactacaactttcagtcgtttgggagtattgggtcagctagatttttgttcatggttcgattggcgaagtcaacagcgtcttgatcgtgcaataaggggtttccaaactcaactgcaccttgatcatggacttggggttttccaaactcagcttggacatgataatcctcatccaagttgttgtgtgatgtctctttattttccatgtcattgttgtgtactgcagaatcagcctccagtggttgagaatatttttccctgtccctattgctttcctcaatgtatggctgcaaaaaacaaatagatagtaaaatatctataatgaagcagtctgcaatgtctagtagtacatggggtagtggttttgagtcatgattccggttttgaatgaatcaactaagcttagtaacccaaaactatgaagttcagtaaattgctgctacttcaatcaaaaagtgtaagttgacaaagaaaacaaacatttgatttacctgtcgttcactttcggtgaggtgtctccacgcatcgtctgccatacttctgaaactctggcctcgttgcctcacccctctagtttttttcaacctatcacattcttccctgatgaagatctgatatgcagtccttatattccgatttcggccaggggaaagtttcttcttggtcttcttaaccaccactgtctctttcacttttggtgtatgtggggttaatttatgttctgcagttcctcatattcaattggaaactcagatattatgtacatatgtgaactagaagaatgtaacaaatcaaactcatattaactaataaaatccttatgaattagtaaactttagattgagagttcaatgtaatacaatgagaaatgtcaaatatgaaaatcaacatagaagagtttaccaactgagttccaagttccaacacgtgcatagatagtactaatgatatacctctacacactgaattagattttctgattaagatctttttctccactggaacatcatcttcttcatctgattgcgccaggcataatgaatctgcactctttcgcttcatcactgaacaatttccatgatagaaagcatgacctgcacaaagaaagcccatgataaaaaataagaaaaatcttaaacctaacagacaacctttaagcaagcaaagcctccttcttaactaaatagaatcaaagcattacatatacctggatcagcagctgctttctcaggtgccctgtaggagtaaatttgctcaaactggaaaagaaaaagagcataaacttgttgaagttgagcaggaaacttcattttgaggccatctattttcagggcaacagcaacttcctcccatttcttgtttttggtaacctgaagaaagacaaatatcatcaaaagaacaaacaatggtaaagttctttagatttcaatacaaactcatgtgtttatgcctatggtacacaatcttccaaacaatatttgggaccagttcagtaaatatgggacaaatgtcataacataatgaaataaacctggtaaaaaccgcctctttgaacgacttctttgtaaaatacatgcaaattgagtagtgtttctcgaacatttagcctgccattaaaacaaaatattagaaaaagggtattaaaagcttacagaatcaattaaaccctgctacaagaacatgcattgatacaaagactacaagaatttcaaattaatgacatataatcagatagattaccataaatcatacatatataagccaaattagggagataaaatcaaatttataagataaaaaccacagaaagcaagtttaaaccaaaaccccattaattttcctgccctttctcaccaaccaaacaacagcacaagtataaaaagaattttccttttccaaaaccccatttag

SEQ ID NO: 1614 - DNA, 651 bp, Cannabis sativa
tatgtatttgattcagtcattatcttttctgtcctcattaatctcataaagaatgaccaccaaaccaactatgaaggcataatcaacatgaggatacactgtcactgaaaatgtgtcttttccaagcaaaacactttcaacactgtgtttcttgtgcatctgcaatgttataattaagttttatgttatgataataaataaatggtttgaatataatttgatagtatatatatagagtcttacttgtgcaatgatattggatgtatttccaagatatatagtgcatgatctttcaagccagctacctttgaccttgaaatcaggtacatcttcttttgtgttagcacccaaaaacacatccaattctgtcttgaattgaagtacagaagatttcttcacactgaaaactaagtcttttgaatctgagctatctcctctgtatacttgccatcttctgtgagcagttattatctgcatagggcgattacatattgttaagcaactatactatgtctacactacaatatatattaaacagttgacacttgaaaatagacctctaaagaatagggttaggcagatatgaattattttgatctattttaaattaatttgtttaattataagtaatttattgcataaaattttctg

SEQ ID NO: 1615 - DNA, 506 bp, Cannabis sativa
gttctagtgctcggtatcaactcgtgtcatcagatgatgttgtcactctcctaaagaagctgccttagaccattgatgcatcatggattcgtcgttgactgaccatgttggttttactttaatgacactattatgagttaagttacttctatgcaacaaataacccaaatggaaatggaaactgcagactaagcccacatggcaaaagcattttctgcatagaaaataagaaagatgaatcagtaagattttcattagaatctgtaactagagaagactaaatcactatgcaccagaaccagaaggaagtgtgttggtaatatctttaaggagttcagttaaataatgtttaagcatatacaagctgatgttatcacttgactaattttaaatccagtagtagatatattaaatatgtcatgactcaaaaacacacacacagcaataatccccactaatgagttagccaaattggtttcttgtatgtaatttaacaagagaaagag

SEQ ID NO: 1616 - DNA, 1878 bp, Cannabis sativa
atttttccctttatgtagtttccctaaactaagctctttaatgtgtcttctttatgtttcaagtgctatgtggaattacctatttgtacaaaatgctgtttgttaaagcgacattatcaaatgaagaatctattgtatttgtgcattgttaaagatgaaaaggagaacaagtctaaatcctataattgatttgttgttattcgttgattactggccttaactatatcctttcctttctcctgtttaggtagattgggaaggaaaagttgctctcatacagtgtgcaaaagctatgggaatcaagaaatttgtgttcttttccattcacaattgtgataagcaccctgaagttcccttaatggagatcaaatattgtactgagaagtttattcaggaatcaggcctcgatcaccttactattaggttatgtggctttatgcaagtaagtcacgaaactgattattctactttcctatacaaaatttgttacatgcctaatgttactctttcataacctatgaagttgatgtttctaatgttagtatttaaaaattctctcgattttggttacaagttcaataacaaagttgcttgtcatatttttagggccttatcggacagtatgctgtacctatactagaagagaaatctgtttggggaacagatgcacctactcgaattgcctacatggacacacaggtattgcatccgtcaatgtcctttttacatacttttgatctcatctttatgatgtctgatccattttgtgtaggatgtagctcgtctaacttttatagctttacgaaatgagaatcttaacgggaaacttctaacgtttgctggtcctcgtgcatggacaactcaagaggtaaataagaacattatcattatttgaatgcttgtttcctcctctttttctgtttgctttctcctagctcttcagtttactaaattagagcttatcatctttaaaaatgctacctatactctctcccgaacctacatattccaaaactcaggcttacttcattgttacctgaaaccaaagcccaagtatcttgtaggtgataacattgtgtgagaggcttgcggggcaggatgcaaatgttacaacagtcccagtttccatcttgagagtcactcgacagctaactcggttgtttcagtggacgaatgatgttgccgatagactggcattttcagaggtaaattatgcaatctcctctttgatgtaaaatcatttattgcagaactaacatgttgcctttggtattcataggttctttcaagtgatactgtcttctctgctccaatgaccgaaacatataatctgctcggtgtggatagcaaagatataatttcgctagagaaatatttacaagattacttcacaaatattctgaagaaattgaaagatctcaaagcacagtcaaagcaaacggatatttacttttgaaggaagagcccgttttacaatgtagaggaagccatgtatgtattgacaacttttggggtttgacacacctcatttttcttttcctttttatctctttcaaaaatttatgatgtagaaagtaaattgttgagtaccaaagcaacaaactaagattgcaagagacaatacattcaaaggcagtgagaagcaaagatagcaaaatcaaacgcaaactttacttggttcggatcagaataaaaaaaactcaccctccctgtcagaatcaagatcacagtacaagaacactttgatatgcactcaatcagccaaacactagctatattatagaattctctcactgggaatctctttgaaggttatggtgaactctaatgatgaagattgttggagaagccacatttatatcaatgagcaaaaccaag

SEQ ID NO: 1617 - DNA, 2951 bp, Cannabis sativa
aatataaaaaaattgaacgatatatttgtttgaggatgaattttatactgaccattccccttgagtaatgtgctagcaaaacatgctcgtctatcgtatggcctacagtttgatcatgtgacctcagattggacaacccattaccttgggtccgctgagtgttactggtcggacgttcttctggcccgtagtgtgattctttagggatatatatgtctatcctatttggatcctaaataattagagtacatcccactgattattatctgattagctgataagcttgcctaatcaacaaggttgcctgcctaggcgattattgattgctgcctgctgggccctcataatctcaatttgttggttcatccactcctggaattggagcttttactgctcgaatgaaaaattaatagttgctcgggtatcttgctgatcgtggtgaagggtgttggtatgcttttgcacctaccctatggtggctcacaaattttgcagctcggtatcatctccaatcactactcgaggatctccaacaaatggatttttagtttttggactggtctgcttgatttgagcattggtggtcccagtttcctgtacgcctagagtgaacctcgccagaggagttgtgaatccttatcttgttgattgggaacctattggaggctgaggaatagtagggttgggatctgttcttactggatctcttcgatttgcaggaattttcacattaggatccgtgagcatcagattagttgtctcgttgaattacccctccgtgtttatacatccatctttgtgtgtcctgaaaggattcaaaacaacaattgtgttcttttgctctcaacgagaccactaaaatattgacctcacttttagcaaatgacagtgagtcaattaaagcgattataaataattaataataacaattaagcaataaaaatacgaatttgttatagaggttcgacccgtgatagtggtaatagcctactcccctttttctcgtattaacttgtgaggaaagaagcaagaagttcttgatctctctcgaaagcttttataaagaatttagcagcttcggtgctctattgaatgaataatttcgaatccttgaatagtaaaatggctccactatttataaggaatacttgtattaatttagtttcctaaacaaataagaaataaataaggaagttcgattactttcctaaattgagagaaataaaagatgaaactaaggaattttctcttttccttgtcgatgcgaatccatcccaaaaaatcaagaacgcgattgcttgaacatttaggcagaatatctctaaagatattctagccacatttattccggttggtgcaagtgagctaactacgaggtggatgctgatcggacgatataacataccttattcggatattccaaatttttcttcaaatcaattatttacaagtgacatattactttggacggtacgttaaggagcgtacagcgcgtccaggtcatgaaatgttctccacgtgtcactcataatcatatggatgccacatcacattttacggaaattggtttaacaaaaactattgctaatatctcctcagattatagggacacaaacaaagtttatgacatgaaccaaacagaataatggcaaatacaacaaagatgatcaagattccacacaaaatattgctactgttaatttttggatcttcaacactaatgctgctactcccattaaaactctccatgtaagcaattttttccatattgttaagtaaagattgctcatcaacttgaacccccttattcaagaccttgggtataaaagactgctcatcaagaattttcacattgttcaggtaatagtgctcatcaatatttgatgttaaaatgtctaaaatctctacttcaagccttcaaattgtccgaaggagcccgcgaaccaccacttaaggccttacacacataggtgggtcgatccactttcataaataacatccttcaaccaactgcgaaaaaaatttcattggagacgaagagaggaggagacgaacataggagaaaggaaaaaactggagaagaaaaaaaatttaaaaactcaccccacacttaacgaattgtcttcttgggatcgaatatgtccacgatgttttgatcacagcatggtattgacaagagcaattaggatttgaaacccttctcatttcttcttctcgtcggtaacaatggcagatggagtcgaatgggggctactcgaagggcttcatctagttagagagggtttttacttttggggtattgattttcttttgattttactttttaagttttctttaataaaattgtaggtttaatttatgtttagtttggttttaattgtatatttgggtgtttttagtttttacttgacatgcaaaatatgaaatggattctcactgggattgccacataggacggttgggcacttaccaaatagtggagagcaaaacaaaggttagtttagccgatgatcagcgcagccaccagccgccaccgcttttctcgtttccatttaccttccatggctagctagctgcaccctgcaacctccgtctccatctccatggtagtgaccttcaatcataccattattgtctcactttctttttgtaccttcactcatggccgaccaaatggcgacaaccttccactccctcttcttcttttcctgcttatttttgtcactgctgttgtgtgactctatatccaattttagaacaatctataatttgaatggaaattttttcaactttgaaagtctaaagccaacgttttgagttgttttgacgacccatttccacaattttaataagcatgcaaacaatatcacttatgttacagcacagactcactcagtcaatacgtcgaacagttctcgcgccatattcacctgcctgcaaattcccttgca

SEQ ID NO: 1618 - DNA, 605 bp, Cannabis sativa
atagacgctttgagaaataccaaattaaaagggatcaatagtcttgtacataaatcaacacgtctaaaaatattaggagttgctaactattatgaaatttattatcctagatatgaaattatatgatcacctgtatgtactgttggtggttgaacccgtatccacggcggcatagtgagacaaagctccagaatcataaatcatataagtgttgttttttaaaggtctcagctctatggcttgaatgaagggtgtaccagatcccgtgttgacaagacatacatgaacatagtcttgtggaggagtatatatcatctccttaaacacaaatactgaatctgacgtgatggtcacagtgtcccaataattaggtccaatgtggagatcaaatttgattgtgttcttgtttagaccatcgtagtttccgtacaaaaaagatgtcctaaagaaatactttgtgcccttttttatggttagtgtgtaacagtttcgaattccctcaggaaagcttctgaggaatgttgcttgttgttggaaaccggctctgtatttgggcattatgctttgtattacaccgcttttaataaaagcagcatctgaaatgt

SEQ ID NO: 1619 - DNA, 2299 bp, Cannabis sativa
  modified_base (394)..(396): a, c, t, g, unknown or other
atagtgagtatcgacttagtggatgtttgcttcgtttgcctatgaagatttcaaatttcttcttattggaatacctcaacatatcaagtttagaaatattatagttctcaacaaagttgaagaactcgaaaatattaaaatacttgaaattaaattatgtatggtgtcttgatgtaattccacaagaaattaaattaccaatgtattatggaagaatatctggagagattgtggaggaggatagagtttaaaatgggagtaatgaattactagtacaagaaagaaataaattttgaagcacgctaattaggtagggtaggggtgttcatcaaaccgctcaaaccgcccgcaccacaccgcaccgcaaagaaaatgcggtttgaaattctttgcnnngcggtcgcggtttgaatttttcctaaactgctcagtgtgttgcggttcgcggttttgaattgttaatatgcggtttcaaccaaaccgcaccgcatgtaggacatcatcaaactgtcaaccacaataaaagtagtttccaagaaattggaacatgatgagctaaaaaaccaatagacaagagataattaagaatttcgatgatgttccaagaaaaagtaggcttaacaaaatttcaaaaaactgaaagcttccaaacatgaattgagagagaacaaaggaaaatagcatgtaggacatcatcaaactgtcaaccacaataaaagtagttttgcaagaaattggaacatgatgagttaaaaagccaacagacaagagataattaagaatgtcgatgatgttccaagaaaaagtaagcttaacaaatttccaaaaaactaaaagttttcaaacatgaattgagagagaacgaagaaaaatagcacaataaaagtagttttcaagaaattagaaaatgatgagctaaaaagctaataggaagaatattataatacacacgttaagcaaaaactttaattttttggagaattttcagagaccataaagcacgggaccactttgctaaaggaattgactaagaagactttgaccggcgatatggtgtttttatttttattatgcatagtttttattttttatttttctctttatatagatttacttaccaatgtataattttttgtttatttggagttagaatactttttctctgtgcgaagggaatggatttaacggttgaatccgtcgcatcgtaagagagagagagtgtgtgaatcttcgtgacgagcaaaacctagatctgaggctccaggagtttaaatccaagcttggtatgtgttcatgactttatcctactggtctttgagttgttgaatttgggttaattagttgttatatattgttaactcactcactctgccactcattatcataattgaactctttaattttgaggatttttagttaattagcaaaaattagtagttttagctatacatgataatgatgctaattaattagattattagaaattatgattaaaaatttagttctttcaatacaatggcgccttgggctgaactaatacaacaatttaaaatatgctgttttcatatacttactaaatttgctatgcttttctctccataatacatggttttggttctttataattagaaatctcttgctaattttgaagtgctattctagcccagaaaacttgctccaagttaaatgataagtttttcagtgaagaaatttgggatatgtttggtgatgaagttgagaggtttatatatagtgtcattggtcctataagtagtgatgatttgtctgactctaatgtacatattagaggactttagtgtatgtttgaactgggatgtagagattatagcatattaacttaaaattcaaatgtagttatgtgtaagtaatgctattgtctagttgtcgatccagacaatagattacacaaaaaaagattatattgttcagaatgtacaaaaatagaattagagagtaatttaagaaatttatttcttgctggatacaaagttgtgattttaatgtcatttttttcttaacatgatcctatgtatagacgtttatacttaaatggatcccacaggagaatggtttttcccatggtgataattaaaagagaaaaggaaatttagataaccatatattttacaatatggtattcagtttgttttgttgaagaacaaaatcacataagatcctttgtcactactctctttcctcgcatatggattgtaccttcttgacttcttctcacttaacactctaccatgagatcaaactatcttactcattttcacaa

SEQ ID NO: 1620 - DNA, 2950 bp, Cannabis sativa
caataaaaaaaatctattaagtcaaccccaccaccgagtcaatgttggcctcatatcagtggttgcatgcaatgtttattctctctagtgtgatcaaaacaaatagctagttgattgatgattggttgctttttcactagtgtagaaagactacaaagactgcgacttcaacaaatatcaacgaccattaatttaaacaagtcttctgtggaaaaatagaaaatgaaatgggataacgcgttaagaaggaccatgggttaatttcaacactttaatttcgggctaatatcatccaaattttcaaagaaaaagctcagaaaatatgttcacgggaagaaattctatgcttgttttttcaatttaattacaatgcagaggaaagtaaaatcataccttttcttcactatgattttacgaggaaggagacaagaaactaacgaaattaatacacagtaaattgttcccagatacatttttattttttgttcgcttactaacgaaagattatataacagttattatatttgtttccagataccttatgtttcaagaaataagaacagaaccagacttgtaaatgattgtatacagactcttataattattttaaagtaccgcagatttgttataatattgtataactagagtaattggagataaactagataattaattacttatgaaaaattaaaggtaaatagtaaataattaaacagcaaaaaattgccaagagagttaaaaaagaggaatttttactcctaaactcaatattcaattgcaccaataatacttttaacattttttttataaagtattgagttaattaaaaaattcctgcagtgacacgtatcagtttcgaaggctgtagatcacccagaaaaaatgatctaacgtaccaaaattgagcgaagactttagatcgttaaatgggttgacttgactgacttggctaaggcctttatgtatgataataacaattatcccgttgaacacttcaaagaagcttacaagtgtattcccctaataaatacaatgcaacattacttttcatccagttcgttctatttctatagcgactttcagacccatttgcctttttttttctttttaaataaatatatatataataattggggccatttataatggcggtttgaaattttcaaagatgttttgtagattattaaattaactaaactaaggtttaattttatacaaggccaaatggactagcatgtaatgtaatgagtaataatatacatattattttctccattccaagtttccaactcattatttaattttctattgcatctcaatattctataggtagaacatactaatgaaactattaaaacatttgacttcacataatttaattagcatttaagcttcctcgatttggaattaatcactggagtatgtaataaacaaaaagaaaaatataacagtcttgtttcttaaatcacctcaatttttagtgccttatacatcagttactttgatgtggacattatagcatgacgctttctgtaaatttaaggtacttttttttttacctcttttcttccccaaatcatttaaatagttaatttttttctcttagtaaaggtagcaaccttggtccgaattttctattgtattgtagtgagagacagcctaattttataaagtgggctccaccacggacatgttttttccacaatggaggctttctataaataagaataagcaatgaaaaaagaaagatatgaactatgacctcttaaaatcttcttacgagagtccctaatcctatagcagctgttaaattacctgtaatggcaaatttcgttgccaaagctcagctctctctcctcaccttcttctccatcctccttttcatccatggaagaccagttctagaccctgtagatcttaaagccctctctaacatccaaaaagacttgggcatcagaagtcaacgtcaactctccattgctccatgtaacttccccggtgtatactgcgagagaaggctctcagatgacaataactatgtccttaagatcaccaggcttatattcaaatcccagcaactcactgggactctgtccccagccattggtgagctctccgagctcagagaactctctctctctggaaataagatagttgaccagataccatctcagatagttgactgccggaagttggaaattctcaaccttggaaacaacaagttctctggagaggttccaaccaatttatcgtcgttaattcgccttagagtccttgatgtttcctccaatgagctttctggtagcctgagtttcttgaagtattttcccaacctggaaaagctttccattgccaacaatcttttcgccgggaaaatcccagcgtccattcgttcatttcgcaatctccggttcttcaatttctctgggaaccagtttcttgaaggctcagtaacacacttgaaaagggtcgaaaaatcagcttctagccttccaaaacgttacatattagctgagaattcaacttctactccaaaaagaaatgcttctgcagcagcagcaggaccttctagagctcaagctccatctccagcgcagttaccccaccacaagcataaaaaaaaccgcaaaaggaaggtacttgggtggattttgggatttttggctggatgtgtggcaggggggatttctggttttatcttctccctgctatttaaaatgcttttggctattgtgagaggtgttcgtagggacgctggtcctgcaatcttcagtcctttgattaaaaagaaagaagacttggctttcttggaaaaggatgacgggcttgcttccatggagaagataggacaaggtggttgtggagaggtgtacaaagctgaattgcccggaagtgatgggaaaatgattgccataaagaaaatagttcagccacctaaagaagctgcgga

SEQ ID NO: 1621 - DNA, 554 bp, Cannabis sativa
tttttctctttccaataattatgtgtataaaactcatctaaactgagtacacaattctcaaagtatttgggtgtgtttgcaatcctaatttgagtgagaccttttcaaccctccacttttattggatacggtctaccacacaagggttacaaatgcctagctaaagatgggagagtttatatttctagggatgtaatttacctaaaccaccacatgattctactacatctcagcaatatgctgttatcattacattagcctccccacctgttatttctccacaagcatctcaacatgttgctcctcatccctaccctacttccccatattaaatccccataactcactcactcctagcatcttttctcaatctagtactggaccaatattgtttgatcatgctcttgtttctaatattgttcctgcacatgttgttactaatgttcataatgcagattgtacaaatactagcatgcctctctaatgttgcaccaagagttattgttcctactgcataaacaactacactactagctgatcaaaatatcaacact

SEQ ID NO: 1622 - DNA, 1979 bp, Cannabis sativa
catccaaacacaatcaaataaaaacgacaagtaaatagagagagaaacaaagatcacaaaaacacacacaagatttggaccaatttatcaaatttcatttcctaaaattcagagacaataatgaaacaaatatgaatttttcaacttggggatttctggccggaaaacaatcaaatgaccggagaattttcagccgccggcgaggtccaaacgatgtcctttaaagccggccgaagctccttactacagaactgattgtactcaagtgtatcaccattgtctttcttcacctccaccaccagaaaagatggcgtaacggcgaagatctcggcggctatggacagcttccctttccggccactctgctgaccctgcaacctcactctagaatcgctcttcttcacattaaacttcacggccttagccaaatcctccagcttcgatatcacactgctcgccggtctagtcgtcgcgaatctcagctcctctttctcctccctcttcttctcctcaaacaacggagataaatcgaaaccctccgataaagatatgatgtggaaagcgttaagggtctccggttgcaacttcgtcttctcaaagtagctctcatcgtactgtttctccttctccatctcctcttcctccttggtccgtacagatctgggcacagattttttgaaccaggaagagtccatgatcttcgctatggtgattcgggtactcgggttcgggtcaagaagcttggtgactaaacggcgagcttccgaagagaaccacggcggacatttgaaatctcctctgtagatttttctgtacatggccacaagattatcgtcctggaatggaagaaatccagcgaggaggacatagaggatgacaccacaagaccagagatcagctttggcgccgtcgtaacccttttttccgatgacttcgggcgccacgtaagcaggggttccacacgtggtgtggagcaaaccgtcctgtttcaggtgctcggagaaagcactgagaccaaagtcggtgactttaaggttgccaccttcgtcgagaagaagattttcgggcttaaggtcacggtggtagacacctctgctatggcagaaatctatggcggagattagttgttgaaagtagagtctggccacatcttctttaagccgacctttagcaatcttagcaaagagttctccacctctgactaactccatagcaaagtaaatcttcgacttactagccataacttcatgtagctcaacaatatttgggtgcttcaccattttcataacagagatctctctcttaacttgttccatcattccaactttaataaccttctccttccccaccaccttcatcgccacactcttcccgttcttcaagttccgagcatggtaaaccttagcaaaggttccatgacccagaagtcgaccgaggtcgtatttcccattaagcaaagtcgagttcccatctttacaaccaccattttccaccattttttttcttttaaacaatactaaaaactcaatacagacacttaagaaacaaaataacaaacagctggtatattaaaactacagagacagagatatatctacagagttagccgaatttcgataaagagaaatcgaaaccgacccagaaaacaagagcagaaagggttgagtaatatgaatagatcacccgtcttcaacgtgcttccggtggcaatttctgccgccgatgcacttcttcgaacgcccaaaagaaatctcagtactcctcaacaaagctcctctcatctctctgcattccctaaaaaaggacttctccgccggatatcaagagatggaaaaagccctgataagctttttttttcctcttcctttcgaatctctcttatcaaaaaccgaagaacccttcccggcgacgagaagaggcggcggtttttttttttttgctgtttttgttttctcttttttttcttctgaactctaacg

SEQ ID NO: 1623 - DNA, 1822 bp, Cannabis sativa
gaaaagtaaacaaataaggcaaagaaagaaaaacatagtttggctataaaccaacatcaactgataaagagcaataaaatatatccacaaagtagagaggtagcaatacaatagccactaccaaaaaccactgaataccctttctacagaaagcttttaaaaaactagccatgagcgctatttagccaagttgaaaaatcaatgtgtatgaccaaaaaggcaaaaatagctatgtatgtggcagacagaaactcacacattatagggctaaagtaggtcatatctagagatatgaaggccaagttggcggcacgccaaccatacaaacaaagctcacttggttacaaatagccttcatttctcactgaaaccacaccaaaacaatgattatttggagtttaccttctaagtctcatcaaattgccttatttatttagtcaacaaagatacttcatgccaaaacaatttttatgtgtaattgcacttccagcatgcaactggtatttgttattggtttggttcttcttatacgtagtggtgttttctcgcagatttctaaccataggattaggaattaacgttgttgaatttctgtagcagatttcctagattctagttgcttgtctagatatgtccttataatggtattctgcttcaacatgaagaatttattagacatgctataaagaaataccacaatggattggataaactttttgaataaaattgtcacactatgctaaaactagcaatgcctgaatttatagccatgttatttcctgactattgcctaaaaacatctttcttgttaacatagcaagaacaaaagaatcaagcttaacagtagaaatatccaatgtgagagggaattccaaagatccaaagtgttgatagtagaaagaaatattaactcttccgttttaagaaaaacaagcaatcaaaatagggtgtcaattgagaccattcaaaggaaatgacctgagacaatagccaacctttaggagacttgatgtgactaatgcatgacaaatccatccagtaacattggtaggaaactgtaacaacatgtactgcaaataatcatttgacactgaccctgcatcatatatgaagaaaagcaaaaaatcagattggggtaataaagtagaatggaaatgaattaattttcattacattccattgtttggttgcaatgactttctacaatttcggtagaatgactattctctttaataatttttttcaattttttttaatacattttaaattttattccactctattcttatacttactcccattctaattccaattccaattcttatgttttcactcctccaaaaaaagcaaacgaaacctaataggaataaaatgttgatctctaactaaccagatataaataaaatatcttcaactttgtattttcaaaggtaaaaaatatcatataagtaattgaaagaaaataacaaaacaggaatggaaatgacaaaaaggaaggaaagaaagaaagagagatgaatttgtcacacctgggaagcctgcaggcaagataaaatctttaaccacatctggaacccaaaataaaactgagttggagaactgtgaatcctgagactttttagaaatgggtttatgttcctcaagtaaagttcgaaactgtaagtcatcatctacgacaaacctgcccaaaattaaacacaagaaatctcaacataacatgaatctaagatttttcaaaccaggacaatgtaaattttagtaattagttgttttgtttgttattcattaatcaaaatgaaaaaaaatgagtaacaaagtaagg

SEQ ID NO: 1624 - DNA, 2392 bp, Cannabis sativa
gttatgtttttgatggatacacatcaaatctgatctggctatacctttgtaagtgaaaatgactccttaccaattcaggcatttggttaagaaagaaggtgtgtgtgtgtgttggaaaataggtgctttaagatgttaatttaattagcttagttttgttagacattgttaaattttgatgcatattttagtcttataagcatcattggtatctcctcctacacaagaacagtcctatattctccaaaaaaatgagttttcaacaagagggatagcccaaatggtcttgtggtttgcttccacaaggtctgaacttcaagtcccttgagcacctacacagtatttgttttagttttctggtcctcaaatatcgtaagattaggttggagccttgtttcaaaaaaggaattaaagaaaagaggctttcaaacctttattattattgaaaaagaagatatcttgtacaaactacttttgataagatgcttgaaaagtatatcatgagttttttgaaacattttaaaggtgaaatactatatgattgcttttgtatatatgagtttcttgctaggttttcaaactattttatgagctacctgctcactattttcaagaatatgaaatgatatttaatgcagagagaattgtgattatttttctgtcaattattgcctcacacattttggctttctttgaaaattatcaaggcgatcttaaactacttttgtacaactatggaaacaaattctaatagtcttttaaattgtttgattggaaaaaagatttgttaatatttgtatttatatttgaggcctagagctggaatatggcatgcctttttcatatatctggagccatatatttttcaagctactatcttgcagctagtttatagtttcttctttatcaacagttgctgtaacccagattctctggaggccgagaggattattagtggataagtttgactccaaagaagatcttattaatgcagtttttacttcttccttcattccagggtattagtttctcttaccattttctcatgttacgtcttttgcaatttattgaacactgtactgaaagttaacttcattgcagatatcttgcaccgaaaccagcaacatatttccgtaatcggctttgcgttgatggggggctaactttatttatgcctccaacatctgctaaacagacggtatatgcaggatatacttctatatctgaaacttgtgatagttaccaatactttctaaaaccatacagttgattatgaggttcttacgtttcctgggcatttctcttgagttatcgaaatttagctggtagaaaatattttgttatgataaaaaaactattttgttataggtggaaaaatttgaatacccttgttattttaatcagtttttgtgagttgcatctgtctgcatagaagctgggttattctcattttaaattctacccttttctttgtaacacataaaattcaagttgttttccacttaaatattgtttcttttgtaggttcgcgtatgtgctttcccagccaatcgcttagggttggaagggattggaatcagcccagattgcaatcctgaaaataggactacccctcgagaggtaatcttctagcttcttcttctgactgatgctctgttttttctttttatcgtaagctgataaaaaaggaaaattcaaaatttcagttttttaattgggcacttgagcctgcagaagatcatattcttgataggctatttgaatttggataccgagatgcagcaatatgggctaaggagaatcctgctaatgaattagttcaagatggcattcccttagtggaaaatggtttagcacaataatttataataaagagttccattttgatctaaaaatataacattgtggaatagtcgtcacctcacctctagtattgggatgctgcaaatagttttcggtatcagctcaggtaatagaaattttcagtatgtaatttatttgtacatggcttgaaccaaaatatgtcatgagggacagaccacagtatattactacattgtatagaggactggataattctttatttctttgtaaagtaaaccagatataagtaaaggagaaaagaagaagaagaaaacatgaagttaagaaatttttaaactgttatattgaatggttgttctcttgcttcagtctcaggactgagcagttgggaaagtcttgggtgtctagatttaaatagggacaaatattagagttgaatttatatttttaagtagttcaagtcagtttctttggtactgcagttagctcattggtatttggagtgcaaattcagaattagtaatttaaaattaaagaatgatatttgttggggcatttgtacttatga

SEQ ID NO: 1625 - DNA, 1475 bp, Cannabis sativa
acctcatctcttctatctcttttaataatattgcaaaacactttccattggagaaatatttcttattggagtattgtaatgattttgaataagttctaatcgttaattcgtcattgagatgaattttaggttggttcttagcttttgcgttgtctttcgatcttattacttgtgcctcatgttgttgtaacatttagggttgtctggctgatgcgaaagcttcgcatcaggccaattaagtgatttagtcactctttatcctttcgaactgtataagaactttgtgcctatgttcatcttctttgaaaattatatttagattttgttcggtttttgaagattgtaatgggaagagtatgattccttccagctatgattcagcctgtcgaaccaatgttggaaaaggtggaaggatatcatacaaacaaacaaatcgctaaccaattgcaagacgccacctcataatagtatctgaactgattgttgaaatatttcattctcccttttaatatattttaatgtttcgaacttagtttacagaagagaaaaattactaaagctctcaattcatatgctgatttaatgtgtttgtaaaaaccagcttcagtagagagacccctaagccagctcactactattctactcataatttgcacaaaatggacaaaaaaaacctctaaacttagcaactgtcatcaacctgtgtttctttttctctttttttacttaccctcggtcgggttatcttcggagattacagtattgttgctgattaaactgacgcttgcacccgaattgccacctgaaggaacggtatttgagttcgctgcatcgacagcattgctagtttcagcctttttcggttcaagaactgaagaagcttgaggggcgaaagaggcattactattagagagcgcaactggagtaaccaatgttgcatctgtggtatgatgatgatgatgatgctgttgtttttgtgcagtttcgagagcaggaatattggctctcagagcattgactgtaaaagaatccatattacttttctgctgctctgctgaagctgcctcgttcacggcatgaagttgttgtaaccgataatcagtttctggcctacggcaaacttttcgcagaggcacaatttcctgaaaaagaaaataaataaaaagagttgagaacgagtttatgaataccatgaaatttataggcgaaatttcaatgccactcgatcatatgagtcggtcacactatgaatgcaaattttcgggggactaaaagcgatatgctaggacggtgaaagctccctcgcctgcccttttaaaggatttgtcaaaaacttcccaattaacttaaacaacccactcaaatcttattccatgctaactcttaaaatcacagtttgtcaatcgtttccctcggcacgtctacagtatgaaacaatagaaaatttaaagataaaagagtaatttgcggcgtaa

SEQ ID NO: 1626 - DNA, 7495 bp, Cannabis sativa
aaccctcaaaagcacagtattcgagttcgtgccgatttcgggtaccgggatttcggtcttgatggggtttccttgtcggaggaagaggatcttgggtctttctatagtcatttcgtacagtcaaggataaatagtgtcaaattgggtgagaaatgtactatcatgatgtacggacccaccggttcggggaagagtcacaccatgtttggttgttccaaacaacctgggattgtttacaggtctctgagagatattcttggggatgatgatgaagaaggtgatgcagatggtgagcgagttggggttgggacatttgttcaggtcactgttttggaaatttataatgaggagatatatgatctcttgtcaagcaatggtggtggtggtggaggatttggccttggttggcccaaaggaaatggctctaattcaaaggtaaaaaatttcatgtgtttttgatgataaggaaatgttacattatgttctgtgctttttattttttaaacatattgagtatgattttgcttaactgagtttactttaagtttccatgacttgtgtgaacttcttaactgtgtgttactgtatgaacacaattttagcttctaacatgttaagtaagcataaagtgtgaatttttatgtataattggcagagagaacttgagttctgtatgtaaacttgttataggttttacttgtgtatattaactagttcccacaagtcacgtgggaacttcttaactgtatgcaactgtgtgatcacatttataggttctaacatgttgagttaagtgtcataaagtgtgaatttttgtgtataattggggagagaacttgagttcattgtattagtgtatataacagatttataacactttgttttagcctgctatagtttggtaagatgcatttttgtgtttgcaggtaaagctagaagtgatggggaaaaaagccaaaaatgctacatacatatctggaaatgaagctggcaaaatctcaaaagagattcagaaggtggagaagagaaggattgttaaaagcaccctttgtaatgaaagaagctcccgaagccattgcctggtataaaataaatttttggtgttttactaggccagtcaattttttttcttgtactattctgtgcttagatacttgtttgtggttctgcataggtcatcctggatgtcccaacagtgggaggacggttaatgcttgttgacatggctggttctgaaaatattgaccaagctggtcaagttggttttgaggcaaaaatgcaggtaagattatcaagaccatgattgttattctatgtatgcagggtactgacattaatgaacgaaatgctgagtatttcttttgttgaaatctcagacaggaaagataaatcaggggaacatagcattgaaaagagtggttgagtccattgctaatggagactctcatgtaccctttagagacagcaaattgactatgcttcttcaggtaaccataatatattaatgtcagtttcaattgctggagaggtgactttcaagttcaagttttgattaactttttcattttttgtttctattcaaggattcttttgaggatgacaagtcaaaaatgttaatgatactttgtgctagccccgatccaaaggagatacacaagacgatctccacccttgaatatggagccaaagcaaagtgtatagtccgtggccctcttactccgatcaaggataaagctggtggtgaagattcttcctcagctgtgattttaggatcaaggattgctgcaatggatgaatttatcatgaagctacaaaaggagaacaagctaaaagagaaagaacgaaatgatgctcacaaagaactaatgaagaaagaagaagaggtcaaagctttgagagctaaacttgagcttgtcgaagggagagattctgttgaaaatgaggaggaagttaactcaaaggtgaatgagtgggctcagaatatgaaatgtgaactagacaaaaagttagaggaatgccagaaaatggccaatgaattcgtagaattggagaggaagagaatggaagaaaggatactccagcagcaacaagaacttgagatgctgaggcggcggttggaggaaattgagttggaattgcgatcgaaagaagggaatattgagataaagactaacaaatctatagaaaatgatggaagtggatttgcaaagaggctgatggggatttattctagcagtgatgatgcaagcatggtaaagtcaatggatcttgacatggatgatcaagaaccagtttttcgtggctttacttatgacaagaatggcagcccaggtcttaaccagcccctttcaactactttgaatggtgctcttggaaatgatctatttgctccaacatatggtgacaaagtatctctaagcactgtttatgaggaagatgaagttgaagaggaggaagaacacaaagaaagtgatgaagatgatgaagaagtgaaaaaagaagtcatagaggagaagaaggtttgtgtggtaaactccatcgctaatgtgagtccaactcccttgacattttcacaccagatttgtcaagagactccaggggaagaagattatcttaaatcaaatttagaggaaagatttcagagtttaggactcaaaagtgtaccccaagatgacaaggattcagaggcttcaagaaaaatccgaattcaaaacattttcacactgtgtgggaatcaaagagaactatccaagcacatcagcacaccaatgcctaagaaaaaaggatcagaaaatattgatcctcaagaattgatggtgaaagtgggaggagttggggttagtaagtttagaccatagtcttatacttgcatacttaaattggattttttttcttctcattttacacttgactgactttagattgtttttttttcctgcattgcaggagaatggaccagcccttaaggagttgtcatcagcaaagggaacgatttccccgagtcatcatctagtaactcctgttcccttgcgatcactggagaacattgcaaccacatctcctgaacttggacctcacttgggttctacacctttcattacacttagaagaagactttaggcgggctattgttctttttgtataaaagacatggagtatactcgtgtatatgaatgcttttatttgggtttttgatcagtgttcatctgtctgatgctattggaaacttattttgtaattagttccctgattagagggaacaatatttttttcctttgtgatgaatcaatagctatttgatgatgaaaaagctcccaaaacttgatgtgttgttcatttttgttggtatatgcagtgtgaaagattgttatattttcattgaacaagtcaagtagaagcagtgtttgcaatttgagttaaccaagttatgttgattgacttcactatctaattaataaactttgtttaatgaatttggtcaactcttggtttaaagtattatatttgctgagcctgataaagccttcttaaccagtacatggtataagtctaagggtcttataataacaattaacaattatgatatttaaacaaccacaagttttctatcattgtgggaaatttacaatagaatttgtttatggaagcaccaaggcattggagacttttatccaaaggatacaagaaactaaaatcaaccaacttggcttcatctcaacatcaggttctttcttttaacaaacaacttctattttgttttgtttttggctttgaaatcaataaatattagaaccatttttctttcttttgtggcagagaaacatattcagaagagttttgagagtagcacaattgaaggtcatagcaactaaaaccatcagaaacttgaaaaccaagttaattagaaagaaagaaaattcaagaaaagtcaaagaatcccatttggaagaagatgatgatgacgatgatgatgatgattttggttatcaacagataacaacagttgatgacaagattcaaaaccaacacaataaggacaacaagaatcatcagataagttcaacttggatgaaattatatgtcaaaatagcagcagtctcaaacaagaagaaaactattgttgttgaagcaagaggttatcatattgttcatgaaatcaaatccaagattcttgttgctgaaggaatcaaacaagatgagtattctttattccatggtgggataagccttgaagattacaggacattggaatcacttggaataaaaaccgaatccacccttcatttgatcttccatcccacaacttcattgccaatcattgttcgaaccccgaatgggaaacttcttagtttccaagtacaagtcttgtacactgtttgcaacctcaaaacaatcgttgagagcttcataggttgtcccgtggacgaatgcaagatggtttacgcagggaaggagctcgaggactgcaagagcttggccttttatgagatcgaagagaattcgaatttggagctgcagccttgttggattcaaattcttgttaagacttggagctcaaagaccataacactccatgttatgagatcgaatacaatcgaagaggttaaagaaaagcttttttgtaaggtgggaatgccaatttgtaggcagaagattgtgttttgtggaagaatactcaatgatcaaaatcgaaatctgtctagttacaatgttcaaaaggattccactcttcatatgttattgaaacattaaaaacaaaatctttgtcatttcacaaaatttgcttattgattttgttttgatatttttgtacttaataagagaaaaagttgaatcatatgtataaatgaaaagataacatatagtattagctttttacagcactttttgtttttctctattcaaaaattccctcaaagggacaagacataagaaaaagttaagtcatgtacagattatttaactctttactatgatatgatgatgatgatgatgtcttcaaactgaaattaaataagaaagtaggaaacaaattcaacccaacaactcttgttgtcctatcctatgttgttgttttttctaggcaagacaaaaaacaatgatttatgctgagttgactttgtttctcatccaaaagctataaatcataaaaacaaataagaagaaaaaaagtgcataggagattcatatgaaaacctctctgtgagttgggaaaaaaagcaaagcaatctggcattattgtgttattatttgagttgttgttgttgttgttgttcattgttgttgttcaattcaattaggcctgtttcagagtctgttccaagatcagagtattgagtatctgtcatggatgaggaatgatgtccttttgatcttgtggagcttccttctgtagatgatgaacccttcttcctacgagagcttttgggtatagcaggttggtgttgagcagctgagtccactgatgaaagattagacttatgagagcgcctagaagaatggcgcgaactgccagaggaatcaccacttccaccgcgagcatgggaggtagcagacgcgtctgttgtggaacgcctgcgccttgaatgcttcccctcggaagaagaacctctcttggttggagaattagtagctgcttccaaagagccacctaaattgctcgaatggtggcgccttgattttgtattttcattttgtgttaaagggtcttcatcaaatcaaatcaatacattttatcaaacaatttgttacaactcattgacataattccaaatcaataattaatcaaattataccttgttgttgggtaataataggttctaatggtcctgatgacacttctgtaggggtcctaaactcactcatctgtaatgaattcacattgtttttatttataattaaaacaccattgcattgcattggttacctcatacttcaatatcatttccaaaggaatgaaaaaattagattaagaagacatacccaactggggccattatttgaagaaggtccatcccaaccaatgtgagcaacatgttttacatcagtaggaaatccaatttgtatttcctcttctttctcatctgtcatgttttttcatcattaatgaaaaagcccaacaaattttggtttaaacagacaatgaatgaatgaattgtacttaccaaatatctgagaaatgtatcttaggcctttcaataagcctttcaccttggtagtcatttttctttcttttgttttgtttatttattagcttcaattgacacaaaaataaacaaacaaaaaatgcccttttgaaaataagaggcaattgtgagagtgtgaaactttaacaagaataagaataagaagtagaagaagaagaagaaattgagatgatgatgatgatggctgcatttatgtccttataacataacataataaagatgtgaaaatggttttgttttgttttgtttggttttgacggccggtccggcttagtgttttttgaggatggtaccggtggccggtcaatcaaaaaaacaaaaatcaaaaggatgaaatgaaagtgagaaagaatatggttagaagaagaaaaaaaaaggtatagaaatgaaatgaaagaaagaaaaaagtgaataataggtaaaggtggtaaattccaaaccaactgctttttagtgaatgcgcgccaaaaacggttttctcatcaaaactttgtggctcttcttcattctctctctctccaaccactttaatttacatcttttacaatttaattctaatattttaatttttattttacatatttaataatttatttctatcataaacaaaccatatattattcttcttctcttgtaatatgttacaaattaagtaatggtttgggtaatcatcaaagtttatggtgcaaaaggaaaaagaagtaaaatacaatatagatttgtgataatttctttttgagtttcagtcttgtattgctattgtctgtattgaaggagcacaaagaatgggcattcttataagtgtcatagtatatcaatggaagggactttgagagagcaaagacaatcccaccatcgattctgtgagtttgaactagaaactgtttcagtaccctggaattattgggttgctttgctggtctgaaccagatgtacaggaaagtggtaaatcagtgatacaacatctcataatgtctattctaaaactaactcagaaactcgaatattacgatcacctcctccaaagaacatcaattgggacccactcatcacaaacaatattcattttcactgctcagactctgaattatacgtacccaaattatgtcaattatatgatttgctatcttgatgttattattgtctctaatatttacgcatttttttttttttttgtgagaggcacatattgttacttaccaaataaattgatacaagctaatttgttataaagttgagtaattgataaatttgcatttgtatatataatgtatgagaaatgttaacat

SEQ ID NO: 1627 - DNA, 4199 bp, Cannabis sativa
  modified_base (4002)..(4005): a, c, t, g, unknown or other
gaattaatatagttgtagttatttcaatctttttttatttttatttttgctaataaatgcgagactttacgttctctaattctaaaattgaacatcgaaatattaaatttgttcaaatttttgttactccatatattttttttaaaaaaaaaaaaactttactgttttaatttttgaaatagtttttgtgtttctatgtgtggattgctgattttaattttgatttaagttattctgttataagaatttttggaattccgtaaaaacacaacaaaaaaaaaaaaaaaccattttaaaatataaatgaaaaaaccttaaaagaaaatgactaaattttttaatacaatatacacaatacaatatacacaattatatatatataaattgtaattaaagagcatgcatcacagctctaagaatttctttaattattttttatattcatcaagtgatttattactgtgagtggttaattatacatgttatttactattttttttaacattataaaataaatgttattaaaaaaattattgtttgttaaacaataataataataatctttgtgaaataggtacctgctgttgaaataaaaataacagtattttcatatcatatgaccataaatgtatataatttttttaaaatatatatatataattttgtaagggaggccccaattccattgtcctccacctctaaaaaattaaatttgtattatattattttattttatttttttatggaacaaattgtattatatattaatagatattgtttgatacttatctaagctttaatgcaatcttagttttccccccaatttctgaaatggacatgcatagattttgatattacatgaaaatatttatatttagtttgtgtagcttttaataagatttatttgcttaatgcgaatcatatgtgtaatttactatataagtatatataaagtttttcaatataatttagattctgtatgtcctaataaaaatataaattgatttaatttaatacgctatcacataaattaaggaaaactaaattatattttgtcagaagtggatgcaattgaaagttaaatgtcctaaatttctaatcatagtcaatttcctcttggtgtttatttgtttttgttttagtatttaattacaagtaccaatgtattatcgtttaccaaatagaactaagaattcaagtaattagtatttagctaaattatctctttgatattgatcttacttgggtcttgaattttcacaacatttgtttatctgattatatattcacatcgtgttattttataatcacatatgcttattaattaaacttatggagaaagctcttcaatttgctatcaaaaatttttgacaccttaaaattcgatgtcagacttgaaagacaagaaaaaaataatatccaccaattattttaggcataaatggaggaaaaaaaagacaaaaatgtaaggagaattagaacgaaacaacataaaatgttggaagaccaattttacccttttctttttttaattacatttattgggttttaaaaccatcaccattaatttctcacctaagctactttggctgtttttttttttttttgataactagctactttggcttcttgagggtagtggttctaattttacattttaagtgacacataataatctttcgaaatttttgtagtagactgttttgatagattattttggcatctcagagaatttgtattgatttgagataatttgtaaatttttaaaaagttttgtatagtttataataccgaaaataaagttgaaataattacttaccacaagtataaaaaaattgtgcatacaacaatatatataaattttatttttaacattataaactactttgaattttttaataagttgcaagtaattttaaataattataacatatataattatgaaaattaaataaattaaaaaattcttttgtatgttgaaataaataaaaagtctaccaaaacacctctttaaagatttgcattgtagacttgtccataatcttttacgagttaattattcatctttatttttttttatctttatttatttttgaaaaggctacccttttgtaaaaaggaaaaagaaaatgtggggaaaggggaaaaaagaaaaagatcgtttcatttttcatttttcaaattttggagagggctccattatttgctttaagctaattgcattgcattatgaatatatcatatccacatgcaatggaacttcatatgcttggagctctctattggagcaatttaattaagtgcgctactccaccataaagaatgtcttatccttacgtggcatccatccagtggcttggatgtaacttacacgttttcaaatactctccttatataatacctctcacgtgtgaagtgtcaacgtagagccatagagccatttttaaagtttatgcgtgaaataatagaagaataatggttaaaaagggaatgacaactttttctagtatctaccggcattacacgtgccaagctggccagacgcgttggtttcctgccgtcgctttatcaaagcctccccacaattcttagtgtggtctaatccacacacgaatctaccttatccttttgtttgagggtacttgtatttgtccaggtcttaaacagttagcaacgaccttttatttttgattattttctcttatacgaacctagctaacccatagttttggagcaagaaaagttgcaaattgtaattatagcacatttctgctcattaaaatagattttaggatatgtaaatagtcattacataaatagagaaagaaagaagacttttccagaatgtataatatgtattgattttattaggataaagagaataaagatagagagaaaacatgacaaaagggacatagtatgggtgttcaaatgttatgattgattagatcaaatactcccaataacaaatcaccaaacaaaagctctcactttgtttcaaatcatcactactaacatgttagaagttactcactttcactaaacataaacaatgaaaagaagacaagtatacacaaccaatttatactcacgagtctaaaataattatataccattttaacatttttgccttctttttccaaaagaaattccaaaactaaattgacccaataattattaaatattactttaatttgcaaaccaaagtaatcaatacattgataaaaacaatctattataaataaaccccgcattgattgtcacaaaaaaaagaaattgattcatcgatcccacttttattctattccctcacaaaagggtcaaacccccaaacccaaaactcataacacaacaccatgaccaactacggcacgattccgacctcatcgtcgccgtcggcaaacctcgagtacatttcacgcgccaaggaccgaatcaaagccggactcagcacgcgccgcccatggaaaatgttgtacaacttccggtcgttcggactccccgcgagcttcaaggatgcgatcggccgagtccgaaccaacgccgcttatttccggatgaactacgcgattgtgatcctggtaattctgttcctcagccttctctggcacccgatctcgctcatcgtttacatcgtcatggccgtcgtctggctcttcttctactttctccgcgacgagccgttggtggtcttgggacacaccatcgacgaccgcatcgtgctggttgtgctcgccgtgctgacgatcggaagcttgctatttaccaacgccacgacgaacatcctggtttcggtcctcgtcggcgccgccgtggttgtggtccacgcggcgtttaggaagacagatgacttattcttggatgaggaaaacactggattgatgactgctactggtgtgggtgctggatcttcttcctcttaattcattctcttttttcttattttcttaatctgtaatttttatcctagtattattgatttttctttctttttttcttttnnnntttttttcttttttttttttacctttaattacgtacgatttccaggattttgattggctgttattatgttttaccgttttcttctctattttttttaaataataatttttaaaagattgaggtctctagactctacttaaccctttcttcaatctcttgtgggtaacgtcagttgaaagttggtttaagtttgg

SEQ ID NO: 1628 - DNA, 1328 bp, Cannabis sativa
aaaaacttctttattatactttacatatgttgccaaattatatagttaatattgcatgttgttaaaattataagggtgttttgggaacaaaatggagttaatgaatgattagaccaaaaaccatgcactataacagagaagagtgaggaacttgttcggtaacgataataactaccattagcatgctacgaaatttccaaaggtacgggaacattttcaaattataatgacctaatatatattaagaaaaagataacacagtagcacaaaccaaagctagattagtaattattaattataatattatcatcataatctaacttctaattaataccactaataatcctattcataatataagctaggtaataataattaatagtaaattttgttatagaagattaataattaataatgggagaagttgttcaagaagccaccaaaaatggctcccaattcatcaaaactctcttcccacgaccatcttctttgcacctactactaattggtctgcaaagcttctcattaaccatttcatcatcacaattatcatgatcatccatctctccactccaaaaacactcatcatcatcatcatcagctgttttactatcttcatcaatgttcttttcttcttcttcaatttcagtctcaatttcaagctcatcaatacctttttctccttcttcttctccctcttcttcttctccttcttcttcttcttcttcatcttcttccttctcctcctccacgggctcagaactactcatcaatcggagtgtgagccttccgtcagttcgctcagcatggaaaaaactccgaacagaaggtacaatgacggctctcaaaacaaggcgtccatcttctctgtgaggtctaacctgaagaccagaagagccactcacagaggtcaatggcggtgggaaactactactacagcttcgattacaatacctcttcgcagcctgtgtagcaccagatttctttgtctttgcagacgacaatggggacgaagacagtaaagacatttcgtctccactgctgtcgcccgagtcgctaccagtctcgctccccaagccttccgtgcacatttgcaagctcttggcattgagcatcgcagaggagcgcttaaccattggatgaacatacaccttttcatctgttttagtgtcgtttttggtattattatttgaaagagcttggagaaagttccacccactagcgccaacgtttttgttgtcgtttccatctgtttgtttatggtaagtactttcagaattgttgggtttgggtggtgatgatggggctaggatgggctttggcagggc

SEQ ID NO: 1629 - DNA, 665 bp, Cannabis sativa
caccttaatattttagtcggtgcccaatgagtctttctagatagatacagaacagcacacacaaaccatgcacgtgtttttcgatcgctcagagtgagaaaaacgtgggttcacaaaccccccaaaccgccgacacattctttctccataattggttagacaagccgcggggttcgccggagcgccgccgccggtgggttcccgcgctggtaattttccagataaccttctcttcttatttcaatttgtacccactctttctcttccattaccatttctgtttttctcattcattggcatcgtgaactattaatgaacatagagttttgctataattatgggaaatttcgggtttgttttcttgtcggtggttgcaatttggatctgaacagtatattttgatcgattgattggacttatctgaatccaacctgtaacagagtctgtacgtctttggacttttgggattattgttagtattataaataatttgtgggtgctgcctatttatgataatttccttttatctatatccgtattgaacttacttcgatgatacattcaattgggaagtagtacttgatttaagatatatcaataaacttctgattaacagtttctgtttcagctctgtcaatgactggtgactactagtgttacataaa

SEQ ID NO: 1630 - DNA, 1283 bp, Cannabis sativa
cggtttaaaacaagcccctcgggcctggttcgatcagctcaaaaacacacttctgagatggcagtttcaacattcaagagctgacacttctctgttttattacaaaactgccaaggacattatacttgtgctgatttatgtcgatgatatcatcgtaacagggaacaacaacaaaaggcttgaagttttcattgctgaattaaacaaaaccttcagcctaaaggatctcggtcctttgcacttcttccttggtatagaagttcatcgtgacatcacaggtttatacatgactcagaccaggtatatagaagacctgttaagaagaaacaacatggaaaatgtgaagccatgcactactcctgttacagctgggaaaccgatgtctcttcatgaaggagaattaatgcaaaatcccactgcttacagaagtataataggggctttacaatacctttgtcacacgaggcccgacatagcttatgccgtaaataagctaagtcagtttcttcaagcccctacaacagttcattggagtggagcaaaaagagtactaaggtacctcaaaggcacatcaaatcttggcttacacatcagctgctgtgataaactcagcattacgggattttcagatgctgattgggcgtgctgccccgatgatagacgctcagtcgctggatactgtgtttatttgggtgaaacattggtgtcttggtcttcgaaaaagcaagctgtggtatcaagatcaagcacagaatctgagtatcgcgctttggctcacgttgctgcagagatagcctggatcgaatccttactgaaagagcttaactttcccttgtcaacaccgtctgttacttggtgcgataacatcagtgctagtgccctcgcatccaatcccgtgtaccatgcgcgaaccaagcacattgaaatcgacattcactatgtgcgtgataaggtgctgcaaaaactacttgaagtcagatacataccatcgcacgaccaagtagccgactgcttgacaaaaggactgtcccattccagatttgaatttctcattgacaaactcggactgagaagatctccccttcgtttgagaggggatgttgagaaataacatttatcctctgcttctctctgtcatgaagatgatggtgcacaatagcagctgtggatttcagccttgtggtcccaaacaatctgttacaaatgattaggctcacaatgattgggaatattattgttaggatattccccctttctttttgtaatgatatctgtccttgtga

SEQ ID NO: 1631 - DNA, 1632 bp, Cannabis sativa
tgtttgcagatacggcagatatggaaactcaatcgaggctcttaacgttgatttacacactgaattgggttttgctaatgtggtgagctctactagtaatttcttttagctacacaaattaatttggtgttgttttcttgagaaattttaagtcatgaaattcttttacattgatttctctatgatgataatgatgatgataaagccatcgaaatggttttcttttatttttgttttaggggtgaggttggagttgattatttatgtcttttgattgtgaaattaaacttgaatgatagtattggtgaatcccagtatgttctctatctctcatgtgtatatactttctcgttttgtatattacatatatcatatagtttttcatttcactatttaattttgatcattgatggattactttttaataactacaaatacagtacgagtatacttctgccaaatttttaacctttatgtgaatttgatttgtgcttgattattatgatctaaaagacaaatttccaaaacaacattttgaaaattgaaaggatgcattgactctaaaattataaaataaatctaaaaaagtttcaagagtttatctgtcatatttattgtatttgagattaaattattagattatacttttccccccttaaatagaaaccattctcttctcttgccattgttcatagtctttgaatcaacaaaactttgatacttaattatattatttatgtgttaatgtgtgtggttagatcgagttttgagtattaaaggtgtttgatggaagtgaatggtgaatttgatagtgtttgatgtttaatgaaattgatttataagtaactgaatcgttctacatattgaaatactggagattggatttgtggtttgtttaatctctttcgatgcacttgcaattctaaatttataaactaactagtgcaatttttcccttttcaattgggttttggttgtgtctttcaaattgattttttgtgttcaatactcgcaactatgaaatggttttaggaatattgagttcttggagaggcctaggattgaaagaatcggttatttagaagagagagaattataatgaagtagaataatgatatagtaattaatcttataggttatatatatgttgaaaaaacttaaagagtattctcagctagcttatcttaattattttaagcttgtgatcatttctttgggagttggcactttagatttgtttctggtagtccaatggatagttcagtctcaacatctgaactgagattactttctgtgttgttcaagtcctcgatctgcttatggttattactattattattgttgttgttattatttttattatttgatgcttgaaccattagtttaataccatactgcaaaaaaactgagcaaacaaaaatgattgattagatgtgccaaattaaactgtaactaaatatgtacatattattaaatggtaatggtaattagtaatgaaaaggctcaaagggtttttgtctagttagtgctagtgtacttaaaatgtgtgtttggatcctaagaaataaatcaagaagaaattataaattccaacccatttatttggtgtgtcttttttagcccactgtcttc

SEQ ID NO: 1632 - DNA, 1723 bp, Cannabis sativa
aatatctagctaggagtaggagatcttaattgcctcaagtggaatatttttcttttcttaatttcgtcttaataatgagaatgatattaagtttctcacttaattttactggtatatataatcctaccaataattgagtgataaattttttaatcatttctatttagaattatgttagtcaaagtgataattattatatatatgtttagtcctaaaatattaagaagatataaatatagtaagatcataaaataaattgcatgcatggaagtattttactgatgtgccaaacaacaaaacatgacaggactgtgtcatatttaatgaatataaatatatattaatgaacagaaaaacagtcaatatgtgtaacagtactgtaagtattgttcagatcatactcacaccaaaaatgaacatagcagaaaaccaaccaacaccaaaaccatgtcaacctataatcgatcttcaggatatcaaaccctactaattaattactcactctaaactcaaacactataaactcgaatttagagcaccaaacatgtgttttgttgcacacaaatataaatatctatatatacttatatattttgtaagatcagagtagagagaggcgaattaaaataatatctatatatgtaaaaggaaaaaagaaataaaaatcaaatcgtacgcatatataatctgtaattgatattggatctatatatatatatatatagtagctgcagtcaccgatgactagtagtactgctagtatcatctccacaaccaccgggatgttggtgggatgcagcagtcaccggagactcattaataatcggcctaaaagcgttgagcaagtggctatggctgtcattgctgcagcctgttcccgaaccaggcattaaggccaccggaggaaaattcatgaaatgcaaaggtgctcctctatacatattattattagaagttgtagtagtactgctactcgtccacatgggatcgtgttgattatgcgaacccccccatattgacccagcagcagcagcagcagctaagtgattattattaccagccgaattattgggcaacatccaaaatgccgccggtatgggattactaatgttatgactttcctgaactgaacccgaactagattgcaacaaataaccgttgttactgttactattattattgttactctgtgcggaagacaagtcctcctctggtccggcccgtcgctttctttgcccgccggcgccggcttcactctgctctaggctgcttgcagcagctgcctcatgatgcagctcttgctttgtttgcatcatcattgcgctaacattcccagaaccaaaattcaacatcattggcagtgaggaagaggatgttgatgatgatgatgatgaattgacttgtgaagaggtcaataaccctatccctcctgagaacaaagcccggcgttgctgagattcatccatcattacagtactaccagcacccctctcccactctgctcctgatgaagttgttcgtataaactgtgatgcagccgcaagcgcaccgaagttgtaattagggttaaagtaagagctccggaagtgcgatggcgctgacatacttgagccggagctccgaagggatatgtttagagatgtaaagttcgcgggaattgtcccggtccccgtggcggcgatcactgagggctcggcttgctgaagaagccactcaatagttt

SEQ ID NO: 1633 - DNA, 3975 bp, Cannabis sativa
gattagctactggatcaccatcttgagcagataatttctctccaccagtcataggtgttggaagagaattagcaaagtccttggttctacacagaaggtccatgacatacttcttttgacaaagatggagaccattgtcaagatgagtaacctgtatgcctaagaaataatcaatttcaccaatatcttttaatgaaacagaggcattaaggttagatatgagtgatgaaaccacagccatagaacttcctgtgataagaatgccatccacatataaaagaatataaatggtatgactcttggtaatccttgtaaagagagattgatcgactcagtagaggtgaagttaaaggagataagagcagttttgagcttatcaaactaggctccaagtgcttgtcttgacccatataaagccttattcaattaatacacacagtctcttggcagtcgataacacccgcattcagaaaatcacccaacgagacaacattaaatgtcaaattcccttatctgatgtcaaattcctcacctttctctcggtttggggctctaataataactaaaagcacacttgatgaggttaagatctttgtgcttttcaaagtttgaaatattcaaaatatctttcatgaaatgccttcgttttttaattctagacacgggtgatactacacttccctacagtaatgttgctcatcccctaataaagctctcatcggttttcgatcttttagttttcaatctgtttcacatctaatgcattccaaatctttgaaaacattaataacacaaaaacaagcgtaaacccaaaaaaaaaaaaaaccccatataactaaaagacagcctaaatggaaccctcgaacaaagaacactaaacactactaaaaacctcaaaacaactaacacggaattcaagtcaaaaacaacaattcaaacctcaaaattataaatgatatgcacatataattcttaccaaattcaaccaatttcagcaattcaaaatttcgatccaaacacttctcaaacttactcaaatccattaaaatatatgcttacccaatcatgatcaacaaataatgcataaattaaaattcactaaaattttcattacaatgtatcaaatttcatcaatccataagcttgcactgtattactctccactaatgtaaacaaaaaagaagcttattataatgaacaacaatttaagctcaagcatgtcaactaacataccaactagacataacattacaactccaaacacaactcttagtgtcctttcttcccttcagttgacagagttcataatttttattttagataacaacatagcatacaaactgatacattttattccctaattgttacaatataagcttggaagaggaagcttgcaatcagaataaagaagccattgacctcttcagtgaaaatactatacaagtatatttggtttattgatacacaggcttgtattcatagcgtttatatttatatatatacaacaatacaaatgtacataaaatccattaataaacaacaaagctatgcagatgcatgcataactaataggccacttacttaaccctgtttctgagtgttctgatgataccagggaatgtctgaagaatcaacaatggaaatctgaacccgtattacctcatgaatggcaccgcgatggagcactgcaagaacctcttcttccttagccattgcaaaatctgccatacagaaaatgcgaaaacgcgactcatcgcgcatgcgaaaaccatagaaccatcttccaagcttccaccacttcacacacacttccctatctgagatcttacagcactcaagtgattcaagtacatactcagcctgtcaaatacaagatgctttagaaatcatgatcatgatcatgagcctggttgaattaggcaacttattaggctgcatattcaggtccataatgttttacattgactcactaagatcatgtttggaatactagaaaagataagacaataaaaaaattgctactttataacaccaataaggcaataattaagcaatgttgatactagattttagctttcagtttttagcaactaaccatcaagcacaaacatgttacttaagttactcagaatcttaacctctaaaataaagtcaaagacataatatgacaatagaattatgatctcaacaaaacatatttaccggtactcgaagccaatttatgcagtaatgcaaaccgaccaagttaaataaaggattaagctttggtttgaaaagcaacaattcaacatctttaaacccaaattgcattacgtgcaaatcttcaattgctttcaaatagtccccaactccaagagaaccagataaagaacgttgctccacgaatttcaatacctccattgctctacccgccatttcattgtgtctctggatgtataaggccctccatccctaaaaccaattttccacccccaaattaaaatgacccaataaaccaattttcatcgataacacactttcaaggaaggaaaaaaaaaacctggaaattagggatataaggagcagaggaagaagaggagggttggagttgaagagaacccaaaaaaggccatctttctttagctagagattcccataagcaatcagacttgcatagctccctccaaaaacgagaacaactacccagtgaacacagttccaaacccttaaaaacaaaactcagttgaaattatatgaaaactatatgaatatgcatatttatatttatatgtatacattatatatgaacctgaagtgaagaagcgattttgagggcaatatcgttgggaagcgatttctgaaagtaatcacagtgtttcatttttctctctggaaatattttctttctgggaaatatcagaaatttgagctaaaaagaagaagttttgaccaatcggaagtgtgttacagcagagtttatcgtggttgacatgcagagaatcccaccacatgaagcaataataaaaccacgtgtcgttttgacttgtaaacagcctaacttaaaagtcaacttattaagtttgtgtcacaaacgatatgtcgtttcttattaatattttacaaacgacatgcattttctttagggcttattctttcttcttccttttctttaacttaaaacgatttgttcttataaagtatccaattttttcataacgtgagatgagattctattagaaaaaaaacaaaagtgttattatttgttgtcgttcatgatgaataataatgtgtaaattatgtcgtttttccttgtaaatgattgaatatatttgccaccagctatgttatggttaatatatatatataatatttttttttttctgtagtgaaccacttaaaacaaggggtcaatttcattaaactgaaaaaataaataactatacaaagacttaattaattttattctttaatttgtagaagttattatttacatatctttcattcataaaaattctccaaaatatttcttatttttcattcccttttgtcatcaaaaaaagaaatagcaagacgaagaatgaccataactttactttggcatatgatttaattaataacttattagaaaggcgatttctttatttgttttttttaattatgaatttttataccaaatttaatcaaagaattatagcaaaaatggagaagaattcctacacacaaacttcagataaattaataaaattcaataattggtttattattaggtacccctcattgatttgcactagcaaaagaaataatcaattattgtgtagtataaaatatccaagatatacatttttttttctttcaatgaaatttttaacaagagtaaaagaacatcatgatgacaaagttacaattatatttattgtattttagaaagaaaaaaagacataaattaaaaaagatagtaaaataagtacaaagacttttattaggactcaaaaattg

SEQ ID NO: 1634 - DNA, 2502 bp, Cannabis sativa
aaaaaaagaaaaagaaaaaaagatcacccagacagaggcggtctccttcgtggtgcactaacagcaagtgtgaattctccaagtccaaccaacgcaaaatcaccgttgtcagcaatctcaaacaactagcagaaagatctcaacccgaaaatccataaacaaagagcctaaactatagtttttgaatttctaaaccaatgttttatttagaattcaaattaagataaaaaaaaaagtgttaatatagacttgccccccaaatttcaaatctaaatctcaaagaaataaatggagagcctccatgaacgccgatgagagaagaactagcaagagaagaccttcatgactaaatattttgagatttttttttaaacaatttgattttgtttcccgtttttactgtgattattttgtttattaactgttgttgtttgttttcattgattcacatattagttagtggaatttgtttatataattttagtttattttgataattttcaaaaaattggaataaaaaggattacagtgaatttttaggtattataatgaaaatagtaagtgtttaattttaatataaaaatatgttgttttcagtgatgtttgttttacgttgttatctataattttgaaagaaaaataacgtagatataacaacaaatgcaatttttttcataagaataaaaagtaatgaaatcaagagataggtttgataaccataaagtcacaatattttgactcataccatctaatgatcaaattatttattcactagtaagatcaatcttttcataacttgtaaaattaaaaaacataaaaaattgaaaaagttgaaaataactaaataaaaactacaacatatctaagaataataaataaattattttgttgatgttgggaagctttttttgcaatgtttttgcaacatttatataaaaccatgttattataaattttttatgagttatttacacctatctattcaatgtgttgattagaaccaaaatatgcaaccaaactgaaaacgataattaaaaaaaaaaagtcgttttttgttgttgagaagttggtttgtcgttatttccctaagataataggttgatgtctaattttgcaaattggaataaactaatttgttttacattgctataaagttatttattagttgtttacacaataattaactaacaaattgtgataacacaaaaaattgcttgtttaaattaaatctcatattaacattaaattttagagaataaaattatacaaatactggtgcagatcaaccagaaatgggatgagaacaaaaattatgttggctttcaagtttggaaattggttggaaggtattgcaagtataaagaagttgtacacaaatggttgcaacaactacaatataactatggaacagcatatatacaactacaatatgaagtgaataaaggttacccaccactaaaaaacaaaatgattacaacaaatgtaggcacaaagggcacaacaaaaaaacttgccaaaaatacacaaaaaaaatactgagaaaaactccggatacaaagttgaaatactttcaagcaaaaacatacattaattctagtttttctttaaaaatggttttctgatttgagtattcattaggtacaaaaagatttaacgcatataatagtatactcggtcgggtaccaacaagaatgagacgtactagaatttttaaagacattatagtgttgcctctaatcgaaaaaatcaaatcttgaaggccaagaaaaaaaaaatgaacgctgcatgggaaacaaaaaaccacaacaaatacaacaaatattaacaaaatggcacgacagaaaaacgagtagaaacatgtcgcaaacaaattgaaaacaccactacaacacctacaaaactactaaactaatacatttattacatgggcaataatttattagttatttcatattttcatttgattactgattaaaaattacttgtaacactaaaatattgaggattattaatatagttattacatgcttaaaacattctaatatttaatatttgatattgtttattaagtgatatacattatatgctgatttgagaaatgggtaaagagaagaaaataggcactagaaaggaaattacttaaaaaaagaattaaaaaaacttgaacaatatgaattacatgcaaattaaatttttaaaaaagttgttaacaaagatagttttgtaaaagttgttttgatgtcgcgttcctatcagatacattttaaggttacatgtatttggttgatggcaagttgccattaagttgaaacatgattaattgaaaacattaaatgttgttttgagattgtttttaagttattttcctacagttaatttttatcagataacatcatcctaaatattgaacaacaaagattaaagaaacgatgtatttagaactacaaatgaaagaaacaagtgaatattgtatgtatttagaattaccaaatatcatgggga

SEQ ID NO: 1635 - DNA, 4587 bp, Cannabis sativa
ataacatacgacatgtcgtttaattatagccgtccacgtagctctctcgtgtgatgcatagccgttgaaatattagcaaacgacaagtcgttttatatcttcgtgtgtaatgctctatttatgggtggtatttccacatactaataagacaccaattttacgggttaagctaagaaaaatcagacacagatctaaacaaaataacacaaatttgacacgaattttataaataaataataatataactatataatatatatatatttagtaatttaatattagagttaaaaaataaaattaattttctttaaaaagaaattaaaaatattttaatttttattatatataaatagatgtaagttttctaatagaacctaatagcaaacatcaaagtcaaatataaatactccatgattttatacaagttaggttagagttaagaaaattagacacgagtcaaaaacgaatcgatacgtctaacacagaatataaaaacgagtcaaataaaatatgcacgaatacgacacgataatacgttttgtcaagctcttttatcctaatactacttcaaaaacaacacaacttttccatgaccttcaatttaagtttttatagttaattaagaaaattagaataattcaaacctagttagtttggatgaaaagtaatacatttttaaatttccaaaaggaaaatttaatataataattgtttttttgtgtgatttgtagcaaaatgatatatagtgtggttgagaaaatactatcacaaattaaaaaatacaaacactaattattatgctctattttacacaagaagaattataatttagctattccttttaagctcaatcaaataggtaaaatccttcaaggcatggagcatcagaggttcaaatttcagataggaacctaacaaagtaatttaagagatgcaaattgaaataaacgcaggatcaggataagggcaagcctaatactaatatcaattgaacaaagatatatacaaattcaaccaaatgattgagcctacccaacattgatctgattctttacacaatttaggagcaaaagtaggtagctatctctagacattaaattacttcatcttacaatcctcagcaacttctccatctgttgaagcaaagaacagcacagcaagatcgggttaaatcggtgaaaacaaaaatatttgatatcagataaagataaagatggaattatttgaattgagtaatgctagaagttcctcacccctaagatatattgcttggtttgcttgagcatcagcttcagagttatgttcctgaataatatgagaagtttttattacaatgcaaaaaatggtgcagatcaaattatgctaattttgatataataaacaccaatatagtgcttagtttcaaaacaaataagtcaatctcaacacaccctgtaaacatgagttatctgagacgaagaaaacttttccatgagctcctttgcctgtttacacaagttggccatattctggtttttggttttccactcgcctgtagtctgccaaattaggaaactgaataagaaccacaagcatgtaaactcagaattgaaaccgaaagcagttgggaaaggaaaaatatatccaagtgggcaaagttctactgcatttatacaggttaacaaataagaatttggatcaaatttgaatactttcataatcagttgtccaatttttaacctcacaaactttgattgtttcagcacaaagcaaatattccttttcttcacttgtgacagcagcataatgtgtcaataatgaattaaacataaaatggacgacaaattacatgtattttagggtacactctcaacaaacctgcttacagacgagcatagagtcaccctgacaacatatatgtttaaatcctttcttaagagcctgtttaagtcctaaaattaatgcacgatattcagcaacattattcgttgcaatgccaaccccttcacgcaactgccatacctgcaaagacgaaaagttatgatatggctaataagcaatagattcaataatcagaggcccccgatttatttagagcattataccacacttccatccccagcacgcaacacagctccagcacctgcttgtccaggatttcctttcgaagcaccatcgaattcaagaatacaggaatcctggaaggaacacaaacaacaatattcattctcaaagctcaattctgcataaattaattaggcagcatcagtatggaattaatattgtcgtatcaatatgaaacactataaggaatggggagacatgaagatagttcaccaaagatcttaacaattcatgaactattgtcaccaaaccagaaagaataatgtacaaattgttttacacatattgccaaattttccataaaatacgtagtcacatgactcacatacacataataacagtccacaagagcactaactagatatctccagagatagaaacttacacaacgagaagaaacattaaatttttcaatgggggtcatgtaactatttgatttgaaatctttattttgagaaattctaggtattgaactacagccaaccttctcctgcaaaaataaataataataataagtgaatcaatactgccacatcatgattaagccaaaacagaggctttcacattctcacgtcaatctgatcagatcaaaagaccttttaatcactacaaacatgaatcatagccaagtttggcaagcatctaagcacaagattcttaatttgcattcccaaatatgatactgaaaaacagaaataattatttgaaacttatcaagctaaaatagagacttcacttcacattatcatgtcaatctgatcagttcaaaaagccatttaatcaccagaagcattcgtcatacaagttatatatgaactcccatgtttggcaagcatctaaccagaagattctcaatttgtagatgatcctaaaaatagatataattctttgaaacttataaccgatagtttattatatttacatacagatctattcctaatatcatatcaaaattttcatgaagcacaaattgatgtagacttacagcaagctctactaactcaagtgcttcctgccatgcctctggcgaagagtcatcgtcttcctcaaaggaagctggttgctgagagaaaaatcagtgaaaacaacaccattaacacaacaatataagttcagatttttagttatgacgtacaataatcttgattcttcgcacaaatacaaacctggtaaggacaagcaacaagtttcccaagttttccatgaagattatctttcatatcattgacactaatagagtaggtagcgttcttaagcccctgggagacaaggaaatcctcagcctccttggacaaattatagcctttatgcacactgatattaggatcgtacatctacaataaataaacagcataataaatgaaagaagccaaaatctttttcatactattttacctactcaaaaccagaaaaagcttcagcttttacataaattctttcgagaaatcatttttccacaatacttttcaatccactgtaaataagacccaaaaggaaaaaaaaatgtaatgggtcagtgaagaaaataataccgatgatcggacttgatcttggcaatctcttaagctcctatatatcccaatcgtatctccctttcgaagaatataaaaggcgttgctttcttcccccatttcaacttcacataacgatcaacaacaccctttgtttttctatatttaaatattagtaataagagaatgagccggtaattgaaaatgatgaacctggtggaacgaacgaaccacaataatcaaatcaagggtttaatttgctgagcaaaatgaatagccttgagaaatgatttcaaaatggaaagagggaaagagggaacaagccctaaccctagccttactgtactctttttgctacggctagtaaccaataaccaccaccaagtctactggcgggaaagacccatcaattatagggcttcattggcattaaattggaatatttggggcaaaagtctctcgacatttgtaatcgttacacaaatgactcccatcaagtagcgtcaaaaatattttattttaaaattttgttacagtcgtacttttttagctgttaagtaacaattaagttcgttaagtgtttaactcagaaacatgtggctatatatttttttagcttatttaatacgtaatctaataatatatcgccacgtatttctgagttaatacttgatggccaaaaaaatatacgattgcaacaaaatcgtaagataaaatacttttgtcgccactttttaactccattagcaaactgtttaatataaaaagtaaaaacacacaaggtacactttgtaaacaacatcttaccgtcttcaacaaacacattaaaataagaggatatgtaaccctccttccatgtagataatcaatatcgaagtgcttgcactatcaaaaagtagtgcgtctatgcttagtccagctcaatgcttctttaagcatgatggcttccgtaacttttgggctaacaacctca

SEQ ID NO: 1636 - DNA, 3303 bp, Cannabis sativa
aatctttattcccctaaatatttttctagcccgtggaacaccaatttctccgccggcgccggagttctaaaacaaggtaatactattctttagttttttttttttttattattatttattttcgtgtcacattttatatacagtatgtgaaaaacaatgtatgcatttatttatttattgagaaaaatgatatatatacaatacttctcaaaaggaaaaatacggtatatatacctctcaaaatgaaatatacggtatgtatataaatgtcgtgtatatttatttgttaattatttatttatttataatgggcattgggcattgggcagtggccagtggtgtctctttcggcagtggttttgtttctttcttgccagtttgattttccgtcgaggtatgtatattgtgggaatgattagatattatgatttgtgtttgtgttaaattatatacatatattatttatttacatatgtgatgttcgggttaaattagtgtaagtttatgtataaattgattctccaagagtgtatgtcaaagtctaaatctgcaaatagagttgaacatttgatatttaaagtatatttggttgaaaaaatgtttggtttgttatgctatttctgcttctttcgtagtttggctatttgtttgtactgcttcttttgtttattaagctcaactgtaaagtttcaattcttgaaattcataaagagcttatttagataagacaacagagagactttaatcataagtgttgaggagcagactcagagtcctttaatctttcttccatttctttagtttcttttatatcaagcctttgctgctagttgagatttggaaaattagctgcattaaaatgctctctcttttttggtgggtagatttcaattccagtgcttgaaaagaaattacaaattagagatttaatgctgctggatgtcattattgaatttgaaagtttgaatattaaataaccatacaagagtagccaatccacaccttgtaattggatttttatttatcttcaatggctatttctgcttcttttgtagagttgtttgtgctgcttcttttgtttagagattagatattgtgattggtgtatgtttatgtataaattgattctgcaagagtgtattttaagctaaatctgcaaatagaattgcaaatttgatatttaaaaatgtttggttgatgaaatgtttggtttgtgggatagacttgtttctttctgcttgtagtttgtactgcttcttttgtttactaaaaaaaaataaatagtaatataaattggtattgagtttgaaattaatagaaggtttaattatttaagaatggctttgaggttgtgtttttttatggaattaatacaaataaaattgtttgtgtttgtaaatgttattgatttgtgttgagattatttttagtgttatttacaggtttaaaatttgagtaggttagaaattctttgttattctgatgaaattttagtagaattaaaaaagacttcactaattaatttaataaattaataaattttaagtataaataataaattataaattatggtatggttttaaaccaaaccaaaccaaaccaatttgttcttaagtggattggtttgattagattagtttggtttggtttgaacatttaattagtttggttcaattttaattttaaaaaactaacattacatagtgtgattcaaaaaaaataaaaattcgaacaaaatcaaaccgtgagcacccctgatttatacatgatttagtaataatttttttttttgtttttagcattaaatgtctgcagatattgctagttatcatagcggagatagtgatgataactcgtcagatcctattgttgtccccaacacatgtgagtcttctggtaattttttttttaattaaaacgcaaaagtaattaaatgaattatattaatgtattattttttattttatttttggtataatagcttccaaaaagaggaaagctcgtggtcaaaatgttctagttgatctagaggaaagaagagctaaatcttcagtgccactgcctttagaggtggatgtggtttcttctaaaatagtgggaaaggagagtataactttccctcgattgataggaagagaggttagattgcatgtaccaggatggtaccatagttgggcaagtgttcctcaacaacatcaagacttagtccttagtagagttaaggtaaaaaattagaatataaatctttacctaaattactttatggttaataatttttattaattttgttctccaatgcagcactattacgagatcgacaacaatgaacatgcatcgacaattttacaaattacattagctgagatggctgataaatataaaaaaagaaagagcttaagacacgctcatttcaaaaaattctacaaaaagccagaagattttgaacaggctgtagataacccgcctaatgatgttaacgcagaacattggcgacaaatttgtcaattttttacgagtcctgagtttattgctcgttctcaacaaaacaaaaacaatcgagaaaagagcaagtaccctacaacacaaggatcaaaatcattagcaggaatgcgttctgaaaatgtaagttaatatgtctatttaattaagttatcttaaattacaagttttttaacgttctctttatttttattagcgcaacgttggctacattgaaacgtggaaagaagctcatacaaataaaaagacgaagacttttgtcaatgagaatgctcgacgagattatgtatgtttatctaattatattcttatattcaaacagttgtaactttgttttgattctaacttattcttaaaacaggaacggttgaaggcagcttatgaaaagcgagctagtattcctaattctggaccagttgatgagattgcgatacttcgtgaggtgcttggtgaaaggcgcggccacaaccgaggagtaggtcgcaaattgaagggccaatcctcaactcatcgcactcagcccgtacctactcaacaaatgccaatggacccaagagtggagcgagagcttgctagattgagaagaaaaatccaacacatgagtcagaagttggcacctgaggatcgcctaccatctgatgatgagatagttgacatgggtccaacacatccaattgggccatctcaaacacacatgtcggtagatggatctagttcgtcttctcagcctatggctactcaatatcagcagtcacaacaaactcctcttcccctcatgtttcctttcatgtttggacaaccgtc

SEQ ID NO: 1637 - DNA, 4098 bp, Cannabis sativa
taactgttttagctttgctcaagttaaatcttttaagtgctttttcaacataagcttcttgggataaccaaagtttcccaaccgggggcagattgagcttggaatttttggccagaaaggatttgagtctgttaatgcatgactctaggtcattagagagaagagtatcgacaaaaccagagcagttgatggcggagacctgtttaagaacgcagagatctcgggtttgggaaatgagttcgtccaccatagaagcgtctgtgtctgagaggaaagagaaatcggccatttctgtaggcgatgctttaggtttcaaaggttttcactggtaacttgtaatggagttttgggagagtaacggctacttcatgagtgggccagtaacgactactttttttttttttttaaatgagtaacgactaggctacttcatatgctatttttgttttattgaaaaaaattcttaattagaatttttactcctgaattttaatgtgtattaaaaatacatgaactattaatgaaagtctaacattgatgaaagtttagaggctttaatttgttacatgtgggcatgatttgataaatatcacaatctagggagtataattcgacaatcacaaaattagtaaaattgaatgaaaattgacaaatatccttaaatttaacgatctcaataattcttggagaatttttaataactactaaaaattcaaaaacatgatttattacataataaaaattctaattagtcaaaaatatatatatatttaattaaacttttgcctaaagaaaatatttttttttgttttacatttcttttttatgaacaggtctatacaatctccacaccttgttttctccagatatgttaaaattatcattagatatgtgcaacactaccatgacaacataataggttcttagagtttgattttaatttatgatttcgaagccattgaaattgttagtgggtattttgtttatgtttatacttgacagatttatgtatatacctttaattcttgaacacattattgaattatgcatatatttctagttcttaattcacatattcatattgtcctttatgtatttgccaaaagaaaataatccaagtacttgttaataattgatgagttggacttggagcctggcggaacatataaaacttatgttaggtaaccattagtctatacaaattaatattaaatgcaccaccaaaaagacatacaaacaatccacattggttgaagttgtaattaattaaataagtaatattgctttgtcatgatacaaacaatcttttggcctattacttaaataattcatgtatttgaatagtcaattaatttggccaagttgatgtaataatataatgtttaatgtttttaatttttctcttattacctttcaatagcaattaagaaacatctgataatcatttattgtacttgtgaggagaagagaatcatggctgtagagttggtagtgggacctgttattgctgcttctgttgggtttttgctgaacaagatcgtttcttctgaagggtcaagcttcttaaggggaaagaaaaactctggttttgatgggcttcttgacaagctgaagacaacattgctatctctttctgaggtacttggtgatgctgagcataagcagatgatgagaaaccccaaagttgaggagtggctggacatgcttaaaattgctgtggaagatgctgagaacctctttgaggaaattaaatatgatgctctcaaacataaggtggatgcagagttaaagcctaacaaaaccaaggtaaggaaattcttctttagtttaaactcaactgataaggacagaaaaactgatatgaagaatcttcttgagaggttggaaacttttaaagaacacatgttcatccttcatttgggaaaccgtgtggaaaagattcaatcactgaaaccaccctcaatatcatctattgatgattctgagttttttggtagagattatgaaaagaatcttttgaaaaatttgttgctgtcagaggagataggtagagaaaagatatgtgtgattccaatagtgggcttgggtgggattggtaaaactactttggctcaagctgtttataatgatgatgaagttaagaaacattttgaacacaagacatgggtttgtgtatcagatgagtttgatgtttgtaaggtaatgaaaaatgtgcttgaagcagtaactagaaatgtttctacttttgagagcttgaatgtgatgcaagagaagatacaagaaaagttgaaggataagaaattcttgatagttttggatgatgtttggtgtgaaacatttgacttatgggatacaatgagggtgattttcaaagtgggagctcaaggtagtaaaataatcgtcacaacaagaaatcaaaaagttgcatccatcatgggaacaactagttttccccatcttaacgagttgaatgaagaagtttgcttggagttatttgtaaagattgtatctagcaataaagaattcaatatggttttagacttgaaaagaattggcaaagaaattgttcaaaaatgcaaaggcttgccattagctgtgaaagtaattgcaaggctcttgtgccatacagatgttaagcagtgggagagaatagcaaagagtgatgtgttggattttgcagttagagaagataacactcttccggcagctttaagattgagttaccattatcttccatcacatttaaaacgatgttttgtttattgtaccatattccccaaggactatcaatttacaaagaaggaaatggtctcattgtggatgatttttaatttgttggagaagcaatcaagtggaaataaaacaagagatgaactgggaaatgagtattttaatgatttagtgtcgcgatcattttttcaaccatgtatgaatagttatgaaggagatcgtttcgtgatgcatgatctcatagttgacttggctagttttgtttctaaagaaaagtttatatttttagacagaaacaagttgtgtggaattgaattgataaagcaagcaaggcatattgtagttgaaggtggttctcatatgatattcaaatctatctctcaagcagcttgtttgcatacatttttgtgtgcgggcagatctgtccagattccagacgaattagtgcagcgtttcgtggaagaattgttgaagttgaagcatttaagagttttatgtttagtttgtaagagacttgtctatgaattgcctgaatcaataggtgaattaaggcacctctgctacttgcgttttggttacacttcatccatagagttgcccaaatctttttccatgttgtacaatttacaaacattaataatagatgaatgtttgaatctcactaagctccctaaaaatttccataatctaattagtttgaaacatctcgacattgttgattgttctaaactttgtacaattgtccacacttgggcaattaccagctcttgaaactctttgcattgaaggatgtaaaggaatagagagaatgggtgttgagttttatgggactacttgtacaccatttgcatcattggaaaccttgaaatttgatggactggaaaattggaaggaatggtcaatgccaaatgctgaagcttttccaaagttaacatcacttgctatacaacggtgtggaagtctcttaggagacttgcctttccacttaccatctttgacagagcttgatcttttaatgtgctcaaagctttgttcttcgcttccaatgatgccgaatgtcagtaaagtaagtatcaagttctgtagaaagcttaaagaagttttagctgctaacatatacgaatcgttccaagagctttccattgacttatctgactctgaaagctccattgaattgcttcatatagactccttccccaatatcaggactgtcgaaattgactggtatgaagatgtggagtctttcttgctatttaaaagccccataaacactctatctactctttctatcacaggatgccataacatcacattattatctgataacaacctctgttgcccaaatttgactcaactggagctctcaaa

SEQ ID NO: 1638 - DNA, 1054 bp, Cannabis sativa
ataaaaagtatttttgattacttagacaaatttgacacgtgtcaatgtgggtagttcaaaaatatatgagttaatgaggataagatataataatgagtgataactgtgttgagctctcaaatcttatattaaaatggcttattgtatctcaaacagcaccaccataggcatattgtatgagaatagtaggagaagaaaaataaggccatataacttgtttgggtggaacataggcaagaacaacaatgatgaaatctcaaaaactaagtaccatgatattgatcttcctttctccccttcactcctcaacaaaactttcttaaaaggtactcttactctctttccctttgtaccattttacattttatacccattatgtaatagaattgctaaagggtactagtggtgcaaagattttttgggtctgggttggggagctttgggaccagtgctgtctcattcttgagttggccattgttattagtgtttggtacagtttaatattggtaccacgtattttcatttaataataaaattaatagttttttgtgttatttaatcctattatatgacactaaatgagaaaatatcattttgttttgtgatatgtgagcaaaataactagatagggagctaaaatgctgctatagagcctccatagatggatttagtgcaagtgatttccacaagtattgtgatttcaaaggaccatgtgtgataattgggtacacaaacaagtccttcaaatttggtgcctttaatccagagggatatagaagcacagacgattactacgactcttttgatgcatttctcttctattggatggaccatattactactaataataatgatgatgatgggcctattgttctgcccaaagttgggggcagtggtgcagccctttttgattatgcaaggggtgggcctcaatttggggctgatgggcttcttattgggcctccattagcacctgttatgggtggatttgctggcccagataccaattcgggtgtgggtgacctaaggcaagctaaatcaagattgggattgt

SEQ ID NO: 1639 - DNA, 630 bp, Cannabis sativa
aaaaacagcaaagccacacataacatacatagaacaacattattaagaatttgggtccacgagatctagtaatatatatttggataggaatactattatgaactataatatgcatgcactagcaatgaaaaaagaaacaaataaaaaatgtgatactagccaacaataaatattgcaattatggctgcaatatgtttataagctacccaataacgttgactgatcgagtaatagtacgtagcaccacattcattcaaatgccctctacccaaggcaaacttaattataacaaaaatgttaacatgcataccgatggaaaatatttagtatatatgtttcccttatacatcttatgttcttttttctaattaacatatgtccacacatatatattattgataatgaaatatttaacttttaattgcaaaaatttcaatagtgctataacatgtgtacatatatttacagttaacatattaatgattcttaattaatttatttatagtgctcaactcaaacacgtacaattcatcatcaaaaatactattcataaagagagacacaacaagaattataagcatcaccaatagtactattattaagggcaaaatatctttactacaagtatat

SEQ ID NO: 1640 - DNA, 1043 bp, Cannabis sativa
ccaccccacctcgtcgtcatcatcaagctcctgacaacccaccacaacaatttcagattcccaataatctgcttccgctcaacattcgacttgatcgcacgaattatgcttactggcgatccctggttcttccctcgattcgtgcacatggtcttgaaggtattcttcttcgcacaatgccacggccacctgcgattcatcccgtcacccgaaatcccaatcctgaatatgaccattggggaagatgcgatgctctaatcatgtcttggctcatgaattctctgtctgaagccatgattggtcatgttctccattgtcagtctgcatctcaactatggaacaccttctctgctctgtttactacacagtccaaagccaaagagcttcaactccgatttgcaattcaaaccaccaagaaaggcttcctcaacattgacgagtatattctcaaaatgaaaaatcttgctgaatctttagcagctgctggacatcgcctttcggatcaagaactcgccatgtacattcttggtggtgttggccctgaatatgaaactcttgttgtttttctcacagctcgtgctgaagctctcactctggaagaagtccagtatatgttacagaaccaggaaatgcgaatcgaacaacatcaacaccctactttggatcttccccaagcaaatcttgctcatgttaatggcagaggacacaccaatagacggggttctgcatcatcccgtggcaactacaatggtcgtggtcaaccaactgggcgtggaaactccactggcccctctcgtggtgctgcaactggtcgtggacggggcaacaaaccagtttgccaaatctgtggcaagattggccatcttgcatacaagtgttatcacagatatgatcccgaacctgcaaataatacatcaaatccaggttcgaacaacaacaatcctcaagctctgatttctgagtccaccaactcaacatataacaatgggtggtatgttgatagtggagctacgcatcatatgacctcagattctcagcagctt

SEQ ID NO: 1641 - DNA, 3255 bp, Cannabis sativa
ttgtcttaaggtaaaaatatattgacctcacagtgtaaccaaccatcaatcaacgaatatatcgaatgctgcactataatctctcttttagcaacatttcatgtgaaacactatttctgaagcattttgtctatgttcctagcagagtatgtaactaatcactaatcaccgagttcatttgtaagcctgttaacctttcattttcaaaaccagaattctcatttcttttcctgttttaaaataaaataaataatacaaaaattacaaattgaaatcacagtttggtcttcgttgtgtttctttcttcgttcacctttattacacaaatacgatcaaccttaccaactgtaaaagttttttcactttctagacctatagtgatatgatccaaactgttgctgtcaggttactaacaaatacaacagtatattataatagtaataggaataatatgtgttccagtagtgaaaaaagatgataaaagaaaaacttgtattgacgaaatatgattcacacaatcacaactccacaggtttcgagagcctgggcctctcctattgatgctgaaacaaacaactagttcaagcatacccactacaccactcaacacatatatatagcactcacacactcaccaagccaaaccaaaagctaacaataaacacacaataaatatactaaacaccttttacttctcctagcataaatgaagcgaaccaagtgtctaacatataggtaatcatgttatttgacgttcaaagcttctgactctacatatctccatcacatgaataatcaagtgttgtctgcttaacaaaccatggaagtttaacttaagatctttaatttctatttcacattctacataagcaggtgaaaacagaagtcttttaaaaatatacatgaaatagaaggaagcagtcatgatcacttccaaagaaatggtccaggaaaaatttgatatacttaaggacagatagatattacttactcgggaagactttcatacgcagtcaaaacattccatacttcacgaacaggagctttaactgttatactagccaccacacatcgatggacacctccattttccttcattcaagattgttttgtcaacaacatgaagaaagaatctcaacaggaataaataaacagtaagaagagtagtttggggccaaaggtaccaataaaccatcaaatctacgaagatgaacctcatccaccaagccatgcctatcaaggctgcaagcttttcctaatatgcccaatttactgtttgagtcactaaaagaaggggtcaaaggaccaacattagaggttaagaatccctctttgagctctgcagatgatatattatcctttccattcaagagattatcgacattcagtttcagtgaactactaacacttgtagaactttgagtgaaggagttctcagtaagtgccatgttctgattccctccaaaacttttttcggctttacaagccaaggctcgaagattaacaggaagatctgatctaatgattcgttccaagaaaatagcaggaaagttgaatcttggtatcacattaacttcatatgataaaatagccgtagatgatctgcagtaatcaatagacaagaaaattagaacacaatacattacacaaatatttaaatgaacatgacatatttttaacaaactgttagaactcttaaagggcctgcaaagaaccaagtaggcaaagctagattgcccataatatcaatagttgtgacgtttattgaaaagaaaggtaatttatgctaaggtccgtattaaatgattgcaccccaaaatattaatcactaatcagcattttagcttgttttttgtcttcggtattttggtatcgctattcattaatgtcaatcattattcccaattcagagggtcaacaaaatctaacatactccagcatatagtgacaaccttactatgtattcaatcaacttgttcaattccaaataaaggcattgccaacatgcttaaagttctcattatcattaatatttttgagagcattacatccaaatagtacctggtaccacatcttacagaccattggccttcaaactttttgaagtccccatcgaccatagaaaaaagaagaacacgatcaaaatcctgaaaaagaaatttaaaagagaaattacataggcaaacaaactaaaaatgatgaaaactaaaagatagcaatctatgtatttaaatatatattatagatatagatgtgatacgcatacaataaatgtgatataacccacatgggtgtaagttgaatcgtgaagctgaccaaattgtaaggttataacttgtgaggatttagatgattactgaattgataatctcttgaaggtccaaaacaacccgagcttcaatatgccaatagagtgccctttgaaaacctctttgttccaaccatattcgccctggatatgggcacggaattctcccactgtcaattttaacaccacaatcaatcaaccacacaccacttgctcaaaaactgttctattcaatgcaaatgagcagtaaatgaatatatataaatattaaacctggagactaaattaggaacgaaatcggctaagcgttcgtaatcggtgagagcattccagaccgattcgacatcggcatggacaagagtttcggccttgattctgcgttctctccatgaaaccacttctacttcgcaatgcacatttgtcttttttccttcatcctcttcgtcattttccccttctacttcttcttctttttcttccttctcttctcgcttcctctggctcttcatgttttggtttcctttgttgttggaagaatattgagtgacagagccgttccatttggaggaaaacaccatgaaattgatggtgcgagcggtgtgtcctcctggggagagttgtacatttctaggaattggtatggcggcgaattggagaggaagagttccaaagttgaagtttgaaggcttgcaagtaaccatggagtaaggcgagagagagtgtggtagtagactacagtaacagcactgtacaaacagatatttctttcttttgactcggatagtgagtcgggtggttttagaagccaaaagaaagtgagttcactcgaccgttaactgctaaccacatgtttcggatcctttgttgtggcttgtgtggctccaatctctcccgcctttagaagagagggtattttcgtctttcgataccttatttcaacagatttt

SEQ ID NO: 1642 - DNA, 1869 bp, Cannabis sativa
aacactacaccagaacccctccactatcgagcaacaacaagcagtaccagtgctagccactaaatcaggcaggacaataaccaaacctacatatttgctctactgttgtgccatcaaaactcaatccaccagcacgacatatccaataatagattacctttcttacacaaagctctcaccacgattcagagtagttgctcttaccatcactcacttacttgatcctacttcctatgcacaagcttggaaagataaaatgtgaaatcaagtaatggaattaaatacaagacaacataccattagcaacatatgggtttatagaagtaaatacaacccagacagctctgtagaataatttaaagctcggttagtagaaaaaggctacacacaacaacaaggtgttgattattttaaaacctatgcccatgtggccaaatttagcacagttaaactcttacttgctcttactgtcatcatgcaatggcatctacaccacatggatataaataatgtatttatccatggtgatttacatgaagatatctacataaaatttccacaaggtgacacccctaaaggcattgttcccaaaaatgcagtctgtaaattgaagaaaatcctatatgacctcaaataatccttgtggtatgtgaaactaagcaataccatattgcaacagggatttattcaatccaacaacgataagtcccttttcataaaacaaacaacagacattttacttgtcttattaatatatgttgatgatatcatagtcgccaccaatagtaacttggctcttcaataattcacatcaactcttgatgcttattttaaactcaaagagcttggtcctttccacttcttcctaggtcttgaaataactcgctgcaatagagggatattagtaacccaaagacccttttaccttacaactccgacaagacactggccaccttggcacgaaactagtttccacaccaatggagcctaatgccaagttaaacaatgaagttggactactgccaactaattctactcaatacgaaaacctaattgggaagctaatctatctcacaatcacacgacccgacatcttgtttgctatcaataaactaagccaatatctccaagaaccacaggaacctcaccttaagcagccaattgcatccttcactatttcaaaggcactacaggacaagggttattcttttacgccacatcatctgaaccactacacctccaagcatttacatatgtagatttgggagcttgcttagacacaatacgttcaatatcaggttattacatcttccttggacaatcactcatctcctggaaatctaagaaacaacaaacgttgtcgcgatcctcagctgaagccgaatacagggccatggcaaatgcaacatgttaactaacttagcttcactccatccttcgcaatttcaacatcaatattagacttccatctactctgttttacgacaatagtgttgcactccacatattagaaaatccaatttaccatgaacgcacaaaatacatcgaaatcaattgtcacctcattcgagagaaaataaataatgacaccatcaaaacaaaccatgttccatctaaatccaacacccatggacattctaacaaagcctctcttcctttctcattttcaagatgagtgtcaaaaatttctacactccatcttgaaaggggctattaaaaatcattatgtctgttattttttgttacaagtttactagttagttgtaatgtaatcattctctatataaggattagttcattcccattgtaaattaatttttttttttttttataataatgaaaatagtatattgttggaaattattttac

SEQ ID NO: 1643 - DNA, 1971 bp, Cannabis sativa
aagggaaaaagcagtgagacctacacaaattaagagaaaataaaaagaaagattcttccccatttttataaggaatacttttcattttcctaacttaatttattttaattttattaattaaaaatgaaaaaaaaaacaaaaataaatatgccctttaaaaatctataaacaaaaaataattacatgttataataatgacaattttgtcaaaattaaagcatttcgattatctttcctaattatgtaaacaaaataatattattttggtttttttttcagatagtttagtaaacaacataataaatatttagtatacatcataataaaatattatttctaattatttattattttaaactgatacatttctctcattaattattaaaattttaattacagttttgtaaacgcgccataaaatttatcccatcatatcattgatcggttggcatcaagaatggaaccacttcgacctactctacaaattggtgatcttaagatattggaagaatatttatttttaccatcactaaaaaaattatcgaaaccaaaattaaaattttagtttcttttgtagttaatttgttactaaataagttatcaaactttaatattaaaaaaaaatattaatatacaaaacaaatttcataaattataaattatgttttatttaatatttcaaagttattaaacttcatagaataagttaaattaccaacagaattaactttatgataattattattatttgaaattacacatgtatttcctatcataacaattgactaattaccaatatcctcccaaccatgaatttttctttgcatagcacgggtaaagataaatggctgaatattatttaagaggaaaatataccatttgagaagaataaaacctgaattatagtcaagagaccattgcacaagatacttataagatataaatagattttaagtagaaagaaagagttctaggagtggaaggaacaagatataagagatggttagttcctaaagtatttatgcaaaaggagggcatttactacaatgatatttttttctccgtggtcaagcaaacatcaataagagtatttgttttcttagctgcagaatttgatcttgaggtagatcaaatggatgtaaaaattgcattcttatatgagattaatgatgatccagataagatttgccttttaaacaagtttgtttatggtttgaacatggctccaagacaatagaacctgaggtttgatgaattcatgatgaaagttggttataccagaagcaattatgacacttgtatgtatttcaacaatcaatcttacctcttattgtatgtagatgacatactaattgttggtaaagatatgaccaacactgataagattaagtctcaactcaagagtgagtttgagatgaaggatctaggcgaggccacgaagattttcgaaattgagataaagagggaaaaaccccatacaatcatgttaagccaaggcagctacctcaagaaggtaatagagaaatttgggatgacttatgttaaaccagttgcaactcctctagctcatcactataaattgtctcaagagcagtctcccaagactgagacaaaaagaataaagatggatgatgtgacttatgctagttggcagtctcatgtattccatggtctgcaccagacttgaccttgcacatagcatgagtttagtgagcctattcattacagaccctagagaagaacgttggacatcacttaaatggatgttggcatacatcaaatggacactaaacactggtctagtatcagaaaaaccaagtaatttcaaggaaaggtgactggttatgttgactcgaattatgctgcaaatttaaaaactagaagatccttagccagatatgtgtttagtgtgtttggaggttgtgtgagatggaaatctaatctcttaaaggaagccatttggcttaaagg

SEQ ID NO: 1644 - DNA, 1742 bp, Cannabis sativa
tttggtggttggggaacaaggagaaagataggtatatggctcttaagtcatgggattacatttgccaaccaaagatgaatggggggcttggtctgcgcaaatttgaagatacaaacattgccctgctgtcaaagttggcatggggtattgtgacaaatcagaagaaactttgggtggaatgtctcaccaagaaatattgccactctcaaaatttttgggctatccaaccaaaggaaggagactctgctacatggaagagtatagttgcggctaggagtacgattatgaaaggaatcactactatcgtgggaacagggaattctgttgatttttggcaacaaccttggataccttggttgaactttgatgaattcagagatcttatggggagtcttagagggaagggatacacagccaaaacagtggctgatatctctgaaggcaatgaatggaatcaccatgtggtgcttcagatctttggagaggagatgggcaagaaaattattgcaattccaagattaccgcagcctcataaagatcagatagtgtggaagagcaaccgcaatggtaaattttcagtcaaaaatgcatatattgttgatcatttagatcgttttaactctgcttgtaggttatggaaatggatttggcactctagaattcatcctcgcattgccacttggttgtggagagttttgaatgaggccattcccatcaagtctaaacttcctttccttttggaccaacactgctgtctttgtggagaaaaggaggagacttgtattcacttgttcagagattgtccctttactaaaagtgtttggctcatgggtgaattgccgcttaggattgacatgattccgggtaacaccattgttcaatttgctgaaaacttagtgtctaacttctctgatcaaaaacccttctataccttgctgtattttgggtgtgtctctatggaagtttggaatcaaaggaatttgtcaaggattaaatctttaactcctgatggtgtcttcacttcctcccgtattgctgcgatgttcaaggagttttcgggcttctctgcccctcctaccagcatctgtaccaacgggtatgatcctatgtgtcttaattctaggcctacaagatactcgttcttcactgacgcctcatggcgtgatggcaaagctggtttagcaatgattttggtgaacaatgaggataagtcgtggtactacacttcccaaagtgttttatccccttcggcacttgatgcagagtcccaagccattctccttggtttatcgtgggtgtcaaagctgaagttggaagatatatccttattctcggactgtcaagtagcggtttctgcttttgcgaaaaacgattgtattccggattggcaaattactcatatttccttagctgttttagatattgttaagacttttggttcgtgtaagttttattttattaaacgtgaacttttatctgcagtggacgaattggctagaagagctagaatttctagcccagatgccagtatttttcaaggggagggaaacccccctgtggttcccacttttcctgtttagttaatgaactttcgttccttcaaaaaaaaaatgctaatttacaaaacatggttgtccacattatgtaagaacaaaatatgaaagcttgtagtcaaagtcttgattatgtaacacttgagattttttttctcttttttaaatgttcataaagacaatgttcaa

SEQ ID NO: 1645 - DNA, 1421 bp, Cannabis sativa
caaaagtcaaaagctcttaatattttaaaaccttggaaattggtgatctattgctcaaatatggctcatcgtttagtccaatggtgtgccaaaaattgatccaaatttggatcacaatatgtcatgatgcaaaatttgcatcacaataaatgcactactttaatatttactgtcatttttcatattttactattaaatttagttattttattaaattaaaaactttttacatttattttttattgttttatataataaaataagaataaaatttatgataaagttattattttatttttatatatttttcataaaacattaatgaaacattaaatttagcatcaaattttgcaattaggcattggagcacaatgctaaaaattgatgcaaatatatcacacaaagttatcttttgtgtcaaatataacaaaattttacattttccattggagatggtcttagtaaaatccagaaaccaactgcaagaacttatagtacaagagcacaataaggacagtattgaaacaaatagatgccaatacctgatttataaagatcaataatgtctgtgacagagatagagagtggctcagcttgcgaagtgcttggctcatcaatctggcctgcatagctacatgagcatcacccatctcaccatcaagttcacccttaggcactagtgcagctacctacaggcacacatattatctaaaaatcacattttatgacagaacaaagaaaataaactaaaacaaatgatgaaatcaacagagcttaataactgaaaccaaaatgttggtcagaacttgtttagaaagttcaaaaggataggagcatttcaaagaaactttctataatcatccatacccagaaaagcgttgaataacacatctaaattgtccgccagcagcatcaaataatttaagatggaaccttactaagaaaaattggaatacaaaagcaccttacttacactgtcaacaacaacaacatcaacagaaccacttcggattatagtgtcaacaagactgagcgcttgttcaccacaatcaggttgtgagagaaggagattctcagtatttacaccaatagcctgtgccagtgaaggatcaagagcatgctcagcatcaacaaaaacacagtaacctgcatcaaagaacatccagaataagaactgcattcaaagtaatatgtaacccaaaatataaattttgtttaaaagattcctttgtttagttgttaccatatgttacactccagagattataactagagatttgactgataagcaatgtttgacatattaatacaacatatcatacatatacctgaattgatgaacaaataaagaattagggaagtagatgctgtataagattagatagtatatatatgaacaaattataaaattaagttcgccc

SEQ ID NO: 1646 - DNA, 1081 bp, Cannabis sativa
tatattaatggaataaagatagggaaatttggatatggtcaaaaagaataagcaggcgatcgaagctcttataccagcaaaatctgtactaaaaacataattagagatttttaatagagaagtcattggcacgtgcctgttacgccgctaggaacagtgaaaaagttgcttggtgaagaggtggtgagcttggctcccacttttccacattttcttctttatgcacatgtgggtcttgtccatgtgtacagggatcatccgattttgtacgaagatacccacttggcatgttgcgccctttctttctactatatattcttttgccatgatgtgtgtttttttatctccaaatcccatgtcccacgatcgaaacaagagcaaaagagagaattataaagcagaggaaaacaacaaaacaaccaaagcacttcagttttttactttttagtgagcttaaataaccagtactaactgaagattagagaactcgcgtgtgtgatttagaccactccaaagctaatggaagatctatgcagtccttttaattggaattttcgccatgaaggagaggtaattacttacaaattagtatgattttctagaaatggtaaattgtcaccattatgagtaatgggttttgataactttcttgaaattttcagggaatggaagagttatggtactcccttttatgcaccacggtagaactggagacacaagttgaatcagcaaaagaagagattacaaagaaagaagatgaaattctaatacttaacgaatttctgagcagagccatcaaagagaaagaagaagccgaatccaattgccaaagcataatgttggacattgtcacccttaaaaaacaactacaccaagctcaaaaagagcagccaattgcgccacaaaatgggctaggagagccaacaaaggagagtcaaaaccactttgctgaccaaatttttgcctcttcttgtgagacgaaagaaaacgaagtcagtaacgaatcatgtgaagataacaatatggactcaattttgcagccaccattattatcttcttcttctccttctacttcttcttc

SEQ ID NO: 1647 - DNA, 2311 bp, Cannabis sativa
aaaaagttgatatggcaaggctgggaagaaatgattttggagcgtgggcgataatggcacttgatgactataggaggtggtggtggtggtggtagtaagctaaagatagccttggcgtgcttaattagttaatgaaattaaatgtgcttctatgacaacctctcatttattttcaaaacaccactttaaaattttataaatcaagtacataaaatttaaaattattagaatcttcaagtgtctagtattattttgattgctttagagattggcctattgatgagataacaaataagtatcatttgatctcattaattgattcaaggctctatgactacttgactaggaatgggaagtattattttatttattcttatactttgtttggaaggaacttattaaattgtatttggacaattgaaccaatacataaaatagttttatttgtgtagaattatttgtacttggcaaaataattttttttaaaccttttgcgacattcttcaataaatacaataaaatgtcatcttacatttattgcaatattaatattcaaaataaaatatttataacctaatttaacatcatcaaaataaaacccaagtaaattttaatttatctgaattctatcttaatttatctaaatcctatcttgattgtattatgttatatagtttatatatatgtgtgtatatatttattgtgttttttctcctttcaagggtgtctaattaacatgttagacttagtcacactttaaaggaaatgtgggtctcacgttcggaagcatggctatgagtttgttttcatgtatgggcccaagtgttttgttgtaagtaacaaagattcccaactcaaatgtaatgtttctatattatataataataataataatatgtgaagtaagtaataactgccaatacatgagtcgtttatgtggtagttcatgtcgtttactttgtctatagtcaaattaatcattttgactatatttccatcacaaaatcattggatacagctcaactgagttgtcagaaatcctcagcagattgtatatgtttttcaagctagctaagaacaaaataagctgttgaatacaacaatcggtgaatcaaagattatatgaaaataaaataaaatgaaatgaaaccgtcttataattaattctctgcaaaaacaaaatgattgcattcagtcccagttccccttgtgatgagataataacatttcttttctttttgtatatatatatataataagcaatacagcttaattgttgccaaaacaaatagctggtcagtacaaatgaccatctgcccgatctctactctcgcatcttcgaaacataagacaattaattctacgaaataaatatgattttaaaatcccaacggtaaaatacaattttaatcatttatcatcaaaatacaattcagatgaatgatcaaatttatactttatcgataatcatatttgatcgtagatttttaaaatataagaaaattctcaaaaagcaaatcaaatacaaagaaaaagactatatgtatgaatatttggattgaattggatttgatgagactaagttatttgaaattggcattacccttgtaagtctttcccacttgccaattagagggtgccacattgtaaagtgtaatggtttgtttggtggtgtaggaagtgattctaaaggataaagcttggccaccaagggctgagaaagcttggtaggaagctccccagttatggctcatactgatccaattggttttgctacctttgacccacattttggatatgtcacctcctcctcctacgttcattacatacaccaatagccaatacccatttccttggaagctaaatcttagccctccacttctcatgcaaggcactctatacacgcacacacaatataaaactatgttaattatataatataaacatgcaacgccctgaaaatttgtgggctttaggacaaaaaattactattattggaccctcaagaaaaagaaataagtggtatttttgaaaaacactaaaactatatatattttttaaaatgaaaaaaaaataatccaattaattatatacaacatttaaccgtacccaataacaatattattgtttatctaaacatctatttgttctacagtagtatgtattagttgtatagtcataacttttacacatgcattttatcacaaaaggaagtttcaagtttgagtctcttttcctaatatatgtatatatattaataaaagtagtaacacattgataatacctgcggtacatgatgggaacaatccca

SEQ ID NO: 1648 - DNA, 1119 bp, Cannabis sativa
tttatttataatattgagtgttcatataactttttagagtgcaaatataaaacccttaaaaaataaagttagggaaacggctcttcatccatcgaacaggtggcaataaataataaaataacctaatttcacggggtccgttttaaccctaattgaaaacgacgtagtttacggggtcgcgtctctgatactcgtcctctatataaagaggccgtagcttcttctcataaaccatctacacaaatcctaattctgaagaggctaaagaaaaccagagagtttcagagagagagatagagagagcctagtttgattgatcagctactgcggtgagccaaaaaccattgttaatcggaaaaacttcaatctctccgctgtagctgacttattcaatctctttgaatactctgaaaaatggctcgctctttctccagcgctaagattttcacctctctcgtcgttgatggcgcctctaacgttatcagcaggtattaaaagatctacttctccttccattccgtctctgttatatttctattcgattttgaaaagaacaataaaccgatgatagtaatccggagtattttcaatattttctctcttgccaaacagatctggccgtggattcaaaaagtgaataaataaaactaattcgctatttatttattttgaaactgtttcaggcgtggattctctgctgcatcacaaggagttgtgtcgagcgtagtaagagctggaaccgcagcaggttctagaaccgcaacaaagaaatccgtcgaagaaaacaccgagaaggtgtcgtggatccctgacccggtcaccggttactacagacccgataatggtgttccagaaatcgacgtggccgagcttcgcgctacgctcttgaaaaagcactgatttaatgatttaatttatcagtaaatcaatatttttaagaaaagaaaaattaatatttaaaaatatcccctagagagacgtatggggagttacttggtccgagtcgcctgacactattcgactcagtgggtaggggctgtcgttttcattgggtgtataatcattttaattggaattcgataagccgttggttgttgtgggtggtggtggtatatgaaa

SEQ ID NO: 1649 - DNA, 779 bp, Cannabis sativa
taaaatttaggtcaaaaataatattaattctctttttaatctaaatttaacacaaattttacactatttattagagatagttgtacgtcgctatttaccccaaaacatgaaaaaaaaaaaaacattgtttcttccttttgtaaattaattaaaccattattatatatacttacagtttgaaaaacaataattaaattattgtattatacactttaaaaatttctttttataccatatttcatgttgtttatttatttacgttttgactttcagtgttgttgttgttagttaaatttaaatgtaaggaagaattttgtatgataatgagatgttgaaactatcatttcaccattttttttaaaaaaacttcatatgtttattttaaagctgtaacatgtaatattattatttattttttttaattcccccatcccaatgtttttagtaataattaggtggttaattgaaaataatgaataatgatctcatgagttttgtctcttcccaatattttattcagtaaataggtattcatatgtcttttactgagcatttcaatgttaatctaattattgttccactaaacaaaatgaatgaaagatgaatatgcatagattaacgaaaatccttcaaaaatgatctcttcatcaactttaatgaagtaatactacatttacctcagttttcggatttattatacaaaaatgatctctttatcgtctttaactccttcaaaaatgatcccttcatcttcagtttttggttatgtaatttattta

SEQ ID NO: 1650 - DNA, 757 bp, Cannabis sativa
cgaggtcgaaattcgcagccgaggttcggttcgtgattggtaacgccacaaaggccgccacggctgcaaacggtactgggttcggcgttgcggcgggagagggtgtttacgccttggctcagtgttggaaaacagtcagtgccgagggctgccgagcttgcttggataaggctagtgtggaggccaagaagtgtgtgcctaagaaagaagggaggagtatgaacgcagggtgttatctgagatattcgactgacaagttctataacgatgaggcagaagcagataacagaaagagtgagaccagaaattttctcagtaaccaaacagaattcatcactttttcttacgtattttacattttactttgcgtttcaggcagttcaagaagaaaaggaataattatagctattgttctagcggttgcagcattcttaatgctggctctgtttggtgcctatgcagcctatgctaaaataattaagattaaagccggtatgcatgcatttttactttctgttttcaacattttccaggttgagaagaatgaaaaagcaaatagttgtaactatttttatttctgttgatttttttttttcatctagctcggcgtaaccttggcctgagttctttcagttttcacaagtctagtgtgagtttcaaatacgaaacacttgagaaagccacagattatttcagtccctcgacgaaaattggacaaggtggagctggttctgtgtataaggggactcttccaaat

SEQ ID NO: 1651 - DNA, 1176 bp, Cannabis sativa
gaaaaaatgaatatgttgaatctaaaacatgtcccacaccaatggaatcattgaaaatgctattaatttctgatggtgagcctctgaaatgtccaactgagtatagaagcataattggggtcttgctgtacctaactcatacacgacctgacataagctttgtagttaataagcttagtcagttcctaaaagctctaacaagtgcacattggagtgttacattctaaggtaccttaaaggtacaccacatcatggattgcatattcgatactgtgacaggctttttctaacaggtttttttgatgtagatgggtgtgttatccaaatgatatatatgatccatagcaggagtttgtgtgtatcttggggacactcttgttgttgtcatctgaaaaccaatcgattgtgtcatgatcaaggcactgagtaagaacataaagcattagcgcggtgtttattgaaatatcatgggtccaaggagtactacaataattggaatttcctttgtgatctacgtactccggtcacttgtgataatatgggtgctagtgctctaacatcgaacctcttgtatcttgcgagaacaaagaaacatagaattgcatgtgcattttataaaagacaaggtcctagcttagaagatataaattaggtacatttcatcaagtgagcaaattgcagtctgaatatctaaaagtctttcacaaagtcaatttagatttctcatcaacaaatttggtgttgttaccaccccacaaagtttgagaggggatgttagaaatatttccaaagcccataaagatactcaatttgatacttatgactaaaacatagtatttagatataagttgtcatatcactgatttagttattgtgactaagaacacatttagtcacaataaattgtgatttttgtgactaatacctatagtcatggacattttagtcacaatataggaattattatttataattagtgataactttttttaacttttagttataaattaattttgttatcattaaaattgagattttttgtagtgactttgtagagaattttgagtaataattgaggttgaggacgatatcgaaatcataatttaagtagttttattgcatatatgtgcttgttaatttgatatctataggtacatttgttggaaattattttac

SEQ ID NO: 1652 - DNA, 2623 bp, Cannabis sativa
ggcataaaacccaacattaatctcatgtggtttatttggaacgatcgtaataagactctacaccattcacatcctcttccacaatctattcttttggacaaagctatggattatctctatgaatatcgtcaagcaaacactccacctgccaagcctcctcaaagctcacaatcccgaagccaaccgtggctgcctccccccgaaggtttgttgaaactaaatgttgatgcagctttggatgttgataaccaaactattggtgttgggggcattgttcgcaactcttatggacaggtcattgctgcgattttggcaccgattaaaggagttttttctgtcaaagaaattgaagcaaaagccatttcttattgtctcaaatggttgcatcatatcaattgttcggtgcatttaattgaaacagatgctctcactgtctctcaaaatgttaactatcctcaacagtattatagttatttttatgatttagttcgtgatattatctatcagatgtcctatttccccagtatttctctaagatatgtctatcgaagtgtcaactctgctgctcatggcctagctagatttgctttaaggatagatactgagattgtttagcctaactagatttgctttaagagtagatactgatattgtttagaaaattgtttgtcctagccctattgaaactattgttgtaaatgaacttagtcattaatataaataactttctttaaaaaaaaattaataataatcatatcaatgccgatctgaaaattaagcaattatctgtttatattattgaatgaatattcatggttataaatctatgaccaagtcataactagaattactgtcccttttaataaataattctattatggtgaaaacatcattctaaagctatacacctaatattttgtgcatgcattgcgcatacaacttctattgcatacacaagttttataggtaacaacaccataaaacaagtcatgagttgtcacaatcggtgccacgcaatgacatctgaccacatcgccacatgcaagagctccacgtgtagaagacttaagatttgccatgtgtaaaggtcatataattacaaatgtccgaatttgtgagaaataaaaaaggtctaaccattttatatatgtaacaccattctcaccagtaaactacaaaataaccttaagaatggcgtcgaatcttagaccagtgttggcttatatagttatttatgtaaaggacgtagcgaaatccgtaacgttctacgaaaaagctttcggtttcagtgttcgccgcttggacaaatcccacaggtatatataaatatatatatttatatttatgaaaatatatttatttatttaattatcaatcaataatgggttagtttttaaataattactaggtggggagagctagagagtgggcagagcaccatagcctttactccgctacatcagcatgaaacagatgaggtgacaggatcggtccaaaccgcagccgggtctcacggtgagagacagcctgtcgaggtttgctttgccttctcggacgttgatgctgcttacaaggtatgtatccatatatgtgcgtttgcgttagtgtactaattggggtttgggatcttcttataatatactgagtttgattttatttttatttgtagtcccaacatgggagatgggacttaagtgcaacttccttaagaaaacaacaatatattattgaaaaattcttttattgttgcatctgttttggtatctagcacaattttaaaaaaatttgaaaaatttaacaaccgacaaaaaatggggtttaaaataagtttatttcttcacaagtttataaaataaaatttgaacccgaatgaggtcttaacttattttaaatctctgaaaatttatttaaatattttaaataactacaccataaataactattaaaaaaaattaaactagaaaaaaaaatctgaaacaattaagggtgcatggttcaccccttttaaaggagtgtgttgtagaaacactgtattattaggttatgttttgaatgtgataaatattattgtaataatgcagaaagcaatagagaacggcgccgtatcagtgagcgagccagaagaaaaggaatggggccaaaaagtcgggtacgtaagagatatcaatgggattgttgtccgaatggggagtcacgttcaatcacccaagcatgactgatttatttcaatagcaccctctttatgtatatctgtaatgtctttagtcaaaaataaagtcttcttcgaggctttttcccgtcgtacttgaaactgtaccttgtgttgtgtatctgtggatatacctttactggataaaggtcgagtctctttaatgagtttgcgactctaattaaatacagagctttaacttccactaggtaatactgtaataaattacatacgaagcaacgtcaaagaggaatgggatgaaaattaggcccattggtaacaatatttggtaaagatcaaatgaatgtggacaatgaagggtacacactaataggttttaagatcaattgaatatggacttaaaatgtgaaacacaaaaccccactttgcctatcacggccggttgtttcaaaa

SEQ ID NO: 1653 - DNA, 3307 bp, Cannabis sativa
agagagagagagaggtgaagaggctttactaaaataaatacttaaaaaaggatttctgttttattgggttgaaacccttcagtctgttctggccatcgccatcattgtccatttcttcagcttttacttactaccactttcttgcttctttttcatgcttttgttgttctcttgttaatgtttatctggctaatgggtttttgagaaaagactcagacaaccaagtttcagacttcaaaattgaaacttttttttattgggtcctcttggtaatggttatttggcttctgggttcctgagaaaaggcacagacaaccaagtttcattgttaaaaattgaaactttcttattaaatttgtttttggaattttgggttttgttatttgtgctgttttctcatctaagtctctgaacttagccgtttattgagaaaataataataaaaaaaatgactgtggaggaccaaaggggtgaagacggtggttcctttgaccggtttccggtgggtatgcgagttctcgccgttgacgacaacccaacttgcctcagaatattggagtccctacttcgtaaatgccagtatcagggtctgtcattcttattgttaattctcctttaattaaaaaccatattgtgattatgaatcctttcattacaaatcctcttttggtttttacattttactttagtttttgggtttaacagttttttcaagttttggtttcatttttgtgttgggtttatggttttgtagttactaccactaatcaagcaatcaaggcactaaaaatgttgaggaaaaacagaaataggtttgaccttgtcatcagtgatgtgaatatgccggacatggatggatttaagctgcttgagcttgtggggctagaaatggacctacctgtcattagtaagcataaacccttttcttacatatgttttatttttttgatgaaaaatgattacacaagcaaatgtaacctcacaattcacagttcattttttactttttgcactgatgttgagttgatcattagaaagtgattgtgttacttttatctgacattttttttactttgatgctgttccagtgttatcagaatatagtgataccaagcttgtgatgaagggaatcactcatggtgctgttgactatttgttgaaaccagttaggatggaagaggttaagaatatctggcagcatgttatccgccgaaagaagttggatccttgtgaccaaggcaagcattctgatcaaggaaagacttgccatgagtctggagaaggtgggaaaggagtgacatcaataggattgaatcaaaatgctacaactaataggaagcggaaggatcaagatgaagacgaggaagatgagggtgaatacgatgagcatgagagtgaagatccgtcgtcaacacagaagaagccgcgtgtagtttggtctcccgagttacataagaagttttgtgctgctgtacataaattaggccctgaaagtgagtttttctctaccacaaacataagtagggaaattcttattcatttgtttacttatccaacattctattatttcattactgcagaggctgttcctaagaaaattcttgacatgatgaatgaggaaggacttacaagggaaaatgttgcaagccatctacaggtatgttcctgtactgattatctggctcttgttactgtcaatagaatgcataacattgttggcaagcaatctttcttgtgaaccatattaatttgttaccggaaaatctataactttatcctatctatttcttaatatcttgtaaagatagctgttgtctgaattagaagtattggccaagtagtatagtattatttacctggttggactgaatggaatttttcaatctaactatcactgctcatgttgcagaaatataggctttacctgaaaagactccctggtgcaaaccagcaagctaggttggttgctgctctgagagctaaaggttgctcttatgtatgcatggacacactagacggctttggagatatgcacaccatgaatgggtctggaaggctggcaagctcagctctatcatcatcttacacacatggtgggatgcttggtagattgaactccccatctggtttgactattggaggaatttcttcaaatggactcatccaacctggtaatccgcaaaacttgagcagttctttcagtactcttggcaagtttcaaccatctatttcagtaaaccaaagtgcaagtttattccaagggataccaactttggagcacaacaagttgcagcagacgaagtccactgctcatattggagagttcaaccctttgaatagctcatccggttttgcagtccctgctagctttccagacttgcgagtgactcctagtagctcgggcactgcacgtagctcttcaagtaaccccctgattggagaccaatcttcagtcagagtgactccattgcttcctgaatcttttgacggtgaaagcagaggttcctctgactttttagatcataatcattataatgaaagctgggaagttgcagttcagtcatcaaatttttcatcaattactttattaagggagtgttcgagtcatggacagatacattctaacaacttgggcataccatctaccactgcacaaatcagtaacagcccacatgatttttcttctagtaatgcatttctggaacctttagcaggtcctagagatggacatggccatggtagcttcattggaaatggtgtccagagtacagattacacagaaaagcataggtgggataatcacaaccttaatcaggattttggtactctaaattccatagttgaccaattaaatgggtgcacttcatctgcctttgagagcaatgagattgagaattcagctatggttgccaaaacagaaactaatgaagatttcattgaaaacattgagtcattggatgatataatgagtgccatgatgaaaaggggatgattataaacttttagattttgttagtgatctacttgtacatattttgaggaaataaggatgcagtccaaactttcccggttagcctaatatgaccaatagtttatgttttgtcatctcagcttttatttttgtctttgcctctctcatgtgaaaaaaattccatttttcggttagctattattaaatttgtaaaacagcaaacatgcatatctctcttaattttctcatgttttctttttcattttatggttggaatggataacacttttagatgtgtaatatattttttgtttaatcttctttaacatgaattta

SEQ ID NO: 1654 - DNA, 1935 bp, Cannabis sativa
tgacatactgcagtttcatctttgtctctcaaccatgttttaactgcagctaatttaaactcttcatctattgtggcggcggcttctcttttagcacgcaccctttatgtccttacaagtgacactaaagatgacagcaaatcagctctagcttctgtcaatgtgaatgtttcactggttgaacaacttatgggttgcctattagaatgtgagcctggtctctcatgtgagctagtgaaaaactttattgctccatccagtacgtgcccaagccattatgttggtgttatttctgaggaaccttcttctacaccgtctccggaatacatcggtgatgtttccagatttgtgtggaattttctggctgacaaaacttctcctccaaaagggaagactcctgtttgctcagaagattgcagcaagaaagggggagtatgcactagagcagaagtagatggaaagggaatttgtgttttctccacaacaaggtaccttgctacagatagaaccatctttgttttcaagtccaaattatcatgccaagtaccttgatgtcttttttagaattggtttttattatttaggattacatctcaaacatacgttttaaccccccacattgacatgtttatgcctgcacttgaagcttaagcctttcttacaatatttgagcctttatggataggtcaagtgctgttttacatagctcaacatagactagaagtacttgaagaagttggaagccctagtgaaaagacatctgtgatttgtgttctttctgtttacgatttatctgtatagttgagttgtatgattggtgctattttgtttttattgctgctttgataaccattggctaagtgacatgttaactcaaattttattttctatacattagacaattatataataaaaaaatatatattttactttttggtcacaggtatgtaccagcatattctacacggttgagtttcgaatcaggaacttggaatgtcctgcctccaaattcttctgacccaatggggatgcacgatcctgtttggactgaaagcaactggaatgcaatagggctccgagtatacacagtgcagagtgctgcttatgaccgtcttgttctattgggtggtattgccattacaggtggggcgtaccttgcaataatacttactagagcttttgttgcaaagattttaaaacaagattgaaaatgggattgggaaaacttttctcaacaactcctccaaaatagaattttggtatattactaattgtgcatgatacaatttgtaagaatgcttaaggtatagcaaccatcagaatgaaaaatcgaaaaaataatacttaatcataatagaaaataatacttatcaaattttatccaattatgtattgagtaaaaaataagtcattattttatgatttttcttcctcattccaaaattattcttaaatttagttcattatgaaagattgttttgacttttttctttttcataactattaatttatagatttgaaaaaagttgagtatagaaaatgcttaaaataaagttatcatttttgtatcttatgatctataagagtacatgctcttttttgatttatttagatatttatttgtcaaaaattatatgaaagtgttaatgtaggttatgaatttttttggaagtgttaatgtttaattagtatgtatccatgtataaaaataatatatttgattatagaataagaattataaatacaatgtattaaatataacaaatttagttatttatttatttgtataaatgatttaagataaaaatgtaaacttaaaaaaaaaattacgaaaagaatatggctaaaaaaatatctataagataaaaattatatatgctatggaagatgtctttatacaactctctgtagaggaaatcgctctacttaatcctt

SEQ ID NO: 1655 - DNA, 2348 bp, Cannabis sativa
tgaagacatctataccctttttgatgcataatatatcctatgaacaagcatttggagtatctaaaggacactttatgagcttgatagggtctcaagagaggaaaacaaaagcatccaaagatcttgacaaggttataatcaggggcatgtttgtacaacttttcatagggtgtaaggtagttgttaactggagtgggtagtctatttatgagataagctgctgacacataagcttcccaccaaaagcttaaaggcattttagcttgggccaagagagtcaatcctacatccacaacatgcctatgttcgcgttcaacccgtccttgttgttgatgggtgtggggacatgaatttctaagaacaataccttgggcaaggaacttttctttgagaggagagaactcctttcctaaatctgattgcacactctttatttttaactgaaattgtctctcaacaaaagcattgaattggttaaataaagaggatgcctcagatttagatttcatggggaaaatccacacaaacttgctaaaatcatcaacaaaacttatatagtatttatatccttccatagaagggtaaaaggaaggaccccaaacatctatatgcacaagttggaaaggaacagtaattttatttattgtaggtttgaaactaaattggtgcattttgccaatttggcatgcatcacagaagtaacattgttacatttgagatttggattaatatgagccaacactatagctaatattggcttggaaggatgtcccaacctacaatgccaagtggacacaattttggacttatctaggaccggattactggatgtagtacagttaaaagctgagggtttgttgctggtgtgcacagcagcagactgaggcaatcttgaagtgtggacatggtttcttgagggctggacttgtaacttgtataagccttcattgagagtaccctttagaagtacttgcctcgttttcttgtccttgataagacaacaaacatcattaacttcaaggatgacattattatctttagtgaattgggaaatgcttaaaaggttcttggtgacattaggcacatgtaggatatcttttagaataaggtattgatttggaaaagaagtagggacatggttagatccaatttgaagaataggcatagaagtaccattacctacaagaactttggatttgcctttgtaatccacaggattttgcaggtgttgattttctgacgtcatgtgattggtggccccagtatctagaaaccaagcccctgagatatcacttgagattacagtttcggctagatttgcttgaggagaatcagttgcactttcattgttgttagactgatttgaggatgaatggccattaaaggtaatgtcaaacctatgatagcatttctggacagtgtgtccagctctgccacatagttgacacacaagtttgttccccctgccaccacgattgctggtgtagccacgacccccgctatagttgcctctgttactgttatatcctctaccattataacctcctctgttggagttattgttgttgggaacgtgagcaagattggcttgaacattgacaagagtttctgtggtgtgttgattaattcgaagctcatgactgtgcaacatgaattggatttcaggtaaacttagaggcgtttctcgtgaagtaagatttactatcactgcttcatattcttgaccaagacccccaaggatgtaaagggcaagatcatcatctgatatgggctgtcctgctgctgcaagggcatctgcatagctcttcatcttgaggatgtaatcttcgattgttaaagaccctttcttagtggcctgaagcaatccacgaacttgaagaactcgggctcgagatcttgatgcaaacaatcgtgagaagacactccagatctcgaatgatgattggtaattgatgatatgccccaacatagattcagatacggaattcatcagccaatgcattaaaaattggtcgaatctaagccattgaagatattctgggttggcaatgttaccttcaagggtttgtggtggagggggaattgatccgagtatgtagccgtcaagattgaatgccctaacagctgcaagaacaagagatcgccagaaagtgtagttgtttctgtctaggcgaaggttgagcggaagtagattgttgtttgggaaagctgcttgaggagcctctggtgcagcaaggatcggctgagcagcgttcggaggagcagtgtctctgtcgacttgtcctccattgttggacgagtgtgctccagtcgacgccatgggagctctgataccatgtaaggaaacg

SEQ ID NO: 1656 - DNA, 1587 bp, Cannabis sativa
tcaaggagaaatatacattctcgtgatttatatcaaagtgtcaattacaaattgaaaaattggattgtggaattacgaaacataatttttaaaaattggatctttaatgaaaatgaaagacctctttttcatgcttttgttttgttctatcatttaaaaatataaaagaaacacaacattggaaaaattgacaatgagccaagtcaaatgcaaagaaaatctatttcaaatcaaatattagaagaagtgacatatacctgtcttgataactttctgatttcttgatttagaattacactaaaaagattcatatcctcttggtttctcctattcaaaaggaaatttttgtgtcaacaatgtagttattgcgaaaccaaacagaaaacccgaaagtgtttagtggttacgggaaaacctgttcataaacttcagttcgatttcatctgctgcgccaaatatggatttacgaaataacctacaagaaagaaacatgcccaaaagatttaacatcaagtaaccgaggatataacaatcgccataacatcaatatacgtacctatcgtcccatcgagttaatcgagaagtaagatgtgctatgatttcgtgcactgttcttggtgtattgtaacctccagctgaaagaaattcctaaccaatgcagagccacaaagatatttagtatgttatatgaaattacaattcttctagactagtcattagttttttattttcaccaatctgatttacctgaacttctgtaataccaagcacatttatgtttgacacaggtccttttagatggagtacagtaactaaaaagttttgtgcttgccacgatcgaagcacaaccgggatgtcatcttcgtcaataaatggatcgccggctgattgtcccaacagctcgaataacagtcctccagcaactctaactgggacctgaaagtgcatagtgttaggataactatataaagaaaaatgttgagaataatttgaaaaactacaaacaaatttttttatatcatgatgtacgttatagttatactagtcttcctgcatactttcgggaaatttgaaataatttgcatagccgaaaatataattcaaacagtcagttgcacgcgtacatgttttatttcatatgtgcaactggctatttcaaactttaatgtaaattattcagaatttttcgaaaacaaacagaatgcttattacaactacagtatacaatatcatattaagaaattgggatataattacgagaaatataaaaagcccatacgacagggacaaaagtaatgctcttacctaagaaactccctataatatatatttttttgacgcaagactagttgtattattacttggaaaaatacaagtaaagatggaaaattccatcaaaaaactgtacactagagatcaagagtaaaaactctcaaagtatagaatttttacaattagtgttgcattgcaccattataatttttcacataggcaaatggtgataaaaaagcacccttttcacccccaaacacttccctgtgaattatttctattatagagtgttagtagcaaaataactacaattgt

SEQ ID NO: 1657 - DNA, 1469 bp, Cannabis sativa
ataattagtttctcaaataacatagaaagttaaacttgcatacacataacaaaaaatactaatatgtattacaaaaatcattatttatctatttatgatgagatatcatgttttagcttttaaccagagcagttatgaataatgaaaatatagcggggaacgggtgtgagaggtctatcacgttccatctctgttcccgctcctcagtttaaattttctaccctatcccatctactttttatgggacaggaattatataaggttgaggcaccttagttatcatcttagtgattaaactacattaaaaaaatatgtatgtatgtgtaatatataaatttcttaaaaaagaaaatctaactaagaaaggatcgagatgaggaatatcagtccaaccccactctaacccaatatgtttggtttgagcttttagtaaccttgggaaaagttttagcttcttaagaagactctttctgaaaaactattaaaattaatttatattaaaataattttttagagctaaaagtcagcaacataaatattcttgtaaaaaaaaaagagaaatttcacatatgcttaagaaaatctttatgctaagtgaatgataatatagtaataataataataaaaatggatgtgtatctcatttacattcaattatttacagtaaaaatggcattttttaaaatttgatattgaggcaaaatttatgagcattgttattaggcatcagtagtgcctagcacctctagacatatcgtcttgcgattgttaacaatactacctaaaagttattatataggacccaatacttaattggaccaatatcaataatgacatattgaaaagaactaagcatcactcatactttttagcatttctcaaaacttatatgataaaaacaaataaaattagctttttcttgagaaagaaaatttatcttcgcatttgtaacatttaatattttattcacacatttatgtatgagaatttgcgcaaataggaattgtcatcctaaatcctagttcttgtgcaatttcacacccttttttttcccattttttaatgataaaagatctcccaatttattacaatcccttttcttaaagagtttgctaatgtgatagtggttatatgagataaagagttacaatataataattaacttaactaaaagttagcaaaaattaaatattattagtactaatcataattctaagaatgtaaatatattttttaaaatttattatcatactactattatgcaagtactttcttacctgttctatcacaacagtgtaacatctacaaactgtaaaaataaaaataaaatataattcaagcaaatttgcaataattattatgatcagtaaagattttcgcaatacataacaaaatttaaaaatatatcattcgtcctaagaaattaaaagacaaacatgcatccaaataatacattatgaactcaatca

SEQ ID NO: 1658 - DNA, 3944 bp, Cannabis sativa
gaaaaactatgactaaagctattcatattaagcaatgctatgtgggatgggatttcattacctacccaatggaactgtcatagattccatgttcatggaatcagtataaatagaagacatctcaggtgtactaccatatgaatgaaagattaatctctgtcctggtgctggaactctttcttgttccctcgaaaaatcgacccctaaacactgtttaagctctgccaaaacataactcattgtggctctatcttcagagtggcatgctgtacatgccatagcaacttccaagacttttcttagagaattcacatcaaagttgtcttgaagcctttggtcaacaacacttgttatatcatcttcttcaagtttataattcacccaatgtattatgtggattgtttcatcgcttctgattattgctggttggcctgttatgagctctaatagaactactccaaagctataaacatcacttttctcagttagcttttgagaacggtagtacctgaattaaattgatcaaacaaatgctcattaatcactttatttatttgttcataacaataaagaaagagttgggaacatactcagggtcaagatatcctgctgtccccataactgcagtttctgcttgagtgtcattgttgtcggtagtaaaaactttagaaagaccaaaatctgctattttagcatctaaattttcacctaagagaatattggctgtctttacatctctatgtacaataggtggcttgcatccatgatgtaagtactctagccctgtgcagcatcaagaatattgttataatgttcaaggcttagttttgctgatagaaaattatgtgtgcaaaagctaaccttgtgcagcatcaactgcaatgcgaagtctggtttcccaactcaaatgtagagttttatctgcaaccatcaaacatgacacaacacagtttttgaatgttcctttttcggttattgggagataacatggtgataaagacaatacttttgaatggattagtacctgaaagacattcttttaggtttccattaggcatgtactcataaataagcgccaaattctcatgctcgtcgcagtatccaacaaaagaggccaggtttctatgatgtattctcatcaagagctcagcctacagtcagaagaaactcatcataattcttctatatattcagtttctttcttaaggcaagtgaaaagatcttatagttggatattgattaaaagggaaaaagaaaaaaaccaagaacctcagtttggaactccctaggcccttgagatgacaatggagacaatttcttgactgcaacttgtgtgccatctttcatatagccatggtacacagccccaaatcctccctttccaatttccttttcgaagttgtttgtaatctctacaacctcatcatggttatactgactcttctttagtgccaaggttcctgatttcttagcatttgcagcatttgcagcatctgcagtatgagacatggtgtttttatagacattcagaaacaatcttttcccaaatttaatcagttatactcctccatgtttacattggaattctattcttgaattcataaacataatacttacatcagtgacatttggcataaactatggaagaaaaagaagtattgaacaagaatcaaacctctttttttctttcttctttgtatcttcagtacgataatcactactacaaggatgaaaacaacacatgccaatgatccaattattggagcaacaatattgttcttctttttgcatgaacccgagctacaaagatttcgattatccacactgaaatcaaagaaaggagaaaagaaaaattagagaacatatgctacatttgaacttatacatcatgctcagttggaaagaggcttctctcctcattattaccttaaagttagcaaaccatcccttgatctttccagaagagctgtaggaacaacaccagacaattggttgcctttcaaatttctgcaaatcagttgtaaaatgactaaattatttaaggccatcctaattacattaccacagctccaacatcataacaacttacaataacttgagagatttaagatcttctagaaatttgggcataggtccagttaaattgttgtgagacagatccctgcagaagagctgttgttagttattagtaaatatcataaactttatgctgtgaaaccagataaggaatgcttacaagaattctagcaatgagagcttggatatggatgaagctatattccctctcaaacggcttgaggtcaagttcctatacaaataaatggttgctatgataaaaatggatggtgaaatgaatatactaatcatcatagtacagaagatcaccaggaagtactcacaaagaaatgacccgaggagacgaggcattgttactacatcttaaaccttcccaagagaaattccttggtccacaagggtcacctccccagtttctagtaatttgatatgtgcttttgacttcttccattgcctcaactgtatgtaatgaatgatatcacaaagtaaatattttgatgaattggttgagttataaatgatgctctctggtgtctgtttttttcagatgaacttataatgcaagtttagtagaagagcataccatctgcagagtatgttggcaactcatccttctgtttgaccatgtaaatctcaacagcattgaggatcggcgggagagtagaatccttagtcttatgaatagaaatccggtgctctttcccaaccaacgctttcgagtttgatactacagttgtatacaaatgacgaggaacaaagggtccaaacaatggatttccattccaagttacattgaattttcttgactggtttctcccaagttgctcaagttcagcaaagtacataaaaacataaaactcagaactcaaatcagttgcattccatttcaactctaaagcctcactaccatttcttggcctggctgcagtcatgatcacttctaaaggcactctataaccattctcatagttattgacatcttgagaagttgtgattgaatcccaactggtggacatgtatgaggaccaaattcgatcatacgtgtcatcttggtatcggcctgttccattggtttccccaatatccaatctttgaaagagtactaaagaagcattggagccaaactcagtaccatacacagaactgtttaagggtctgagctccaaggctgatatgaaaggagtacctaagcctttgttcacaagacaaatgtgtatggtgtctgatgtttccatggtgataatttctttagtaactatctcagaggcattgttgaatttcacagtggaccaaagattaacatccacataaagatcaaattctgggggtttgtcttttccatcatagttaccataatagaaggtggctctgatcaaattcaaacctccaattccaactgcaggtttcagggagtaacaatttttgtttgcttgaggaaaactcctgagatctgagagaggaaatggtaggttgggaactattgggtatgcatattcagaagaaatgttcttgtttactcctgtcactatgtaagccccatctgaagcataatttatcccagtgtctgggtctccataatttaaattcgaagaagagccacaatctatgcttatgtatcctaattaagaaacactttaaattagttttactaaaatatgcatgattatgtctttcattaaaaaggtcagaagaaaaagctttcatcttgtcaaggcaataaaaattctgttttgtttcaaaaatgaaagaaagagcatcacaaccctttaacatgaacataataaccaaaaattataccaacctatttgacgctgagcatgagccaaagttgcagaaatcagtagaaagtaggcaattaacactgtcat

SEQ ID NO: 1659 - DNA, 3840 bp, Cannabis sativa
agagttatgaaattattgctcgtaaatttactatagacactgatcgtacttgataagttaaatcatttcactattgtattttttataatttctatatattgatacttattttgtttaactgtaatgaaaataaagtataaatttataataataatatttatttattatttattatttttcatctcactaatgtatagtttatttatgtgcaattaaaacactatttttccttcaagctcttagaaaaaggatagcaacttttaaagcaaattgtgtaacgctgatgacattggattgtaatctgttaccaagatcttacaatcataatttatttttctaccagttttccctactctaataattttaagatcattgttagtagtttttacaagtttgtcattcagattttcaggagtgtccctaatttgtgttgctcacaaattagttgcgcatgctcttcggatggatgaagaacttgtttagctagatatgaagattcatgtttttgttggatgtttagtagtattttgataatcatgacatgtatagtatgtatttgacgaacatatcataactagtctgtatgacattattatatttttaatgaatttattcatttcctttcaaaaaaatataccaacttttataagtgagttgcccaatataccttcactctttacttaagtctagcatataatttacattaatctaaggagtctaatgggaatatcatttataaaagtgagtatatcttaaagaatataaaaatgaaagtaaaaattaaaacaagtaaaataaaataggtatacaatctaattttatcgaaaaaaaatgatgtaaatttctcccacaacaaatggataatggttgggctaagctgagcccactaatggcaaagcggcccagcaacaaacgacatggacagataattgaaaattttcgaaacgacgtgtcgtagataatacgtcatcttcgacatctggagctggaggttaggaggccaagtttgttggacggtggagagagagagagagagagagagagagagagagagaatgttccttgtccgaagagcatcgcaagacctccctaaaaaacttactggaattgcaaacaggtccttcaaatccttgaaaatacagggagactccgtcgattcatcaattccttcctctctcacccatggaatccacgtcttccattgtccagtaagtcctctctctctctctctaccgtcacacattttctgtttggttcgccagaaaataatgcgcaacgattcaactgcatttttgaaacatagacacttctgagattgtttgtttggaaatcaatataggatgctgtcggaatcgtggctaagctatctgaatgcatcgcttccagaggtggaaacatacttggagccgatgtttttgtacctgaaaagaagcatgtcttctattctagaaggtatattttgagcttgccacgtttgaacttctacttattgaaattactttatatgtattttgatttttattcggagtggtcatttattgatgacagaaagcttaagagacaaataaataattacagtcctttacatatatagcatattgaattgcagtttgttttgctcagtgtacttagccaactgaaataggacttaatcttttggagtcaggaagttgttatattagctagttcccacttcataggaattgaattgaaccccagataaaggcagaccccaagagcttcttggccactggtctaaccctcctgcccttggtaatagactagttggtgttatttaatgactccatgtatgtactatactatgtatgtcaaaatatggttagttctaaagattgttgatcccaaaaatagtcaagagtaagaaatatgtgaaccccttttactttctttttttgacattatttgggggtggggattcgaacttcagacttactctgtctgtaactaggctatgtctatgactacaaaccccttttccgtagaaaatagatttgtagggtttgggtgagcctattattactttattagaggagatgcgcaacataagggaggcctaactattgtttattgttgacaattttttcggcatcaatattctaactctcaggagccaactagctggaatgacactcatgctgttcttcaaattgatgttgttcatttataaaatatttgtttggcagtgttacttgaatattatagattgccaatttaatgtgaaaccatgccttagttaaaaaatgaaaataagaatgagccttcacttttatttttttggacatatatttgaaaacaaaactaattgaatccctttggctttactgatccaagaatacattaattggagaactaaactggacacacaatcataatatgtgctggcagtgaatttatttttgatcctgctaaatggtcaagattgcaaatggaagaagactttcttaaactgtcaacaacattcaatgctatgaaatctgttgttcgggttcccgatcaggaccctaaatataagattgctgttttggtttcaaagcaggtatagaattttgcttttcttgtatgcatttgcacacatgtacgtatacatttaatatgcattatgccaattgccaaagatttctgtacattcttgaaggaacattgccttgtcgacttgttacatcaatggcaagatggaagacttccagtagatataacctccgtgataaggtaaggtttcaagagtatcagcctctaaacagatttttattatcttcttcttcttatttttaattgttgttcttgatgggttgttttcctctgtaaatcagtaatcacgatagagctccaaacacccatgttttccgctttcttcaaaggcatggtattccttatcactatgtaagttcagatggtgattataaaagtgaagtagagatgttgaacctggttcagggtactgattttttagtacttgccaggtacatgcaggtaataagattattaaactgtaccttctggaatatctctttctaaaccaaatcttcctgttaatatagctttactattgacattcagcgaggtagattaagagaaactgctttttcctactctgtttgcattgcagtgtgaaaaataaaatgaagttgattatctatgtacctgaattacccaggaaagtaattcagaacatcattgtccatctacttttgcaggtattatctggtgattttctgaagaaatatggaaaggatataatcaatatacaccatggccttttgccatcatttaagggtggtagtccatctcgacaggtttgagcttctatctatgagttacaaacgtgtactcgcctttcgaaattaatccattctttcatcctaactgtctatgcatggttaatatgctagattatgttggcaggcttttgatgcgggtgtgaaactaattggtgcaactagtcactttgtgactgaagaacttgatgctgggcctataatagaacagatggtgaatatgaactgattactcctgcttttaagtttatgtttatttctattttctgatgctttttgctctgattctgtcattaactcattatagtataattcttgactcctctatgctgctagttggttttcaatccacgagttctttcattctcatgtccattgaacaaggctctttttggttcaaaatgatcaaaaccctctcaggaaaacatggggttgccttgtccagcatgtatatatatatatttctcaattagaagctaactgctctagaattatcatgcttagaactgccctcaatgtattcattttttgtcgttgcttaaag

SEQ ID NO: 1660 - DNA, 1400 bp, Cannabis sativa
aaaaaaaaaagccatacaaggaaagagctctcacaccctagaaaattagagttagggtaaggccctaaacctaaacacaaaaaacaaaaaaagaaaaagaagaagaaaaccccaaaagaagagatgacttatctctctcgctctctcctcctattggaatcaattgcttcaagtgattaaaggccaaaatttaagaaaaaaaaacctacaaacagataaaagccctatttttataatgaatggaattacacctactagctttgtgagcattgtttaagtacatgtaagcttatgaagggtgagatggcagcaagtaatgctttgggacactcttcatggggaaggtggccacatccagatatcgcaacaagttcctgcattaacccaaaacaatcaacaatatcaatatcgttatattagattagattagttgaatttcaataaagataagataataaaagcaagtactcacagaatttcctagttttgaagccatagcttgggaagatttaagagggactaaggcatcttcagcacctgcaaccaccatcactggtatgtcttttacagccttcagtaatatttcagcattttgtcgagtgaggattgtctgatgtgacaatctgccaatctcatgaagtgcttcatcccaaccttctacacaaagaggagcctgaggacaaaagaaaaacattaagcttaatttattattatagatagtatcaaatgtgaaatcatcaatgacagaaatcatattatttcagtacatcttttatttaataccagagggttgctactagcagtcagtcataccttatacaaactcaaaacatctgtggttaacttggtagcgtcgtaccatgctcgcctatttactacttgagtaatttctgttcgcaatagcggacgcacaagatgccttttcccaagtgaagtacgcattagaatccttgcaaagccaggaacaacctctcttgacaagctaacatttaacagcaccacccccttgattgtaacctgaataatacaaggtattaattttaaaaaataaatgaaagtgtggaaaaagaagaagttagatgctttaatttacaatgctaatgcaacagtatcatgcccatcattgatttacattattttcatcaaacatttagatacaataaataggatgacagagagcttgagacaaacccctttggtagatgataataaactatgttaaatttccttgttggtggaaacaaagcatactcacatttgaagaattcaaagattcttgaattttttgtgcagccattaaagccagaagcccaccatcatcatggccaacaagcaccactgaagaaaatcccatctcagagcagaaagaaagaagcaggtcaacctgaaagataaataca

SEQ ID NO: 1661 - DNA, 2525 bp, Cannabis sativa
atcctggctcgtcgtctcattaaaatctcgggcaatcgctcctctgtttagtttgaaaggatcgctaaatttgaacgagaaagtcaaaaacactttcctcggcgatataattgaagccgttttactcctcgtcatcaccacccgataaacggcaacattagcgctgtcgttttggatttgatcacatttattattttttttattattatgatcagatgcagatgtcgttgtcgttttctcatagaggtccttaagaggaacgtaaacttccccaataatcttgtccagacaaaatggtcgtttgcttcggatttgaatcatgacgatcgccgagtttttcagaagcttcgattctttctcgtaaaatttcatcggaaccggcgaattccacctgtactggttcttggtttcaaagttacctgtttgggttttttgggtagaaatggaggtggtgtttacgagtgaaacgacggcgtaaaactccgtcttcatcaacgttgacaataacccgttgcttggtttgagaccttccagggatgtaatcgcaaggtccaagcaacggtaatccatgattataattaaggttaattactaaaagaaaaattattatatgaggaggtttattaattgtgggggtttcatttatagtgatgggagacttgaagaataaagattcttaatttagattttctcataaataaaagaaaacaacttgtaatccactgaatgattataaagtaataaattagtattattatacttaataatctaattatagaaattgctttgcttgcatttttctaaactgagtgtcatgtacgttgactcctaatttaattaattggttaatcatttgatttgaccaaaatttactatttattcaacaaatttcgtttcactctttcaagtttcaagaactcaaaatgaaaatgtattctttcaattaatttatcaaaaattatttcagtaaaagattggtcaaattatattatcatcaaacaactaatatatgacatatttaaataacagttaagattaccaatcattcatttcaatatctattggtaatcatagatataacatgaaattatatgagaagtgttcacgctaaaaataatgacaataatttcatttgataatgataatgtaatataaaagcagtactaaagagttacgaacacaaaacttttatagtattcgaccccttttcaacaatacaatgacttatgtctcctagtagttttattatgaccttgtactcgagatcaaaagaacgagactgatctaatgagtttctcaagcataagattgaaaactaataacaaagctagcacgagagtatttattatatatgataagaatcgatacttaattaaactatttttattaaattagctgtttactacaaaattttaatttatatcacaatgataatcaattagtacatcgacttaaattatgaatttatgtttatgctattagtttctttgattcactcgttaaaatttgcattcatgacctaaatcacctatacccttatatatataaaaattagggttgcattatatctttccctttctatttctctagctaaaccagcaccacaccagtccaacaatttcgaccttgccctctccatccagatcccttcgacttcgaccttgtccttttcatctaacaattcgaatcccaagcagccttctccgtccaacaaagccccaaatcccaagcaaccctctccgtccaacgattcgaatccaaagcagcctttttcgcccgatgaagccttgaatcctaggcaaccctctccatccaatgagcaagtcccatgtagcctcctctgtctaacgaagccccgaatcgcacgtggacaagaccatgcgtatccttctctagccatccaacagagtactgaatcaacatttcaagtgacaatgttgggagttcacagaggtgacgacaacagctagagtcaaccggagttcgctggctagggttgaccgagagcaatagatttttttttcttttttgtgtccaagtgagaatgagagtgagagttagagtgagaatgaaagaagaaatataagagagcttggactatgattgggtttcgtggtggtggtggtggttgtggttggtgggttcctattttagggtttgaaggagagggagagagagatgtagagagttctaaatgtttgaacaaaatgattttttttgggtttatatatttaacatggtaccctcgacggttttaaacaccggggataccattttaactcatttttgaattttaaattgtgattattttgcacagttggggattctaaatgactttttaaaattgtcaagaatagtggagtatttctgatgattttaaatagtcacgtaactttattggagattgttagatccttttttttaccaaaatatgtggcatgcatatgaagtctcgcatggcagagaggggcccattcatagacagatcaatattccttgtggatttactccactcccagactcta

SEQ ID NO: 1662 - DNA, 902 bp, Cannabis sativa
ggcgaaacatcggcttcttaaaagccgtggctgcgtctcaatggcttcaccaaaaaccaactcttatcgaagccataaggaggtcaaaactcagttaaccaactttgagtgtgctcaagacttgatcatcaaaacgctcctagattttatttatattgagtgttcttggggttttcaggtacaatgagctttggatgccgttaatttccgatctgacggtggggtcaactcctccattgattcttcctcctattgatattgaatgggtttggttttgtcatacattgaatcctgtaagtaaagactctgtgcattttctcaacagtcttttggttactaaaaatattatatgaatagggtcctttatttactgttttctttttatggtttatagtcaaagatcaaagctttccatgttatatttcatccaaaaaaaaaactatcgaaccaataagtttgacaaagagacttttttttcttcttttttattggaaaaaggtttcttatagggaatactgtgaatcaaagttgtcgaaatttataggaaaggcagctatttttgatgaagagaatgaagaatacgctttgatgagatgtaaagagatatggttgagaaggtacccggatgagccatttgagaatgaagttgattcggatttgaccaaccctgttgtagctgatgaagagtttttgatggaagtgaccaagcacagatttttgtactcaaagttctcggagccgtacaggtctgaaactctgtatctgatagcagcaaggcaacgttataagggatttctttatatgctgcagaagtcaattcaagtgcgctctcgtttggtgcctgcttctgatattcttctaatgtggcttattcatcaagtctgttctctctctctctctct

SEQ ID NO: 1663 - DNA, 878 bp, Cannabis sativa
acattaaacatttatttttggtggggcgtccttttggtaaattgggaaacttaaaggaaattgcgtacatcttgatcatcaagtaataacaagtctataaataagatctattatatgaagtctctacatgtttttgagtagataatataacacaaaacaaaataatgttgttcatgggagaaatgatgacccaatttgggtcagtaattgctagcataatgtttggttatgcaatgtttcaacaatatttcccatatgatcttaggcgttatctaacaaaatacacagacaaaatcgttggattggtgtacccttatatccatattactttcaatgaatactctggcgaccgtttcaagcgaagtgaagtttacttagccatccaaaactacctaagtaccaattccactgctcgagccaaacgactcaaggctgatgatgtcaaagacaccaaatcattggttttgacattggctgacaatgaagaagtcactgacgatttccaaggcgtgaaactgtggtggacttcttacaaaagcacccccaaaaactcaaccttttcgtggtatcctaactcagatgagaagaggtattacaggctcactttccatagacgacatagagaactaatcaccactacttatctgagtcatttggtccaagaaggaaaaaccatagccattaaaaataggcaacgaaagctttacactaatggatcaggtgagaggtattatggtgggaaacagaccaagtggagccatgtcctgtttgagcatccggctagtttcgatactttggctatggaacccgaaaagaagcaggagattataaaggaccttcttaagttcaagaaggggaaagagtattatgctaaaatt

SEQ ID NO: 1664 - DNA, 1225 bp, Cannabis sativa
atgatcttgccaaatttctaactctgttgggtactccaaatgctttcttagctgtagaagaacttgggtttgagaggactgaagttggtaagtacccagaaaagaaaaactccagataaataagaaaatcaagagcatattactacaccccattaaaggatctcactttttcttgttatgacccaagaactcaataaagacctgtcatttaatggaaacgcaaacgagaccaatataatatcagtataatattgacaaactcttcaggaatatggtggcaagttcaggctcaatgattgaatcttcttcgttttagaaaaaaagcagcagagtaagaacgaccagttttaccccacaagctcaaaaaccaagcttttccagcaatttactcagaataaaggcagagacttttttactctttcacagagcttacaaagcacatgtcacatttgatttaagtaacagagacaaaacccacaaggaagaaggtaagttccaaagattttgtttagtagtagttgaagatgataagtggggtacctggatttaatgcagtattgcatttagtgctctcacatggtgcttttttgaagccagtgaagcattaatggcttagacttttgctcttcagaagagaagataggaagagagagacagagagagagagaggagtctactttgaatactcttcagtcttttgagcaaagaaaaaatctagagagaactcaattaagatgtcaacaagaaaatgatattataacatttgttttggttcaaaaacaaaaagaagaaaatgaaaaagataactttctttctttagtggctagttgaagcatgaatgactgtcttactgtctttttcatttgttgttgttgctttttttttttattttttttagtttgagaaataatgatcataataggataagttcacaatgtctttctctaaacaatagtatcaaacaaatcaaaatgtgctggctaccacagtagcatgtgtgggaaatatcaaattgggcaaagagatcatgaatatggagacaataatactactgacactgtctatacttctgtttcttgggatagagagaagaagagaggtcatggatccgtttccaatggttttcatagttggtgtattcaatacaaatacaatatacattataacatgtcatttgtttggtatttttaaatgagaaaatgctaacctttcaaaatgtaatata

SEQ ID NO: 1665 - DNA, 1666 bp, Cannabis sativa
gtaaaattcaaatataaaaaaattaaaaacttctcaactcttttatttactttggacccaccaaaaacatgtataaccaagacccaattaaaaagagatgaagaactggtggtggagatgtgacaatacccaacatatccaactagtagcttctaagtgttgctggctcacccagttaaaatctttcttcttctgtttggagtctttaacttttaatggacccagtttctccaccaccttctccttccttccaactaagacaatgggtttgggttttggttttaggctaaatctcaagtggggttttcctcttcactctcgtttccactctaattcaacttttaagctcatgtcagcttctcctggtaagttcattgttattaaaatctttcttttgggaccttcaaattatgttcatgaagaatcagttgtcaattatgtttttttggtcttaaggcaattgatatcttcatgttaacttatgagatttgcccataagataaaattgttttgagctttaataagatggaaaatttgatcatgtcatttgaaccaatatagactgtattaatgttttggcaaaaccatatatgtgatcagcatttgagaatgtgtctttcaatttattttgcttagctatagtcaaggaggcttctttcatttcagcaaggctgtctttcttgtctgttatctctgaagaaagtgagactattggcagagattctcttacagcttgcgccttttcgccttcatctccacaaatcttagagaatgatttatcaataatggaagaattgaaggtttgaaattatttgcttatttatctcaattgtgcttgtttttactatatcttctttttcaaactatcacatatttgagtctaccacatgattcaaatgattaccagatgcctgccaaagaaaacataaatgcatacaaggcatcaaattttgggatattgatgcaaaaccttggtgttttggaagagagtttttctgattcagatgtgctgagattagaaaaagagattttgactcatctaagtaagcttggagcacttaagttatttaatactcgtttgtcaaacactcttcaaaactcaatcttttcggacttagctagcacatccacagagcatgttggagaaaataagataagaagcgaaattgaaagccccacaagtaggaccattgttcgaactggtaaaagggaagaaagaagatcaagaaaaagaaaactggaaaacccgaaaactcagtcttcccagctgcctgtagaaacaattttgcaaggtcctctacagccttttgtttccactatgaaaggatctaagaaatgtagccgtaaaaggctcgcaattgcaaaaaaggaggcagaactttcaactggggtgaaggttgtgtttgtgtctaatgctctttgtgctgttttttttattattaagcttgtgtttcgggaatgtcttacaagctttaggactaatgttttcagatgatttcaaagttggagcaaatcagaatagctttggagatagaaaccggtggagttgtcagcttgagttgctgggcagaagctgctggtgttgatgaaaaaatgcttaagcagcaacttcatttcggttggcattgtcaggacgaggttataaggagtactaagtccttagttc

SEQ ID NO: 1666 - DNA, 905 bp, Cannabis sativa
tagaattcttactggtccaccaaggtactgaattccagcaagctcaagctcctttaagattccatcttctccaatcacgtagacctgcaatatcaccaaccatcagtgaagattgtgattaaggagagtaaaattaaaagtatcctgcatttgaaagaattgcttatttatatcagtaactctgttttgataatcacaagagcagggaaagccctttaacctagaaacgtgtaaattattttttctagtttacaaaattaaaacgcctgagattgtagccttcaaataatgtgacttttgtaatgtgaaattattggttgacatgaaatatcacactcactgaatatataaataaacaacatgcaactgattttaccagcatatgagatttaatgaattgtttctttgatgatgttaccttcttatctttcgggaagttgatagacttcaaataagcagcggcagcaaaggatgacgcaaaaatttcctcctgaaagcatttgaggtggctatgaatcctatgttaaggagcatttactaagatggcacgattacttcagatgaatgagaattatttctgtggtactgatttccatttacatgtttatgaatgctttacccttcaattatttaagagatgtgattgacctcaatcacatctatttctcatgaaaatatttatattattaaaatggacaaagtcaatctaaaacattccaattatgctttcctatttatgtaacaacatgaactcgttctgtttcccattctagtcagttaaagtaaacaatataataaaaattatgattctgattctttttccactatatgttattcctattttgattgtttcctacttataaaacaacatgaactcgttttgtttcccattctagtcagttaaa

SEQ ID NO: 1667 - DNA, 1419 bp, Cannabis sativa
catcaacattattatctctggttaattttgaaatgctaatcaaattttttgttatgtcaggtacatgcaacatctctttcaagatcaaaggtcctctatcaatggcatataaacatccagtaccaacatggtttatttttaactttgtaccatcacctactgtcaaagtttccttacccgtgtacttagccttttggttcaggttgttgatatctgctgtagtgtgattgctcgcactcgtatcagcgtaccaggaatcattctccaccatttctggtgtggcaacgaaggcagaggcgtgttgctgattgttgggtttgtttgcaccagttgcaccagcaggaacagaccccatgtaactctcatcgaacctgttgtagcagtgagcggcagagtgtccatacttgccacaaacttggcaagttggtctcggtactcccgaccttcctcctcttcctctagtgccaaatcttcccctgttgttgttatggccccctcttcgaccaccattgtgacccgagtcattgttgtttcctgagtatccttggtttcctcctgtgtgtggggtcttgtttgcatagttggcattgggacctgcagagctgtttggttgtttgttggtgccagaaattgcactcaacctttcaattttactatcaaaactgagtaaaatatcctgcaatattggccaggttgttgaagctctagcttcaacttgcaacacaatgggaaggtagtccagatccaaaccagataaaacattagaaataagaagagattcggggtacgggtcacctgccagggctagaacatcagcccattgcctcttttgtttcaagtaatcgaccatgctaagagaacctttccttgctgtctggattttggtcctgtattcatccatttttgctttggagtgtgctccatacaaagcttcaagagcttgccaaagagctgctggggaatcgcatcccataacctcagtagctataccttctgtcattgacccgtagagccaccccatgagaagttgatcgtgcacgatccattgttcaaattctggattgatttccagatctccactttgctgtccatcttcttctgcaacagtagcaataaactcagctggtttgggcttggtgcctttgaggtatccatcgagacgatgtcccctgacaatggcagataccattgttttccataatgaaaaattgtttctgtctagcttgagtgcaaagggttgatttagagtgcttccaaactgtgggacgattactccctggcttgtatttgctgttgtggtggtggaatggttagtaccattatttcctgtaggagctgaacggtttgtagccatttctgggtttgggttttcaccagtcgacatttgccaatggtggctctgataccaagtaaagaaat

SEQ ID NO: 1668 - DNA, 3363 bp, Cannabis sativa
tagtgaaggatgtgattttattagaaggatagttgatcaaccacatcattttaaaagaaaagaatactttgtgtggttagatagggcaagttgatagactttgatgtttgttgagatttgagaaaattctataataaacttgaacataaaattacagattaaaattatatacttataattatcacatgacttttttcttttataatcaaaattacatatacataacttttttttttcttctaattattaaaaaaataaaaataaaaaagcaagactaacactaactaacaactaacagtgttgtgtagtatggtagtagagtgatttgtctttttcttttttgtaatagtaataaataataaatagtataaatagcgtagagaatggagatggatccaaatcctgttgaacgggagaagtctgtcgtgtcctctccaactggactcggctcaactcaactcaactcgacccaactcaactcattagagtctactctacatctacaccaaaagcaaagtaaagaaaagaaagagaagagaaaagaaaagaagagagtccgactgtccgagtcagagtcactgagaagaagaagaagaagaagaagaagatatacgagagagagagagatagagaaaggaagatactcactcaaaccctagaaccacaatcaatggcccaagacgaggaacagtcttccgatctctccagaaatgtttcctttagcagactcaacgcccaggctcccgagttcgtcccttctccccgctccgatctccacccgatccctcctcctccgcctccgcctccccctgctctccatctctatcactctcacgctcccttccacgttccaattcgtcctcatccccatccccatccccatccgattccgattcgaactcaccatcctcatcacttgcctattcactatcagcagccgcagcatcagcatcactactaccccgaccaagaccttcccattccacagcctcctcctaagccatcttctgatcactctgcctcctcctcctccaagaataagcagccgcaacagcagctttccgatgaggctactctcaagcttttgaatcaggtttgccattcataaatataaaaaaccttcttcctactaaaatgttgatttggagatcatcaaatgtaattttttgcattttgtttactgtcttcaggcaatcatgattaaagtaagatatcttactaaacggaattctgtgtctttaatgtaccatatttagatttgatggaagaaacatgacttaattaaaatcattgttttcacatatgtgatattgcacttgccttaattacttttgtgtttctctttatactaaatgtataacatgctcactcacaattttccactataattagatgtagccactatcagattcattcacactatgttcgacaagcatttaggatgtctgggttgttggacatagcttgatgcttcataaagggggtggcaggacaaattgcatattcttttttctattttcctctgtaggattgtattgaatgtgtaccaacatagcaattgagtgtgctaaaagagtttgggggatttttggattttctttttgttatgcttttcttaaggaggacaacttatagttgcttctgccgtgctccttctgatattgcattgtttggttgaagtgatctatattataataactttatccaattctagacaagattgttcaatacatgcattttcttagcagtgtcctcctccactctatccaattatagacaagattatagtagtctatggccttagaatgttttccttctcctccataatgattacttttttcttttcatttacatgagacacaccatgaatgaactttgcttttgatgatttacatgaacatatgagttacagactccacttctgtaaacatgatttcgttgtgaattttacgttcaccctctagcatgaaacatattacattaagcagctgcaaatttccttaattttctttgtaatgcttttaacggaccaaaattttcaggtggagtactatttcagcgacttgaatttggcaactactgatcatctaatgaggttcatcaacaaagatcctgaaggatttggtaaatttccgtcattctctcaccactctctctctttctctctcatgcgctcacacacaagcactagttttgagtatacagaatatttaacctttgttttgagggcccagtgcatttaattgctatgattgtttggcataattgtacagcatactctctctcgcaccactcttgtttggcatcttaacgtacatcatacttgtacagcatactctaacctgcattcatggatatccatgtctcctcaaaatatcttggatgtcatattgcattatttcgaagacactaagattgtttaatatctattgttttacaagaaagttgcagttgactttctatcatatctaatttgtccaatattcattcctatatattgttttatgattttgtagtgccaatatctgttgttgcatcttttaagaaaattaaggcgctcatcaatactcatgcccagctagcaactattctgcgcaactcgtcaaagctcgtgagttaatttatgcgccttttacactatctacttatattgttcttcaaacaaatactatacttcttctggtttcttttgccaatgtttattctatattttcctctgtaatgttaatcctaagtccttctaaatgcattgatctgcaggtggttagtgaagatggaaagaaagttagacgcatccatccactgactgagttggatatggaagagttgcaagtaggttcttgtttattagttagctacttcttttttggcataattgcttgattggtttgcaattgcatggtaatttcttttacgttgttgcaatacattttattttgctagctcatgttacctatttggcttttgataatatcatgtaaggtaatgcttgagttttctttttatcacatcaaataatcatctaaaatgcattctgttgtttagtctcgcattatagttgctgagaacttgcctgaggatcattgccatcaaaacctcatgaaggttttctcttctgttgggaggtaattttattactttttttctgaaaaaacttgtaattttaaagcttttcatttcttcaaagaatatgatagtagcaacctagatatggagataatgctgagctctttggcagtgtaaagacaatccggacttgccagccacagacttccaatggaggaggatcttctgcagcatcaagatcagcaaaatctgacaacatgctcttcagtaacaaggtatgcatacaagcatttatac

SEQ ID NO: 1669 - DNA, 4139 bp, Cannabis sativa
taaatgataatgaagagaaactggtaaaatgggaattttttaacttaacatctattctttactatgtttttatattttagaaaagaaaaacagtaagtactaataatattcgaaaagcatttgtattatatataaaaacacacaaattaaggaattaaagaaagtcttgtttatttggtatctgagttgtgtcacaaatacgaagacaatgttgattattattggtatttttttcaacaatttgcaaataattgattagctaattaaacactaaacaatgcaaatttcaactacaatcccatctggtctaatagaattgaccgacctttgaatatttttttaatcattttttttcttctttggcaaacaatatgtttgtaagaaggaaacatatatagatggatattaattaaaataaaattaataataattcgtaatgtaacgtacattattctgtactgtaaaacaacatgcatttattaaattttttttacagaacaaaacggcagccaaagtttgtaatgaaagttacacattaatatacttttataacacgtaaactcatacgaccatggattaaattatgttggaagaaattttatctaattaatttttaatacatttagttaaaataatgaaaacactaattaaattatatatcaataaaatacattttctttacaaaaggatctacgaagtttcaaaataaagaaagatattaataagtagtacacatcgtacttcatatttatataaattagtcacctttttaagaaatctcttaaaaataataaaaattatattgtttaaactttggactgacgatcgaatcagaaaattatgtctaaatacaattatcattcattacataagtcatataaaaaaaaacattgtgaataaaagaaaagtgcagaaacattgagtagagattttgttattttgtgttgtaataatatatatttacatttggaagcaagtgaaatgaaaatacagagacaaaaaaaataaaaataataaaaatggtttgccgagaaaaatggagtgtgttatggtgaggggttcagggcagcagagccagatcagcttacgtcagcacttgtcgggattgttgagttttatgagctgagaaatgagatgactcttcttcttctctctccacgtgccttgcagcgaagcgccacgcctattcttcctcctcctccgctttgccacgttttttaatttatattctcaaaaatacccctcatatttctcactttattacactcattgccactctctttacttttttctcaatttcaccactactactggctattggaattggatatttgatatttttatattttattaatattctagcttctatctctctatattcaattttttttctttaaaagcatgtgtagtctaatctcaaaccaaataaatatatgatatttcttaactgatatttattgttacgcttatttctattttttcggttgatacgggtacccttttctacgttaagaattaatagtgtttaattattaaattatttttttaaatgttagttgtgaacttatttccttttcattgtatgtaacttaataattgttattatgagaattggagatagtagtcacaaatcatatgtgaaataaataaggacaaatctctattttagtgaattttacttgtgcacactattcacaatttgggtaaacatgcattattacttcttaagacaaaacttaaaaagcaaggtcaatccaaaaacacataatactttttccttttttatttggatatgcattcacctttcacatcccaatacttctcaaaatggtgtagtttaataatgtaaacttatttgttaagctaaaatttcaacataaggaggggactactaccaccaccattgttatataataattggcaaaaccatttgatatggtagacttggtagttggtagtatatatagtacatagtatagtattactgtatactatagtattagattatagactacaacctaagttacctaacatttctttttatgattttatctattattgacccctataaatatttaactatactacacccatcatatcctcttaattattcatgcctacgtggccaaaaaaccatgtatagtgaattttttcctaattttggcaaaactgctttaacccaccccctatacattactactattttattagatatatcatgaccctccattcttactactaatattagatccaacggccacaattaaacagtccattattcttactgcttaagttacaatgaggaaactccctagtgagaaaattagtgaaaaagacatcagtcccattaaatgtaaatatatcattactaattagggctattttggaagtgtaccaaattatatatagcacattttacaacctgtcaccaccaacttacagcctggcaagttctgcccactgatcgaaattttttcaaaaataaattaaaaaaaaaacaaaaattatattaaaaatcaatttagctaaacgacaaaaatccgacgtggcaacttttccaatagaagcagccttcgctttttttttcttctggctatatatatacgcactacttgctgtctctctcttcatattcgccaatctctctctctctaacgattccgattcttgactcggccgagttgagtataaaaaatcaagaagaaaaacctttaataaaacgaagacgaagaagaaaatgggtatttgcagttcgactaactcgactcacgttgcgacggcgaaacttattctacaagacggaaaattacaggagttttcttaccctgttagggtatcttacgttttgcagaagaatccggcttgtttcatctgtaactcggatgaaatggacttcgacgacgtcgtttcagccgtaaacgacgaggaagagcttcaacctggtcagctttattttgctctgcctttgggtagactaaaccaacgtttgcaaccggaggagatggccgcattggccgttaaagctagttcggcgcttatgaaaagcggcagcggtggcggcgaaaaatgtcgccggaactctgtctcgcctattgctttctctggcgatactattaaatctccttcgcggtgtggtaatggcggttccaccggatccggtggcggtaatgggaatgggtctaggagggttaggagaaatgggggaagaaagtttacggcgatgttgagtgcgataccggagtaaaaagggtaaaaatggaaattcattttgtacggaaagtggtattcttgtaaatattgtaatgatcttgggttaaaaatcacttccagatttaattgtagagatttaatttagaggattttagcggctcttttattcttcttcatgagagttttctcttcttttcagtttttatttcttttccttggcctgtcactcattttagagtgtgttacaattttgcccttttcgacgggttgagaattgagatgaagagttttatacaaatatgatgaagaaaaagctatgaactttaaacacatactgttaacagtgtatgaatatgattcttgggtaaaacggtaattttgattttattttttttaaggaatatttttatagttacctgatagctacgaaacaaaaattgatcactattcccaactaggcacagcttatttaaaataacgcggttcctttcttctataaaaggtagccaaaaaaataactagttactaaaagaaaacagctgtagcaaaactattcacggtcttgtagatgatatttttttttcctctgaaggaactggtagaatatactttattaaagaaaaaaatatagatacccaaataataggtgcatgaaagtgttttccatttcttcttaattttaatttttaaattaaagtttcgttgttgttttagatattctgccagaaatagaaattctgaataatttaagcatcaaaaataaaatttaaataatagtacttgtataagctatttcaacattacttcaaattcttctattttttttaaaatttttagtataagttaaataattacaatgtacataattattaaatatatgattaattaacctactgtatataaattttttttgaatgtaataatattta

SEQ ID NO: 1670 - DNA, 1191 bp, Cannabis sativa
taaagcaaactaggtttttaacccaaatgaacatctgacaaagttcacctatcaatggctatcagccaataatcatccaataaaaattaggacatatcaacctcattatttacacacgaaataagggaaataatcaaatgaccaactatggctcaaatcaatcaagggggcttcaacccttactttttagaaatagatctccataggtacctagctgtgatagattattacgatagggtagacaaaattgtaaggagtctaggacattttcttccaccacctgagtccattagggtagatccttttactcttatgcatatcttggcttcaatcattgcaatatggtagattcttaagccgagagaatgtagctttatttactcagagaaaaccaaagtatagcagagtcaatagttgttcccaaatcagtcttctttgtatttttactaactttgcgtcaaccactttgtgtatgtccctaactttattttgtttaaattttgcagagaagccccattcggtgggatttggtgttaaaggccgccacatcatcctagactaggtttgcgggacacctcttggaatgcccttccggatgtatatcccaaatgcttattcgaagggtctcttagctactccttcttattaaggcgggacacccttctaaatctggagagatatggtcttggagataaatatcttgggtctcatataggttttaggcccatcctttcgtacaaattgagcctgttatcttgttaaagccttctgaccagactttagatgattaattttgaattggggaatgtcacgtatcccccttcaaaaaatatggataactctcaggacccaatactagccaaacccctaccggaatcgagaaccaccctagcccacaaccaccgcgccacctccaccacaccaaactggagcgaagccaccttctgccgaacgaatccatacaggatcagagatcatacccaaaccaccaagaaaccagaggaagactatgagtgaaggaagatagcaagaggaaaatcaattcatgaaggctgccccaaggtaccaatcgaaatgcctgaccaaagctacacctaagcctaggaggggctggcgcgcgggccaggccggactgagagatcaaagaagagatcctttacgactaggcttcaacgagagagagagagagag

SEQ ID NO: 1671 - DNA, 1360 bp, Cannabis sativa
gggggggggaggggggggtcacaatttttttatatgattgtgaacattatagttataacaagtattttgtatatattttgaaatttttaaaataatttaatatatcaaaaataaagtttaaaagattcaattacacacatataaaataaacatacatataattgactatttaaattttaattcatattttttaaactataaattattcaaaatttcttaaaaaatatttattatattattttatataatataaaatattaaattataacttttctatatactacaaataaaattgtccctatataatatgagcaagtgatgttaatgggtgcacgtgctacttgttccaaccgtcgaataaaacaaagtagctagctcagccataaattaccataaacaaccataaccacaacaaaattaatatgacttgtctctcagcatataaatatgtatattatattcttttgtacaacctagccatccttgtcaccaaacttgtctttttacactctttttttttttttataaacctttttacactttcactacttgctagctagctcatatgacttgccaattcatcaccacgaatatttcccatatgtgctctttcattggacactacaataaattctatatatatatatgtataaatactatatattaaacatgatcatcatgaaaatatatgtataaagaaaacaaagtttttaattcataagccagtctgtaaagcaattaataaagactcccatgatctgtacatatacccaaattaaatataccaatacatgatgatgataatgatgacttcaaacaattaaaaacaaaaatcacttatccaacaaaaaatatggatgaaaaataaaataaacatcacagctttttgtaccccctctctctctaaagacgtacgtactaataataataataattaactacaaagtttggataattaaaacaagttgttttataagttttgatgatgagaagatagtatatataatatattggatcatatcaaatcaactaaacagctagctgttgctgtgtttgatgagatgattgatcttgatcttcattgaagcacaagtgaagatttagtgattttccagaagtaataagagaagaagtagttagttgtggtggtggttgcattagaagcatttctctttggagataacaacaataggtttggaatgtggttggagtcacattcaactgaaaccctaccccaaataggaaatccacttcaagaaagttcatttcttttgtacttattcctcccacttttgcatagtatgcattgttgtagtacctgaaaattatcaaaattattcagaaaattaaaaaaaaaaaa

SEQ ID NO: 1672 - DNA, 1705 bp, Cannabis sativa
cattcatggtagcaccatagttaaatactagcaagtgaatttacttgaggaaacatgaacagccaaacatgaaccgaatcgctattgaagtagggaatacagaaacaaaaaaccattaggacaattttgaaactgttcatctagtgttactaatttgctttttgccacaggctacaatataaaatgacaaactctacggattactttacattgtacttcttctggtgttgtttcagaatgtgaggccaagtgctgagaacctccctgaggatttagcattgattgtaacttcatgttggaaagaagatccaaatgaccgacccaacttcagccaaattatacaaatgctcctgcactatctctcgacgatatcacctgcagagccggtaattccattgcggattttcagatcagagaatgctgtactgccaccagagtcaccgggtaccagttccttaatggcggttagagaagaagcaggagacacaccgaaaaccaacacagaagaagaaaagcctaaaggcctcttcttctgctttaaccagtgttactaaatcctcaaaaagggccacaattacaacctcctgagacatttaaaaaagaaaagcaaaaaaggaaaaaaaaactattaggaaaacataataaacaaacaataccctctgtaaaaattgaacaagatgttactttgaattagtcatttgagaaaccacaagaagaaaaaagctgccttttgtctgattttactgtcaaaatttatgtagctctctcactctctcattctcttttaatcacattagcctatagttttaaaagtcatggagttgggtttgctgtgatgtaattaaattgtaaaataaaggttcatccaaaagcctttactctattaacaacttacaacttctttacttgaatgaaagaaaaaaaaaaggaaaaacatttggggtttggtttaatcattcaaatggcatttgctttactattagacatctaatcaaaactctaaaaagcttacttttgatgtaatacagtgaccaatcacaaataaacaaaaagttcattaattgtctttaaagattttcactttttttttgtgtctttgagtagatgtgtttgaaatattggaaaagaggggtttaatttttcattattgtagttgaacaagaactgagagaagccatggaagaaaagaaaatggcttctctaatttcttaaattgagtcaggtcatttattaaagcttcagctttatgatgattctctgccattattgataattgtactcttcaaagtaccaggagaaatagaccaaattatatttgaagcatttaaaaagagataatgttacccagttttgatgattctgtcatgattgtacgtacgtactccttcaagttgcaggagaaatctacccaaaatttgtctgaaaaaataaaaatgaaatcgccgttgccggggatcgaacccgggtcacccgcgtgacaggcgggaatacttaccactatactacaacgacttgttgattttgttatcaagtttaggaatataaaccaaattaagaagtgttgaagataaacaaacaacacacctatttttatatagtcagtcaatattgttatcataggaagcttgtatgaagccttggccttatacgatatggccactaatgaaacccaaattccaaacaccaatcatcccacaaagccttt

SEQ ID NO: 1673 - DNA, 2777 bp, Cannabis sativa
agacaggatcaagttaacaacaaaattagcccaaactctaagccttttgacatggaattggaatgggatgagtgatcaccaatgcaaaattaataatgagggtcaagacaagggacaaccacttggaaagaagttagcttccaaatgatggagcctatccatgtcaaatagggaaggggatagcatgttcaaaaatgaagtttacaggtaaaaagggacgcaccttgatatgtaggaatataccaaatacaagaaacagaaaggcctacaaaccagctatataccaaatatcacagataaaaccacaagtccataataataaaaacattgtttctgaggaagatacgagacttgacagtgtaaaccatggtgcaaatgaattctaaagcatgattgaaaacaagaaatagacaaataatggataaagaatgattcaatgtaagtaaaacaaactttcaaacattcaaaaagaaggttaaaatataaatccaactcactaattcacatcaacctccagtaatatcattaaacaaaactaataataggtgccatttaaaagtacatattgattaataccttgggaaaagttgcattttcagattcatctggaaggtcgagaacttgggatgcagcattaatctcaggcactgaagaagagctcggccaaacactagccttagccatgcttgtcacactatttactccaaccgaaccagaagcattttcggaaggtccagggtcatttccagagctattctcattgatgctcatcaaacccatttcttgctcacaagtagattctcccccagtaggggaatctaaaatggaggaccagatggaagagagttctgcagccgaggggcagccagagtaggatctgattgtttgcctcttgtgtgttgaagatgaagtagatgcaccatggcccatccaatcacaattctgacagagagaaactctctcttctgcgcatctcactaatgccggttgggaatggcatctttcacatattagagttctcgagtgacgctttgagagaatattagcagagtggacatttcgatcacatgataaacacaagcatgcagcatcagaccgacaatataccatggacctttgatccccacagtaatcacacaagtagcccatgattcaaaatgactgctttcctcagccaatcaaaaacttccttttccaagtttccaaacttctagcaaaacaacagaccactctaaccaaaattagcttcttagaggaaccacagttcttcagactctcagagtgtgcctcaaaaaccttcaacaatgtcacagaaagaataattcagctttaatgtctctttctaacaaatttaaggaagtgaactaaaaacaaaatcagcacttaatccttcttctactaaaataaagatttcatctgtttctcacaaaaacttgatcttcataattcatatgaaaactaaaaatttggatgtgaattataacattggaacaaaaaaaaaaaaacttcacaagaataattttgttgtgacatagaaattcttaaaagaaggtaagctccagaaattttacagctttgaattaaaatgataaaagaaatactggtgagggcgatgccttcacttatcatatctagtgatctttagcaacaactaaattaaaaccatatcaaatatgctaaaacagcacaacaaatacacatctagttgttgtaaatgtaatattcgtttatcatcaaattatatatatatatataataaataaacacatacaaaactgtgggttatatcaagaaatggacaaaacaaaaactgaaccccagctggtccttagtatgaattataaataaagtaaaaaaaaaaaaaaggtatgataacagtttgttggaaaatcatatgcagaaagttgaaggagagagattcataagaattgacttcataactctaatatttttttttttaaaaaaaaagtatgaacatgggtgatcagatgaattcttcaaaaacacataaacaacagaacccagaagctttaaatttttttttattaaaagttgaaaaataaataaaaatcagatatttacctcagaggaggacagagatgacaaagatctactgaaaagtcgcaaatttatagtttagcaaaaattggagaggagaaaaaagggaaaaatctgaagcagagaaccctaaaagctgaagcttttcctgaatctcttttgtgtgtcttcagatgggaaagaaagaaagaaagttttttttttttttggttgcaataataataaaaataaaatagaatagatagagagatagatatcaaatatggggtgggtgtgaggaaaagagcataagaaagaaaaattacacatgtgtcatcttagctaagcaaagttgataaaaagtgcattacattttgtgggtccctggtccttttcttacacttttccctttatgtggaccccatttccttataaaatatcatttgaatattagtattctaagataccttttccctcacctctttctaattttcttttcttattaaaatataattttaactgccaagtactcaaaaagtacttctctctcagtttcaagcagccaataggtgagtgccatctcatttgctttgctacaccttcacataacaattaataattttgcaatgatgtttgctattttaattgtttaattatttatacaacaacaagagtacaagtctttttctatttttgttttgttaaagaaatatagagaatagttttaaaaaactattaat

SEQ ID NO: 1674 - DNA, 1407 bp, Cannabis sativa
attctaaaacatcaacaataactgaaattataatttgctttccaaggacagcacacttttccagtcaataattaactattaaaaaactcaatccatcttctatttcctcctgcgagctatcaacagaagaaaatccttgtagacacattggttttgtgtttttctccaaataacaacatttgattttaattcaaatgtttagaaaaacagaattgattcaaatgtattcaaatacagtttatgttcaactcaacttctccacaaactaagcaaaacgaatacttaaatgagtttaagtcaaaagaacaagtcttttaacaaaattttgcttatttttcaagtaaacacataaaatttaaaaatgtgggatatgcaactcactacctctttatttaggtatgacttgatgaaatttccatatcgttcggaggtcacgttgttctggcaaagttactaaattgatatgtattttatttttgaaaaaaaaggtacaaatgggatgcaaatgaaaaacatttgaaaccagaaactgggttacttcagctaagggcaggtcttaatgtttttgcaaatttgaggccagcaaccgttttacctcaggtaaaatcttttctatttcttcttcactgtctgtatttcatgtctagtacaagtacattgtattgtctatgttagtttaagttctaaggattgtagaaacgaaaatatgcattgtacttttcttatataccgtttcgttatttgcagttggtggatgcttcaactttgaaaaaggaggtcgctgaaggtgttgacataatggttgtaagagaacttactggaggttagcctgagatttacatgtttggactgaggatgcatcaaatgatctctttatttcattatagttttctgctaaactacaggtatatatttcggaaagccaaggggttttggcacagatgaaaatggtgaggagattggatttaatactgaggtgtatgcaggctacgaggtactacttttatagttattattttcgtattgcttcaacaacataagttatgaaatcgggtttataagttgtattgagtcagtcgtggccatatggttgctagattgatcgcattgctcgtgttgcgtttgagactgctcggaaaaggcaaggaaaactttgctctgtcgataaagcaaacgtcttagaggtactcctatattaagcttgtttgttcctaaactttactccaaatcgaaactgtcctcgttgttgtactttaccattgatgtattgtttcttcaggcttcaatgctttggagaaaacgaattacggccatttcatcagagtatcctgatgttgaactctcacacatgtatgttgataatgctgcaatgcagctagttcgatatccaaaacaggtttggcttaa

SEQ ID NO: 1675 - DNA, 3167 bp, Cannabis sativa
ctggtaaaatatatccaacagtaggttggtgtaattttatctccggagggtgtaattttatctccggaggcttggattaggttgctccatgtcttcatggtacaaaatatagaaagttagtgggttggattcaagttattgaaatttgaacttccatcccggagtcaacctgggtgcagggctagggtcccctcccaagttgactgctatgattcgggtctgctcaattctgtgacgtcatccttcatgtcacgtggcaaacatttatatccacgtcaccaaaaaaagtttttgggttaacagataccacaatgagcctgctacttcttcgtagaaaaataatcaaattattttctatagaaaaatattacatggtaaaacttgtttttttgtccaccattctcaaccaaaaacattggatgcatatagttgataacaagagaaattttaatggtacaatactattaattataaaaacctatctagagtcgtctcatattcataggaggcatgcatgataattaaggttgtgcattataagaaacttccataattttttgccactcccggtttactatggtaaagctctattttgtagtttgatcagggaacagtaagccccattacgtcctaaagaaatcaattcattgtgtgaaccttgttctgcaactcttccatgcttgataactgcaattgaggttgacttttgtatggtagatagtcggtgagctatgactatgcatgttcttccaaccatcatcttctcaagtgcttcttgaactaaattttcagaaatgctgtcaagggcacttgtcgcctcatctagtaggaggattgacgggttcttcaaaatcgcacgggctagagcaatcctttgcttttgaccacctgacagctgcactcctctttctccgcagtaagtatcatacccatctttaagtccactaaaagaaaattaaaccaacaaaaaatatatgaatattagcactagaaaatatggcttcatattttagtctcattctataaaaatgaagacatggttaaaatcctttcttcataattattttttcaaatttcaagccattttttctgagtttggcatgtccttcgattaagaaaactatttctttagccagcaacattggatcacatctttgtgtcatgatactgtaatttcatacaaatttaaaaagaaaacaatcattttactatacttttgtgaactacttatttttattttgaaactaataattagacctcgtttccataccttatgaactcatgagcattggcatgtcttgaagccttccttatctcagattctgaagcttcgtctgtcccataggtaatgttttcgcgaattgttccagcaaaaagagttggctcctggctaacaagtgcaatatgggatcttaaagttcttacattatagttcttaatgtcttgttcatcgatgtgtattgatcccttcataggatcataaaacctttcgataagcccgatgattgtagattttccagaaccactctcacctactagtgccactgttatgccctctttaataataaggcttagccccttaaggatcatttggttaggccttgttgggtatgaaaagaatacattttttaactccacgcgaccttttacctttttctttaagtcaatcccccatttgctttccgggtcaatttcactttttctgtctaaaatttgaagaactgaatggatggcaatgcctcctttagatatgtctgatgtcatactcccagcttctgcaatgatgtaagcagtgaaaagcaatatcaaaaatgcttgaaaaaggtgctttgctgttatcaggccttgaaccagtagcctcccaccataccaataagccaaagccgtagcagctgtgctaaagaattgggagctaaacaagccaaatcctgaaacatatgattgcttgatactttccttcttaggaccattcaaggttgcactgaagagtgcaagcattttcttctgagaagagaaggcagtgatagtcctatggttgatgacagcttcacttgctagctggcttccttccttctgagcttttcgagcctttccagccatactcttcattaagacacttcttgcataaaagctccccacaactattggttgcactgctatcatcacaagtgttagcctccatgtgagggctagtccaagcccataagcaaagacagatccgaaaattgcctggacaagcaatgatatcctgtctccgaccaaggatcgtaccatgttagcctcagtagctaaccttgcacagatcgcagcacttgtattctcatcctcatcaaaccacccaatctcaaacgtcattaacttttcaagtagtttctcccttactcttttagttaatttttctcccataacagagaaattgtagtgttggaggatgttggtgaagaagttaaaaacaccaatacctataaaaatgagagatacttctctggatttggacttcatttcagattcatctttaagaaagtagattgatataagagatccaacaaagtaagcattaataggttgtactgcgccagaaccaattgcccctaagcatccaagtatggttggtacccactcaggtgcattcattttcagtaaacgcatttgagaaagattctgggatgaatacttcgaatattcttcctcgctttcctcaccaacatcatattggacagagtaagagtagggggttcccatggaggcagacattgttgtgctaaaaggaaacaatgttggagtgcctggagcacttgatctaacactgtaaggagttctatgtgggcttggggtgacattcttcccgcgtcgaggtgtttcatctatttctgtactcgaatcattttgtgctgtcaattgctgcaagtttaccatctttgagtattcacttccttgtcccccatttcgttgcatcagatcattgtgtgtacctgattcaattactttacctgcttcaagaacaaagatagtatttgctgtttgaattgttgataggcgatgggctattgtgattgtggttcttccttttgatgcttgatcaattgcttcctgcacaactctttcagattgtgcatccaatgcactagtggcttcatcaagaagcagaatctttggatccctcaata

SEQ ID NO: 1676 - DNA, 634 bp, Cannabis sativa
ggatggtaggtgggggtcggtgaacttggatctggttcctgtttgggttagggtgtatgatgtccctcccagatttttcactcggaaaaatgccacagccatcgcgaataggattggagacgtggtgagcatcgacaggatctggcgaaatggattccctgcagaggagtatattcggtttagggttactttaaatgtgaggaagcctcttctggtgggtcttcatcttcccatggaagagggggtgtgtttatggtgctatttcaaatatgagaatcttcccctggtttgctacaagtgtggagtagttggtcatgaggagatgtactgcagacggaataggagactgatttcggatgactttaatcatacagtccctatgtatggcccatggatgaggtttggagctcgggtgaaacactgttttgaaaggattcaggcggaggaggcagcgagagaatttgaggaggacaatcgagaggctgttgcggccctgagggatgaggacactgctcaaaacccgatgctgacgaaggctttcgagccggggttactgaatatagagattcatcgggaatcacttgagcagagttctgcttcagtggagataggtgttgacggcaggggatcggtg

SEQ ID NO: 1677 - DNA, 5002 bp, Cannabis sativa
aaaaaaaaaaagtcaaaatctaaccatggattaaatattgcaaagatgctatgctagtttagaatacaaacagaaagtagtacccttatctcattgaatccaagatctagcgaagttaatgcttcattgaccacttttaagctacgagcaatgcactttgcaccctggaaatcatgtgtataataatttaggtaaaatttgaatgtacaaagtgggttatatataaatatatacatatatatatatatatatacagggtatgtcgacttttgttaagttttatcacatgtgcagtttaaaatttaattttaaataaatttttaagagagataaaatggtattgtctagcaaggaacctcatctcttagtccatttcccctcaggtccagattggataaagtaccattgtatcttatcatatcagcgatgaattctgctccttttgctcctaactgcaatatagtattttttatgttttgtaaacttcagaacctggtacaaattctagaatcaagatttgtgtaaattcaaaaacgtcattttacctggcaccagccaagcttgagcatattgatgttaccgtgaaatttaagaacttcacataaactttctgcaccttctggaccaatgggattataaccaagttccaactgtgtcagagacagtatcattacgtggatccataatattaatattaaaaaataatgagttgagtgattaagaacatacggttataatgacagaattgtctttcaaagcttttgctattacgctgactcctttgacatgaatgttgtttcctgcctgtaaaatcagttactatgtttccaggtatgaataaggaagagattttcataaactaaatatacagactagagttcttctaaccaagtctaaactttttactgtccggttttccttcaatgcatctccaattcgttcagctccctgaaaattcaagaactgaaaatcaaaaatagtaaactatggagggaaggcgcatcctgaatattttggtaaaatttgttactaagaaacaagtacattccgcataatatagatttgtgaagaaagcaaacaatcaaaaagaccacttgctcttattttccctactattaagaaaaacacagtagttaatgaaacaggataggtgcagcagaacttcaatcaatgaaaataacggtcaacaaaagatgagttacttgcatactgtaaatatcaatacctcatcgcctatgtcattcatgctaatgttcaacgttgtcaagctcttgctcttcttaataaattcagcaacatgaaaagcaccttttgcactaattgagttattgccaatttctagacgggtaagtttacctgtgtaataataagcatgtaagtgcatacaaataatcaacataaaatcatctatttctgtttcttagtcagaaatgcatttatataggaaattaaaacctttatgtgagcttaaaccatcaattaatgtgcgtatgccttcatctccaatagaatttccatgcaaatgcagctcctgacaggtataaaataattatgattctcaaattagggttgtatttaatcaattggaatgaccaggtacaggaacatgcacacactaagaaagtgagacatgtaaagcccagatatcacaaaacaaggaaacaaaagtaagaggaaatggaacattacctttagagacttgttcccttcaagtcctttagacaaagaattagcccccaaggcaccaccatagttgccacttaacattaaatcaccgatatttaaaaggaaaatcattagaaaacatatccagctgataacagaatagtataaattaagagaaaaggaaacaatggctcttgggctgtatgctatatcaccagatagagaaagtgtaaagaccacttacttaagttgtaaatctcgtattgtcttactctcaagaagagctccagccaaacttgcaaatccctgccagtaattagtaaaaggttattaacataattccttcaacttgaataaatagaattaagctaatatgagaatatatagaccaatctgcttacggaaaattcaatcatattgttattgagttcaagaaaacgtaaggttgaatttttcttcaacatctcagcaatagcttttgcaccctgcatggtatgtgagcaccactttagatacatctctgtgagaagatctacacttttaacatctgtaactttgacagcggatgacataactcggagcttaatttttttcagctagaaataactaacctcatcccccaagttggcactgttcagctgaagtttagtgatcccagtattatttaccagtatttcacttaggcactgtggaaaagaccaacccatacaccattaagttagttaaggttgagaatactgcatgcaacaatagttcatttgattttacttattttccaattatactctcaagcacacaataatgcaaggtaaaacttaggtcttccaaatatgcaatagaaaataataaccaaacctttgccccagcatctccaatagggtttccagaaagatctagagtctttaacatgatgtttgattgcagaataccatcaaaagcttttaatccagcagcagttattccatttccggcaaaacttactccttcaagtgtctgaattatgagagaatattatcaatatgattagcaatgtttatgtcaattccatgacaaagaatatgggaaacccccaaaagggggagaaaactctcttcatgtttctgttacttttaatataaaaatggatcccatgcaattctttttctattccttaagggctataatataacattaatgttttttattttatttttttaatttttgaaaaagagacgaggtcacaagggtcatatgtcttagactgaccccctcccaacagtattagggatcctcacatatggtggaggagaccgtggtatcaaaaaagaacaaaaaaagtagaatataatccaataggacttggtatgtgcaataagtaaactaacataaattagagcatttaaaacatcagaacttcctaagccagatgaatagtatcttgtgacagaaatcaaccccattgactgctaagatcttggatttttatataacaactataatgtaacataatgatattcttcacaattctagataatttctcctacatgtcagtcttgttagaagaaacggctgaaacaagaagctatgtaaaaataattgaccgaaaactggtcaactcgctcgtatgtatagacgagatgaaagttagaagtaactaagtaaaattgagagtagacacaataatttatagtagttcactccctgtgtcgtgatagtaatagagctacgtctacttcaaatttttattctcacaagaatgattacaagaaaaataactaagtctgaaatctaatttctagaaagaaaaactagacagagatactttgaccgtatgggtacttttctgaatgtgtaaaatgaactagaggagctctccttttatacgaaaggaggtactataagatataataaaatattcaaaaaaagtgaaaaaatacatttcagctatttttgactgttgatgatgtctaacagtaaaattgactctggacgtcggtcgtcaattaccggagcttgagtcgcgtttgcgggacccgtttcgagtaagagacttgcttcgttgattgacatgaagagaagagcagatgtcatgcttaatgacataaaagcatgggagagagatgagaggactttgtttaccgctaaaaatcactgtaaagttggtttgataatgacatgccaacgagtttatttggatgctcacttttctaatgactcttggacgatacctcttgaagatgacgaagaggacaaacaaagtgaaaccatcattagtcttgagcaatgtcaaaagatgagaatttctctgatggggaggattccattcaaaatggtccaaactattcagagagaatatcttaatgtcgaagcgagaaagaagttcactccggtagtagtgtaccagagagagttggggaatcagtaggtcatttatactccatttgttgccgtcataacatattatcttgcttttcgtattttttctgttgtactaaacacttttcttttccttcatgaagacaacatgagtttccttgctggtatgagaaattattcaaagaggaagacaatcgtaccgaaggaggccaatccttcagttagggaagtcgtgcaagctatccttgcaacttttcctgtcctgcaaagaaggagtctaggaaaaggggcaaaacagttgtgactaaagctactccccttgtccaggattctaacaaaaggaagtcaaaggtcattgaagttgatgaggagtctcctgcttctccaattaaaattactccgaaggaggctgataccgataatctaaaccccagtagctcggagttggtggacaggctgcgtgcacaaggcacatggctcctctctggtggagatgccttgatcgagtctaaggttgagaatattccttgaaggaagttggttactaccaagcctctgcatgccagcccaaagatgcttcactgatatcttggcaaagatgcttcactgatatcttcaaggtaaataatattttttgtcttcttttgagcttgcttccttacatttatagttctctgacttacttcttttacttttagacttgtgtcgattaagcttacaccatagacaacgagtacaagaaagttgtctaacttgctgataaacttttagctgcggagaagcgaaccactgatgcgaagagcaaggtagttgacttagaggaagctattagcgacttagagagtagtgtgtccagccttcaaggagtcgctgataatgctaaggctctagaggacaacttgaagaaagaccttgcaactcgaaaaaagactttcgaagttgaagattctttttcgtcggttgcttgatgagaagaccctta

SEQ ID NO: 1678 - DNA, 2565 bp, Cannabis sativa
aaagggaagagaatgatacacatacaaacactcaaacttacaaatgagttgatatgttatttatgacaatataaagacatcagcaataaatattggttaccgtgtgaaaactaattgtaaaacgacctgtaaaacaaagttttaaccaaagattggcttattgtttttaatatgtatcagcattagcaatagttgagggtagttagtaattacatttatattctgatcatgcgtgggtattactaataggaaaatttgagttcggtattaccgttgattacaagccccaaaaaaatgggtattacccattgggaactgttttatatctggaatacttttaatggatattatttataaatgatattggatataaatcaaacagttgatatttataattattaattactttttaaaaactaatattttgtgttttaacctatgacttgatgacatgatagttttttttgtctcccaataatggacagacattgaggaagtcttgcattatcagatttagctcaatattttggcctcccaatagtagaagcctcaagatcaagaaattatgaaagtagaaatctccaagcatcattcttgtaaagagagattaacaaataagatcagagagagaccatccatccatgtcttcatctcctctattcattatgttttcatgcttcaagaagaataataagagtattacagaagaaacaaatggtttgtttttgaagaacggagatgcgttgctagagcaaaccattcgtttgttcaatgggaaaatccaatccacttcgtacatactcttctcatcaacttaagaaagcattaaagagaacttccatgttaacagggtggaggttatcaattgtatagggttgtaactgatgatggtgaaaaagaagattgagaaaacgttttcatcagaaccatattttaaaagggctgattatttagaagaaaaaaatgctactgaagttccagtggcatcacagatgagcaaccacaaaaacaaaaacgttctgaagctcttgatatactgtcttgacagttgacacagagttgcctatgcaggtatatgattactttcctattcaaggtattctctcgttttctcaatcgaaataatggaccaccaccactgccatttgaaagcaagttaagaattgggattcaaaattggaatagccaatgcagttgcttatatccaccatggtcataaatatatatattataacacgtttgaattaagctaagaaataattaaacttcagagaccaagactatggtcacaccttggttttggttattttaactttccaatatacagctgtgaaaaaaaaaaaaaaactcctcattatacatggtgcattacggtgacttatagtgcctgagtaaaatatcaacaatgaccctcgcaaaaaatctaatacatttttatatttagtgtaaggaaggctgatgtagtaatttaaacaaaataaattagtttctaaaaataacttgttaaagaaataaatacattttttttaataaaaaaaattgttggtaactcgccatagcaagtcactagattgccacatcattagttttccctcttttagtagtttaagtttaatttttaatattttttaaacaattcttattttagttgaaaggaataaactagtgataagaacaaaagctataaagcaagaaatatagagcgaaaaatactgggtcagtggtttcccaagctttctgaggcaaaatacacaaaaaacagataggcatcccctctcaaccaaatgctaccaaaatcctaatcatcaatccatatcacattccatacccacatcagcaattaatttagcttcccaaattacccgtgcatctagaataggtaaaacaaatctaaggcctatcataatgtcacatttatttttttctttttctctattctaccacaactaacaactagaaatctcaaccaatatgttcatatgaagatatatacatatatatatgtacctttaaggcaagttcaaactgattaatactatgttcttctctccactgctatgttcttctcctctccatccacataagcactgaactgtgataattagctagttaaagaactgtacaaactaggaaaagacaaaataaagacttgagttgtgcttgggaaaagaatgtttcatcatcatggtccaacacaactttgcaaggttgatacagctggctgcatgcaattctatcaaaaagtgaaactcaccaccaatatatataaatatatatcttacctattggctatacaatggtaagaggtgaattaggatctcacaatgactacgtatgagatttgttcttgtggtttaacagatttttcaatttttccgtttgatttaacaattttataagaaaaatgtcagtacttacctactaaaaagacatgtcccaaatataacaatgcaaatatttaaaaaggtgtcacagattattctctttgtctagattatcaattgttgcttcctttcaattgtttgattaaatttccctccaaataatatatattttttccctcca

SEQ ID NO: 1679 - DNA, 2028 bp, Cannabis sativa
ttgtagaagaactcctaattatttagtcatagtaaataattactctttgtattttaaaaaattagaaagaaaaagaaaaaattgaaggtaaagcagttcaagataagttacggtggttgacaataattaatttattacctttacttcatcgcgtggtggcacatcgtagtgtttaccaggcaatccagtgttcagagtgctgagtaaaattgtttcattagggtaagagaaataaaattttagtattttttttttcggtaaattcaaacaatttattctgaagcccttacttgaagatgtcgagaatagcgacttgaaagtcgtcaggggtgctgatatttttggctacgaactcgttgtacacttttcctgataagtaatccaacatttgcgagtacaacgaccctatcatgatgcaaattaactatgttattagagacaatatcaaggattcaaagttcccatataaaagaaacatattacaatgaaacaacgaaaataaacatatatatgtttacaaaacgagtagcaaaaatactggcttccgtcataggaattggatagtgtgtaattcaaggaaaaaattagatgagcatttaagaggttcaaaaaaatgtcaaaaaaaaaaaaaaaagcaatgaccatttttatttttaattttcaaaacatggactccgaagcataatactgtagatgcttaaagagacgaattatatacaaaaaataatggaatgaaaaaagtaaatgaaccaacctcctcccatgaaactcataaccaatcccattttgcagaaagctagaaaaatggggtgccgtggtatatgatacattaatgtgtagctatataaagcagtcatgtttgataagcttaagcaaagtatccatcgttttttgggcatctatccaggaaatctgattcttcgcttgaaactgacctaaaacttgaataggagcctatagagagagcatatcacatgccataagttggctgctcatctttgtaatatatctcccaatgtccaacatcttcgcatgcttttgtttctccgttagtcttctctttggataaatcagcatgtcgtcaatatcaattttcaaaaagttggtaaccacgagtattccgttgtggggcattcagtcttttcagagctgatatctgaattagctttggtaatgagatgaatccttgagtttttttagtagttgaattagcctgaccttttcccaaacccccgtacccgtcctttcctagtttaagttaacttgtcatgtgcttccataactgccccaaagttaaatgtaaacattcccaatgcggttccaacctgtttccagacacgaactcttggatagtaccatcaacctcaatgacacttaaaccaacttccttgtttgctccattctctgccatcaagctttcagtttcatctgcatcaccccacctcctctcactggcatacaaatttctcattgttacataatttccatcattccccggctccagttgtactgcattttccaaagctttcttagcccttgagaaatcattgaagtacccacatgcagaaagaaaagagctcaagattatcccattagcttcatatggcattctctcaatcaatttctcggcttcctccaagcatccggcctttcctaacagatcgatcatgcaaccatagtgttctatccgcgggacaagttcaaagccttccattgcttcaaaccactttttcccttcatctactagaccgctgtggttacaggcagataaaacaccaaggaaagttatgtcattcggcttgagtttcatatgttgcatctccaaaaataactccaacgcttgatgaccacggccatttactgccaatccatttatcaaagcattccaagaagctgtttccttttcaagcatctcatcgaaaacaattttagctcttgatatttcgccacattttgcatacatatctatgagtgcagtactgattttggtcaacttatcaagccttttacttctagcaaactgatgaa

SEQ ID NO: 1680 - DNA, 2119 bp, Cannabis sativa
attgatgagaaatgcagcaagagcggcttctggtttcgtcgctgctcatggaagaagaagaagaattggaccggtgttttcacaaacgacaactgcgtccagtactacgacatatgttaaattgaatgtttggaatgagatttgttcagttgaatgtctatgtatttactaagagcactcgctttctctcatcattggcgccaaactcacataacagaacacactttttgtgaaattggggagatctccattttagggcttgcttttaattcctataaatccaaatttcttcttattctctctctcctccattttgatctctgtaaatccaaatttcttcttgttctcttgctccatatctctagttcacaatttggattcttgattgttgtaagccatttattgttaaatgagttgttcagtttgagtaattaaacaactctagtagtactctaccttagattaaaagaaatggaactgaaaagcaaattgattaatttgattaaccatcttctaaatcattgattattatgttgcccatttcaatgaactgattgggttcttatcatctggaatgagaagttgagtgccctgctctaagtaccagatcgtgtatgaagaagtaagtcagtttggtagaacaaatgttctgcaatattagagttttttctttttctttagtctgtaaaaaatatatttcactgttgtcttttgttctgagtgttttataacaatgttctatggtatgttctgttaatgattttaattctagatactgaacacgcaggccaagatacttacttagctattttcatgtgacttcataatgaatattttagagcttagtttataaactctttgttttgtaccacatttgagaaaatcaaggatagagattcacttaaggtgagaaccacaataagcatttcttataggatccccccatattatattttgaaatgagtatagagatattttagtggtcagatattatatgtcttattcctggtacgggtgagcataaaatccagaaaattgaaaaaatcattcaaactgacctaccgaacatcgttggaaccaaaaccgacgaaaccgaaaaccgaaaaaatcactaacggttaaaaccgccattgaacggtcggttttttttttggataataaaccgactgaaaaaaaccgaaaccgaccgttatacatatatatatattaatttattaatgttttttttttgtatgtattatagttactaataatatattatttttttattaatattaaagttaaaaaaataagataattagtttttgaacaattaatttatatgtttgtagttgtaaaatataaaataatgtatttataaaataaattagataatttttttttaaaaacaaaaaaaaaatcggtttggcctgtttaaaccaaccaaacctagattcaaaacggtcggttttgagataggttctggattggtcggtcgattttcggattgcaccaatccagaccgaaaactgaattttggatttttatatagaaaaatatcgaccaaatcgaccgatactcaaccctacttcctgatatgctaaattgatcctacatgtttgtttgttcctcaactcctcttttttgagcaacaacaagctacactacaaattgttaatgaaatctagcataacactttctctctttgaagacttcttacttactagacctgagactctagctttaacattttcttaaatcattttataaatcctattatagagtaatagcagcaattaaagaaacaagtatttctattgagccatgtgctataaatcgtagcagcaagtgcctttctagggtacttggacacttggatttctcttaaatgtcattgtttgattcccttaaagtaatcttttgtattgaatcatgaatctagtcttttctttgctttggcacattgcagcaaaatgttttaggtagtgagattttttttttctttctctaacatattcgtacggttaaacaacaataatattacaaactgaaagaggaatgtgttagaggaaaatttattatatttttgtagttaaattaacttcacataaaaatcaactaaaggttaattaactactat

SEQ ID NO: 1681 - DNA, 2630 bp, Cannabis sativa
agggcacaaaacccaacaaaatctgcctccaacagtgaaggaaaacattataagtattgccaagatgaatagatgtattgacttggaatccattatgttatgacaaggattaaccgcaacactatttgccatgccttgaacatcaacgaagacgtgacatcgatctgccaaaagtagagaccattagatctggtaagggccgaagcagtgaaaacggaagtagataagttgactacgaatggcttcctctgggaagcagtctatcttatttggttggctaatctggttttggtcctaaagcccaatggcacgtgaagaatgtgcatcgacttcacagaccttaacaaagcctttttgaaggattacttccctctctcatagatagatcagatggtggatgccacctccgagtacccgttacttagctttatggatgcttaatctgggcaattatatcaagatgcacatagccgatgaagaacatactagcgtccaaatggataaaggtgtgtattgctacaaagtaatgttgtttggtctaaataatgtcagagcaacgtattaacgactagtcaacaaaatgtttaagaattaattagggagaaacatagaggtctactttgacgacatgttggtaaatctaagacatccagagagcacagtacagaccttgaggaagccttttcggttctctaacagtatgggatgaagctcaattccaaaaaatgtacatttggtatcttctttagaaagttcctaggtttcatcgtcagctctcagggaattgaagcgaacccgaagaggatcaaggccttcatcgacatgccatctccctaaaagcataaggatgtctagagtgttaccgaaaggatcgcaaccctcagtaggttcatcttcaaatccacgaacaagtgcatcactttttttaacgtgttgcaaggaaataagaagtttgaatagactgaaaagtgtgaagatgccttccacaaattaaaggaacatttgaccaaagctcctattttatcaaagccaatgaaggggaagattcacacctttaattgaaagtgtctgatcatgccataagtgtcgcctcaatgcgagaagaaggacaagtccaactattgatgtactacgtcagcaaaatattactgggtgcggaatccaagtatcccttgattgaaaaattaaccttttgcttactatttgcctcccaaaagttcataccttactttcaagcccatgccattaaagtattgacaaatcaccctttccgccaagtgcttcggaagctagagacatctgacagactgttaaaatgggcaatggagcttagccaattcaatattcaatatcagccttgagattcgatcaaagatcaagccttagttcacttcgtgatggaatgtttcgggttaagtgacctcctaaaagagctagtcctggagtcacccacctggaaagtttatgttgacagagcattaaatgaaaagggagctggagaaggagttgtattaatttctctgcaaggacatcaactccaaagtgctagccatttcaaatttcctactccaataataaagctaaacacaaagccatactggcaggactacgattggctaaggaagtcagagcccaacatattgaagtacacagtgactcccaactagtggtaaagcagatatctggagaatattagaccaaaggcaaaaagatggctgcctatgtgatgatgtcctggtaattgttgcaagggtttaaaggctacaacatctgttaagacccttaggaccggaattcattcgtggatatgctggctaaactcgctacaaacttggagatcattcaatacggagtagtgcctgttgccaaccttaaaacttcaagcattaaagcacaggagtaaacaccattgttgatcattcaaactcctaaatatggcccatctacaagttcttaagtttgggagagcttccggtagacaaagctatttcccggaaggtttagtactaggctccccaatatgtgatactagataggaagctttaccacaaggggttatctgtgccatacctgaggtgcatggctgggactgatataagtgttatcatacatgagattcatggaggcttttgtcgagatcataattctggacaaagcctatccaagaagatccttcattaagtctacttgtggcccataatgaagaaggaatgtatagaatatatccaaaaatatgagcaatgtcaaagatacactaaggtttcgcgagctccaccgatggaatcacactcatgagcagtccgtgacccttaactgtttggggaatcaatttagtaggatccctccctactggtaaaagaggagttaagtacgtcatagttattgttgactacttcaccaagtgggtggaggcgaagcccatgaacagagtcacctccaagaaggccttggcctttgtcatcaagaatatagtatgctgccttggacttccacacaagattgtctcagacagtgggaagcagtttgatagtgatcacttcaccgacttctataatcaacatagaatcgtgaagaggtttttaattgtggctagaccacaagcgattggacaagtcaaagccgtgaataag

SEQ ID NO: 1682 - DNA, 952 bp, Cannabis sativa
gcgaaggccatattttccttcattttcaaagatagctccatcaatgttaactttgattttgggagaaataagtgcactccaatgctcgacacctccaatcgaagcttgatcccttaagggaggaggaatatgaaaccttgtttgagcattactccattggcattcatgaaagttgagctgagttaatgtaactatccttttaaaagaagctaacttgtctttccaaattagatcaaagcgtagaagatatttagataataattttttttttgtcaatctcaccccaatcatttatgcatgttatgttattggaaatattatgtttaaatgcataatttattagcatggcatctattttcaagtattataaaaagaaatagtcacttatcatattgcacttattgcactctttcatgttttctcatttattattctaatttcctaataagttggtgtaactgtaaacatttagaataaatatcttctaatttttttaaaaaattagaataatttacaacagcaaaaataaaattaaaaaaagtaatttattgtatttgtattcttttatttttatataccttgtgaaatatatattgtttgtattttattttgtatatataataaattattttaaatattctttaaaatttataaaatatcttaaataactatactatatatatatataaaaattaaaatataactatttcattgtaagaaaacataaaaatactattttaaagaatcactgtctaagaaaatgcaccatcattataattaattatgaattttattattttattttttagttttttctttcttctttagatatatgtagtcaaactaagaaaattcaaaattggggtcatgcgttcatagctacgattatttattaattaatctttgtctcttaattaatttgttgagccaaaaagaagttatatataagtaa

SEQ ID NO: 1683 - DNA, 2093 bp, Cannabis sativa
ttccatcctgtagcctgccccccctcccctccttccctcttttttctcattgttctcccttaccgaaacacacttctaagaacatcgttacatcttatcctgaacatgtttgcagaactttatttttcagcattggtttggtagggatttgctgccatttcatgcatttaaatgtagacaagctatattttagttgaattttgactctgcatattatttctcaggtttagggacattgtcattgagtgtggattgtttgtggttcataaacttacggaaaaattctattgtctgattttcaggtggaaatactgttgatcctttcaagccatgtcacatttacagttgtagacggactgcacagaagaggaaatgtacagcagaggcaagcgatgaacgtttgagtgacttgttaagagcacgtaagtgcaaaggcaaggccattgctgagcctgtgagttgtcctcctgcaacaaagatccagaagattgggtaagtatattagttagtattatgtattttcttcatgtttgatatttacatgtaacttcacagatgtactaaatgttgacgcacaattgaaactcttgattttttgtgcagccaaatataagtttatttgatttgcaaaggtcttgtatgtaaactaatatttacctcctggggtctctctttgctttcaaaacagggagaacataagggaaactggaggaaatagtgtatcgaaggcaaacacagttccaactaaaaaggtttgtttttagattgatctattcctttctttgcagggagctctttaccattattgtaccatcggatgaactatgaagctattttcctgcttaaaaaatgattttatttgattctcaagctaaaatctgtcaatatgatttctgtgtaagcagggtcaaaagaaagctttgtcacaagaatttatcgagcagcagagagcttattttgcagaaattgatgcatttgaactacaagaggaggaggttgagtatctttcagagtaggactaactgcaagagttaatagtattaccatattagatgagtaataagcaacataacccttttgtatagctaacgaaggtatgcagttaaatattctggccaagtttacagtcctcgtctcctattaacatcagctcaatcacattagaaccctcttgcagataaaattagttaaagtatagccacaaatatttgtagtttttttttcttcctttctcttgtgtttaatcgcacaaaattatgctcttgcctttgtgaatcaatgatataatctcattttacatggatccaatcacaacgcttcgttagcctactccattgaacatattgattgaaatattaactatgactacgcgattctcttgttatctttttttttttagtggataaaatgtaaatttgtaatgccctttgcttgcgttgcttgtcggaacatttggttggcagtcatgtcacccccacttgggccatcttttctgcaattctagtagttgttttgtttaaaccttgttgggctgggttaggtgatagtggtcaacattaggaatgctgcttcaagattaaagacgtcaatttcatatgtctacaactacaattgacgttactagccatcacattttgcttcattgtctgttttataaaatattgttaaatgatgtgaccagccagattagaggaaagcataatatctggaatcgaaggtgttaagatttattcaataagtaaaattaacaattacaatttcaaatgcagtaaaacagaataactcataaatagtcataaaaagttatagttctaacttggactagttctaaataggaataaattctacactaaaataagttataatatccttaaaagaaataagttataatatttgtaagtcttgcttttagaaaatatgtctccatatagtaataattgtgaacatattaaatagtgtatatatggagacatttttatttaccgtacatcttttttaaatgtctacatatttatatatcttttatcaagtttggaagtcattggggagtaagtgacttgagagaaattgaatgagcataataataagagaaa

SEQ ID NO: 1684 - DNA, 3663 bp, Cannabis sativa
aaaaaaaaaaaaaaacctttctaccttttttaaaaaatatatatgactaaacatacatatacatgtaatcaaaactaaaattaagaataataattatagtgcaataaatgtgcttttatccatttgtatttgtaatcgtgttctcctcttttcatttgatttttcctttttcatcacattctgtttaaagcccagcgtcaacgtttgggcccgtatcatgactgtgcaagtgcaaggaccttactgcacttgccatttatgtgcgcaaatctttcagatgaggcccagccttcttctaatagtagtagttagtaaatgaccaaatgaccaatgaccaagaatcatcttttgaaaatataataaatataaatttttgacatatactaaatctaaaattagacgattttattctaattttgccaactaaccctattgtcaattaaaaaaacaaaagaattatgtagacaagaatcacaaagtggaaaaaggaattgacaagaaaaccctcaacaaattctctccttttcttttttaatttgatttttcctattaattatctgtaaattcattccaacttataaagaaagccctctcaacaaagttatccctctgtttcaatatataatatatttaggctaaacaaagaatcaacataggcaagatatgattaagattctgaatgctaatgttttagatgagcttatctttatcatgaaatccataaccacaaagaagaaataataaaagatgccattcctttcctaatcaactgaaattcattccatttgaaaagatgaaaccctgaaaggctgaaaaggttcaaagtaaccgaccaatcaaagaaatggacaaagcatctacctcaatgcattttcttagtgtctgacataaatgactaatataccctccaattttgtcacaaccaaccaattagcctcagacacatttggatcacaaaataataaaatgcaactaatttttgtatcaatggggttccaaatccaataaataatgatagacaaaactgaaaataattgaaagagtgttggtacagtttggacttacgtttcaaccacaaaaaccatgattagaaatttatgttattagtaggagggtaattatgtaattaaagaagctataggtcaaaagcgaagtgaggatactttagggaagcaaaattgtcctaacaaaaaaacaaaacaagaaaaaatagtaataacatgtacacatggagaaagcaaactttgtctattaatttttatttttttttatctacattatattattattctccaaacaaagagaaaaactatagaaagaaaaaagaaaaaagagatatatgcataacaacacacgataatattaatcccaattaatctttctctctctgtctctctctttattataatttcattttcagattataagttactgatcaagtcatcaagagaagccatatatatggaaatcccaccacagcttgttcagtacaaataccacttggccatagcaatttcggtttcggtagtgatttcattagtgttatacgcggcgcctcggttgacaacgataatggcctactttgggcccttgttcgcctccacaactctattcgtggtcgctataattgccttcaccggtgtatccaagctcgccgtcgaagcacatcgtggcgataaggccggcgaagatatcgtagactacgttgcagggctgcaagaacatgatgatcaacatgaagatcgtcaaagttttgaattaaaaagctgatgataattaattagatcatatcatattactgattaataatctattgtggtaattgatgatcaatgtatgatatgttactactacaatttaaatctgtattatctcttcttttaagtttagataatatatatctttgaaaactttacaagttcccctcacaatattgtaaaatgaatgaataattgtaaaggcgtagttgctcattaatttcttatattttcttttcttgtttaaatattttgttcattaatctatcttcctattatatttgtttcttgttttagttttttcataaaagaggaagaaagaggaatgaggagcaagagaaaaataatgttgtcgttttctctgcatgtgcagagggagaaaaaaatgtgtcgtcttcagttatacttccttatataaatcatgtcgtacgtgtggtttattagaataagatcgatacttgtagctttattatataattaattagaaatccgtttcatcattcatgcactaacgcaaattatatgtcgtttaccttatgagacgatgctgctcccttaaaaacatatgtggtatcgttatttcttgttattaggtaccttataaaatcatgcccatcttaatatatatatatgtcacattgattatttattcaatcaaattatggagacctgatattattatacactaattacaattaataatacgacacattttgttgtagtgtttggtattaggtgtcatttagcccttctctttaattttgtggcaaatatcaatacatggttaacaattaataaatcaacggacattatttatcgtcatgatttaccctttttaccttaatcaaaaaagaaaaatacaaaaatactatcttaaggtgaaaattaccacaatataataacataatgcatgccattagtgttattattttagaccttagataccaaatagaaatcctcattaaaaaaaaacatcatgcgtacgtatctccattcttcattcaaacttcactaacatagaattatttaagattcacaaattaatgggaggagagaatcgatggagttttctattgtactcttttgcattttttttatcatctaatatgatattattaaattaatttattacaccatgaatcattattaattagaaaacacatcatacctatttaattagtgaataattattgatcatgttatgtaaattatatttatatatatggataattttaactgaataaattaagccacaaatttaattttaattagttgcaaattttattttcttaggaaaaggtaagagtgtaattcttaatcataccaataatctcttctccaaaaaccaaatcataccaataaaaataaaaggcattatacatttatttatttcatttttagctgaaggttcaaattcttcccaccattttttataatatatatttccctacaagaataaggtgcattaccaatattgcccctattactaacggaatttatgaaaacaaaatatatttatatatataattacggttacactgggacagttgattgacaattgcttgggaccaatggcaatgagcagtatcttcatatgaaagttagtggattaatgaatataagcaagctacgtactctacttctaactagtagtactgatcacacatcaaattaatatatatggctataaaaaatcataaatagcaagagaaagagagaataaataataagagattccataagattatatatatatatatggtatgattttagagggattaaggacgtaaaagatcagctggtgtgagagaccctgattgatcaatatcaagatgctcaaatgtttccatcagcattgagatatcttcctcacttatttttcccatttcctttagcttgtacagga

SEQ ID NO: 1685 - DNA, 3589 bp, Cannabis sativa
aataataccatgtgtgatgtttttgcatgaaatgtcaaattttccttttataatgtacctccaaaatgtcttttttattattatttgtaatcccattaaatcacaagttattatagtgatgtgagttagcattgcaactaaaacatgctttatttaaatataatttttaatttattataaagaaaaatattctcaattgggaccacttataaattataattaattatataatttgttaaaaattttatttaattggttagttggttaactaacttaactgatttttatggttagttagcatgattttcctatctctttggaacttgcatatgtgtctatacaagaccctttagttctctattttaagggacactttagaaagagaaattaaaataaaagattaaaagtactcaggaaaattgtaaagagtttggcatgtgtttaattggctactttattgttgagcgttttaagcttcatgtttgatgaataaagattagtcttaatgtggttcctctcaagaattagatccaagctatcttggattgtgattgaacatcgttaaatttttttgttcatagcactttgttttatatattttatcattggttgttcttattgccattattagttgatactagtgaagaagttcacgagtgcacatttatacactcattctttgccattatttagatgaattattttttattttgtaagttttggatagatttgatatttttttacagtttgcaatgttaagcttaatgtgataaaattatagcaaatttggattaaattgtacatatttgagaaaattgccaaaatgaggaagcaatcgagtcaagaaccatgcaaaacgagcaaaatttaggtttggcgttgtagcactgtgattgaggtgatgtagcgccagatgccaaaaattaaaatttgcttcatagttgaaaccttaagaaatctcgtatggcgccactccgcaacatcctaggcatcatagcgctgttcatatggaattcaaaattaaacataatgtttaaacatcatttttttaagtctatgaatagaacattatagcttcgacttctgacgatgagagtgacaaaaaaataaaattttaaaagagagatataattttgagagatcaaaaataaatctaaagccacattcaagagttttattcgctcttcttctttcttcttagttttttagatattatatatattttaaacaatattttgagattataaaccacattatgtgtggctagttttcttagtttttatggtttggatagatctctaataatgattttaattttatgatttaatgtaatattcaaattcgtctaatatttttcatgtgattttagcttggttaattgttgccatggttatgatttatgcattatttttttttttttgctatatgtgattataattagggctattattttgattgtaaaattagtgctcgagtggaaaacttttgaacaatcaagaaaagggtgactaaggtggtgtaagatcaagagataaataattacttaggtaacctaaataattataaattgtgaaattgataggtggaattttagggttgtttctagagtaggagttaatgaaggtaggaattaatgatggtataggaatatatgctattattcacttacacattctttatgcggcactctaaaaaaagtatagagataaaatattgctctaggttcttaaaatattggaataaattgggaatattaataaataggaccatgattacattagggtgaaatcaaaaccctcacaattatttttaaatgattattctcaacttgatttggttacctttatctttgttagttattctaattttccaaaatcttcgaaattgattacttagataaaattagattttagtatttgttataattagttatttttgttatcctaaaatgtgcatagggtgacatggtacttttctgggtgacacgtagatcatttttagacttagacgaatgaaactgtcattgacataccatccagggtggattatccattaggaattatttttttgagaaataagacaaaagtaccgcatagggtaaatatccccatcggacaagagtcgattcctggaccactttgcatgtgccacccatggtaaatgcaacaatgaaagtcttggaaatattttcctctttcatatatcaatgaaatcccaattttggtgggatttccacacttgaatagtttaattcagaaaattaaataatattccacatttattttctgaattcttttgggaaaccttattaatgtaattattccctataaatagtggggtcatttaactatctacggatccaaaattattcatttcaaagaacacttacgctgctaaaatttttgtaaaaacttttgaggaagatcaagaacttcttgcttcttttctcacaagttaatacaagaaaaaggggagtaggctattacaattatcacgggactgaacctctatagtaaatttgtgttcttattgcttaattaacattatttaatacttcttaagcacattaattaactcattatcgttggctaagagcaaggtcaatattttaaatctgtcattgagagaaaaagaacacaatcattgttttgaatctttttaagacacataaaaatggttgtaactacaaggagtggaaatcccaacgagaaagctggtccaatgttatggttattaatgtgaaaacttctaggaattaaagagatttagtaaggataaatcccgagtgttgattggagatgataccaaactgcaaaatttgcaagccgctctaaggtaggtgcaagagcataccaacaccattcaccatgattagcaagatactcgagtagttgtgaatttttcattcgagcagcaaaagctccaattcaagtagtggatggatcaacaaatggagattatgggagccaagtaggaagaaatctttaatcgctcaaagtagacaaccatgatgattaggcgagcttatcagataactggatataaatcagtgggaaatactctagctattcagaatccaaataggatacacacctatatccctaacagaccacggtatgggttagaggaacatccgaccaacaacactaagcagacaaaaggtaatgtgtcatccaagctaaggccacaagatcaacttgtgggccacacggtagatgagcaggtcttgccagcacattatcttggggggaatggtaagtataacattcagacttagacaaatataatgaaccaatcaactgataaaaacaaccgaataagaatgccaccaagtgtttcagtctttgacagattggaatccgtacatgatttaagagataatctaaatcgcaaaagggcaagacggacaaccaatccctcttaatgcttagctgattaatctaaataactattttccagtaatgttctaagggttccataggtgacacaggtcggtctacaaaccggtcaacttgatctagtggtgcgggcacaactagatcaatttaagagccttgttcatagcctgactagcaactagcccttgacc

SEQ ID NO: 1686 - DNA, 3156 bp, Cannabis sativa
cataatttgtgattagaagagaattaatatggaggtgtgttttgacctagctaagctaagaaccaaagatgtgaccttagttgacgtctgaaactgactaagctctacaaaacccctatctatctacttctttcagctacctctatactactatgtactactatatatttatatatgtatatatatgtatatgatctctcctcatctcaaaaactgaaaaccctaatcagatcatcttcaaaagataaaagatatggtcatatatatccattatatctacaaattaacattagcactaattataagtagatattatccaaaatcttattgataattttttagttgcaatttatatttttgtaactaaatactatttttggttaccacaaaattaattatttgtcactagtagtatatttaaatacaaatttatatattaataacaataaattataatttttgtgattactatttttaactacaaactttttagtgatagcataaaaataataattaattattgtgactgaagtgggtataagttaattataattagttactattaggttataatcttaattttattatatatataaagaagtgattagaaacaacaacagccagaattcaacgtatatatatatatataagattatatattatcgtatcatgatcatgattagttactttatcatttttttcttttttgtctaagcttcttgtaattataattataaaatacgtatgcacaaaatttgctacaaattattatcctaattcaataaacaaaaagaagatatatattgtgttttttttcattgttcttttttttttcttgccgaacaatgtgttggaaattttactatatatgcattcaaattatttgacaatgaaaggaataatttatatagatgaaataagttgtgataactacaaaaatctggtttttggcgctaattaaagattttaaagatgtaatcaaaaaaaaataccatcaaatataatatatgtaacacaatttttaagtaatattaattaatattacctagctctcacaaagacttttaattactgattacacttaatgttgcattaagttataacttttgttttttactaattaatatgatatattatgatcgaaaatagtgagtaatttttttttttttttgtataagaataataaaaaagaaaggaatatataatttaattaattgagcatcaagatatataatcttcactaaattattatggtatagatattgtatgccaaaaaagagagaatagatcgagaatgatgagactattggtgtacgtacactttaataaaaagcttttatacacatatatatatacagtactcaacttctactattgttggttttggtgatgacttatatattatctcatgatgatcactttaaatatgtttgaaaagtcaatattggaagacaaagaaaaactatactattaagaataaattttggttcaatatgtgaaaccacaaataatatatattaagagagaagcttaattaaccctaattaatattgaaaccatcatattgttacgtagtgatcactttttgatttttcatataattaaattaagccacacaaaacaatatatatggcgtacgttgtttgaataatcctaagtgatctcgaagacaagaaaaataaatttggagaaaagaaaaatatagcagacatgcacaaacatcgatctaactcaatttttattgtgcaattaatatctcttacttcttctaattatatatattaataatatatatatttatatatatatatgtgtatatagcacatgatggtatattaatttgagggtcaacaatgtgctattggtagctgttcgtactagctcttgagattttcttctctctttcttggattttcactatttcacacatattttcatattcttaattaatatatttaatatatatatagtaatttatggtgtataaatatctaaattttatgtcgagtagcaagtaattaaatcgtatttttaatggtaaaaatatatttcgttactatagtatgaatcttccgtaagtacttcgttaattgtcaggtcgatatacctatacatgccagccgctgataggtttatattatttattatttattttttatttgaaaattatttttttaaaaaaaatctaataaaataaaatgaaaaacaaagtgttttgattaaataattatttttaattgttaattaacttgcttaagtttgattactacatgattaattttttaaaaaatcattttaaaattaaataaaaaataatttaaattttttaatcaaaattaaaaaaaaaaaactcattttagtgaaattaaattaaatatctgcaattaaatcactaaaatcaataatctaactaaaagaactttaactctaatttcataacttcatcatcaaaaagaccaaatccagaaccagaaatgtcagctccaaacgcagagaagaaaaaaaaggtaacccaaaaaagatttaccctatctttatcagctcactcttttttccctattcattctcgatttttaagaatacagaaacaaatttatataaacaaataaaatctcaaatccaaataaacccataaattaccaacaagccaataaattccaaattcaaacttgttggactcaaaccaattcacaactacacagacttgtgacagtcaatagtcttgtgatctgtacggagaaacactggataagttgtacaatctcacattgtctggggaagatcaagtatgttgattttgagactttttgtaggtatacattgttgaagagggcttaaatggattgattgatattacctttatcaacaaggtacatcttatttttcagtagcccatcatgaaagaactccatgtttaagtgtgcatgacctagggtaattttaggatgggtgacctcctaagatattttcccaagaagtgtgcgagtgagaacaaagtatgctgtaaacactcgtattagtttgtaggatcagtcgtcaatccatgaagcatccatagtgacgtactcgtgtataagagccatcattctgtgagtgtaaggacctaatggatgcttgaagcgagaatattataaatggtatcagaaccttgaccca

SEQ ID NO: 1687 - DNA, 2761 bp, Cannabis sativa
aaagaaagaaagatatgttaactgattggagtacaaatagtacaaatgaaagtacagtaaatatgcaatttgatttccatcaagatctatggaaagaatatacaatagtaccaaaaatcaataataagtttctaagaaatatgcactaagttagacctcaccagagtagaggatattctattctaataggaaaaatacaaaacattgaagttaagatcaaggtaccaggtaatatagcttagatttggatagttcacctcagatcattagaggcttcagtaaggcttttggttaaactttcaacttctttaaggagaccgctatctcgcacctcagctagtaaaggttgaatatcttcagccatggcttggatctgaaatatcactacatcaaagccaaatatatgtacatgagagcgtgcacacatggtacaacagaaatgcctagaaaaagtcctctgtcaccaactagattcgacttgattaaatgttcatcttgataactacttccacttctccatttcaacaaataataaaatttaatgaggcaatcaattacttcttctcacaaacacagacattatgaaggcaagcatgtttgcacatacaagaagtattcgtttgtttaatgttaaaagtttgtgtagtaaattgagcaaaaggaaatgctttaagtgtgttagtgtagctaattactaaacatgagaagggcattcaaactgcagtagtttccgtaaagacctatgaagaaaagaaaaaaaagttgggggttggggggtggcaagcatttcaaaatttgtctcattttctatcattttaaaactaattatgaagtgctcactaacaatttacatttaagaacatgcacaaccaagaagaaacagataaataacaattatacagaataacatcagaagagcacatcacacctctgtaagcagaggccttgcttcttcaataacagaagaaactcgttgagccagtgaataagtgttggcaataccaatttcctccacatcacgtccaagccgtgtaaatatccctaccaaagcatccaaacttactccttgttgccccttcaccttttccttatcacacacaattagaccttctttggcacagtctggatcaagaggtccaactaacgcatttggaattggatctcgaggtgttatgtcaattattgtttccataagtagacctgactggtttacctcaatcagtgaatttcgaggtatgattatcttatcatctttaacctacaaaaagcaatgttgatcacaattttattactttattttcaacttagaagaaccacaaaacaaaattagactttaaataataggaaaaaaaacatgattaatataaaacacacctcaacaaccgcctcaatacttctcaaagaaggattgactccaacaacattaccaacagtcacccctctaatccttacaggtgttccattcgatataccacaagcttgactaaattcaaacacagccatgtacttcctgaatctataccgcatttgaaaacccctcaaccaagctatactgagagcaagaataacagcaccagaaaccaaaaacaaccccaccccaccttcccaaatgctcctatgaccgaaaccaaaatcacttagtggccgtagagtccgcttccaaatagcctgtggaacattcaatacggctgcaagcgggttctttttctcggaagatggtacttggtcatgtccagtttcagaggaagtagcactaatctgagtcatttttcttttggatctaaacggaaggtaaggcaaatgatttgaagagcgatatgagacggatcccaacgacgaaaataacacagtagggcatgtagatgcctgagccattggatttccaaccattttcttaaactacccaaatcagcaagagattaaaaataatcctcaggcagctgcacagattcaaatgtccttccaaacaagtttagcattaggcttcagcagcagtatgagcatcaagcaatccaattcatcattaaaccctaaataccaaaataaatattaacaatatatatacacacacataacaacttgatttctacagcatggcaagattttataggtgaacttatacaataacataaataaaaatgaaacgattgacgagggtttctagttccacaacccatgttcgcaatggaaagaattgtggtgttgaagtaaaactcttatacgctaagaatcaatccaacgagttagaaaaggaaaaaataagtcttagcaaggtatacctgcaaggtttcgaagaaagacgagaattttatggttgtaagtgagaaatgcaaggcgaagagataaccaatttgatgataatactgaaacaaggtcagccttcgactcagatggagttcacaacttcacactgaacagtggagagagaaaatgaaagagggaggaatgaaaggtaaaggcaaaggtcatggggccaatacagaccgcattgggccttctgcaagtttaggccattactttgcgacaatgctcattattttagacaatgaaaatgtaacgacaacttttgcaagaatattataagaaaatcacaatttacataaaatgatttattaccaattcttgtaggagaaaaatgccctctaatcatcaatagatcttgtcagcatcctcattttcagcccaaatcaactcaaaggtgtcatttggttggatataataatttctttctatttatttgcattttaaaatattaaaatat

SEQ ID NO: 1688 - DNA, 1124 bp, Cannabis sativa
atcaattctaaaagtacatttagattatataattactttactaaataattatagtgtaattatacggtgagataaatgtattaaattgtaccattacttccaataacattcaaatttattttctcaataactttccaaaggcaccctaataacacctaacaattttcacaaattattcttaatagcttaataaataaagtttaataagtacttaccaaaatatgatggctctcttagaaaataattaaaaatattagaccccccaaaaaagtacataattttggtgcatttgactatgagacagttgctttttcttctacctaccttttttttttcctctgaattaatctaggcatacagttgttttgttttacctacctttattttttcctatacatatttttttgaggtggtagatagtccagttatactgtctcgtgattcttgtgtttctcctaattaatttattacattattattataataaataaaattaaccacttatcttatgcattttcatatacatgcaatacattatattttataaaattttccattttttttttctgaataaaaaaatatgtattatatatggcttttaccctttattaaagttaggtttgattttttctttttcctttatttgttatattttgtaaaaaaataaatataaatgtatgacttttaccagtaattatacaactattccgtacttttttttatatgatattgataaccggaactgcttattatttaactagtgttattatttgatagatgcagtttgagttattcctcaataaatattacatggttttagctagtattgtttttcttttacaataataataatattacgtggaatttaaatttcaaatccaaatagttttaaaatttaaactctaatcaagtttacaaaataaaattcatatgaaaatcatggtctgctcatgttaattttgaattaactatttgatcataagcacatgagtttacttcttttttttttttttgaataaacattagttatactaataattattaaaattatgaacttatgattttttgtatcttagcccagtactattgttttatataaacaacatagatataattcttgagga

SEQ ID NO: 1689 - DNA, 4379 bp, Cannabis sativa
  modified_base (1284)..(1290): a, c, t, g, unknown or other
cttaaattattaggctgaatatatcagacaatacttaaattatatggaattcctgcaaagaaaggttatgatatatacctttctgttttgggccggtgttaattagtgtttttttaataacaaaccaattctctctatagttatgtatctaattattaacttataaactacaatacgcctctcactttttgtagtggccaacaaggttaccacctaaactaaagtctataagtaccaaaatcaaaatacaatgatggatttaaattgttcatcccaacaatcccaccattccctttaccttttttacagaaccccacttattatggaattatatgttcaataataatgaataaattgtgtagattaaatttactaatgtagtttaagtttgctatattatacactaaaataatcaatatgaacacataaatgaaatgatgagtggccaattagaagtatatatcacagttcacagatatactcttaacaatgtatagtaagataagtactgttacaagcagaaagtcttatatacagaggaatatattcctcactttttttttttcacttttctgtctggtaattttttttttttttttatttcttaaagaaatattctgtaaatttttaaagatacgtactcatgtatgtagctaaataaacttaactatgtaagttgtattttatgcatggagaaagctaagttaagaaaaataaaatgaaaattaaagaattaggaaaacagtcgagcctttattatattatcatccactttattcctttattatcttgcctttattccacaatatacaccacacttaaaagccttttatccatctttagtttttttgtttttatctttgttgtctcatcttctactaattctctcgatgattacttttcctttgttgcttttcttttttctatgtaggtttcatttagttatattccctctctagatctgactttaattttcctttcgtcattttcttgtatttcttcaaaactatcaaattttaaatttatggctccaagatctctattattataataattattgtatacaattatctcaaaatatataagtgtagaataaacactatatttaatccaataacataacctgattgtaaagaagattgacactgaaatcaaaagaatatatacaaaaacaacaaaatatttaatattattagtcagatatcattacagatttgactttcttttcataaaataaaactttgtttttcacaagtttttgtaaatgagagagagagagagagnnnnnnngagagagagagagagatttattatttattatggtactgggaaggaaggggccacagaaataaatggtgttgatgacacagttgacacaaccaacagcttcatttcacaattttcaaggtactcttaccctcaatgaccccccaaaataatttaaatacatacgtatgtattcatcctaattatgcgtgtaagtgtcacagggctaaaatttccagtaattttagcagtaactctggagctttttaaagtctaaattaagttttgattgcacaaaattttaatagtcttttttattgttctttaattaaccagcttcttaatacatcctaagtgtgaataataactctgtatttatcttgtgttcaatttaatcttctaaacacacaactgtttaattatgatagtttgagtgtagatatgagcaaaattaataccaatagcatgtaacatataaatacccaatttcaacatatggtgttgacgtaatatatacaacagagaaaagccaaaatataattaatggtgtttggatttgacaaatttaataaacttttcaataattgatgatttgtatgatttgagatcacatttggatggatatatatctcaaaaacaaatagcagctagctacttggttagacccacatgagtacatgacacgcccagatccctaagttattgtctacagatttagtgtcaagttgtaatgttatttgtaataaaaacgacaaaacagaaaattatatagacaaaaaagaaaaacatagaataaggtttgttaaatcaaacttattataaatatatacttatcgaagactaattattctaagaacttcattgatttttattatcttattattatttcgttttttttttctaaatctaagagacagtaatattgaaaagaaagagaaaaggttgtgtaatttggattcctactaattagactgcattaaatgtggggacctgaggtaacagtatgtgtatatagtatttgaaatcagctattaaaataaaagtaaaaataaaagaagacagaatatatataatataaatgtgtacatggtccaaagatgttgtactcaatttttgttctccttaattttttaatttttgtaatctttataggaacaaaacaaagaacaaaagagctgtatagaacatataaagatgattctatgtagctaatattcacttgttttttcttttttgcttatctcatgtataactaaagagtaaacttttgatctgctaaaagcacaaaattaatgttgatggtcaaccacatcttatcttgataataacaaacaaatcccatatctgatgtcccctctcatttaaataaataaatatatttaatatatttattttactttatgagagagatcatatagcgatttttcttttaattttattacataatataatctcaccaacttcctctttatttctctctccctaaaggtgtgcctgtcttaggaaaccaaaacttcctttaagatggccaattatgagttttgatgtttacaaatcaaattacgtagtcttattgatatttcttaaaattatatatatatctccatggtttcattacttagatatgcttctcatcaagagaacaaaacatatataattgtttcaagcttttcccaaattagacagttatattttatgtgcatatattttgttttaacataatacgcatcttttcttaagggtcttttcttgcttttcttgtgtagtactagtgattacacatttcaagtattacttacccaaaggaaactttggttgcctttgcttgaaaactactcaacaatattgttctcttaagtactagaaattaatgaatgccagggatatagagagataataatatagatggtaaaaggaggtgaccaccacacactgttaaagggtatcattttttgctataacttaataatattcaggaatattgaagccaactttttcttttgatcttttcttttcttctctttctttcactctcactctctccttttaaagaaacgggactcgttttcattcttctaaaagcataacagctctttaatgcatgtgttttggttccttttgtttcaaagtttcagaatacatacataagtattgagaattgctttactttcactattaacatctcatactgtcaaacgatcatatcctacatatctttgcaatcatgttgcttctatatattttgcaagactatttaatttaatttctttctttcttcagtttctttcaacatttttaatttttagccataaaatttgagtttccacgtttctttttccgcgttaaattaatttatggtttccatgatatatatatgataattaacttgtatccaaaactatacttgagagttgtgatgcagaaaagtatgagacaacgaaacatgtatagaaagattattccaatatcctatacatagatatatatatatagagagagagatcactcttctggtcatgaccaaatacattattattatgtatatttatctaacgaaattaaaaaaaaaaaaaaaaatcagctagaaccctatatgtaccaattagctcaatttgttagtaatagagatcaattgaagagagaaacacttatgaatgagcaatagctctaaatatatacaagttacaataagagaagtaataaaaatcaacaacctagcatccacaacagtccaacaccccctcaaacttagtgttgataaaaaatctagactaagtttttctctaagatacaaaaatcttgtgctagttacaggttgaaatatatttaataagtagttgtttgttgagaactttctctcgaacaaaatatagaaccagttgtatatgcttggttcgagaatgcatgattgggttggcaaacatcagaattgcactttggttatcacaccaaatgattggaagatgcttcagatgaacacaaacttcaataaggaaagcttggctccatattaagtttgttgtagcatgcgcaaggctacagtactctgtctcataattggatcggggacatttttttgtttcttagatgaccaggatgttggacttttattt

SEQ ID NO: 1690 - DNA, 2587 bp, Cannabis sativa
gtctttttatattttggcttcattgagatatgcaaggaaggatccctggctgatgctttattccttctttcctcttatgtagcttattggagtacattcttcatctaactcaggtaaggggagaagccatgagaggttagtcaagtatggtttcagcttgctaaagggaaaagctaatcatccaatggaggattatcacgttgctaaatttgttaagatagaagggcacgaattaggcctgtttgctatttatgatggccatttgggagatagcgtgcctgcttaccttcagaaacatttgcttcataacatcctaaaggaggtcagatgttgctttacatattttacttcagctggtcatgtaatcagaaaaatgtgttcacactttcttttcgccttctaggaagagttttgggttgatcctaatcgatccatctcaaaagcttatgagaagacagaccaggcaattctttcacatagttctgacttgggacgtggtggatcaactgcagtaactgcaattttgataaatggtcaacgactttgggtggccaatgttggagattcccgagctgttctttcgagaggaggccaagcagtgcagatgtcaacggatcatgagcccagtactgagcgaggcagtattgagaacaggggtggcttcgtctcaaacatgccaggttttcaatggaaacctctgctttaatatatttagatatatatttaatttctaattcacctcctcaaagttataaatagggtgccaacttcattacaaactctattttacacttgctttcttgaaaatctaatgcatacaattgaaactcttacaacagttctaattacaccaaaaattgcaatttcacattggctgtcttaacaagcaaatatgccttactctaagtgaataatgattggtgttcctacttttgagtctattgaattatcctttccataaattctctctacataaatggtagttgaatggggtgcctatttatcctgctctgtacatgaattaaaaagagaaatttaacttacagtttttttagacaacccccattataatttgaaactacaatcagcaaactgagcaaagattctctgtttctttgtttatctatcttttcaaaacgaaataagtaaatgttgtctcgtctcactcagaagtagacagaagctacagagccaagttcaaagatatgacaagtatcttaaaacaatttatatattgttctttattgggttgaaaagtacttaactcctatgttcctgctcgatcatttatctttattgtgcttgatttggctttcatttctcttctgtaatccagcagatcacttgttagaattttatttctttttaatttgttctacgggaataatgaatttaattctataataggggaaagtacagacatgtagcataaaatggatacattgatttcctttgtcacaaactcaagtcctagtgattttattttccaatcctctcacatattatatattccgtttcatcatttctcaattcacttgtagtcaaatgtgtgacaaacgtatttggtggtggtctacatttattaatttgcatttgttgttaggaagttgggttaattttcggtctcttctttaacttgaattgacatatgtgggctatcctttgcttcttcaggagatgtccctagagtcaatgggcaactggctgtttctcgagctttcggtgacaaaagccttaaaacacatttgcgatcagatccggacatacaggatgcaactgttgatgtcaataccgatgttcttataattgcgagcgatggtctctggaaggtgaaacaatttgcctggagttgatctcctcttttctgtgttttgtttttaccttgcctagtgagtatatgtgaaatggttgctttcttatatgatagaaaaaacacaaattctactttaaattttgctattcttcttttcctcccctcttatgggcatcatcaaacaggtaatggcaaatcaagaggcagtcgatattgctcgaaagacgagagacccgttgaaggcagctaaacacttaacagctgaagcagtgaaaagagatagtaaagatgatatatcttgcattgttgttagatttagatgatggtgtattgtattattgctccacaactgcagtttatactggcaaaataaaaggaaagcttctccatgtatggaatgaaaggaagataaaaaagaggaaatctaaatttagattcttgaaaatgtgatggacctggtggtggtattgtttgaattcttttgtgatagagattaggctctaatgtatatttttataattattgtatgttttactgctttgcacagacaatccacgaattatgtggctatgttgaatatgttgatgtagaaattgtgtttcaaatcgttaatggagaataaatacattcacatatgtgtactcccgaaggtctatgaaaggggcagtgggtaatgttgtaggggattaatggtgagctggcaagtgagtggttttgagggttttgctagtgtgtgaggggtttagcttgggacgtgttagtgagaataaatgc

SEQ ID NO: 1691 - DNA, 1833 bp, Cannabis sativa
  modified_base (1005)..(1007): a, c, t, g, unknown or other
tttagagcattatgaaaatattattaattgatcatcttgcgatatactaatatatatacagaagtgatactagcataatattattattattttaataataactatatatatatataaatatattatatcaaacaaagtgagcataataattatgggttgttatgacactcaaaaagggaaacccttcttctacctctttaaacatttggataatccaaacgagaattcaccaacctgtaacaagctcattaattattagttgttatatatggttttgtaattctaacattaattctcaatttctccaaataataaattaataaggaaatcaaattgcttgaaattttaacccatgccggcggccaatgccattatatatataaatgctcccaaattataaaaaaaaaaattattagtatacaaataatatattaaatattaacaagattaatttttaacctctaatttttttattttttaaaaaaatatatttaatgtgtaattaattatgaagaatatttgaattttaaaactcttaaaaaaaatttaagaactttaccattacaccaaaacactattaaaattattattttcataataattcaactatatagatggctctaaattaaattttaattttcccataagcctatgaatatagaagcagaagaaaatacacaagtggccatatatatgctctctctttcggtgcatatatacacgtgtttagattctttgccagaatatgcacatacacattatctctatatatttatagaatctgctactacatacacttcaaaaaatgttatttttgccagcacattttggtgcagccaaaaattagtattacgatggacttgtgatgtgtcggcaaaagggttcggcaaatcaatattggtattagaacttttaccagcataaaataaaaagcactggtaaaaatgacttttcccagcgcataaatatgttggaaaaagttagattttagccactgcaaacgtnnnctggtaaaattttgacctctttactaacgcagtttgcaaaatacgctgataaaagttacttttactaacgcaatagcgaactgtattagtaaaagactaaaagtgatattttttgtagtgatatatttatttttgttcgaaggtagctgggtaggcatgcgaagaggggtatgatatttattatttctttcttgaatattgtgattggctaattaaaatttttaacatataaaaaataaaatgtgggctaaacttgccctaatactatttgagagttgttttgtgcagtagtagtagtagcactaataataataataattaataatagtgattagtgtctaaaggaaagggacagacaatacacacgatcatatatatgtatgatttttgagtactactacaactactagctagtactactgctctacatctcttcttatatattttatatatgtagtagtacgtactaattaattttaattatatataatattaatcatccaattccaaacagtactgcagttactactttacaattcgagtgtgcatatagtatagtggatgacgtttgaacattattgcaacattacttattaattcatttgtggtcttcctctactatctatatttatatatatgcatggtcaccactacaaagtacaaacaataacatatatatatatatttacattttatacctttactctacaaattaagatcgatccctcaccatatatatattcacagttatatataactacctttttagattaaaggtatatatataaatgtgaatatatatttaccaaaattaaattcattataa

SEQ ID NO: 1692 - DNA, 1608 bp, Cannabis sativa
ttttatggacatcctgaggcctcacatagagtgttttcgtggaagttgttacgagatatatgtaatgaaactcagggtgcttggttatgtgtgggagatttcaatgagatagtaagtttagcggaaaagagtggtggtcgattgcgaagttcagaggcgatggaagcgtttaaagaggtacttgatgattgtcaactgattgattttgggtcaattaaacatgattttacttggtgtaatgaacatgaaaatgatcaaattatggagaggttggataggggtttgtgtaatgtagaatggttgcaacagtttgatggggctaatatccaattactggactggtgggaatcggatcaccgacctttggtggttgatatcccggtccgtgaggagggagaaagaagtggtcatgggaaaagaattagccggtttcactttgaggaggcatggtgtgaggaggaggaatgtcgtgacattattgtaaatttctggaatgaggagcttgtggaggaatcggctgaaaggtttcgaaggaagactgtcaaagtggggaaagttttacaagtctggaacaagaagaagaagaaggaaatgaatgaaagaattgataagctcaagaagactatgaatatgttatctattgggcaacagccgggacaatggagtgagctaaaagcagttgagaaacagttaaatgtccttttggaaaaagatgagcagtactggcgacaacgtagtagggctatgtggttgaaatggggagatcggaatatgaagtattttcaccataaagcatctgctaggaagaaaaagaatgagattaaaggtttgtatgatagtatgggagtttggcaaacggataaagaagtggttcaacatatagtgggggattactttcggggtttattccagagttcccgggttgatgagcaagacatgggggaggtattagaggtggtacaaccaagaataacaaccacaacaaatgcggctttgttattggccttttctgaagaggatgtagcttgtgcggtacatgaaatgaatccggccaaagcaccaggggtggatggtcttcctgcattgttctatcaaaagttttggaataaacttagaaaggaagtggtcatggtttgcttaaatattctgaatgaggatgctgatgtgcgatgtttaaatgacactataattgcgcttattccgaaagttgagaaaccgaagaaggttgaggaatttcgacccattagtttgtgcaatgtcatctacaaaattgtgtcgaagtgccttgtaaatagaatgagaccatcgttgggtagtactatctcggactcacaaagtgcctttgtcaaagggcgtcagatccatgataatgcgattgttggttatgaaggattgcattgtatgaggaagaatagatttcaaaatgggaataagttggcttcaaagcttgacatggcaaaggcatatgataaagttgagtgggggttcttgagagccatgatgtctcggcttggttatcatgagaggtgggtggaaaagatcatgcggtgcgttacttcggtcagtttttcctttctaattaatggagaggtgaaagggaatattgtt

SEQ ID NO: 1693 - DNA, 3368 bp, Cannabis sativa
aaagtaaaaaacataaaatgtgacagattggagagagaggggcacttttatcaggtggacaaaaacaaagaattgccatagcaagagcaataatcaagaaccctgtaattctcctacttgatgaggcaacaagcgctctcgacactgaatcagaaactctggtccaaaatgctcttgatcaagcctccatgggaagaaccaccctggtaataaaaacaaaacacttcaaaattggacaatggtattttacagaaaatgtccaaataaatataacatgcattgtcgttttcttgatcaggttgtcgcacacaagctctcaactgttcgcaacgcagacctaatcgccgtcgtaggcagcggtgcggtgatcgaaatcgggtcccacaacgacctcatcaaccaacataacggtcactatgctaacctggccaaaatgcagagacagttcagttccatggaaaacaatgaccaagaacaagaacccaccgtcacctccggccgaatctcctccgttggcggcggcctaagcacggggagatcgagccctcttatcttctctacaccgcccaattccacagtcgatcaaaccccggcggtgggacgcaaaaaaactcaaacccaccagcgaggttctttctctcgactcatctcattcaacgcacccgaatggaggaacggcctaattggtggactctccgccgtcgccttcgggtccgtacagccaacatacgccttgaccataggtgggatgatctccgccttcttcgctccgacccatgaagaaattcggacccgcatccgagcatattctctgatcttctgctctctctcgctggtctccatcgtcctgaatctccttcagcattacaatttcgccttcatgggagaacgattgacgaagcggattcgaatccgaatgctggaaaagatcttgagcttcgaaacagcttggttcgatcaggagaagaactcgagcggcgcgttgtgctcacgcctcagcaacgaggcttccatggtgaaatcccttgtggcggatcgtgtctctctcctagttcaggccgcttctgctgtgacgatcgccatggtgatgggtctaatcgtggcgtggaagctagctctggtcatgattgccgtacagccattgacgatcctctgtttctacacccgaaaggtcctgctatcagccacatccgcaaacttcgtcaatgcccagaacaagagtacccagatagccgtggaagccgtgtacaatcatcgaatcgtgacctcgtttggcagcgtgggaaaagtgttgcagctatttgaagaagctcaagaggcacctaggaaagaggcgagaaaaaagtcttggatggccggaattggattgggttctgctcagtgcttgacgttcatgtcttgggcattggatttctggtatggcggcactcttgttgagaagggtgaaatttcagccggcgacgtgttcaagacgttcttcatcttggtaagtactggtaaggttatagccgacgctgggagtatgacttcagatctcgccaagggctctgccgctgtcgcctcggttttcgacattctcgaccgccagtcactcattccagtatctcacacagtgagtaaactaactaatgcacataatatgtttacttttgaaatgtatgatttataattgacactttctgtttgggataattttaaggactcggatgaaagtagtggtagcaaattggagaaagtaatgggaagaatagagatgaagaaagtggagtttgcctacccaagtaggccagatattctagtgttgcgggagttcagcttagatgtgaagccagggacgagcattggactagttgggaaaagtgggtgtgggaaatcaacggtgattggattgacccaaaggttttatgatgtaaatggaggatgggtgaaagtggatggagttgacataagggaactaaatatccaatggtataggaagcacacagcactagtcagccaagagcccgtcatttactctggaaccattcgcgacaatatcttgtttggtaagcttgatgcctctgagaatgaggtggtggaagctgctaggtccgccaatgctcacgaattcatatcgtaagtaatcaacctatctttttgtttatttgttcatttgtttttgtagcatgtttttgttgaataataatatttacaaataattattaaaactagaccaaaccccatgtttaagtagagtagaatagtatgtgtgtgtatggtaagttgcttggaattattctctaacaagatttttgtttttggaaggtcattgaaagatgggtatgaaacagaatgtggagaaagaggggtacaattatcaggaggtcaaaagcagaggatcgcaatagcgagagctatcattagaaatccaaccatactattgttggacgaggcaacaagtgcgctagacgtgcagtcagaacaagttgtgcaagaagcgcttgaccgaatcatggttgggaggaccacaattgtggtggctcataggctaaacaccattaaggacttggactccattgccgttgtggctgatggcaaggtcgtagagcgtgggacctatgctcaccttaagaacaagaggggtgctttcttcaaccttgttagcctttcaaacttaggttaggtccaactaattaaaaattaaacactttcatatatatatatatatatatatataaatatatataatcgtaatgttgtcgtatagtatagccagaaaaaagttgggtcgacgatggagtttagttctaacattgaggacatgcagcctcattttatgtacagaggcccaaatgatgttatggccgaagtgatttaagctatatataagatagaccaactactatagtaactattgtttattagcccaagaagaaatgtagttttgatgaatatgatcaatcaatctattatcatcttcaaaatcaaggatttttgcactcacatttgaatagttttattgccaacaaccattacaagaattatatgtgaaataatgacttaatacattgataaattatcctcaaacaaaacgaaattacaatgattcaaccataaaaaaaaaaaaaataataaataaataaaaacgaatttacaatgacattttaatttactcgacattaatgtcaaacttccgattaatctttactttgatataacaactatttttatggaacagaagaacaagaagtttgtgatgtaatgggcctctgagctatttcaacaggcccaactttgatagagtatgggatacttttgtgagagtctctgagatgcttgctactgtaagttagtaaatctattacttcggttgattaactaggcctctg

SEQ ID NO: 1694 - DNA, 2338 bp, Cannabis sativa
gattattgaactcatcaatgcctacaattaatcaattaattaattatatgtactataaaaaaaattatttttagttataataaaatttatgattgtaagattcgtgactatattaatcacaaaaaatttaccttgtcactattgttaggttttttttttctttttttttttagtgataattcaaaatattaatttatttaattatatatatgaataattacttaccattctcagtgatgtaaatgagtggattgttgtatttttctttggtgtactgtaaaatgttataaattcctagtgggtaaactctgagccaaggtgaagcagcctgtaaataaatcatatgatatatattattatcatgtatatataaagtgtgaaatattattgtatttcatttaatttaatttaatgaacattaataattaattgtacatacacacacctttggaccaatggagacaccatttcgctcagctgtcacatataagatatcataacataaaattaaattcacattaaatagtatgtttgtttattaatagtatatagttaaattcaattaggttagttataactatactatatagaggagtgtaattatgtcttgtataatgtgttcccattcttatatacttctctcctattcaaactcgctagtcatttaaaattgagaaatgccaaaaaaaaaaaacaaaaacaaatactaattgtgtcaaatgctcgggtcctttctgagcatagcgggttagacttgtgcttagaatccacatagcttagtggaccataattttatttcttcttttaataatatatataattttttttactgattttaaaaatatcatatttatttgtagataatagtctaattttttttttcctatgacctaaagttcaaccataatggtgttattatatattgagttgtatatgttttaatttaataactattataaaagtatcgctaattattttgtaagacgccacctcgtagtgatagattgagtactactagtacctaatagtagtatttattaaaataataataataattattattattatttaatccataaatgagcattgctatgagatgccaatgtgtcaagcaccattatgaagtgacgccttataattggttagttattttttataatatttattaaagtaaaataagtaaaactcgtattaaattttacttatatcgatattacaacttacaagaatgctagatcagctagttgttgattttaattgcagaaaaataatagagattggagaaatttgaaattttcaattgatgatacatattgggtagctcttttcaatatgtatttttttattgttattttgtaaaataatttttaaataaaaaaaattatttgtttctccatcgaatctcagtttcaaaccagtttcaaaccacgcggtagtatgagattagttggaattatttcaaagctgttgatctgtaattttttagtaatattgtgtcacgtggctcgaaatgaaactcatgatcgaaatgtgtagcactaatttttttgttcaaagtatgtagtattagtatttaaaaattttacattttatattttccaatacatttgattatactatggggaagaaagattaatttacaaatttctttatcaaattagggtcaatatttttgtaatagctagggtagtgattatatatataaagtacttacttgtaacattagttcttgagtcggtgttatagcttggaaaggagttattgggcaaatgagtataggctgcataactagttgtgtagtaatttaagccaacaaagtcaaatgatcctttcacaactttggcttcttcttttgtgaactttggaagtctctttcccactagtactttcatactatgtggatactcaccatttcccaagggttccatgcacctacaaattaattaatatatattagagcattgttattagatattttatggtgcccaacattataccgatatcacacgttacgagtgaataacagtatcttatattataatttactaaatgaaaatatgtagaatccaatattaatttgtaccaataacagtgcaccataagacgttccttaacgtttctctattaataattaggattctccttatagtttttcaaaaatctcttcttaagaaaattattaaagttggtttttattaaaagattttatagaattaaaagttaaaattcattagctacacaactagctacacaaatattttttaaaacttcagaaacttaaaaataacttttaaaactccagccaaccaaaacttatatatataatcatagtatgaaa

SEQ ID NO: 1695 - DNA, 2913 bp, Cannabis sativa
tgggcttgtttctacttttgctgcttcccatgttaccagaaacaaaggaagaagagctagcatcatcgttggatccatcagtttcttcttaggagctgtccttaatgcagctgccattaacattgccatgttgatcataggaagaatcttccttggaattggcattggattcggcaatcaagtaattttacatttcttttcttacttttattcactcattatcatctccttttggataatgatattagaaaccttatgaatgagattaaactaggggattatttaagttttgttgttttttttttaatatttacaatgtaaaaattttctaattgtgtaggcagttcctttgtacctatcagaaatggctccttcgaaaattcgaggtgcagtgaaccaactatttcagttgacaacttgcttaggaatcctagtagcaaacttaataaactatggaactgaaaagatccatccatggggatggagattgtcacttggtttggctacagttccagctattcttatgttcattggaggaatctttcttcctgagaccccaaatagtcttgtggaacaaggcaaattagatgaagcaagaagagtacttgagaaagttagaggaacaacaaaagttgatgctgagtttgctgatttgattgatgctagcaatgcagcaagagccataaaacacccttttagaaatcttctccaaaggaaaaaccgaccccagttggttatcggtgcactcggtatccctgcattccaacagctcactgggatgaactctatactcttttacgcaccagttatattccagagcttaggatttggctcaggggcatctctgtattcctctgttatcacaagtgtagcccttgttcttgccacattcatttcaatggcatttgttgacaagtttgggagaagagctttcttcttggaagctggttctgaaatgatatgttgcctggtaagtaatgcttccaatgttaaacttaatcacatattaccctatttaaagcattaattctacaattgaaacatacctcccaaattgttcattccatccctttgagtcatttctttgtcactatgaatctgtcaaaaaaccactaatataattaacaagtgttaaatcatctcattatggttattgacagtattaggcatcacgtttgagattatgttagcttattatgtcataggaatatttactaacatgttttttgttgaaccttttttccttttttcagattgctttggctataactctggctctgaaattcggacaaggagaggttcttccgaaggggattgggattttcctagtgattctgatatttatattcgttttgtgttatggaaggtcatgggggcctttagggtggcttgtgccaagtgagcttttcccattggaaacaagatcagctggacaaagtgtggtagtgtgtgtgaacttactcttcacagctcttattgcacaatgtttccttgtttctctttgccatctaaaatatgggatatttctcctctttgctgggttgatattcatcatgagtagcttcatctatttcctcttgccagaaacaaagcaagtcccaattgaagagatatatcttctgtttcagaaccattggttttggaaaaagtatgttaatgatgatgatgatggagtacttgatgatatgtctcctgctgcacctaaataattaactaattattagcccatgtttatgtttattatttctctctaaggacatggattttttctcctatctttcttattgttactatgactaaacagtaattattcgtggtatatagcagtcgtagtaataatgaccaactctattcttttttttatgttattgaggattgcatagttttattttcagcaagtgaaataatgctcaaaccaaaccagtgaaaggaatgaggagttaaattatagatgaaatataattaacacacatacatatgattaatgaagacaataagaacttggttagtttatttttccacttccaaatgtataatcaataaatctatttagaaatagaaaatattgggaaaatgattgagaaaatagaaagtggtgaggaaaaaggggatgtgaaattgagaaaaaggaaatgatgtaatcacttaaaagaaattttaaatgaatactatagagctagagccgcttataatattgttcaaaaacatcaaaaaaatatcaatcctacaaatggctaaagaacaataataatcgttcgaaaaataaagggtgaaactaacactactgttgaaaatgaaacaacaatccacatactaattaagaatgaatatccacctatacctaaataatgtttaaatccaactctaagggtgatccatccaagtaccgtctaagataggcataacatacaaattaaaatctaaacaatcaaacaaaataacacaaaaataaaaaaaatgaaaatcaacaacaactaagtgaaggcttcattgaacctaccattcatcaaccaccatccacctgcaaaacattcgatctatctcgagtgttggcattgcccacatcaaaatactcttactttttgtgtgagtgatttgtgttggataaatactacatttattcatttgtaattaaatctaaaaaaaaaaaataaactcttaattttttttaacttattattatcaatggtcatttgccgtgttattcaacaatattggaatcgtgttaatatatattaagagttagttcacattgctaatgtatggaaataaactgtgatatataagatgaatgggctacacctctcattgccaattggttttgagatggaaccccatttatcttatccccaaattctaacatggtatcagagccacaaatgtcacgttacatagttgggtttgcaaaaaagt

SEQ ID NO: 1696 - DNA, 1503 bp, Cannabis sativa
tttaaatttgtttttgttcattgtaatagttgttttgtagatttaactcaagaatcttgttcctattgctgtcaaattttaattaagtttctagttttgagtcaattttgtattgctagacatatgagaaagctgtgttttgttatattgcaacgattccatacttctctgccatgccttttatctttctctgaaaaaagtttcttgttcctattgaaaactataatcctctgttaaaagtatttcaaagttagcaaggttttcatattttttttattcatataatctgccaccaataccaattaccattaataggagaattatagttccatcaatcaacctcctttaaatagacactatgaatatattgtaccaacaagttatcttgtttggatgctataacccatgcacacacccctaatgcaattgtgttccataacaaaataagcctaaaccctaaaccacctttagattttgatttacatagctaatcctaaactaaataaatgagattatctaattcaacttcacctctccatataaattccctacaaatgtattaatctttctcagcaccaacataggcaatataccattatctatgcccaataggaatggatagtaataaagattgagatgatccaagttactcgacaagcaaaaagtatgttccttgatctccaaactcgaattatttgcactattttctcaattaagctattgcattcagaagttgaaagtctttgaccacaaattgatatacacaaatatttgaaggcaattcactcctaataaatcctaaggcatctagaattttatgcatttagtataacgttattccataaccatacaaatcagattttgtatctagccttgaatagtttgagcccttggagcaaataataaatggactaaaaataaccatgacaaaataagagcacactatttgcaaagtagagatgattcaacttcaaatcagtatttatcatgacattgaaaatctactttctgacccagtgaagtgagaattctcgataaatactccattctgataacaaataacaatggagacataggatccccttgacataatctcctatttacttcaaaaaatccatggataaagccattgaataatagaataaatttgagagttcgaacacataccattattagcttaataaatatatctgcaaattttagtacaactagtatttcttcaataaagtcccattctaagttgtcataagctttccttaggttaagcttgatcatgtagtttgattttgtatttttgctcctattgtgcgtgaccaaatcttacaaaccattatgttgtaagcaatggacctcccctctatgaaaccactccttttctacgctacaaattcaagtaatacgtgccttagcctggagcaaattatcttagtcacggtcactcacattgtttgggtaattgatcttaggtatatgattaagagtagttgaattaacttccttgag

SEQ ID NO: 1697 - DNA, 1712 bp, Cannabis sativa
cacattaccccaaacaggtgagcttcattcaaagccactcattactattattatgttttcactcataccatgactttgctaaaattattccaacccttcttcatttgataccctttctttgcttttctacagctagctgtatggatattgtgtatgatacttacaaggatgaagatgggttcctgtacatgtgttacagcagcgagaaaacatttggctagttattattgcagccacggtgtttgcttgtttgtttgtttgtaagtagtatttgtaaattgtaattaaattaaattcactttgctgtcgtcttcatcatcatcatcataaacgtgtctgcatctctaatttcaagcatggcacgctttgttcaaaagatgttaatttgttatttttctgactactttaggggcctcctctttatgtttcctttgtcaactattaaagatggaaactatggagagcatagcctttcttctaaagttacaatgtcattattatgccattgtcatctcacaataaagaataaaaagttcatttgtgattattcatgtttatgtgtttgtttttgttccaacttttgtagtacatgattatgtatgttttcccaattctcaacagcaacactaaaaacgattgacgagtaactaaatgaaaatgctttggtatgctcagttgggtttgactaatccttagtgcgccaaaccataggaaataattaaattcatatactcttgtctaaaaacagttacagataagatttttttactataaagaaaagcatagtatgaaagatgagattgatgagtgaaatcatcaggaactggtttactgactgatactctttacaaccaaatagttggggttggtttaaaagatttgtgaataaaaagtcattacagagtatcaaggactccatgaatggtgacctctgtttccagtatgcacgtccctttaagcaagaaacccatgtttgagctgctgaaataggcttgagttatatatcttgaccaaccacgttcctcgtttgaggcactgatccagtcagtacctgtacaagataaaaaacattgtagttctattgagttataatgtatttcttatatacacgttaaatcttttctcttttcttacctgtaccggataaatggttggaattaacttggtttttgatgcgtaatatgtattccacatataatttatagtctcgaggaagcgtagtgggatcagccaaagccaaataaaaagagatatgagtacccaatccagctcctcttccattgggaaaaaacctcagcttcctacagttgaaatcatcatgaaaaagggtttttttattcaagtgcaaaaatcttcttgatatgtgtaaacaaaattgcataccattttcgacttccagcattaaattcttttgtctcaatgcattctttgtctaaatctaaacagttgtcaaccttaaaagtgtgcttgtacacaataggatcctttatcattcgaaaacactctcctttgtctttgcttctttctttgcaaacaaaaacctctgctccgaacacacaagtgtcgtcgatgagaaacccattaccaacatcgttaagagttttgagagggatgaactgatcgaatccccattcaagcttcattccatgaaagcgcctttcctttccatctaagaaaaatgagaaagaagataagctcattgtttatggtgg

SEQ ID NO: 1698 - DNA, 1553 bp, Cannabis sativa
tcaccccatacctgaagcctgaatgtgtcaacgatgtccacaaccttaacagtctggtcatcaacaccctcatcagcatcagcaccctcagcagatgggtttgcaccaatatctacatcaacggcaccttgaacaacccactgcataaaacaaccatatccaacagaaagtcagctataattgtcatatagtatattttttttcaaccatagaatgaatgattaatttgagattcatatagaaataacagctcaaaactgactcccaaaaaggacttgtagtgacatacctttccttcaacctcccaaagaacaccattctcaatctccttgtagggaaaggagtcagagagaagctcgtcacctaatgataaattattcagatcggtcagcacttatccacacaaaactaaataagagcataaaatctagtatgataacaatatcttagtaagattcataagatagcaaaatagcatataaagatgcataaaacaaaccaaattgaaaaaccatactaacccaaataagaacaccatctacaccatcaaaaacatgcataataactccgatggaactatatttcagattctaatcctgataaagcaataaactttccactaacctagctaaaaatctttcaacaccagcaatatagtccaaaaattaaaatttgtcatagttcaaccagcaaaaacgtgcatagattatataataatatatttatctcagttaagaatccaattgtacacagcaaaaacgtcataaaaaaacaaattagagattcaacccaggttaaagcaatcacctttactatcaaaatctataaattaataagttattcaaacaaaactatgtgatactacagatctgaaaacaacccatcaaacactagatccatagctaaagatttaacacccatatcaaatcaaaaacctattataatgatttaaacgatatacaatcgtaaccagagagcataattcacccaaaaacaaaacaaaaaaaaaggatagagaatcgattcgtgattgaaacaccaaagtgaaagattgtaaaagaaacttaccactgagaaggtcctggtacaccaacatgtttgcagaaaaatctctcggatctctccaacaaagggtttttgcgataaagaggagagagagagactacgaacgagagagacgctgcggtgagagagcgagagagggtttgcgaaaggagtcgaaagctgtatttatggacgagggtttgggtatgtgttgaagacaaattgtttcgaattgcatttataggcctccactttatctttaattgctttggagtccttatcacactacgattataacttatgtttttattttaaaaaattaaaaaattagaaactcgtttaattatcttttactttttatattaatattttttatctttatatattaaaagtaattatttaacaataattattggtttaatttttttttcttctcctaaacttaatgatacattttaactcttatgttagctcaaaaatataaaaataaaaaaaacaatatgatcaag

SEQ ID NO: 1699 - DNA, 1220 bp, Cannabis sativa
ttataatcatgcgatcagactttgatcatgttcgcagtatctcgctgaatctatcttgagcttggtttaaaacttcgaggagtctcttgcagacgactcaactttcattggaaaactgagtacacgtgtcctctaaacaagagtatggtctcgagtttctaggtgtgagaaatctcactataacaatttgcattaggcactggtgttagtattgatcttccatcactcatgtatgatcaaatagtaagttctgtcactgccaaaagggtgaaacacacgctaccttatccaagtttgattaattgtgtggtgaaagagggtttcctactatatatgagcatgacaatatttttcctattcatactcttgggaaaactttcactcctgtgtgtggcaaacctttgccattataagctatggatgtttcagctacgggtgaggcccttgcatctggtgtcccttcttcctcgactgttccttcaccttctttggaagggttcagtcctgcatcttggaaaagtcagttattcctcgggtgaatgagttcgttgacacttatgctcgtgatcagctcaggcagcatcgattgaaaaaattgttattcatgtgttctttgctatgactgaagtcttaaaatcctttgaggcttgtcctgatgttcctgcaattgatgttttctccagttcttcagatggtgttggtgctttttcagggcattcaccagtgatttctccattgaatatggttgtagatccatctgttactgctggtcatgattcttctatccctgagtctaatgttcaaccatcttctatgggtattcatcaaggtccttcaggttttgctactgtccaggtggagtcagtctctgctgatatctagggggaaaacattgttcctgatgtctaaggggagcaagatcttgcacatgttcacaatgattccacaactgttgatgtccagggggagcaagatcttatacttgttcagaatgattcaacaactgccggtatccaaggggagcaacccactaatgttctgtcctatgtacctgttggtgatgttactttagttcatggttccttcgcatcccttgttgcctattctagcagcgagtaattatgatcatcgagggggagatttagtttttcactttttgtacaaatattctaaacattgtccatattttttgtttagttttttgtcaagttgttttgttt

SEQ ID NO: 1700 - DNA, 3180 bp, Cannabis sativa
ccaaatgaagccagacaatgggaatagaactgtaagaaaaaggggtgagcattgaaagtacctctgtgtcaaatcgcgccttacaggtgaaagatttcccagtgtcagttgtgacagtcacatcttgaccaggcttaatctcactaatattgcttggtaaatcgatggtgtaacgttcatggccggtcaatcctagtgtctctgcatcctcaccagacttgaaacaaagtggaataatacccattccgaccaaattactgcgatgaattctctcaaaacttttagcaatcactgctttgactccctgtcatgtaccaaatttatgcaataagataagtcgataaaaactaaccaatactttaagaaacttatcaaaacttgtagacttgcagtaatagaaacaactcaccaaaagcattgggcccttggcagcccaatccctagagcttccacttccatactcagcaccagcaataacaatagtggcctgcccagcagatttgtacctctgtagaagcaaatagaaggcaaacgtatagtgattaaccatacttggaaattatttgggcagagacatagtcttcatcacaaaaggacagaaaacacctaccattgcagcatcaaacacaaaaagcttttctcctgtaggaacgtgaactgtttttggacccacttcaccattcaaaagcttgttaacaaggcggatatttgcaaaagtaccccttgccatcacttcatcattgccacgacgacttccgtaagaattgaagtccttacgatccacaccgcgctccataaggtactttgcagcaggactatccttgttgatacttcctgctggagaaatatggtctgttgtaatactgtccccgaaattcagcagacagtaggcatctttcactccatgagcgccaggaggatccatggtcatacttttaaagtatgggggttcgtgaatataggttgagttagagtcccaagaataaagtgtagaagatggaacagacagctgattccacattgcatttccttttgtaatagcttcataagtactcttgaacatttctggcaacacactggattgcacagcctaaagaagtatgacatacatttatttgtatcaggcaataggtaacttcacaacaataatctaagcacatcatcacatgcaagcatgaaaattttattctacctccgcaatttcttctgttgatggccagatatctctgaaaaagacatccttaccatccttcccttttccaattggctctttctcgaaatcaatgttcacctgttgacaaaattttataagttatctaatgtgcatgaaataaaacattgcaacaagagactaagaagagccaaaataattgccagaacatataatatttactcctaaaatcatgtggaaaaaataatctctggaagagactaaagcaagcccaaactaaaggttttgtggcccttaatttcatgcaaggacaacctccataaaacagagcccattatgtgaacatcacatcttcttttcaataacatacaagttttatttatttattctatttagaggggggcagaggggactgaaataatcaagatatcattttaaggggaagattgtataccgtgccagcaagggcataggcaaccactaaaggaggtgaggcgaggtagttggcccttgtcaaggggtgaacacgaccctcaaagtttctattcccagacagcacagcagctgctacaatgtctgcataagaatcaaagaaacaataaattagcaattgaactttgggataaaggatttacatatgcacaaaactaaatcaatactttcccatttttatggtctgaactcaataaaaggtagaattaaaacattaccgttgtcagcaatggcagaagaaactgattcatctaagtcccctgaatttccaatacaggttgtgcagccataaccaacaatattgaagccctgttcatttaaatatttctgcaggccactgcaacaagcaaataaaatttagtggacattctcgtctgcaaagaagaaataaattggttaatcctatggtaaaattacctctgcagtaaatattttgtggcaacaccagaacctggggcaagactcgttttaacccatggcttgacctgatcgtcatttgtaagccctcagttaattaactcttgtttgaagaggaaataaaatatcaagtagaaacactaggcaaacataaaagaacagctgtgatcgaagaaactaatgagcaggtaatcattagaacactgccctaccttcaagccaagttcactagctttctttgcaacaagggcagctccaagcatgacacttgggtttgatgtgttggtgcagcttgtaattgcagcaatcacaacacttccatgcttaagctctgctggttgtccgtgaaatgaaaaattagccactttgtcttgtgtttctttcggtacagcaaatccctgcattatgtcaggtaatcaggaaaaaaagtagacgagattatattgaaacaaattcatagtaactatgcagaaacaataagtgttttttcattttccatctcctggattggtaatctaaatacttattttccagtcctcatctgtgtaaacatagcctagataaattgattctggggactgatgtatcgcaaataccataactctcgggtaatcaattaaaacagtaaaaaatgaatcgagggagcacaaagttttactactaaccttgaacccaactttgttatcaagacaagcatgccaatcagctttcatttctttcaaagccacacgatcatgaggcctgttaaggataatggttaagacatgaatatataacacgtctgtgtgctttaagagctaaatagttgtgcagtgggatcacatacctctttggtcctgaaacacatggctcgacatccgacagattcaattgtaggtaagatgagtacactctatcttgttgaggctgaaattataatgttacagtagttgtgttacagacaaaaaaaaaatattggtttgtaaagtacaattttatatttgagaaagttgcgctgcataatttatcaacaaataagaaaaagtgggctcatgaaactatattacctcattatagtcaacaaaaagattatttgccctcagataagcttcaaccattgc

SEQ ID NO: 1701 - DNA, 1601 bp, Cannabis sativa
cttattatttattatatacaattaaaaaatttgtattttataaataaatatatttattattttctttacttaactttttttagtcaaaaaactttatttttagaaaacattaactaaaacttttaacttttttttttttcaataaaactacagaaactgttattgattggtttccatcttttaaagcataattttgaaaacaatatcaaaccgatcgaccttagtatatagtcttctacatctggcggctcctttagaatttgaggaagtaacaagcttgagacattgagcaaatgatatccactattatactagttttaattatctctacattttctaatgcacaccctctttacaccttttgttcacccgaccaaggaaactacactcccaacagccaattcgaaaccaaccttaagactcttcttgatcacttatcttcaaacacaacccttaatggatctctcccaggctacttctatacatctattggaaataatagctctgataaagtttacggacaatccctttgtagaggagatgttaactccaccgtctgtggaaaatgcgtggaggatgcaagccaagacattttcagaaactgcaagagtatagatgcaattatatggtatgaactttgtcaagttcgctactctttccagatgttcttttctactatgcaagtctatacagggaagttccccaagagcaatgagcaggacaagaacgtttcggtggaccggactcgatttagtaaagttatgatgcatatgatgaagaatctctcagatgaggctgcgtttactccttctaagaacatgtttgctactgggaaaattgaattttcaagagaggaaactgtttatggtatgctacagtgtactttggacatgcctccaagatcatgtagtagctgtttggctgctgccttgggagaccttaacgcttgctgttcatttcgccgaggtggaattgttttgagtaggaactgttatgtaaggtttgggatggaccatttctacaatgacaccttgagccctttgttagtctatccatcttcaacaggtaaacatttcaacagcaattctaaagtggtatcatttagaacttgtctatttaattaagacttttttaattaaataattattacgaaaattgatgtttcatacataacaaatgtaacgattactttaattgaaaataattcgagttagtttattatgtatatatttatttcatttttatcacatatttttaattgattatatatgttaatttgtgtctagtgtattgattttttattatttatttttttggggtgaattatcaagtatatattgactaaattcgtgtcatgttaaggtgtttggatccaaattagtactactagtagtactattttcttgtgttgtgtatcttagataagaaggtctagctacacgtgtgtattaaatcaaactaaatatggatatttgttactttataaataattatagaacttgagtattgtaacttggggtttaaggaagttattccactgagaaacagggaatagatggaagatttggaagattgtgctggttacctgctcattgagtttg

SEQ ID NO: 1702 - DNA, 1953 bp, Cannabis sativa
taagaatgatacaaaataagggtttagtattacattaggaggaatggtcgtgatctcaaaaataaaaataaataaagttattttagaaattgtgatattcatgtaatgccgcaactgcctcttcctagaacttgctttatgcgattttttcttttcttcccaaattcgagactcttctacaactctcaaattgacaaattctcattcttcagaatctataaattcccttaaaaacccaaaggtaagttcaatctcatcttcgccgaaaacaaaaaattgtagaaagcttctgaaaagcttcgagagaaactatcaccaatttagtagcagcttcttcttcttcttctaattgatctttttgactaaagaagccatgttttttgtgtgcgtaagcgacgtggacgaaagggttgtgtcgagccaaacggcccctggtaattgcccattctgtggaggactgattcgggccttggatgttcattatcaatggaggctatgttttatccctgtttattggaaaaccaaacgcaaattcttatgtaccctctgcaaccaaccactcgtagctctccactgattctataattcttcttttctttttttgtatcatattatagatagattgtaattattatcatatattttttcattgcccatgtaattttcttttatttcaataaatatatgaaaaaaaacaaatttatttcaataataataccaagacaaaaagtacatcacttgcaaagttttagcctcttaaaatatgatgatacaacggacttgggatatggtttcgtagcaagacaggttgggaaattctcaggttgttcaatccacaacttgtgtgctataccaccagctgtgagtttttcagacaagttcaaaatttgggtttctcccttcacctcaagtgtaacctgaaaaaaagttaagtatggtgacaccattaatttatggcaatgttcccttgtttcaagtattacaaatactcagatcaccaaaagttagggctaaatattcagcaaatatttaaacacattcaacatcaccaaactaatgcacatgatataattattactcaggattgtcattttctctgttcagtctagattctcaaagccttaatatagaatctagtctagactgaaatgcataaaaaaagatatacatcaagaaatctcccaaaacagaaatatgtatctaaaaaaattgaattgaaaaacggatgaaagggaagattttctttggagggtttattattaccttatgcatggaatcgatgttatccgggttacagtactcaagtgtatgaggatcttctttgttggaccaaatggcggatacggaggcatggcaaccttgtgtcacaacgctaccgagcggccacgtgtcaatcagatctcgacggagcaccacatactgaaccagtacgtcgaagctttgggttttatcgacgtcttctggggaagcgaggggagtggagtccgaagccgaagccgaagccgagagaggttgactcatcgagctagggttgagtcgactcagtgaacgattcaaggcccaagtaggtgggttggagttgtgctttatcaatagtgattgggagatactgcaagggcagcgaaacgctgctgctgaaactgaaaggcagaaggagacccatgttgtgctttgtatacccatttttttctaaataaaaaaaattccatttccatttccatttcccataatacccttataaacacttctcaccagtgttgccttaaaatctatccctactctaccatttacttcccctcatcgccaatcttcattgctagcaccatcgttcgtctctgctctgaatacttctcctttaatataataagagaagatcatggatttttctgacttataatttggttggttttaaggtagtttagggtcgaacacgagtgcgagaagtcggaggct

SEQ ID NO: 1703 - DNA, 2015 bp, Cannabis sativa
taattgtgtcaccgggtttcttctctctcttcttcagcaacttaaactgctttccaagacctttaacagctggttcaaccccagaactttttgaatcatcatctgtttgattttcctgcttttgtagatgttgaacccaacaagaacccaattcccatctaataggcctttcagaaatttcaggctcttcctgtgatcttttcaagctctctttgattacagttctgactagactcatggaagtttctgaattatccaaatcagattggctacttcccaaaggttcagcagtgggtttttgaagcagagctctcaggctgtaaaatacattgaaactcatgaatttgaactagttttccgattttgtaatagcttttctgtgagacattaaaagaacaattggctacaaaagttgcatatagttctaacctgttgatattaagagcatttgctcctccatctggttggtcatcaacttcaatttcttgagcctcaaaccttcttttattcacattgccaacagctttaactgttgcactgtatccacaatgtctgacattgacaatgcccaaggaagaagtatcctgtaaaaaacagtcccaatcataagtgttgatccacatcattatagaaataaaacttcaaagcttcacacaacttttttgaacatataagctatataccaaatcaatcataagaaatgaatacaagtgctttgcttacatgaactacaacactctcatctgctgttagtcccttgagtaaactcttctgagcaaactctttgacagacaaaccagatacttgatcaatcactttcacttgagaatttgagctcacttctgttgagtcacgtttcacagtaatggacaagtcccctacacgattctcatacacaattgaagactcattctgtctcgaatcggattctaacaaactgcttattgcttcagtagctttcaatactgagacatcgacaaatttactatgaagcagaaaggttttgcgatctctaaccactctctcatcctcagtcttgcaaggaagtttagccaatatcgcgaaatcagttgcccatggttgatgatcatactcaccatttcttccctctccacctccattcccaccccaattttcatcttctgttggtaaaggttggaaggttgatgatggagagtcagcaaatgatggaggaacaagccatgtattggctcgaaatccataaggaatattaccaaactgaaatcgaaaacaaaagcatgaataccataactgctcaaaacaagaattagacaagtgaaagaaactcatttttgtgtcaaattgtcaccttgttatgttcaacaaaagctttcatcaaggactcataagactgcaatatgagcattcataccccattagttagtaaagaaaaagaaaacagttttgtatgatatgaatcatatgatgatatgtttgcatcaaagtacacacattgagaaaagcttggctaagttgttggagaagatcaaccaaagaatggctttgtaggaattgctttcccactgcataaaaacctttgactgatgccaccacttgtatctgcttcccattgcatatcttgatctgtaaaattccataacaaaagtcagttcttgtaaaagtctaagcaaaacagaaacataataacgggacacattggagtgaaagcaaaatcaatgtttattttgttattcataaaaaattatataatcaatgtaccgtttcgaaatcgaggagaatttatattatatttatttaagatatcttgtaaatttttttttaagatattcaaaataatttataataaaaaaattagtgaacaaacagtccgttaaaataaaagaatcacgaatgtatgaagtagtttaaatactattttgagcatgttaaatttattataattttttaaaattttataaaatattttaaataacctcaacatgtactcaactataaaaaaaaattaagtcaaaaaagttctttcaatgaaacaa

SEQ ID NO: 1704 - DNA, 4177 bp, Cannabis sativa
tatttcctttctttctatatatttattcatctatacataccaattataaaactatattaaaattgcataattggttggttgtttggttatgtgcatttctattttccagtgtacggcctcctgttttttcaatgcattaaaagcagtgacatgaaggacctgcatgtgaaatcttttacaattggatcacaactctcctgtctctctctcccaatagtatcttcttttttgattttgatatgggagtggagaaaattgagtcattgagcttagatggatgaccaaagccatgtgaaatctcttcatgaaatggggtcctctaaagcttacctggatgtcagactttctgacctcacatccacctgtactatcattccttccctataaatacacaacactccataattccttctcattccaacatttactcataacaaaaaatatattaaatataaatattatccatcatcaaactacagagaaagtctaagctaaagccatcagaatcaagttttagagtttcccacttggaatacttgaagtttactcaaatgggtattattagattgccatcaactattcagaatcttaagcaagctcttaagcttcactcatcaactgctggagctaagcatcaccaccaccatcattctggtgtcccaaagggccatattgcagtttatattgtgggagaaattcaagagaagaaaaggtttgtcgttcctatagcttatttgaaccacccaaaattcaaggagttgctaaagaaagcagaggaagagtttggttttgaccacccaatgggtggtttgaccattccatgcagagaagacacttttgtccatatcactgctcaattaaatgttgcttcatgttgaaggctgatattgagagtaactccacatttttttgggtagtagtagaggctgtagagatttttattacatgtaattatgctattagacaaggatattaggtggttttaattgataaccatctaaaatccattgagaaatgaaatcatttcctattaaatcctctaagtatttgactcttaatttacagttcttttacatatatatacattctgtgatgattttgcttcatattgcaccaaaattacaactttaaactgttataacacagatgggattttaggggaaacgcttctttgtttaaaaaatagatattgcatcagtaataggaaagtattcatctccaatccacactaaaacattatctaagcagaaagcatgtttagccaaattgttgtgggcttaaatcaatgccagggataagagataatgaattactaatatggattggctataaaacaaatggtttcattccttaagttgtaatttcaatgaccataactttagaagcatattcatgtgcttaatttttcttcacactgagataaacttatgatgtagattctgtcaaacactattttaatgtgaatatgttaatttatttttgggaaatctaacaaggttttttttagttgcttattaaacgataccaatatgagttagacattcttctcatggctaggaagagtgaaaataaaatctgttatcaactctttctccttatagcagttcttgttcagattaacatatcttaacttagtgtaaaaattaacaaaagcaaacagttcagtacattggcaataaatgaacatagacacaactaaaaggcagacaaagttgctaatatcttcagggttttgataatagacagctgtcttcagtcatttcatttattatcataatttcaataattcaaaaaagaataaatactagtccagactttaggttgaacagctttagttttgctctgtcagagcctctctgctcagtagtctctcaattttgatggcaatattattggtggcagctcgcaaatacctttatattttgtgctaagtttttctatttcaactcatcaacaacatcgtcacatggattggtttgcttctctcttagttatgtgatttgatttatggcttaaacagcctcagattggtcggcttgatggaagttgtgggtactcattagtgtcgtacaaatgaactctgtttctatcaaatgagacattggtatcatttgtgtcttatatatagtttaagtacattcattaatcaaaattcaatcacaaccattcttaagggacttatacatgtgaattgtattcttataaatagaaacatacattgagttagaatatttggcaacagagatgttttgcttttcttttttctctttagataactacaacatttaatataccctataattatttatcttacaagataaaaatggaatatatccttatgccgctccatggatctctcctctatgcataaattggctttgagatccaaacgttttctattcactttgttatgtctttggctaacattggccacaagctaataagaaagctataaattctaagaatggggtggtagccaattaaggctcgtggcagaaaccggcaagaaagatcattgatgaaacttttaatagagcatcaactgaacttaggaaacatatgtagacgtagacgcttccaggatgtctgccgtgcaacatcacctccttcagtccaatgacaagttgccggttctaatgtcacgctgctgatgagcgattccttttcctagtcggaactgggataggttcatctcatctggtttaccactgaaaagaggagcaagcttaggttgaaaccatcttttaagtgttattccgctaattctgatttttccatgtgattcatttccctggtaatgtaatccaatccttctcagtaaagacgcaactgcttgaccaaccctgttcacaataagatattttagtttagtaagcggagaaaacgagtgaattatcagagaaatcagttgtttaactatagagcaggacaaacatcgagggagacagatatatcacattaaccatttcaatttgaataattttcaacatgatactccgtccgtaatctgcaaattttgagtatattacttgtgtgtgttcatgtttatttagccctattctttgattaatgattatagattgttgttgtttgcctctaccaaatttgaccaatcaaatatgctgttgttcaacttcagagacaccaaatatagaagctcaatcaaactttatgttgtaatttttcagaagccagtcttttacctccctgcaacgttgactgtcttctcctcgccatttggagatgtcatttgggctttctcaaccgggagtaaaatggttatgccaggtagcctcgcacctgcataatgtgtcaggggccaccagaaaagcaaagatgtaagtattaaaaaagaaatgttcctctagatcatttatgcttgatacaaaattcagtgtacatttcagactgaacaaatttgaccacctaattataattaatcttctacgatatactcactaaaaacttcaatcacaactcaaatatttaaaatgacaacaaaaaggagaagaagaagaaaaataccagcagcaagacgatgtttgagacctttcaaaacagttaaaaggtacacctgcgaagtaccatattagattttaattaatctgaatgcttgagcttttgtagcatgcaccattgtagataagtgaccatgactttcagaagagaactcacctgagcagtatgaatctgcaacttccttgtatcaacaataacaggattttgtttaaaggatactaaaggaacaatcccatgagaagcagcttcctattttaacacggcaatgttacacgatttccagtaagtttctatttcaaagtatgaaccaaaattgttaaaaattcaacactactgacctcaagtaatgaaaaaacacgagggtcatattcaccaaacccgtctatcagtgaactaaggtttgagggttttgttgtgtccgcagttacacctagattctcaataagcctatttttcaatgatgcatcatatgggagctgcaagcatcctaatacttgagataacacatcaaccgtagggacaataccaggtgaaatggagtcacggtagaccattaaggctgatgatgtcctgtaaacatagcacaataaattgctcagaagcttatactaaactccttactcattaatgatacataatcaactttctaaatcattta

SEQ ID NO: 1705 - DNA, 2504 bp, Cannabis sativa
ttcatcaataccattgtggcaaagttttgagtttcctagtcatgcatggctacctggagccaaattagggtacaacaaaacaagcgaaactaggaagattctaacttcatggaaaagcttggaggacccttccccagggctgttctctgctcagctagatcatactaacaactctgtttttattcagtggaataggagtacgaactactggaccagtggtccttgggatggagatctctttagcgggattcctgagatgaggcgcaatgctgaaaactactatttcacctttgtatcaaacgaaaatgaaagctacatcacctacaccatgacaaacacttcaacattgataaatcattttgagattgatgtttcagggcagcttacacaggtgaattggcggtctgataatggttggactgtgttttggtcggttccaagccaacgatgcgaagtttatagagcttgtggggcatatgccaattgtgatagtaatgaggaatccttgaccccttgtcaatgtttgatggggtttgagccgaattcgccgaaagattgggaattgaaggattactcaggtggttgctatagaaaaacaaggttgcagtgtggggttagtaataataatactactgtggatagatttctggaaatgacagatatgtccttgcctgaaaatatgcattctgaagaagctagtaatctggatgaatgcgaatcaaattgcttgagaaactgctcttgctctggcttttcctatggaagtttgggctgttcaattattacgggtgatatcttaaatctgaagcagctagtatctggagatagcagacaaaggactatccatattcggttagcgaattctgagtttcgaatgcgtaaggaatttcaaagatggaagctttatgctctcttgtttggggtaatagctttagtcatgttcatcacttttattgcttgtttcatttatttacggagaaggaaaagagcagccatcaaacaaggtaactttgataataataatagattgttttgtgtgtgtttttctaatttcgtttttttatgaattgatataaaatgttttcaaaatatttgcagaattaggtagcttgatagatccaaaccatttcaaagacgatgaaaaggaaggcatacaagtcccgtttgttgctttggcaaacatactagctgctacagataacttttcagaagccaacaaacttgggcaaggagggtttggccctgtctataaggtaataaactctaatactcattgaagtttggattccacaattttttttttttattatttatgaaatttaaataataggatgttttctgtggaattctactttagggtaaatttccaggtgaccaagaaatagctataaagaggctttcgagtggttctggacaagggtcagaggaattcaagaatgaggtactattgatcgccaaactccagcatcgtaatcttgttagacttttgggctattgtgccgaaagaaatgaacaaatactaatctatgagtacatgcccaacaagagcttagattcattcttatttggtgagtttccaatcatatatttttctaagttttgattttctgtgaatcatttaaagttgatttgttgaatatatacatccaaatagatcaactgattttatctacatgtatactaataaaaacttgttacactttaatcaaaaagatgaaaacttacgtgggttgctgaattgggaaatacgctttaatatcatcatgggaattactcgaggacttctctaccttcaccacgattcaaggttaaggattatccatagagacttgaagataagtaatgttctgctcgatgaacatatgaatcctaaaatttccgattttggcttagcaaagatttttggaggaaagcaaactcaaggaagcacaaacagagtcgttggtacatagtaagttttttgtgctaaaatgtgtaatgtacatctttttcatgttaatttttctgaaccaacttttatttttgttcgttagtggttacatgtctccagagtatgcactagaggggttattctcaactaaatcagacattttcagttttggggtcgtcacattagaaattattacaggacaaagaaactcgaaatcttatcgattagaagaagctgttggccttataggctatgtgagtgttatttactgaacatgtctcttttcaacttaaaatgttcctcttttacattatttatttactttttcgttttcgatgggttgctgcaggtatgggaaatgtggaacaaaaacaaggcctttgaactaatagattcagcatcaaaggagaagttcaatgaagatgagttcatgaggtgtgtaagagtgggactattgtgcgtacaagatgacccaaatgatcgtcccagtatgtcaaatgtgatgttgatgcttggaagtgaaactgcaagtcttccaagtcctcgacaaccaacatttattgtgaaaagatct

SEQ ID NO: 1706 - DNA, 2405 bp, Cannabis sativa
ggttcctcctattcctcatggatagaattctcatttggaacgtgagaggtcttaacaaccaaaataaacaatttaaggtcaagaaattgatctcgaactatcaagtcggactggtggggttgcttgaaataagagtaaagaataaaaatatgggtatggtgtacaataatatgttcatgggttggtgtttctcaacaaatggggcatggtatataggtgggaggataataattagctggaactcagctatgtttacggtcaatatcttgcattgcacaagtcaattgatgcatttgcaagtttggccaacaagacaacgagagtacttttttgttacttatgtgtatgcttttaatgatgaagtgggtagaggaagcttatggcaagaccttaaaggaattggagataacatgaaagagttgtgggtggtgttgggcgactttaatgatattcttcaaccggaagagagagttggcaggacagtgaagcgaagcaagttgaaagcgtttaaagaatgtgttgaaagttgcaaattggaagatgttaaatttgtgggctctttcttcacttggacaaataagcagggaattgcaacaagaatttattccaagattgatagagtcttggcaaactaggaatggctctagagatttgaaaatacagaagtagtatttatggcagaggggcaatttgatcatttcccgacattgctaactgttcaccctgaactaaagactggagataggcctttcaaatatttttgaatgtggcagagtcttttgggtataaagaaggtgttgatcgcatttggaaagaagacattatcgggacaccaatgttcaaagtggtaaggaagctgaagaaattgaaagaggtgtttcgaagtctcaacaaagaacaaatgggggatataaaagcagctgatttcagagctcaacagtttatgactaaatgtcaagaggaattacaacaacaacctttgaatactaaactgtgccagaaggaaagtgagacgagggggaaatacttagatatcatcgctcctatctaacattcctttctcaaaaagccaaactccattggttgaaagaaggagatgacaacactactctttttcatgcaagtctacgagctagaagggtgagtaattgaatttttcaatcaaaaccatgattggagagagggtttttgatcctaagaaggttagtgattcttttcttcatttctacaatgatttattgggctctactatacctaataggaggttagtgaacttcaagttagtgagacatgggccaatcctttcgactcaaaaacaagtttttttactttagcatttcacccctgctgatgttaaaagtgccttgtttagtattctatatatgagggaaatcaccgggaccggatggttacagcaaacattttttttaaagataattgggaattgatcaaagaagaggtgtgtgaagctattctatcattcttgcattcagggaagctccttaaggaattgaatttgactacactaactttgatcccgaaagtcaagtgccctgagagtgtaagtgattttaggcctatagcttactgcaatgtattttataaaattgcaacaaagatgatttgtgcgagattgagaatggtattaccagacttggtggctcaaaaccagagtgggtttgttcaaggtcgatttatttcctataacataatggtttgtcaagatcttgtcaaacaatatggtcagaaattgacgagaccaaattgtatgatcaaaattgatttgaggaaagcatatgatacattagaatgtgactttatcgaagagatgccgatggctcttaacttctcgggaagttttattaaactattaatgacttgcatccgaactcctcggtatagtctgctatttaacggttcaatgcatgtttttttttgcagctaaaaaggggctgagacaaggagatcctatgttgcccttgatttttgtactatgtatgaagtacctttctcggattcttgcaaaggtggggctcaaaaatgattttaagtttcgtgacaggtgctcggagctaaagcttaatcacgtatgattccctgacaatgtactcttattctgtcatggtgactttaagtcgattgactatcttttgcaaggtctaaaactcttctctatttcatatggtttacaatcgagtgatcaaaaatctgcattgtactgttgcgggatgggggagttggaggttcaaagggttatagatgcatctggttttacaagaagtgtgctaccattcaattatggtatctccaattagagttcctctaggatgtaaaatatatcttttcttaccacccccatactgtatgagataaatgtatgcggtcgtttaccaatatcagtactt

SEQ ID NO: 1707 - DNA, 2143 bp, Cannabis sativa
cataataataataatgttttaagtaatttttccgaatagaaaatataaaatttgggtagagaatgagattgagtgtcgtttgtcaccaaattagtacccaaattctaatatctacgacgacgtcctgtaacactaacacataacaaagctttgtgagagaaacttagaaacagacaaagagaaagatgggtcagactccgaggaatcatcaaatccttggttgtgatctcccaaatgggtataaaatactcgtgattaccttcatttacctgagctactgctcaatcctccaagtgggtgcttcgatccatgaataccacaccgaatctttcattcgtcgctccaattcattcttcttccatggcggtagtgagggtctctatgcttccaaaccccgctctgagaatgacaagctcgtttctgaagataaacccattaatggcaagtccttcatcaggtaacaactcaatctttttttctttaggaaccaattgcaagtgtgtatttttgatctatttggttctcgggaaaatagtaagtgggttgttttttattttctgtattttttgttggattttggtaaagttgacttttttgaagtgtcaatttaaatgctaatgctaagatttaatgattggattgagtagattgactgttatgtactggttatatttgttttcatggaaaattttgatttttagaaattactgggtatggtttgtattttgtttctgtttcaatatggaataaaggatgaggatcaattgttctattcaatggaaaagtctccatgttgtagttgatcaaacttctcaaaaaggcttgtagtgcaaatgatattgttacaagtttaatttcttgaatgacattttctatacttaggtttgaatctgtcacctttcgaagaacgaaacattctgctgagcagaagaatgcaatgcagcagaggactggcttagttgaggctataatacttgaggttagagacagggataagattgggggttcttacttgaattcggatgcgttgtgttgcactccagaacttgcaaaggatagttcctgcaaggttggagaggttatcattcatcaaaatctagataacccaaacggacctaaaagactccaggctttctttgaagggaaaaatgaagagcttaccatgcccattcagactattgagatcaacagtactggaatgtattatctgtattttatgttttgtgatccagaactcattggcacggtcatcagtggaagaacagtgtggaggaatcctgatggttacctaccggggaagatggctccgctgatgacattttctggcttgatgtctttcgcctaccttgttctaggccttgtttggtttctccgctttgtacaatattggaaagatataatccaattgcattaccatataacagctgtgattgctcttggaatgtgtgagatggccctctggtatttcgagtatgcaaatttcaattcaactggaagcaggccaatgggaataaccatatgggcagtaaccctcactgctgtgaagaagacaatctcccgtcttcttctcttgatggtttctttgggctatggtgtcgtacggccaactctgggcagcataacctctaaattaattctccttgctttgacgtattttgtggcctctgaagcactcgaacttgttgaacatttggggaatatcaacgatttttctgggaaagcaaggctctttctggtgctacccgtagctctgctggatgcttgttttattctttggatattttcatcattatccaaaactttggagaaacttcaggtacttgtgatgttccttcacattttaaagagattgatatttattcctatcccttttagtttgagacaatcaaaagatggaaatatgtcattcaaaaaggattgagtatgcatcagacattccttttgaaactcttttggaagttataaaagtaccacaataatttggtgaaagaaaacaaaacttattcactgcttgagctcgtttctcaacacttgatcaagtacaatttccttggtttattctcatatctttagaatgttgtttctttacaaacttgctgaaaggaatgatataatcatgtacttgaatcaaaatctaactgaa

SEQ ID NO: 1708 - DNA, 1578 bp, Cannabis sativa
aatctatatattgtctttttaattttctttttcttgtattaaatgagggcatttgtaacataacaatgtggcaaaattaagttaatcctcatgattactaaatgtaacacttctttactaataatttttgaattattataaatgtgaccggtctttaattaaatttaattgtctcttcatatattgatcaatctcttgagttttagtgtaattatttccaaagaaaagaaagtaaagttgatctattactctactctgtctctacacactacaagtaagtgactctatattcaaattattttgttaagttttttcgatggaatttcacctattttacttcaataaagattattgaaattcgctaactatttagagcgctttttaaatgaaaactattctatttgattgagttctttttttttttttcactcaaacaaacaaggtgttagaagggtctaaatatatttgaaaattatatttatttatattttttttagcacaaattcattgtttggcttggggttaaagaaaaatagtactaattaattaagaacttatttgtatttgtagttgttcatgatgggaatcttcttctttgtgagtttagtaataagcgtcttgagaggtcaacatggttctatctggaaaattttaagtattttgagatggatctcgagaattaaggctattaaatttcgaagaattgtgtttgcgacgattgtgcccattgctgcagcggccatgctcatgtatttcataagaaaggtaagaaacttaaggatgttcggtaatcattttgattttgattttttttcttctaattttacttaacaaaaagttttatagtttctccgaagtttttaattaattaaagatttttttttaaaaaaaaaattattaacagatcatttgtatattattttttttggcaataaaattcaacttaactaccaaaaaaaaaatgaaataaaatagaaatattttatttttcattttcttttgtttttattcatattctcatgcatgtttttattataataatgtactttatatttctatttttatactattgttttctttagatgaaaaaaaaaaacatgagaaatgtcctatatatctacaatagtttattcttgtctaatttaaattgcataattatattattagtgcacgttgaatttagggttagttgagtaaaatgtaaatcgaattttttttttctttttgtttcgtatgtttatatatattttaataaattcgtcaatttcattccgtttttgtatattattatatttttattagttccaaccaaacgtacccttaatgacggaagtgaagattgagagtatagacaccgaaattgcggagagcaaaattgaaagcctttcatcttctatggcggtcatagaagagaagattgatgatcttatagaagcttcaaaaaaccctaaccatggagataataataatgtcatatgtttgcaagctcaacttgggagggagttggctgaaattatgggccctgcaagtgattattctaataaaattatatatttacgtggtgtcactatcttagct

SEQ ID NO: 1709 - DNA, 3166 bp, Cannabis sativa
ccaaggacgagtctgtgcatggaaccctagccaatcctgtctacaatggagaaatggccaagacctaccaatttaaactcgacccgtttcagcaagtttctgtctcttgcttggaacgtaacgagtcggtcttggtctcggcccacacttctgctggtaagaccgcggtggctgagtacgccattgccatggctttcagagataaacagagagttatctacacttcgccattgaaggccttgagtaatcaaaaatacagagagctcagccaagagtttcaagacgttggtttaatgactggtgacgtcactctttcgccaaacgctagctgtttggttatgacaactgagattctcaggggaatgctttatagaggttcagaggttctgaaagaagttgcgtgggttatatttgatgaaattcattatatgaaggatcgtgaaagaggggttgtttgggaagagagcataatattcttgccgccggccattaaaatggtttttctctcggcgacgatgtcaaatgccaccgagttcgctgaatggatctgtaatttgcataaacagccttgtcatgtcgtttacacagattttcgaccgacgcctttgcagcattatgttttcccagttggtgggagtgggttatatcttgtggttgatgagaatgaacaattcagagaagacaattttgtgaagctgcaagctacattctcaaaacaaaaagattttggtgactccagaggtcacagaggctctaatggcaagccaagtgggagaatagcaaagggtggacctgcttctgggggttctgacattttcaaaatcgtcaaggtactctcgattgtccgttgtgttgtgccctacaatcacaaactgtagaaaaaggttcgagtttgtgtagtcaattactagaaatcaattgctaaactaatagagcatataagtgttctcttaatcttttgcgtttctttatccgtgtcgataattggaattaaaccactggttctcatgtcagtgaaacttaacacttgaaaagaagtttcttcctagcaaatttatcactgtatgattgtttatagaactattagtaaattgtctgtgctttgttttttttcatcagatgattatggaaaaaaagctgcagccagttattattttcagcttcagtaggagagagtgtgaacaacatgccatgtcaatgtccaagcttgatttcaacacacaagaggaaaaagatacagtagagcaagtttttcgtaatgccattctctgcttgaacgaagaagacagagaattaccggcaatagagttaatgttaccattacttcaacgaggtattgctgttcatcattctggtcttcttccagttattaaggagttggtagagattcttttccaagaaggccttgtaaaggcactttttgctacagagacggtacaatgatttcctggcaatagcttaccttcaatgttcttttaaaatttcattttggatttcaatgtgcggttttagtttctatattagattagaactttatagatgatattcatttcactgtgcagtttgctatgggtttgaatatgccagcaaaaacagttgtgtttactgcagttaagaagtgggatggtgatagccatcgtttcattgggtcaggtgagtatattcaggtgagttaagattgctttacctctgctaagtgggttttagggattttggcgtataaaaccattgtaaaataaaaaaagaacaaaaccaagaaggatacagaagaacactcccagctttcttaaaagacatatccatttagtgcatatggtcgtttccatccatttagtgcatatggttgtttcccttactgaaaatttatgtgttaatttctaaagattattttgtttccttttggtagatgagtggacgggctgggcgtcgtggcaaagatgaccgcggcatttgtataataatgatagatgagcaggtaacttttttcagtcatgctctattcgtataaattattgtactaaaaaccaagtatcatcttactgttttttgtgcaatactaataagctttaggagatttatcattttttttttttttaatttatagttatccttgtgtctcgttttattacatggcttttgttttattgttcactttatgttttctaaatgttagtgatatgattaaagaaaaatatgaaattgcctgtgtgtgaactatttttgacaaatttacagcctgaaaagtgctagttattaggctcattttgaatgaacaatctctgtgtactcattacagatggagatgaatacgctaagggacatggttttgggtaaaccagctcctttagtgagtaccttcagattgagctactactccattttaaatttgatgagccgtgcagaaggccagttcaccgctgagcatgtgataaagaattcattccaccaatttcagtatgagaaggtttctattgccaatttcttttatttgaattaacactttatgaacagtgattaattacatgaaattttcttcatggttcaggctttacctgatataggcaaaagagtttcaaagcttgaggaggaagttgcagtacttgatgcatcaggagaggtattctttctttttctacaagtcttcaagttcatttttaaaaatttatttatttgtctaatttgtttcttcttgattgatgatcgacatacaggctgctgttgctgaatatcataagattaaacttgatatagcccaaattgagaaaatgatgatgtcagaaataatgaggcctgaaagaattctgtattttcttcaacctggtcgactggtatgtcctgatgggcattattgttgaatcgtgtatagaatcttaattgttttgcgttttatctatccttgtccatgtttgtgttttttgccatttagtgcctattttgtgtcatttcaggtcagaattagggaaggtggaacagactggggttggggtgtcgtagttaacgttattaagaagccctcagcaggattaagtgcacgtgggggcggttatatagtggataccttgctacactgttcacctggttcaagtgaaaatagttcacgacccaaaccatgtccacctcgtccaggagagaagggtgaaatgcatgtggtgagtttgaaagtgta

SEQ ID NO: 1710 - DNA, 2368 bp, Cannabis sativa
tattttttattttacgcatgaaattgactactttaaactaatgtaatatatgattacaaactgttctctgttttacagattttggatctagttccaaagctcactcacctgtatttctgtgagaaacttcctgtctcattatcagctgcccaggcttctattttgttatgcataggtttgcagaatcaagacgtctcctatattgaggttttttttttcttttgttttccttgtcatcttccatgttgtagctggcaaagttatattgcactattttatacttgcatatggacacaagctcatagaaaataatggctatcttctgaaaattattaattcagcatctcataatcttaagacgactctgactgatcattcaataaattcttggagaagttatccatgtgatcgccaggacagtcttaaagtaatctttgtaatatcataccaataattaatgtgtatacttctagtctacatcaccatttcagtaaattagaaattagggtaaaagagtagacaagaaaatgcaggaggtcgaggtgtccatttgctctgaattacaagaaggccaacttccactatagtaaaataactcagatttatttgaactaagatttccagaaagtaacttgatttgtttttaagttttgctgagttgaattaaaactcttttgaatgccctagtttcgaactgagtttataaataaaatgtgttggttactcagtgatgcgcatatatttttaatgggttctcagttaaatcacagtcaatgcagatgtagttttttgtctgtatgtacatttatttgtcttagttggatatagtagctgtatgttatttcagaatctttacggataatgggatttaaaagtgtctattttattaatatattgtgttcttatttgacttcttttcactataactcttgcattacagagagagatggggctggagaggcaacaaatattgtcacaatttataaaagctatgaaaaagttccacaaatatctcgacagaattgcatcgaaagaaattgaatcaagcttgcctcggctaagtgaagtaagtttgtctggaattcggtttttcggcatcctatctacacttctgtctccttttttatgctaaattagttaaaagaattaaaaagtggaaagcaaaaacttcattgaagattatccctcaccacattgttgttataacttataatctctatagactctaatctcatttaccgtgcccggccaagtttattttatactattatactcatgctgtgtgatcatttcgaaccaattattacacaatccagtaagaaaatattgttgtttttttgagaaaaatgaagttttagttaacagtcttgttgtaagtaactgaaaagatgtaaactatattaaaaattgtatggtgtgaatgttattacatatctactttcataagttttgagtgctatattggaacttgtttaatatttctggttttgctgtcagattgcaatagagccaaccaaggtttctatggagcaggatcttgaaaaagctgctaggcaggctgaggtattctctacttttcttgctcgtcctcttctttttcattccttccgtcaataccaaaagaactagaactaaatttgattatattctgtttacaggcggatatgaaatctgatttgaaaggagtaatggatcccgagttgcttgaacaatacgctaatggtggtaagaagtccagcaaaagtaagacggacaatgatagtgggaggaaacgaggtaaaggttatcaaggatccagatcgaacaagaaaaagaaattccaacattaacggcaagagaatactctgcagaaaatgccatggagatggctgaagaaagagtcgtttcaaaactcattcacttgaaaggtatcatcacataatacgtgatttggatcagcaaatatgaatgaattatccacaaaattttgaccggagaaagttgcttgctctacttttcttgtttatgttatttattcattaccatttttcactgtatctgttgtagcctaacttctgaataattataaaacattttcttttccatgttttaaatattttcagctttatttatcttgtcaaaagcactagtttttattttttttggtttctttttcttatttttcctcactcatttttaatcatttataaacatctttatgcaaattaaactaaatattcttaatataaaagtaataaaaatatataactatataatgctcgcacaattacagttgtcttttcaactgtattattattatagttgaaatatataatttagggctgaacatcagggggttcatcgggtttgtgggttttggtccaaaaaa

SEQ ID NO: 1711 - DNA, 4193 bp, Cannabis sativa
gcagaagagatatagtgggaacctactaaatgtactgtaccagttttttcatcctttactttaatatttgatgaacctgaaacaaacaattcaaaagtcaaagttgagctaagaactataccaaaaggatgcaatcatgtacgcgaattagctactatataataagccgggactcacagttatattcagtccacccaattgcctgattttcaagatcatatactactagcttatttgatagtaccagatctgcaagaaacacagaatcattatctcacaactcaaataattggaatgtttagcttgtactgaaattatcattgatggtgtccatcgaaattctaagagagatttataatttaaactccatttgtcttgaagaattttcgtaataataacacacagcactcctacaaattaaataatgccacatcatatatcacagcagtttgctgatctgaaaatcttgcgctaggacaatttctagaaagttttcagaagtaaaatccagaaattcactagtcatcacgttccttccaagaaataacaaggacaagaatcttcaaattacgaaaaataaagcaaaacaaagatgccaagctgcaaagtatcaatactcaacttaaaacaaaaggaatgcatatcatcctaaagattctaagttgctgaagatctataacgccaatgaatttaagaattcaaaagtacacttttactttggatgatgttaaatggctcagtggcaatataagaatagtagcaaacggatctcatgacatagaggggctgataataaaaatgcgaattgaagatccatatgagtataactagtttaacaacacaaatgatactaataaatctacaacacaacgcaagaattggttccatgttcaacaaggacaacagaacaattgttaaataactgcaaagtagaatagaggaatgatactcaagtgcaaagcatttgaataaaagctatgtcaattaagttttacttttcatcaaatccaaaggcaaatcataatttcaaagaatacatattatcaatttgtcagtttccagttttaccaaaataataaagccctctctttcatgaatatcctatagagcacaatcatgccattcaattttcatgagcaaagggaaaagtttgaattacttaattattcatgaatataataaaaggatcgctaattttcaaggaatacctcccaaaagggtcaaattcttcctatcactggattgcatcccactattttgccaaccaatacaccacatcccttcctgtaaatttaaacatgttattaataaacaacagttaaaaaaattatgaataaatgataaaaacaatggatcacggagttgttaaaggtaaaacaacaaaacagctaaatgcttacaagagattaaaggccaacaattgaaattctagtaactccatgaaaaaatgaatagatattacagacattgcatatgaaatagaaactttgcttctcagtatacttacaaaagggaataaatattcatgtggataaaccttcaaatgcagcgaattctcaaaataaaacgtgacagttggaaacgcatcatccacactgccaaaaaagatgaaaattaaagcattagtaatggacttaagaaattacaggacaagaattctcaggtaaaaatagcatcccagattcccagcgagaaatgcatcactacatacagacaaatgcgaagtatatgcagtggcggaaccaacctctaattttaggacgggccaagtataaagaattttgtttccagtacaagtgtgaggaattttgtaatttgcaattgatatagaaaacttcttataagtagtaaatttactttactttgtttaagaagaaaatctttaaaagaaaaaaaaaagctatacattcatagaacatataaaatatggaatttaatatatggtatatggtatagcccctccaaaggcctactaatttccgccaatgagtatatggtatgaaggttaatagataaaaagtagttgcataaaatattaaatgaaataagccaatccttcaggaaacacatcatacacaacaatgtctaagacaaaaaaacctactttgtttggacatcattagagataccaattcaaaatgaaatgtgtggaaggtaacaaatataatttatttttttcatttctttttcttttttttttttttaaagtttgggactttcagtgtgaagctaaatagttttgcttggtcaagaaaactggatataaaagttctcatttacgctagtatatgttcacctcggaatagtttattagctaggaagtagcttaatgtagaatttaattccttaatatgaaaaatttaacagcataatgagagcctaaaacaaatcataaaacattcttagaccccagtcatggtaacgtactagaaaaccaacgtaaaaaagaaatttttccaatcagaaaatgaacaagaaaagaaatttgcgctaacaaccactataaataacaaagatgataaatctcaaacaatcgaacaaaacttcacaagaaacgctgaatttaaatctataaaacaaattaaaaataatatatatttattcaataagaaactagtgctcttcttgttgcacattcataatagaaattccgcaaatgtcatccattgctcacctttctgagtatggaaagcatgtatactcgccatgaactgtatgaacatttagatcaggctgctgagatattatctgaaatagggaaaattatgaacaatttttgaataattttgttgagtgtccaaaaaatttcaaattacataaaagataaaactccaacatttctcataccttacttactaatggctcataaaccatttcaggaagataggctaatgttgtaccactgtcaattattgtcccttttctgtcgcctatctcaaacacatcgtttggaagctttaagaaagtacgaccaacttgaactgctgtcatgttgacattgtagtgcggcctaaacaattttttagcaataacacattaattaacaattttacataaatactgattctacagatgggcaagatgaaattagagctcagaataaactaatagcatcaaccataataaaaaaaaatctaactgaatgaacaaagaaagcctcttcaaaatcttgtgttgaaaaacatgcagtgaataaccaaactaagagctatctatgactatgatttggaacagtaaacatgagatttgtaaagaacacacaaaacttatatcctcatcgaaaattcgtgtaagggatataacctaaaaaatacaaaagacatcattatcacgtactggtttggtaccaagggtgtcatgtttacttttggttgtacaacgtggcctatggcaaagattccacctccattagtaccatctaagcagtgagcaaacatctttttaacccttccagatgaagctagctgcgatatcactgatgaatttgattttccaaagccaagtataccatcaagtgcttcttcaccagacaaagataaatccgattgtgtagcaccacacctgtgaaaaagaacataaattttccactgatggattgtttgaaatacattgcaatttaaataagtaaataaataaagtaaaagtgatataaccttactcattgaagtgaaaaaatgcttttataaacaaacaaaatgattaacgcaatgcttatactgtagaatctccttcacttgtaagtttacgtgagaaacagtattatattctcaattagtgcaaactcaagtattcccatctgttttttcagaaacttttacagttgtactcatagacatgaaaattaccaaaaacatttaaacaacgagatagtatacccatgtgcaaataactcacccaaagatgacacttccgttggatgatgtagtttggaggtctccagaaactcgatcatactggacattatctttcacaaaatacccagcagtagagctgccatctgcgtatatctgaagataaggacacgacacattcgctgtgcaaccagataatggaccaccattaacctctaaacaaaacccttcatcacaacctaccaatttcccggttgaagagtccttgatgtcatacagtgtcaggtctatctattaggaggcaaacacaaatattcagatatacaaatatatatatatata

SEQ ID NO: 1712 - DNA, 2435 bp, Cannabis sativa
gatttcaagtgttcttggttggttgttaaagcattggagctcagcaatgaggaacaaaagaaaatattaaatgtgagactggctctttcttaatcacattgtcacttaccttatcaaaaatcagtttgcttacttttgatgtttgttccaggagaactatggcaaggcagacccggaaaaagtagctaaagtaaaagccctctacaaggagcttgatcttgaggtgcaccatcaaactctgaaaccttcttatataaaacttaataagaacaatagatttatataccatctgcatatatatatatatatattagtatataaccccctactttgcagggtgaatttgcagactacgagagcaagagctacgagaagctgatcacatctattgaatctcaccccagcaaagctgtgcaagcagtgttgaagtctttcttgggtaagatatacaaaaggcagaaatagatcagttatcaaattccaagaacaggggaggaaggaaggaaggaaaggagcatagatcggtttgtgtctaacttttttttaccattatatcaagttgtgagtaattttttttcccctgatttggactgtcactctgtttattctgtatgcaatttgtaatttttttttaaccaaggactttgcttggtttttaaccgatgaataaataaacgacattggtaattcttactccacctcaagcatgcatgttacaaaaatattttaaagcacatcatatcataatgtcaaatccatgctgtgtagttgaccaacctacttcccccaagttggccctggttcttaaatgaaaatattaatatatacatatggaacagctacctatcttctgacaaggtaactaactaataccacttccaagattcttacataaacatcaacatgaatattatttttgaacgtttctcctcaagttactttttgaatagtacaaaataatagtggtcaatttttatcaaatggtttttttttttaaataaccaatctacaacaccaccatataaaaaaaatgtaaggatataacgattaaagaattattattatattttattttaacaaaaagtaaaattatactatatttgtattattttgaaaaataccaagtcaaaattattattaaaaaaatagtgttggagggtaacttttacaaaaacacattgccaaaaaatatttacctataaaagatcagtttgcatgtttatgtcttcataatttagcagatagttgttagttaggttaccggtaagaactttttactcgtgaaagtggttgttccttgtctgtgtatatgagtgattttttttgtttcatttattattaaaatgagataatattaaaagagatttaatatttaactgcagcttatctaaaaactttacaaaatatagtaatttaccaacaggacgaaatcaatttatacgtgatcgaaacccaaaaaactcaactttgaggaaatacactcctattcattagctccattttgactttgagaatttggtcattttgagtttatcctaatcccctacctcaattccaaaaaaagaataaaaagaaaaaacaaagaagtaatatacaattaaaaagaaaaggatatataattctggttgcctatggcataggatagagtccacgcaagggaggcacgaaaagtcaattcgatagaaggttctgggcaataacactcttatatgtaaataggtcctagtcaactcaagatcttgatatagtaagacagatagagagaaaaatcacatctctacaagcattataatgaaaagtgaaagtgcattccaactcttgctcttcagaaaaaacaaaaccccaaaatacattatttcttagatcaagttatcaataaataaagtatatatttaatgggataagaattcttcagatgacgtcactgaagtataaaatttaatttttggaaatgaggaagggatttgcaattctgcaccacttatttcctttttttttttttcaagctaaaaacaataataaaataatgtatatatttgaattcaagaatataaatatatattatagaaattttttaaataatttacaatgttaaaattaaaatttaaataattatttatcaaaaaataattttatgtgtgataaaatatttaaattataattttaataccgtaaattatttgaaaattttctatataactacaaaagagatttattgaaacaaggatatattataaacttatcctacattatattattaataatttataaaataaattaatttaataatattaaaatcatacataattaacaaatgaaagtgtaagagagaaaaagaaaagtgtaagagagagtacaataattttttcttataatatacaaagtttacttatcggaaaaaaaaaaaaaaattgcagaaacataattggtgatac

SEQ ID NO: 1713 - DNA, 2740 bp, Cannabis sativa
aagtttttatttttatattaacaaactgggtttcatctatttgtcaaatagacaactgcagaacagaacctactactcctaagtaaaatcagaaaaagtagtctctttgaactgctgcatttgaggaaatgatgagaattcaaatcattagattctttttctttgttttagttttaggatggggagaagactgaaatcgtttcagaatatggatcgaaaaagatgtatataaatagcaaactttggccagaggtcacaaaattaacaataaattcagtctggacaactttgtaataaaagcttaaattaaacagccaaatgtttagagtttcagccataaaagaaaattccagatataatagacaaaaatagcatgatgttttccaactttaaatgccatcatactttgatggtcatagttcatgtttccaacaacgaaagtcatgtttgttccatagaacactacagcatcattattttattttatactttatatgaacaaagacaacctaaatctataaccaccatcggaaaatgattcattaagaaaccattcctcctttctcaaaaaaaaaaagaaagaaagaaatcattcctgtttaatatttgaagaaaaagttgctcgtaaaagaaaatgaagaaaaagaggctacaatctatctagtcatagtcaacaaaaatatttgattactacccatcaacagcttaagaatcaagactcgagaaaaactaacacaacaaattaagtaatagaaaatagggagaaccaattatttacactgtaataattattgtttatgatatccaccgacacatctaaatagaactctcgtaccagttccttgtggaagagtttcgttgcttgtaacagagtatcaaactatcacccaatagaaacactaaaaaaatcaattggaccagagtatataagtaacaaaagaattttcttttttcagacattttatttacgcaagaatgatgaatcaacaatgccatttgttattccaattatacaatgcatcgatgtggtcatatatatattatataatcagaaaaacagaagcaactactcaacactctacaagtgagaatcacacagaggcttcccttgaatgaaaggaacaagcactggcgctctcttaacggttaacactcaattctatttcacttattatttgctttctttttctttttctttttcttttttttttttttgtctcctcctttctcttcatttagctgttatttttacagtatggaataagctcggatcacctcaatgatcggcgctcgacacaatggacactttcctccaccacgaaccaactcatttgcacattttgagcaagtgcacatgtgcccgcatctgcaaagtgtaaagaaaacaaataatcaaaaccaaaaaaaattgtcactaaacatcaatacagtataataataaaaaggggggaataaaatgtcactaaaagaatacaatcatacctatacaaaagagaatcaatttggctgtcgcaacaaacacagcaagttcctttcctgacatgaccccatctaatgccatcttctgatgtctcgggaaccaaccctgaaatgaaattgcaaatgtgaattctatgctatcagaaattcataaaggtgattagactaattcatgaatataattacaaaacaaaataaagaaattccataatgagaagctccattcaaatgtgacaattgtatgctaccctaattataattacaacccctaattaaaattacaacctgtgtatattatttttcgaaaaccaatgacaacagtgctaattttccacataaaagtgtgcacacaaacctttttcaccagctgatcgattcagtgctgcggaaacttcctgtctgactgaacgctgcaactccagctgcatatccatgcaagcctccaacatcctttgcatgtggctcatgccttgttgaagtctagccatgtcggctctcagatcattaatcatctcccattcctgctcggtccagggtaacattcattcaaaacttaaaaaagcaattattgtgtaaaaaaaagtggacagtgaacatgtgacaggagtctccatacagaaggaaaaacacctttcattcatactgaaatttagacttagttccttgtttgtcacacaagtacaattactcacaatttctgagcggtgcatgttatgtcgattccagccagtgtgatgtaagtcctgatgccaaagtggctgtggtgggggtaccggcggagaaggtaacacaagagcaggtctgttaatggcatcaagctgagcttcattttgctcatccctttgttgctcctgatcccgttctggtgaagtaggagttgatattggcaaatttctatgcaaatcccagtcaatgggtgaacgactttgcctttccacatatgattgtatcaactggtcaagactttcccggaaaccactgcgaagaagattagaaacgctcctcctgcaaaaagaagttaaggagcacaagaattaaacatgctaatgatgtataatattaaatagaaattaaaccttctttagtagataaactacctgctcaaaagttccctgagctccatactgtacacattgtcatcatcaggtggatgaaatctattaaatcttctaattggaacagtgcggcgatttctcaaagaaccagaaggccctactgaccagcttccagcaccatcccgggtgccatccctttgccaaac

SEQ ID NO: 1714 - DNA, 2031 bp, Cannabis sativa
ttttataaatcaaagtaaagaatactatgaatctaaattttattaatgtaattatggattattgatgttattataagattcatatatataattaaacacgtcataataagagattataatctatattataattataaatttaaagcagtgcacatttaattcaatgtagtaatatcgaaatattagtctaaaattttattttggaaaagtaaaagtcaaaattttcaattttggaaatggtctaaaactctaaactaaaatttgcatgttttttttttaccattaacacgtacagttaatggtctctagaaactctatataggaaataataattatttttgtcagatggaaatagtaaatattaaattcatcaagtcctcttcaactacaccaaaattgaccattatctacgcggcaaatagaaaaacaaaaactcatgcaaatctccttgtttttggctgtcttcgatatatagggaacttcttcctcacaactcacaacaactcctaactatataatattattatgtataacataaagtaaatcaattcccatgacttatatatattgtgccattatttttctctcttaaaaaaaaattcaatctattattttatatattctacatattaaatggcaaagggtctccttattttatggtcttggtttttccttagtgttgttttagaattgttgaaagttgaaactaatgtgatgtttaatttcttagtttcacatatccatatatactatattgaggtcaaaatgatcagaagaaataaaatagatggaattggaaaagaagtgatataattattagtttaaagaaaataaaaaatttataatagttatagatttaaaaaatttataatatatagttatagatatagttaaaaaattattgttagcttaaaataattaaattagtttagtttagtttcaaaattttatgaagacagaacaaataaacaaaagtagtatcccatatgcgtaattttttaattttctttgtattaatattaattcaagaacaaccatcaagatcaaccaaccatacaaattaatgtataaataaatggatgatagaaaaagctagtcctttgttcatgagaatgagccatgtgaacaaaaacagagaaaacgactacaaataataagctgagtaaattgagctatatacaatcaattatttaataatttttatttattatataaacttgccagtgatttttgtcctctaatttttgccacgttacaataattattttggatctctttcaatcataaatcatattccaatggccataagaatatatatataaatatatttatataaatttggtggaaattctcgtgagctcgaaaaatacatgtagtagctagtataggggtataacttataatataagaccacgtagtcagcttaaattatagtttaatgtcacgtcaggcatcgaatccagtccgtgtgcgatgtgggtgaatatatataacaacactacgtacccatttattatttaattttatatatttttctcaatcacatattcccaacaatatttaattaattaaataataaccacatttccaagcagagttgtaaatacattacaaatacatgaatatgtaaaaaagaataattgccagtttggagttcaaaaaaaaaaaaaaaggtcccaggcaattatgtcggtttggtctctaatttaaaaagctcactaaaaatatacgtttacaaaatatgatatacatcattatataaaaataattaattaaattattagcatataaatatatatttactatcattttaatatatataattaataataaaatattattgatattatcaaattaaacttttgaatgtattgtacatttggaattgttatgttttgttgtatttaatattttttatttttcgtgacacatgtccggtctaaatttatatatatttttttgtgtctgataaaaaaaactcagcattattacgaagcaccatgtataccatgcttccaaaagaaaaatacc

SEQ ID NO: 1715 - DNA, 4107 bp, Cannabis sativa
  modified_base (3897)..(3908): a, c, t, g, unknown or other
ttggtttggtttggtttgggattattactttttggttagcccaaaaagatgggttctcgtctttctcttttcactcttttgtttcttctttcttgctccactactctcctcctcaccaatgccaaccctttccgccgttcccaccaccctcgggtcaccaggcacaactacaaagatgctctcacaaaaagcatcctctttttcgaaggacagaggtcagggaaactccctcctaaccagagaatagcttggaggaaagactctggtctctcagatggctcagccatgaaagtaagcaaggaagaaaaaaaaccccacattttacttttcgtttaaatgcattatttactagctgattttaagtttgaagatgttatggtatgtgggtttttggttaatattgatttagtccttctgttttgaaaatgcaggttgatttggttggtggatactacgatgcaggtgacaatgtcaagtttgggttccccatggctttcactaccaccatgctttcatggagtgttattgagtttggtggcttaatgaaaagtgagctacagaacgctagacaggccattcgttggggtactgattatcttctcaaagccacagttcatccagacaccatttacgttcaggtttcaactctttatacttgttcttttttgctctgcattttaattacttgttgagcaaaatgtgggatttgggttgattttcaagtttgtgttttttttctttctcataggtgggtgaggctaacaaggaccatgcttgctgggagagacctgaagatatggatactcctagaagtgttttcaaggttgataaaaacaaccccggtactgaagtggcagcggaaactgctgcagctttggcttctgcttctttggtcttcagaagaagtgaccctacctactccaaacttttggccaaaagggctatgagggtaatcacaacttagtaataataataggggtttcttctaatgttattaaatgtcctcagaatttgaacttgactatgcaatgtttgctgtgtttttaggtgtttgcttttgctgataaatacagaggatcttatagcaaggggttgaaaaccattgtgtgccccttttattgctctttctccggctatgaggtaaggatggtacagcttttttggcccccatttttataggttggtgcctaaaaaagtaatgatttatcaaaatatcacaggatgagctattatggggtgctgcttggcttcatagagctaccaagaatccattttaccttaaatacattcaagctaatggacagatccttggggctgcagactacgataacacctttggttgggacaacaaacatgttggagcaagaattcttctctccaaggtttccattcttatttcttcaactctgattaaagttactagaaactatcttaaactctaaactaaaaagaaaaagtggtgtttgtattgtttaggcatttcttgtccaaaaggttcagtccctccatgactacaagggccatgcagataactttatttgctctttggttccaggaatccctaccacttcggctcaatatactcctggtctctctctttttctttttcacttttactttgtcttttctttctctcaagctctttggtttgtggtccctgtaaaaattaatttaataacggctagttttgtctactttgtatggtatggcaggtgggctcctgttcaagatgaacgatagtaatatgcagtatgttacatccacctccttcatgctattgacatacgccaaatacttaacctcagcccgtaaagtggtcacttgcggtggaaccactgtcaccccaaaaacactccgagtcatagccaaaaaacaggtttgtttaatattaaaagcaacgaaagacattaattcctttattcaattataatactaatgaaactgtgcttttttaatattacccaggtggactatttgctaggagacaacccattgagaatgtccttcatggtggggtatggtccacgttacccacaaaggattcaccacaggggatcatcactaccttgtgttgcttcacacccggctaagatccagtgctccgcgggctttagcttcatgaagaccaagtctcctaaccccaacatcttagtaggtgcaatcgttggtgggcccgaccaacatgacaagttccctgatgataggtcagattatgagcaatcagagcctgccacatacatgaatgcaccgcttgtgggggcactgtcttacttggctcactcatttggccagctctaggccacatgtggacccatctttccaacactttaggtctcttttctttttaattacaaactcttagttatgtgtcgttttagaagtaatgtttttttttctttgttgggtattggaattgctgtggaagggcacgtggtttgattgggtcgagactaaaatggctcaagaacccgaaagttcaaagcacagttgccaaggtctaactggcctttggtggttttatatataatatatatattactatataggttagtatgtattaagtttactattgtagcctaggctgtgaaagagagcaaaggctacgtgcctgaaccggtgttgcttttaggctctttttctattctaatagctaaattaaaggtatagaagccaaaggaggggccatatacaaaggccattggtttgatatctactttttctagcatgtaatgttgtttctcatttgaattataaaaggaaaatgttgctattattctattttgggaacttaaattactcgttttttcgtcctattggctataacccttctctgacgagcccttttccttttaaaaagctccaacctaacgccgctagttacaaattgacaaatttgtagtggcagtaaggggaaaaactcagaagagagaataagtttattgagtgaaactttcaataaattaataaagtggaaaaactcaaatgagagaataaataaagagtaatttgcaataaattttttcttatattttaatttttatacacttaattttcttattattatttttttgtggtaaaatttctataagtttattttttatatataaatttgactcgtcagttaaatattaccgttaaatatcatctggatgactactgtgtacaccagtatacctcaaagtcgatacaacagtaatccagttaatatttagcggtaatatctaactaatacttaaatttgcaaaggaaagtaaacttggagttttgtcataaaaaaaaaagataaggaggttaagtgtacaaaaattaaaacataaggagattttgtcacaaatttctcataaataaatagcgagaatatattaaaactaattaagttagacatcgtgctcattacaaattaaattaattggtatgaaagccagatctaccataccagtgacatcaccggcaaaagctcattttgctacattacgtgccacaaagttacatagtctggaaatatgtaacggtaattcccttgagcgtgctgatcactgtctctaagtcgctctctatcattacaaacaaatgattcccttgagcattacatcaaaagagaataagttttttgagaagagttatttgcggctaaaccctttcaactatcattctttttttaattaaccctctaattttaaattttggtggtaaaaccttccaaactactaaattgttgacaaatttaaggtaacatctattttccatagttaattgacaacataaattgtttatgtgtacactcttgtacatctgaaacatttatattggtacatctattattatttaaaaattataaaaaatatttcaaaatttataatatattttattttttaaaatattttatttttatttttnnnnnnnnnnnnaattttaaaatgaattttgaaataataatatttaatatactaatataaacgtgccatatgtataagagtgtacacataaaaactaactggatgaaacattaaatttgttaacaattcagtactttagaaagctttaccgtcaaaatttaaacttaatcaagtaaaataatagatgaaaaaatttagcagccaaaatctc

SEQ ID NO: 1716 - DNA, 1878 bp, Cannabis sativa
tattaatgatgattctaacttaaacttggcattagaattaatcaatttctagactcatgtgggatttttagctttcgcaaagaaaatgacattggaacagtgagcacatttgggtgccataagaagcgaatctgaatgcattttgattcctaccttttctcttgaacctaattcaaaagcctccaaactcgaatgctaccaaagcaaaaaccaagtagggatatatgacactttatagggttcttatattatttatttattttttacctgtcaaacggtgaatggctcgtaccatattttagatttagaataagatactcattttgtttgtgtggatctaattccaatgctatatctttaggttctgtaatcttctattattttttttgtaacatttacattatgtgaaagttgcactccctttttaacctttaaaataatccaagaatacccctctttagcatagcctaatagtcccaaatctatttacaaaattaggtttcaaagttgggtgattagttattttgaaaattatatattatctctttgagttttcaaatttggatcatagattctcttaaaatcatttgaatttggacatgggaaaaccatcaggaataagtggagttcggttaaagcattaatcccaaattaaagcactatcttcagtacatttgagctaaatcttgggatagaaagctgcaattagctcacaaaagagccacactcaatggaacaaataactaccaacttgaagtcgagttgtgtctagtcttaaaaatgatgttataacaaaacatataggggagaaagacaagccaatgacctattgggatgacataataagtcctcaaattttgtgagataaaatatattttatacccgccaaaatttgttagagcaagtagtaacttaagttgtctaacatgtaatatgttattataagtagttaattgttttttgtattatttatttaattaaaatatgtaagagtatgttatcttttatagtaattgagaccttaatttacctacaatagctattaggtacatggtgatccctcgcacaaccattatcacgcaattcaaataattatcatgtgtaattttctaatctcaatatgtttaaactatctcaatgagtttttgtttattgttgaaaaaatatgtttatactatcatgtcatatattaataaaaaaaattggaatatagatttaatgttctaggattgcctttccacataatacgtattgaaggatacaataacattgatgacaaagtttacttgaacctatatgctataaaaactaaagttaaagcacaaacaattataccaattttttataacatgatttgtactcaattttctaccataattaaagttgtccgacaatactaaagatctaaatcttaatttttcttatggcattactagctattattcatgtgtgaaaagactacaacacaattcaatgatagaacaaaagcaccaacacatattaaatgtggctagagcattatgtggacttagaaacacatcagaattcttcaaagaatcttgaggactggaaggggagacttggagtttacagtgaccttcaccgaggtggccttgtagaggaactttcttggttttcttatccttaataagacaacaaagatcatcaaatttaagagtgacatgattatcttttgtaaattgagatatgttaaataagattttagtgatatttggcacatgaagtatatcttgcaataataatgaatgatgtaggaatctagtgtgaatagaactagttcctaatgatgaatactaagggtgtgcagaaagtcatccaatccaatttcaactgaccaatccaatagaatcggatatc

SEQ ID NO: 1717 - DNA, 3306 bp, Cannabis sativa
agtcgaaatggcttcgacccgacccggctagcagtagcagtgatgatatttcgattcagtttcagaccgttttgggtgaacagataaatattatcctttcccgccatacacaacaaaaagttccggcggaactatggttctgtgcctcccgtcggctcgtccgccttctccaatcatcagctgccacgtacacacctccccaaccctgctccgcacccacaatcctcgtccctctacttctcactcaccggcgccaacaccaccacaattacccccttctctatcactgaaccctaactcaaccccaccgccgtctccgtcgccgtcgctaacttgcgctctccactgccctcactttgaatcgtacgaatatctctaaagttcccaactttttctattttctcttctctgaaccattgtaatgagaattttgcttgaaatgtttcaggtgctctggatgctcgcacgagttcaatctccaccggcctagcatagtcgacgaggccaccgagttcttccacgctcacggtgtcgacgacttcactttcgatagttgtaaactggtaaagtttttgtttttacattaattccactgctcaattttctgggtctcatttcaaaattgtgctgaatagtggggatggaggtgtcgtgcgaaattagcggttcgtggttcttcagtgaatcctgtggtgggattgtaccaggagggcactcataatgctgtagatattcccgattgcaaaggttcctatttatagttcaatttagatttttcccttagaagtaaccatttttgacataattaatggatgagttgttatttcagctcatcatccaaacataaatgcggcagtagagctgttgaaacaaggtgtgttcttgcatatgtatacagtaatatagctacaactgcaatattgttatatggagtaattttcttttggttattttaggagttaaaaagatttgttttgcttgagtatcaggtataactgaattaaacattgagccttatgatgaagatgagggtacaggtgatcttcgatatgtacaggtgactaaatggttatcattagatagtaattttagctgaaaaaatgcaagtattattgtatttgattaactttgttgtatccttggtggttatatgcagatggctgtgacgacacatgatactgcgcttcctgcgtccaaaagatatctaaatggtttttggcccaaactcatttcttatactaacttaatgtttacaatgatgccatcaattttcacttataaatgtttcatatttttctaggtaaagtacaggtttctctagtttggaattcaagaaatgaaacttcccataattcgcaaaaacttcatgccttgaccaatgtaagttgcctcttttatttatttttttcgaaaggctgggaacttgtgagaaggttctttttctcctaatttataaatattatgcagtttttatggaagaaaggaggacggtggaacaataaccacttgattcactctgtatgggctaattttcagacatcaactaacaatgtaagatatgagattatctctaagtggaaagtacacattgtttgagaaatatgaattttttgtttttcggtattctccatcagtaaagactttactgcttgctaaataagtttgattggtgttgcagataatttttggcaataggtggagacatcttgtaggagaagcagacttttgggaaaatgttggaggaattgatatttcattggctccatccagttttggccaagcaaacactcgggtaactttttacttcattcaaaatgcaaatacagttatatgagaaaccagagaaagagagaacagtcttattggtgactttatttttcttattaaaggtgttttttttatagaagttctaccttctctaagctgtgaaaaatcctacttattgtttcattcattgctactcgtctacaggctttcaacttgctcctccagaagttacaaaaatatgtcccttatgaatcatctgtcaccgatttgtatgctggagctggtgcgatcggaatttccttagctgcctcaagaaaatgcaggtaggaatacattttttattgtatacttgcttacaaactctcaaatgttgttatgatagaaagcattcttttcttatcacaatgttgcattcctttataggtctgttagatgtgtggagatcaataaagagtcaaagttatcttttgagaagacagttaaccgtctaccgagttcagtagatagcagcatcagctggcatcatgcagatacatcaaaggcaagttttacctttcaaaatcaattttcttttcaaattgatgtctcatgatacggacacctcatgacattttatttattattaatttttttgacaaaattgaacaggatcctgttacttgggtaaggggttcagatgtaatcattgtcgatcctcctcgaaaaggattagatccatctcttatcgagatattacaaaacatatcatctataaagcataaacctgagtcatcctctcaaaggttcaaccattgaattcatttttaagttatctatatccagggttagaattcatttttttaagttattaaatcgttgctatttaaatgtgaacatcagcccaagtgtaaaagacaaagatgaaaaaagaccttggattttacgtgcacaggaagattcagttcaggtagggagtaaagtgactttagaaggccgtagaaccctgccacaaaccctcatctatataagctgtggatgggaaagcttcaaagaggtaattctatgattgaagtgattgctaccaattctatgctcatcttttctctggtcctggttttgctgttttatttcacaattttaaacttatcaaggtgatattacataataacaggattgcaaatccctcttgtctaacaaggcatggcgtttggaaaaggctcatggttataattttttccctggaactcaaaggtattgattacttaaaccttaaagcatctcttttttcatcacataagacacaacacaaaaattgatcaattttttcatatgagctctctcccatatatgctattcttatataggttttctgtgttaatttgttctgtgctctgaattaatttctgcagcattgaggtgttggctgtgtttcagagaggtggaaaagcaagccaaaataaaaagaaagcaggaaagaagaagaagaaacgcgtgaagaatgacaagtgaagattacaagtgtattttactgactctctcgacaaatatatatatatatat

SEQ ID NO: 1718 - DNA, 2817 bp, Cannabis sativa
ttttttttttttttttgctttcaaattgattaagaatttcacgcgttatgtttaaatgctttcgaaatttccacggttgaaaatttcaacactttcttcaaaaaaaaaaaaaataataatatttttaaaagaaaaacactcttttcttttaaaattaagataataattgttattgactcaaaaaaaaaaaaaaaagataataattgttattttctttttcttttcttgacattagaaatctaaaactcgtttgtcgtttcattacaaagagttcaaaaaagaaaacaggaggagaaaaaagtgtaagctggtcgatcaattctcaagtcaacttcttactccatcacacccatactcattcttctctgcatctcaaaatgtccgacggacccttaacggtcctcgacgggacccacctccgacccctcgacctcaccttgccgccctcccttaccggagctcagctcctcgaccttgccgattctaccgcctccgcctctctctttggtctcactttgcctcaaacccttaagtcatctgctctccaacgcatcaaccttcgaaacgacgacgtttttcttcgtacagaactcactcctgaacaggcttctcacacaattaagctctacatcgacgcgatcgccgatgagttgaaaggtgtatacacacgcacacattacgcactcgttttcattgttttttttttttttttgcaaggacacttttctgagctgatcgctgagtaattcatatattttgtgtaaacctgatttgactgtgatttattttaggcattgtgaataaatgtatgagaattcagctctgtttagtgcgtttatgtaaattctatacagaaagaataagtgttctaattctttatgttgagtacgatctaaaataaagtaaaaatggacggtgaagcagttgaatttggggtttttggctactgagaaataattcgtatatgtaggaaactaaagaatgtagcagaagggttctggttttaattaaaatgatatcttgtgatttataagagatggtattttgtatttggatgatctatttatgtatttctcttgaaatcatctgttgtttgtttccccaaactttgattaataggaagaatgtctataataaaacattgtgtttggtctgcagataatcctattgttgcagcaatcttggacggaaaaactattaggctgtttttagaagatgaggatgatttcgcaatgatagcagagaatattttcactgatttagatgctgaagataaggggaagatatgcaagagtgaagttcagagtgctctcgttcaaatgggagttgagatgggtgttcctcctaagtcaggttcacatctaattcatttccttgtctttttattggctaaattatttgaagcacctatgttgaattagctatgaatgaatcgttgaattccctagcagaacttaaacccaagaaatggggggattgtgtaagccaatgatggtcattttatgctctagttttaaaaccccttcaatgcacaataacacttgattatccttaattcgctggtaaattatttgagcagttttatagagactctaagaatgtattgaactttgtataaggtcggaagacaaaaggatgcttttattcattgaaatacttccgaccctattttattcccaatcttccgcttgtcctttctgacatgatcatgaaaatattactcacttaattacacccatctgttattttttacatgtttataaatcaatcactaacatctcttagatggagacttaacatatctgttatttgactatccagtaacttttctgggttttttttatcatcttttaattgttggtaaaacagacttttagactacataattttggcatcttgagagttgagtatatgattcacattactagggcttgcatgttttatcttaaagaataatgactttgtccatttatttttggcttgaaaattgatgagataatagatggtcatttgcacgcatcgtgtgctttgcaaattctattgtttgtgtctataacttgttgtaattagatactttgttgttgaatcgttttctatgcgcctatgagttacttttccaactcatcgcctgtatatattcatttcttaaagaaaaaaatgtttccaggacaataatctaaatagaataacatcttttgtagtaaataatttaatctactatcatctgtacttgtactagaaacaaccctattcaatgtcatctcttcaataagcgtttcaatttcattgctccaggaattctgatgattatcttgtcaatcttccttaagttcctaggttttcatatttatagtcaattatgatgctttagtgttgtctaattcagttttgctaactgttttgctctacttaagaaactcttggttttataaaagtaaaaattgacactttcattttacagagtttcctctactaaactctatattaaagaaacatggggcagaaggagaagaagagttgggccaaggacagtttgcattgttacttcagaatgttctacaagagctagcagaggttttggctgaaaagcctatcattctaattcagaacatcaagattgcgaatggttccaacttaagaaaggtatgtttcaatgttttctcgtagttaaaaagtgtagtcacttgtcttctttgcttgggcaattgggtgtaaattgagtaatataacattgacaataggcttcataaagcctcttgacccatttttcaatcataatccttgagttgagcagtaatggaatctatgcgtttggtt

SEQ ID NO: 1719 - DNA, 2760 bp, Cannabis sativa
tattcaataagcctatgtgaattccccaacctgactttactgcctattatgtacttctctccagaattggatggatgatgttgatggcatcagtgactccatactgaagcataagcctctttgggctacatatgattcgaagcgtggaaagaagaaaacaaaatcagtcaagaaagagggaggattatatcgaacttatggaaccagagtaattcctgtgtgagcattttaccttatcctcttgcagttgcagaatatgatattaaaaaaaattgtttgcttatattgtagtacgtcattgaactttggttgtattgtaaagtgttttgtttgcttgcatcaggtctcaacgagtagaataatataaaaatgtattctatgttttgtcgcatgatatgaagtgaatcacgattcttgaagactaagagagttatttacaaaatgtgatgaaatagtgtttcattagaaagtctaaattgattaaagtatgtttttatgtctttgtgcagattcgtgctgtcattggctgacgtggatgctcatcttatgatggaagatgaaagttttgtttggactagtaaggatgttgtcattgtacttgagcatcaaaatgaaaaaatacctttaaggtgagaggactgcttgcttacattcttaagcatccagtgtcaagcctttttgattggcaaagccttgtgagattggtgttactcgcatcattagttatttttgctaagacacatccatttagcccattttcttgttcagagttctatccagtgtgccgctttgtaggatgtgttgcagaatctgtgatgtcacagttttcaatcctctttactatgctattcgtttgtcttttttgacagctatgtttcagaaacacagaggcggtatgccaatccatcacaggcgcaacgccatatattggcaggattagcatccactttgggtggtttaagtgcgccatatgagaaggcttctcatgtacatgaaagaccagttgttaattggctctgggcaactggttgccatccatttggaccattctctaatacatctcaaatcagtaaaatgcttcaagatgttgcattggtaaggccaatctctcaatgagaaaactttgcagaactgtcaactcaaattgataatttgctggtcgcaaaattactactagtatttgtttcatcatggtaattaacattgattctattttgatttgtagagaaacacaatatatgcacaagtggattctgcattacgcaaaatccgtgagacatcagaggtgataatttgcctttcaacaaattgctacttttgtgttccatcttctgacattaatgctgttgtaggctgtgcaaaatttcgctgcagagcgtctgaaaactccacttggggagccagtgaaaggaaagaagaacaaaacgactactgaactctggctggagaagttctacaaaaagacaactcacttgcccgagccttttccccatgaattagttgatcggttagaaaaatacctagatgtaagttattcccaaccgtctgtagtaatgcatttgcctattcttatcgatactcttgaattgcacatcatacatcttttttcatggtttaataacagaatcttgaggagcagctagtagacttatcatcattgttgtatgatcatcgcttacaagaggcacgagcaaacagttcagaaattttccagagtaccttatttacacagcagtaagtactcttaacattctagtttcttggcattttagaaaacaaatttgtattgatgattgtaattctgtaatgtggcaacaggtatgtagatcatgtactggcgaacgagagagaaaacatgaaatgttgcgagatagagtacaaatacccagtgcagtcttctcaagcttacatatatggaggcattcttatcgcaggatttgtggtatattttgttgtcattttcttttcgtctcctgtgcgctgaccttaacaaaatactgaatttgatatcacccacgttggaggtgctagataggattgcctctttttagtctcgagtcttaggttgaaatgtgcaacacaatttttttttatacaacatgctctcaactcattgagagagagaggggcaggagagagaaagagcaacattgttgacatatttagattctataaattgagttttcttttcttttgttttggccaatattgtaattcagaaactttaccgtgttgtgtaaaaatagatacatttttaatttcaggagaaacatgaccgtttttgtataaatatacatttattatcaaactgataagctcaaaggtcccttattatttatctttgaagtttataaaactcgaaataccaaataaactgtgatgttgaggtgggtctcaattccatgtcagttgcaactgttgctaggagtgatcgatctgaaattatttgggtagcgaccgagaaattgtgttttagcgaccctttagcgggtgaagctgatgcatgcgagcttgcctgtgcagtggagaagggcaaagaatttctgtttgttaagaactcaacccattgatgggaaattgctaattatgttagttactgtaagaatattgctatagggatgtgcttgggtgtaatttttccaaagtttctcgcaacattgcttgtttggcaaaaactatggatttggatgaatttgtagaggtttcatccctctcagattcggcatttcctactgttttgattaatcgatgttttctttt

SEQ ID NO: 1720 - DNA, 3243 bp, Cannabis sativa
acccaacaagaaaattcttgaattaaaagttaattctgagaaacattcggaagttgaatttcctctagagaagaatcttgatgatgaaaaaagggaagtgtcagttgaaaatgggaatctagttggtaaggaagacacaggattacaacaggaaaatgtggctgctgctgatgataatgtggctgatgaagtaacttctgaagaaaaagaaatgaagatcattaagaataactacccagaagaagataagatcaccgaggctgataaaatattaaagcagaaagctgccttgaagcttaagttggagatggaagcagatttacataacaaggagatagcaaggcttgctgaggaaaacttctcaataggaaacaagctatttttttaccctcaggtggcgaaacccgatcaagatataaatgtgtatttcaataggagtctctctacactgaacaatgaggcagatgtgctgatcatgggtgcttttaatgattggcggtggaaatctttcactaggaggttaaacaaaacaaatctcgatggggattggtggtcttgcgagattcatgttcctaaagaagcatataagattgactttgttttcttcaatgggcaaagtgtgtatgacaataatgataagaaagatttctgcatacctgtggaaggtggaatggatgtatactcttttgatgagtttttacttgaggagaaacgtagggaactagagaaacttgctcaacaggaagctgagaaagaaagacaagcagaagagcaaagacgaatagaggctgagaaggcagctagtgaagctgatagacaacaggcaaggcaagaggttgaggagcgaagagaatcactacatcagtcgatgaaacaggctgtaaagtccgttgagaatgtttggtacatagaaccaagtgactttaaaagtcaggacttggtgaggctgtattataatagaagctcaggtccacttgcccatgcccaggaaatctggatacatgggggacacaataattggaaggacggattgtccattgttgaaaagcttgttaggtctgagacaaagggtggtgagtggtggtatgctaaaggtatgtaaacacgtgtatgttatctctatctcatttcccctgcaatttgtttgatcttgtagtttacttgaaacgaaaaagtttagctaggtagcactctggttgatcatgtgtgaataaagctcaggtcatcttactaatttctttatgcactctccatggagtagaggtcattgaatgttgtgttgagagatagaaactcatgtcacgactcttgagactgacttaagttgttgggtgagttagtgtaaggggtatgagaccaaggctagttgtttcttatatacactattagtacaaagttattactttgtctttgaaggttagttgtattccaattggtgtctgtcaaatttctacaaacaagcaccttatggtttacctttttttttgtgtgcagttgttgtgcctaattgtgcttttgtcttggactgggtatttgctgatggaccgcctcagaatgctaaagtttacgataacaaccatcttaaagattttcatgctatagttccaaattccatatctgaggaactatattgggttgaggaggaatatcaaatatataagaagctccaggaagagaggagactaagggaggaaactaaacgtgccaaggtaatgcttaattacatctgtactttgttggctgagtttctgaacaatctgaagtagtattaaattattaatgcagaactttcctcatttcaaggaaaaatttgttgtctttaactttgcgccaatggcacttgcgattcttcattcagattatgaatttacactgaagatattcagtaagatcacattgttaagattctcattatttataatttgtttctttctttcgctattgtcacaggctgaaaaaactgcacttatgaaagctgaaacaaaggaaaaaactttgaaaaggtttttgctgtctcaaaagcatatagtttatactgaccctcttgatgttcatgctggtagtgtggtgacagttttttataatccagccaacacggttttgaatggaaagccagaagtttggtttagatgttcttttaaccgttggacacaccgcatgggtcccttggctccacagaaaatgtcaccagcagacaatggatctcatgtaaaagttagtggtgagtttatacacaacctgtcttgaaaaggtcgattgtttcatttcatgtttgaaggcgtctactgtgataactttccttttaagagacttgagtgttagtttttctggttctgcagttaaggttccgttggatgcatacatgatggactttgtcttctcagagagggaagatggtggaatctttgacaataaaaatggcatggattaccaccttcctgtatttgggggaattgcaaaggagccaccaatgcaaattgtgcatattgctgtagaaatggcccctattgcaaaagtaaacatgttaaccaattcgtcatttttgttctgatgtagcaagtatttgatgagaggttctaagttgaggtgaggtgaccaacatttgtgtttttgcttcacaaccaggttggaggccttggtgatgtggttactagtctttcccgggctgtccaagaactgaaccacaatgtggacatcatccttccaaagtatgactgtttgaacctcagcaatgtaagcttcatcgctgttgcttttatgttccctcttgcatgtaattgaaaaacatgtccatgtcctttagtgattcattatgcatattgcttaataattgtggagttccagatcgattgatttttctgttatgttataaaattgcagtctccttacttttgacctgcaatagaattttatgacatttatctctgtaacttagttttcctataattcttatcacttcaaattttgttttctggcataggtgaaggatttccagtttaaccaaagctaccattggggcgggactgaaataaaagtttggtttgggaaagtggaagggctttcagtctactttctggaaccccaaaatgggtagttatatgctcttctattcattttcaatgattttttgtttcatgcttgatctgtatttcttatttttttcatctctatttctggtaccattctgctattaacaaatttttgataatttttaatttctttttctttgcagattcttttgga

SEQ ID NO: 1721 - DNA, 4564 bp, Cannabis sativa
caaagtaagatctcacaacaacaatctaaaaaccgttaaaagacaatctataaatgaactcgaaagaagctaatatatattaattgaagacggaatcttgataatttattcgaaagagacacgtacaatataataaataatcaataaacatatagatcaaactaagagagaaataaatctctcttattttacaaataaaagaggaagaaaaccctcaatcaaatcttgaagaagagacaaataataatctttagaactaagcatgcataactaaattatcaattagtacaaagttaaagcaaatagtaggtagagaaagaaataataccaggtggtcttgattaagaccaagagataggtccttcatagctttgttcaaacttgccattgatatgggttttagaaaagcaaagcaaaataatggtatagagaagagaattggggtgcgtatgatgttacccattgacacttaatatagtgctacaattctttcatgtttgggaggaacaaaatcaaacatggtaagtcttaaatatttactacagttacatttttttttatttttttattttattattattcttacaattatttagaaggggtaatattgtcaccccccattgttattatatactatacatacatatatatatttttcttataacggtttcatttttctttcatagtatttattatatatttgtcattttttcgtgtaagttttattcaacagtcaaaattaagaaacgtacgtttatccatagttggtgttggtaaaacaaattgtagctttctgttaaaaaccctaatatagtaaaacattaactctctttgaaaatatatataagactaatatattataacgctgaaacatgttaagcatgtttgcttattaattattaaaagataagaatgaataatgaatctatgatgactagctatagtatatatatcactacaagaattaaggacatcacaacggtactattaataacgccgtaaaatctttactaaaagtaagagtatcacgagtgacatttaaatatcgttaatattaaaagtaatataacaaattcataattttaaaattaatatattatttatttatttagaacaaatcagctcataaacaccacacaaaagagcaaatcgcaaaaaaaaaaaactgaaagtgttaagtattaattagttagtagttagtgaaagtgtcagttgtcattagttagttacagttagttgaagttgttgtaacttctttttactggttttgtacacggtattgctgagctatatataggctcactatttgtattccatattcagagaatcaatgatacattaagactcttgtttgccattggagatggcacgtggtggagctcatactcgaagtacaaggaactagggagatgcacctaatgattctaacaaattctctgttctcgaacctaataatcgatcatctagtgatatgatcctcgaagtccttactatatattgaatggagatcaatctgttgaaagtcttgttccaaaaatcttgactggttgtgagaattatagttcttggaggagatcagtgatggtggcacttgctgctagaaataagataaagattattgatggacgattaccaaaaccaaatgttgatgatgaggaatatgatgcttggttcagatgtaatagtttggtgatctcatggattcttcacactgttttgagtgagattgcagacagtgtgatgtatctggataatgcagccagaatttggtctgaacttcaagagagatatcaccaaaagaatgcacctagggtgtttgaagctaagaggtctatgcaagctttaaatcaaggttcaaattctgtttagacataacctgtttgtagttgtggtgctataaaggttattcaggaatatcaagatgaggattgagttcttgaattcgtaattgggttaaatgagtcctatagcaatgctagatcacaaatcttgatgcaagatcctttttcctaatatcaataaagcctttgcttctgttgttcaagaagaaaggcaacgagtgatcacttctgttaacaatgaaatcgacaagcctacaacaccatctacatcttccaactcagggcaatttgcatggagtgtttagccacacaaaccaaaaccatttgccaccattgtggagttgcatgacacattatggcaaagtgttacaggctgcatggctacccaccaggacacaagttgtatgaaaaaatccctaacagaaatgctttgggacctgcaaaaacaccttctgccaatttttctggtgcccaaggagatgaaatagtaactggaaatagcctaaatgtggagcaaaatcttgtggaaacctttgctcaatgccaaaagcttatgagtatgttgactcagaaagtttctgaacaatccaatccatctcaactagctcaaccatcagtgtctcacttctctagtaaaaccctttccaattctcatttttcttggattcttgatacaggtgctactcaccatgtacgctacaattttggtttgtttcaagacacttacccaagttcatctatttcttatgttaaaatgcctaagggttcttctacaaaagtttcatgtcttggcaccatagtgttatccccaactcttactctcaaagatgttttatatatgtaccagaatttcatctcaatttacttttatcacttccttgcttgattctggtacttgcatattcactttctaccatgatcattgtgttattcatgacactatgaatacccagcgaattgggacggctgagagacatggaaaacttttctacctgactctttctaaacaaaaaggcaatccttttgtttcctctttaatttctaattcaaaaattacaaaatgacactatatggcactatagactaagccacccctcttgtattaaacttcattcattgaataaaagtttgcaatttcataatgtttcttgtcctaattttcattattccatttgccactatgcaaaacaaagaaaactaccttttgtttctaaacacaacattgccaaggaacgttttgatttgattcatattgacctttggggaccatataacactcttactattgggagttacaaatattttatcaccattattgatgatcattctagatgtacttgggtgcattttattaaagcaaaggctgaagcacaagttgccattccaaatttcattcaattgattaagactcaatataataaaaccatcacgagtgttatgtctgataatactaaagagttacaatttgttaatttatttagttctcttggaaatattcactatcactcttgcattcatggacctcaacaatactatgttgttaagagaaaacatcaacacttgtctaatattgctagagcacttttgtttcaatcctctattcctctaacctattgggatgaatgtgttgctactgttgcctacctaattaatagaacacctacacccaatttgaaaaatgtctctccttttgaggttctaaaatcaaaagctcccaattatgatcatttaagggcttttggatgtcttgcttatgcatccactttatccatgtcaagaactaagttttctcctagagttgcaccttgcatttttttaggatatccccatggcatgaaagcataaaaattattagatcccaattccggcaaaaaattttgttctagggatgttcaatttcatgaaattatttttccctttcataacactggcattttgcctaaagaatatcatgatttcttctctacttctaatattacccctactggtctaactcctactgttgttcttcctggtgatagtgtttctgatcatgtacctgatcctgttgatgatcttcaacagcaaaataaaccagcttctaatgatgttccttataccaggcctgttagaaccttaaataagccatcttatttacaagattatcattgttttcttgctaattctaattcttctatgttgtctcaggattctaaagttgttactccttatctcgtttctcaaattcttgattacagcaggttaacttcaaaccaatttttttttatccaagctaagggtataccagaatgggatcatgctatggatagtgaaagtgatgcccttgagaagaataacgctcggacagtggttactttacctgatggctgctatgttattggttgtaagtgggtctataagatcaaatttaatggagacggttctgtggtgagattcaagggtaggcttgtggccaaagggtataatcagcaagaggagattgattacacagacacttttgctcttgtgacaaagttagttactggtaaactcgtgttagctcttgcagctatcaatggttggtatcttcaacaacttgatgtcaataatgcattattgcatggagatttacatggagatgtgtatatgactttacctccaaagttagtcctaagggagagattccaccaaattctctttgtaaactcacaagtctttgtatcgcttaaagcaagcctcaagat

SEQ ID NO: 1722 - DNA, 2246 bp, Cannabis sativa
gagtattcttaggttgtttcacatatgtagatttcaactttattgaaatgaaattaaataaacaaacaaatagctattagttcattaattcaagggaattcgagccaaatattttttttcaacaagcattagcaaagaaataaatgtaaattacaaaacaatggttctcaactgaatatagattgttatatagtagtaatagtaaaggtaaaatcaccatatacaacaacaacttttgatgaaaaagaaaaagcaaaacactactacacacacttaacaaatataaatcttagacagacaccttcactctttgcaaacttcatgattcaatatttcaatttgtaacagagacattcctccttttctgcacaaaagtagaaactcatttattaatggaaaatcatttatacacaacagtgataaattacttcatacttgttgtaataattgatttaaagaaaaaaaaaagcatctctatataaaaagctataatggatttgatctgacccattaccctacttactttaattggttggtataagataaagataacctgcaatttctaaaaaagcttaatgaatgaacacacaacagtgtcatttctcaatcaaactgaattaaaatggttatgacataagttttcaataacactttttaataataataatgtcataagataacatttattttcctctaaattattattattattacctttatctttcagatgatagcagagcttcaaaaagtccacagcaacttctccatgaagtttgttgtagagaatctcttgtcacaggtacaacaggctgttaataaattcagaaaacaaaacacaacaaccaaatttgttaacaataaaacaaaaaatcataatttcagatcacaaactaagcaaacaaaacttaccaattctgttctgttctcagctatattttcattacttgtaacttgttctgttgattcccctgaattttcttcattaccctttttgaaatgatcaataacttgttctgtcaaagctgaaatattattattaatggtctcattcttctgatctgataatggcaattcagattcctcttgatcatgatcactttcccctgaaaccacagaactcacagcctcaatctttgacactaactcttccaatacttgaggaatctcattctcaatcaaagaagtcaaactattctcctcaacaacctcttcatctttctcatctttattctcagaattctcttccttcacttcaggactagtcatctcttcctctttttcatcctcagagctactagaagaactcgaactagaatgatgatcatcaagaaaatcctcagctttgtgaacaacttgctcaaaaatggaaatttcccttttgtttacagactcagattcatcatcaatctctacatttttcacatcttcaacaacaacctctttagcctgatcctcaactttcccatttgaagaatcttccatggcagaaaatctgagctctctttcttcaaaattcagatcagaaagctctgtatccaagttgtcattaagattataaagacaccccagaaaacaaaaattaataacaatataatattaaaatgcaaaaaaagaaaaaaaaaaactttccaggtagagaaagaatataatatagtcaaaaataagtggaaaagatcaaaccttggagttgaatattaggtgaagattggtggataagagctgtggtggtatggtttataattttggtttattattttttctttgatgaccttgcaattagcataactagttgactagttgttgagtccttaattattaatatattaagatatcaatggtgaaatggagaaaaagaataacgtaaagaagagttatttatttatatatatattgagtatgataagaggtttagaattatgagttaggagtttttggtgtaaattttgattcttttttgtgttttgaaattgaaacggtgaaaggagggagagaaatgcttacgttacgaggttggtgttaaataatgtctatcaaacgacgtcgtacgacagttattgtattagaaaagcgggaattaaggaaaactgctctaacggtattatgactgaatttaaagcaaaacactccatagctgtttctcagtttaaaaatatataactgatacaatatttacttatttatgtttcagacaaatgttttattcaatttttttatattcgtatttaaaatataaaatattcgtattt

SEQ ID NO: 1723 - DNA, 3087 bp, Cannabis sativa
atataaaacataccttgattaacatctaagtcaatttctcctcttcttgacatagcttgaccatgaccactttcaaagtcttcatcatcagagagggtttgagttgcttgatgaatgagaactttctgaaactcccttgttatttctaactctacttgctcaccatgaaaggcaaatgagttcctcctactctcatctgattgaatacattcatttgaagaaagtaactctaaagtatcacctgaactgacccaagtttcagtaacttgttcaacttgttttgccacaccagaagacaaatcaaaatccaatatcaaatcttcttcttctttttcattgctagattttccttgttcttcaaccttgttagaactgaattcaactggaatcaatgtacaatcctcttgaccaatgtagaattccaaatgtggaacactaacatctttctttacagtttcttcttcaatggcttcttcttcttcttgttcttgttcatcttcttcttcttgttcttgttgttcatcatcgtgattttcggttacgaaatcggatccactatgatcaccatcatcatcatcatcatcagtatgagcatcaatgacaggttgatcaaccaaaattttcttgtgggcaaaatccaaaacatcccaagaaggcttaatcaaaatacaaggagagtagaatttgtccttgttcaatttcacaccacaacaagaacaatccaaactctcctccttttcctcctcctcatcaccaacaacaacaaccttttcatcatcatcattatcatcaccaacaacaacaagatcaccacctttgatcataccaatttgcttcatccatggaaagaaagaaactttaccattatttgaccaatcatttgaagaagaagaagacaaacaattctcacacatatctctagactcagagagtttctgatgatttgagcaaaaacccaattcagaaatctcttcagcatgagttttacatacaagatctctataaagattcttgctttttttattattattattaccatgagactcaaaaacatgatcaagccttgaacaccaaagacaaggctttttaagaccaaagtaatcagcaaactttatgatcagataagaaaacagagaatttaataacagaagaacaatcagtatccattcaagaactgcatacaccaaaataagtgtgatcttattggtgtttctatgaaccatcgttgcaaacttgttggcagccattaatggtgctctgtttttttttttttttggggtatatttacagagaatgatagaaagagataattgaagaacaacaaaaagggttacttctaaaaatattggagaattggaaaatttttagagagagggagagagagagagacgaagtagatgaagaagtggttttattatgtagacagatgaagaagaaggggtttgagtggaatgacagccaaagaagacccatatagagctccaaattattttttaaaaaattaaattaaaataaataatattaagaaaataaatataaattggagtcaaagaaaattaaagaatgtttcttttctttatatatataaataaaggtttcatccaataaggtactattgtcatgtattttattttactaaccaattggcatttttaagaaaaataaatagaagagagagagagagaagaaaatgatgcactagattcttgttcaagtgaaatttcattttgtgtacatttcaataaatacaacaccattttttgtgtacatttaaaggaaaaaaaaagtcatataaggtaattaattatctattgatttatttttctagccattagtagattttttgtggaagtgacttaagagtattctttcttttatttaaaaagtgattggataaaataaatagttaatgctattttggattttgcatttttgtaaaagttatataatgaaccatctattttgtaaaatgataaattaaattttttattttttaaaatagtacaaaatagtactatgagctcaattttcgatatttttttatgaaaaaatgtatttagttttatcataacaactctaaattgtgttattattttttattttgataaaaaatcagttcaaggtactattttgtaccattttaaaaaatacatggtccaatttatcatttaataaaataaatagttcaatcagtaatttttacaaaacataaaattcaaaatagtatttactctaaattaaactatttttataatgttcttctattaaatgagtttcttttttcttaaaaaataaaattaatttggaatttaaatagggtgtcaaaaattttatctagagacatgttagtgatgaaagttattttgtaaaaaattattacacaaaaaaaataaaagaactatttttgcaaaattcttttccaaatatatataatttttgccaaatagaaaagaaaagaaataaaaaattgaatgagttgaagtgaagtgaatgttaaatagggtttaagtaagtgttgtaaaacccctaaagagtaattttgaatattttatgcggctaatgttttgtgtgataatgttgtgtggtgattcttgccagctccatttcattattttattttattcctttttttttaaataaataataataaaaaaaaattgggcagcaaatgggttggagtgggcccatcaaccgcagcaatgagttagtgggccataatcaaagtaaggtgtgggcccaatttggatccagatgctttgctaaagttcatcatggaagtctatttcccatgaagcttttcataagagaagtctttatattactttttcatttttatttatttatttaattttacaagctcctccaatccggattgtaagtaattggtcttgtaataataaaattaatatttttgaaaacaaaaagaaaatattaaataaaattaaataaattgtattctattttcaaaagttgattagtttagctaccatagttttcttttaatttttttatgttaatatattcttaatgcgcttataaaccgttgaaattttgcacaacactaaaattttgatttttgattttttt

SEQ ID NO: 1724 - DNA, 2409 bp, Cannabis sativa
taataggaattttgaagatatggaatgataatatatagatgttgcttaacatatccatgtagacaatcaattagtgtgtatatttttttccaactgatttaaccttattaaaaactggagtcaaatcctgactgtcaccgcttcacttctttgttaatactaaagtaatgaaatactgactagaattgtggaatgttgatatatggacactgcactagttagcattgctgagtaaacgaccaatcattgcttgtatgttttttctttaatgcttagcttaaacttattgaaaactgggaagaaacgtatacgacttctctcctttgttcatgataaagtaatgggatttccttccatgcttgtacttatgattctggttatttttgtctaaaaccgctcttgcagtgtccaaacggtcacactttatgctcaaactgcaaggttagagtgcataattgctgcccaacatgccgctatgatcttggaaatataaggtgtttggctttggaaaaagttgctgaatctttagaacttccctgcacctaccagagttttggttgccatgatatttttccatactatagcaagctcaagcatgaacaacattgtcgattccgtccatacaattgcccttatgctggatctgagtgctcaatcaccggtgacatcccaactcttgttgcgcatctaaaggatgatcacaaggttgatatgcatgatggttgtacttttaatcatcgatatgtcaaatcaaatccacatgaagttgaaaatgcaacgtggatgctgacggtaggcctttttttcctccttagagaaactatacagatgtatattttttttcttccattcttgattggggatcagtgataatggtctgaagagcgatttttcaggccttttttcattagtaataaagaaatagtttttatcaggcttttaaatctatgtattggattgtttcttttcgcttctgtgcttactgggaccttacaggtatgttgattgatgaatgaagggagacatataccgattcagttaagcatatgccatgataactaaatacttagaaaggagggtgtaatgtgcagtacatacatctttctaatagtatatatttcctgttataattgcattgtggattaaattaaatacgtattacaataaaaatctcttttaagggagcctgttattttgtatattacttttatttgaaggtcatgcacttcatgttctaactcaaatcaggaactctgtattcatttatttaagctttacccaatttcattttatctgaaaatgagaattagatgagatctcttgacatttttttttctcacatgcaggtatttaattgttttggaagacaattctgtttgcactttgaagcttttcagcttggtatggctccagtctacatggccttcttacggttcatgggtgatgacaatgattccaagaaattcagctacagtttggaagttggtgcaaatggtcggaagctaatatggcaaggaattcccaggagcatccgcgacagtcacaggaaagtccgtgatagccaggatggcctgattattcagaggaatttagctctgtatttctctggtggggataggcaagaactaaagttaagggtcacaggccgcatatggaaagaggagtgagccgagcagctcttgctaggtgtacatgtacagttaattgatatcatgggagattggctagggtttttctcaattgagtttgctttcgtactgaagcatatgggggtagttgaatatcgagagggaaaggaaattcaaattgatgatatgggttgggattggattgaattttagaaggaatgcagcagaagaatacgtgttgttacactagttattttgtaggcctttttgcaccatcaagacacatgaacttgtctttagctctctcattgtgtgtcttgagggacctgtgtaatacctatgatttgcttttgtatggtgtggtcaattatcaaaatccataggccaaagaagttgacagaattctatggaatagggttccttaccctttttgttgtaaaatttatgaaaagaacttgcattgttatttcaatgagttgcaaaagatgttatttctttgttttgtctccatgataattgcattacagactggctaatataccccattaataacttttttgtgccccaaaattgagagactaagagacagatggtgagagagagagagagtgaagaaatgatggcattgcaggtgggacaaatggtcttcaagtcaagtgagtgtttttgcataataatgtaatggaatcagcagcattcaaggcaggtcatcatgaaatcaatcaaaacgaacataatttttattttgacaaataattactacctacttttggttatgaaa

SEQ ID NO: 1725 - DNA, 4777 bp, Cannabis sativa
gagagagagagagagagccttttacttacatcttcaacaattggagtgataccataaacattctccaagtactcaagagcaacatactctccctgagacagttttataagattcttttttctatcaattatcttaactgctccatttggaagcatttcccctatgtcccctgaaaatgccagtcacaattaaccatttaaagtttgtttacaactgaagtttcttaaaagagactaggcaaaaaaaaaaaaaacagcttctcccacctgtatggaaccaaccatctataattgcttctcttgttaactcaggctttttgtggtactcaacaaaaacagatttccctctaagacatatctcaccgcgagcaggatttccaagtggattgtaacccatttcaggaacctcctctaggcgcatctcattgtagactgacactggtccaacagaacctactaggctcatttcatcaggataggatatagttgttggtccacaagtttcagttaaccctgcatcatttacgaaaatgcattggctggtttcaatgtccaaacataactataataaagctgtggaattaggctgactttaatgacatgttaagtactcaaaacaaaatcttgatgtcttgtactttttgtatacttttaccataaaagcagttgtctttacagtagcattggacaacaatgcattgtttcattgtctagacatagctacaataaagccgtgggaaatataataatttgaatataaggcatggattgaatttgatgacatgttatgtgctcaaaacaaaatattgatgcttaatacttaccgtatccttggacaacgaaggcacagctggtaacgcgcaagaattcttctatctcagaactcaaaggagctgctccagatattataaggcggacgcgaccacctagtctagcttttatctaaaagaccatagaaagaaagctaagaagacaacaatgagaagcattctaagtattcttataaacattttatagagaaagagaaggacaacctttctgaaggctaaaagatctgctaaaggtgaagcgtatttgtttttgtatccccaattcatccaagcaagtttgctttaaagcaatgaaagagtgtgtaagtatcaaagtagttagtatgagaattaaactgataagaatatttgaactacttactacttataaagaagatcaaaaatcactctccttcttggattgagctgctctactcctttctttatacctggaaatcaaagaggcttggctaggtcagtatgatggttcaattatatagctgttgaaaactgatgattagagatatttgcttgccttcatacactctttcaaaaactcttggtactccagcaaaaagtgttggctttagttccattaaatcttcccccaatgcgttaagatcctataaataaaagaattaacatgattatggtaagtgaaaatgagactagaaatggattgcaaacaaaatgtggcataattagcaatagcagcaatatcataccccatggtaatagccaacagaagcacctttatggaagaagtattcttcgattaaacggtcaaggatatgagctagaggcagaaatgataagtaggtatcatctcctgtcatctactcacaaatcacaaatgagagtatcaggaaaaattataagaagttggtaagatggtgtatgaagaatttaccacaagaagttcaattatgctacttaccttatcttcaaattgttccaagaagaggtcaatccctctgacagaaaaggcaatggtttcatgtgttaacacaacaccttttgggtctccactggtaccactggtatacataattgtgctaacattatggatctgtggtggaataatctctgttgggttttcttttccctgatgaacaataaacaaactttatgatcaattcagcagaaaaaaaaaaatgacatcattgtgaatctgcggatgttctatgccaagtagtattagttgacatttgtcagcccatatactatggtgaccatctagaatgtgttccaactctcttctaaatacacatttgttacattcatcacagtataacaataactctagactagttcaaaatgattggataggtggttttctcccacaaatgtttgaggtttgagtctctactgaattcttacatagaaactactattttacagtcacctagcacaataatcacttcataaagggacattttcaagggttacgtgagcaacctagttttaaaaaactaaccatatcaaggaattctttccatgacagtggttttatcccaatctgagttgctttttccttctcctcttcagtcaatgaagtgaagcaaaccaaagctgcaacaagaacaaccaacctcagtatcacacattattagtagttttagtaaacataaaatatagaacaatttgcggcgaaactccttatgttttaatttttatatactaaatcctcttatcttattttttagtggcaaaactcccttatgttttaatttttatacacttaacccccttattttttttttagtggcaaaactcgcttatgttttagtttttatacacttaacccccctttattttttttttttttgtggtggtaaaacctccttatgtttatttttctttgcaaatttgacacgctaattatatattaacgttaaatatcaactggatgaccactgtatacacctgtgtatatgtaacagtaaaatctcaaaattgatacagaagtaatctagttagtacttaacggtaatatcgaattaaaattttaaatttgcaaagaaaagtaaacttaagggacttttgcaccaaaataaaagataagggggttaagtgtataaaaattaaaacataagagggttttgccaaaaaaaaaaaaataagaggattaagtgtattaaaattaaaacataaggaggtaaaataagaaagttaagtgtataaaaattaaaacataagggagttttgccgcaaattactctaaaatataccctgcaaatctcacttttaagccggtcagatgatctacaatcaggagtcagtagctgccaaagagaattatagcatcaaattagaaccaataatatcgggaatatgatacaacaagtggtctttcactttattatctcaaagcttttgattctcacttctttaactttcttatcttggatgaaaacataatcgacctcagcatgatctataataaaatttacagctcctggccctgcatcagaaaaaaatattacaaggttaaatcaaattggtgaagctgaagtttctgctaattttaggattgagagattttaccaagggtgtcatagagaggcacacagaccaaactgtgagcattgcaagcctaaaaaaacgtatagcaaatgattacatgactagaaaagttttttggttaaaaaaaaagaactatatgtggcgttgtgtttcagcaaataaacctccattgccacaatccattcagggcaatttgatccataaatcccaatacgagagccctgtcacagtcacaaaatcacaatgaaaaattagaagaaaaggcataggaagaagaagaagaagactttgtactcatatgtttaggccttacaggctcagcaccagaagcacgtaatgcagaaccgatttgaagaacttcctcatgaacttccttgtatgttttccaattataaggcccccactacacacacacacacaccaaaacatgtaaaatcacttgaaattacaatcactaaacataacatcaatcttatatgttatgatatgctatgttatgttatgtaatgcttaacctttccatcaacaagttttcgccatccgagcatacgattatcaggatatctctcaacggatttgctgcaagccaagaacatcttatcaagttttcatgtcattaatatgaataaatagaattaacaagattctagttataacaagtacctgaaaatatcccaagctgtacttaattcaggatcagctggaggaaagttattcttggaaagcaagtttctgtacactggaccaactgaaggcttcccatccttaccttcctttccttcttcaacttgaattgaaaattgcttcagcatcttctctctctcaaacctggaaaattaatagtctctggacacacagaaaagggactttaataactaagagaaaatgtgtatctatatatgtgtgtgtgcaaagaagtcaaggttttgagtgaacagaagaaattcatagtcaaagccaaggaaaaaaaagacagagtcatgaatgatcgatactgaccaccatgtgtgtgtgtgaagtagttaaaatttaggaaaagagcccaaatggtacatgtatatgtggtacatatatatatatgtgacatcaaaacaagactacataccaaatcttcctttaaatacatcagaagattgaacagcgtagcatgattacccaggaaaaaaaaaggaagaaatgtaaaacacatgttagctgcacacacatgtaattttttatttttatttttcattatatttattacataaacatatataccatgttgggctaagtatgaggaagctaaagattgtgaatgactcaaccatccacaaaaatagatgaaacccagtttaagagattatatttttatgctaaaacttacttagttacggcaaaatagcagtttgagctgcgccttttcacattcagttatgtcatatgtttagaaaaaaaaaaaaaaaa

SEQ ID NO: 1726 - DNA, 1862 bp, Cannabis sativa
ttgggatgcaatattgttagtgaaaaagccaatattatgagacatggtattagtaatatcagaaaaaggaattgaattagcaatggagtctgtcataatggctttttgtttcatagaagaggaatttatagtaggatgaggagagtaatgaaggttagtctgaggagggtatgtagcaaaagaatgaggagaatttgttgcagaggaagggagagagattggtaaataagaaggaaaaggaataactgaaggatcatgggaagtattatgtgatgaagcactataggtagtgtaagatgattgatgagggggattcatagcaggaggagatgaagattcggtcacagtaagattatatggatgggggttcggtctgtcatcaagtcgaggaagtacagcagcaaaagatttttttgctagtcttgtcataagaggccaagcattgcccttaaaaaaatcggtttgataccgatcataccccgatgaaggcaaaggagcacccatcatttcaggcccgtattccagagagggttcctgaccattatagagttgatccaggaatttaggacaatgttcaaatggatgcccaattattccacattcaaaacagaattcgggaagacgttcatatctgaattcaacccaaaattcatcctgagagtccctaattcttgccattttgcctcgtaaaagcggtttagaaatatccaacaatgcttaaaaacgaagatatggtccccaaccttcattaagagagtcttcatcaacatccaaataagagccaacaatgttcccagcccacatagcaatggctttggatttacttaaaaaaggtagtctatgtaattgaatccaaaatggggactggtgcagcgagtcttcagtgacttcttgcagagcacagggttcgcgaagaacaataagatgattttgaaagtgccatggttccataataagagccattctcttatctccttcacaaccaaaggaaaccgagaagagaccagagtggtgatcagtaataatagtaacggggtaccttcctttccagtggttactcatttccagtggttactcattttaactttggttaacctattattctcataaaaaaatgtaagaaaaaaaattaaaaaaccagtggactcttcattcgcactccgaatcccaatcgagcgattgataggtggatgcccatgaagcctctcaaaaaaacaatggcctcttccaatcgagcgatactctcttcttttgaaggaatcaaaatcggagtgcaacaataatggcctcttccagaacgtctcaaaatcccaatcgatccactcttccaatcgagcgatcctctcttctttggaagaaatcacccaatcagccagaacacgatgtgggaatccattaaaaatttgttaatatacatttttcttttctcataaaacatatattgtgattttcaaataatcacaaatcctaaaaaacatggatcttccccttctcttctctattttactaccaagctctaagtggtactctctatccattcatctaattgaagacgcgttccgttgctggttttactaagtcggtgtcgatcaattgttactcagtgcacgaaggctccgacaagtatgtgcagggatgccgggaaacagaggtggttaaccggaaagagtggctttagaggtggacgacttttgtgaggtcaatcttgcccggtggaaactgggggaggttggatgatgaagatgtcaaaattaggattttggctgaggtcgatgactgcgactcgggcacttatacgaatgtgagagctggtttctaaagaccagtgggttatattagcggctttttctaccctaattgtg

SEQ ID NO: 1727 - DNA, 2024 bp, Cannabis sativa
gggagcttggaagatgctatgagtagagttagggagaatgaattgcagcttggctgggattttcgtcttcgaattgctgttggtgtgattaaagggcttcagtatcttcactcggctgttcctcagattctccactacaatttaaaacctacaaatgtcttgttggatgcacagtttgagcccaggttggctgattgtgccttggttaagcttactccccatattgatcgcccaacttctggttatagtgctccagagtgttttcaaaatggcaggtgattcttcccaccacttttctctttttcattctaatgtttctccattttatgtgcagctttaatggataatgggatgaatttgtttgctattagaataatcctgaggttttaactttcatcaagtatgttgaagtgttatgtaggatcgtcatatcatatcatagtagtagtatttatttctacttgtctttataacttacatgagggcatgttgagttcttagtttgatgttgtgagcttcatttttcagtagattaagttaaagaaaaatcaaatctgatggaaacaagagttagtgccacattggaattaagaacttgttattctctgattgagttttgtaagtaaaaaagaaaagaagaattcatgatatcgtgagacgaaaaacacctaatcctattgttacaaatgctacttggtagaaactagacgtagtgccacatcagaattaggaaattgttaatatctggttgaattttgcaagtaaaaaagagaagaagaattcatgatatcctgaaactgatggtggatcactttctttttctcatgctgcaggtatacagataaaagtgatattttcagctttgggatgatattggcagttctgttaactggtagaaacccaaccgagccgttcttcggggaagcatctaatgggggtagtttggggcagtggttgcggcacttgcagcaagcaggggaggcaagagaagctttggataagagtattgtaggtgaagtaggagaagaaggtgaggaagatgagatgttaatggcagtgagaatagctgttgtatgcctttcagatgtgcctgctgagagaccttcaagtgatgaacttgttcatatgctaacccaattgcacagtttttaatgaacatgtaagtaatatcttgttttctaggttttggggaatttgaccactacagactacttggtagagattttgcttccaggtttttgccttttttttttctctattttgggatatgcaaagtttactttacccttaatatttaggtttgtatttcatttagaaagtaaaaaagaaaagaacatatctattatctattggagtagtagcaatagtagtagtagtattgtgtacatgattgactaatgttgaaagtcagaaaatttgtaaccccagaatagggcttagttatctgattactactagggagacatctacattattgtgtttttcatcctctaatgatggtggggttacgtttggctgtccttttctggacatcactttattaatatcacgggtccttttaccttaaatttgttgacatttctaagtatgcaatgaacattggtggtggtgtcaatggtgttgtgtgtgttgtttgattttctgagatatgaaagtgaaacctcaaaagggttctttatgctttttatctttctttttccttgctagattgatttgtcatggaggtatcaacggttgatgatcaaccaattcctgacttccaattaactgaaaatgtctttgcatgtggagccttattttccaaaccaaataacttgatactctttttattctttacaaatattccatgtagtatacaaactacactttccactatttgaatcacttcggagtataccctttatttatagcagttgttaatgtatataatctctttgttaatgatttgaaaggattagtacttaacaaccctaattatgacacacatgttctggaagatagggaatgaaataacatttatttat

SEQ ID NO: 1728 - DNA, 7267 bp, Cannabis sativa
  modified_base (603)..(611): a, c, t, g, unknown or other
ccagtaagagatgtgttgtgttagtccaaggacttgtcagggttgtaccccgttaagagtgcgtacaagcttcttgaacagcttaatggtgaatataaccttgatgcctctgctgaagatcagttttagagaaagttatggcaattaaaaatcccaccgaagatgaaaaacttgttgtggcgtgttgcaaaaagttgtctcccaaccatgtctcaactgcatttgaaacgggtggagattaatattctttgtcctacttgcaatattgatgctgaaaccatttttcatgcgcttctcacatgccctgctactgttgttgtttggaatcgcgcgggaataggcacagtaatgcatcaagtcacctcttcctggactggtgcatcgagcgattcctggtgttggacacggatcattccagcttggtggtggccttgtgttgggccatttggaatgcaaggaataatagagtatggcagaataagatagtgggggttgagagcattgttactttggtaatgaactatcttaatcaatggcgtattgctaaaaaatcaagcaattatttgttgttcactgggtacataccgggggacggggctgagnnnnnnnnngctccaagtgttaatagtattaagattaacgttgatgcggcggtgtttagcgagacctctaactatagaatttgaatttgtggcaagagactcaaatggtgttttcgtggagggtggtacaaaactcttccaaggttcggtatcacctgaagtggctgaagctattgggattcgtgaagcattgagctggatcaaagaccatcggtggccacatgtgacctttgaaatggactacctttcaatggttcaagccatccgtagtactattgtcatgatttatattttggcaaagtgattaatgactgtaagaccttagtatgtgctttacgtaattttttttttttttttttcactttgtaaagcgatcaacaaatatagcagctcattctttcgctagagcttttatatcgcaccctgatcgccttttcaatctggacaatgtccttgttgagttgttaccaagtttggtaactgagctaatcgtttaataaaatgatgactttcatttcaagaaaaaaaacatttaagatgtattttttttaaggacacttaaactggatttggcccgctgtttgtgtaagatcacaatcttgatatgccatttcatttgtattgaatttgattattaatgaatttccttcaaaaaaaaaaaaataaataaataaataataagtataaaaatttgcatgatcaaaattatttcctcatttttttttatcgtttgattctttcatttatattttccttccatttaattcaagagtttcattttaaaaatttgtttctattaaaaatgtgtccccatcaatttaaatggaaattatttacaaggccaatctaagaaatttaattccttaattttaataaaattataggctatcacaagacattggcaaagttaagacacaacacaatacataaattagtcactataaataataataaataaaaaagcaatatatatccaacttaaattagtcgctataaataagcaaaattcgaaacaaaaatacctaaattaattaaggcaaaaagaaaacatcaacaacaggatacttgttgatcaacttgcagtgtcacaagaaagagattatctttgaaagaaggaaagacaatcatatgtttttatttttgatgaaaaagtgaagagatttattggtaaaatagatatataaatcaaccatagagctcaatgcccacctggcaatgttatcagttgcagaatttaattctctaggaattctaccatgcatgctatttattctcaacagtcaacataaggtgtaattttcattatacatattacaaaaaacaacaaattagtcaatttttaaaaaatgaccaatcactaactcatgaaggtggcgtagcataattttgtgtcattaagatatttgtctacttcatttttttttcaaaaacataatttaaaaataattggtatattaatatataaaatttaaaacattaaaatgttataatctatacatagtaaagagtaaattccagtaatttatgtcatattaaattaatacaatttcataccaaattggtacaattccacaccaatttattatctcatcttcaattttttgcaccaattattacatcaaacaactaatttaaactaaacaaataaaaaaataagacaagagatggtctacacagaatattgtgttaagatttaaagttgggttggcggatgttatttactccaatttggagttatgcgcgaaagtagatggtcttaaaagccatgaattaattcaattcgttatctttttaaaagggaaaacaaaattaatcaaagttataggtcaatgatcaattttttatttatttattttttaagaataggtcaatgataaattgacaattactacaaattcttatagaaatttaaagccaacggatataaatggtggaacattgaaagaggtaggtacaataacaattttattttgtgaattgaacagagaaattttcgatattatctaatgcataattattttgaccgcttatactgtcaaattttattagtttctcaagtcaataatattacaacttacaatagtagaactagaagattcacattaaaagtaagattaaaaaagttgaaggttcacacaaaaaaagaaaaaaaaacagctgttgtattagacttatacatgctatgagtattttattttataattctgcattattttattatgaaataaaaattgaggcataattgaattgctctggtcttggattttaatttattttggggtcaaatttaagactgatgaaatgtttaacggcagataaagacttatttataaagaaaatatatataataaaaagaattgaagaagaaagagagagatttgtgcggtgttaaaatcctaaacgaatccgaaataacttaaccgcaaaaacacaccgtccaatccgaagaccagtcaaaaggtcttcccccgaatattccgtcacattatccatttctgtctgaaattccttaattgtaaatacttctaccaaacaggggtactttagtaacttcattcgttcttgcgatcccccaaaatcatgatatatccaccgtttgattctcccatcatgacatatcgacggccacttttacgagtttgactgtagtacgaaaaagaaatatttcaggctggaatgattggcttgatgtttgatcccagtttgaccgtagaaaattcaaaaagccaaattaaaaaaaaaaataatgatattaattaaatataaattaaaaaaaggccacatgtaatggctttttcctcattgaacagagagaaattagctctaaaaaatctattacagtctgggggagagcgggcttctttccctatttaattttttattttatttaattcattattatttattattaatttttaatttctaatttccaattctaatttcttcccactatttccagagtttgcttctttcttgttttagattagggattgagagagagagagaggaagaggaagagagaagcaagggttaagaaagagagagctttctctctccttttatttctcattcttgtgattgtgatttattgagctctcttctttttgagggtgattacattgataggtattggggatttgaagaaattagggtttggaggtggggtgcagtggaatcgtggaaacgaagagatgaacatgatgcgtcgccttaagagcattgcctcgggtcggacctcaatctcatcggacccagtaagttcactatttttttattttttatttttttaaatgtttgtgtttgaagaaattgttatgaaactggaagcaaagaagaaacaaaaatggatttttgagctttgcttatggatattgtgcatttgacttgctatactccgataacagttggtaaagcactctttaaaagaaaagaaaaaggaagaagaaggaacaatgatttttttcttcttcttctcatttttccctcattctcaatggtcattctgttttttttttcccacaaaaaggtcaccgcatgagttcaaattagtaggttttgcttacgattacattctagtttttttctttgtatgtaatggattttcgttctttattggggatgaactgggagtatattatatatatgtttatgtatagaatccgacacttgattaataagttctctgtgttttaatggttttgtggcctgatattatgttcttttaaatcatgtttgataaaataacaaatggtatggattcatatgatgtattgaagacggtacattgcttttatgtgggtagggcatcgatttttattgtgtcaattatcgcctaaatctgtgttttattctcttcttcttctatgccaatgtctttgtgagatatggatttattacggttagaaagtggtttttggatcaccagtgctctgctgggaaaaacaatcctgatttacaatgaatagattcacttttttggttaaatgtaagttaacttagtgaagttatttgtactcatactttactgcctgcctcaaccatctccctcgttaactcacaagataggttgatgtttctttaacctacctgttctaaaaaaatttaacaacttaaattttactgattttcttttagggtgcggattgtaatacaaagagagcaaaggttgatcaagatatggagcaagtaaatgttgaatcaaatgccattcaggaaagtgtttctaatctacagcagcacgtgccatctacagcatcggaaaatgttgcatgcacgtctactgtaccttcaattgccaactctgagtcaaaagacgaggaaatgactgagagaactagctatgatcagctccccaaagaaatgcacgaaatgaaaattatagacgagaaagccaatagccatgatgaaaaggtataatttagttggtacatatttttaagattaagcaaagaaagatataaaggaaaggctaaaagagagtaaagaaataaacagttgttgaatggctagagaatcctttgccttgtgcaggatatggaacccactgttataaatggtcatggcacggaaacaggtcagattattgcaacaacagtagggggtcgaaatggacagccgaaacaggtatttttttttagaaaaacatgtttccatctttagcccctccttcctcccaatttttcttttgatctatataccttcaatgtttcgaacagtctcttttgtattatgaattttatttgaatacaaagtcttaatatattgtttttgcagacaatttcttatatggcagaacgtgttgttggaactggctcttttggtgttgtctttcaggtatttggaaatatgtctgagtatccatcatccaaattgtttgttgatgtttcggtttttctttataataattttttaatagtgaacatttattttcttattgatattgatatcaatttcttcactgtcatgattcattatattttacttaggcaaaatgcttggaaacgggtgaggcagttgcaattaaaaaggttctacaagacaagagatacaagaaccgagaacttcaagtcatgcgtttgcttgaccatcctaatgtcattcaactgaagcattgtttcttttcaacaactgataaagatgagctttatcttaacctggtccttgagtttgtatctgaaactgtctatcgagtttcaaagcattatgttagggcaactcaacatatgcccctgatctatgtgcgactttatacatatcaggtaagtaattagttacttactattttactgtatgagattatactgatgtgtgttgtaacttttggttttattgattctgttttgtagatttgtcgtgcattaaattacctacatcacgttgttggtgtgtgtcatcgtgacattaagccccaaaatttactggtaggttcttgcttttgttgttggtttggtaacatcaagtttgttgtctgcttgattccagtgtaatattattggtttgtacttcatactgataaaatttatctggagaccactgagttcttttaatttttgtcttttttaccaatatttcttatcaatgttttggttcagttaatttagttaaatattaatgcaaagttattattatgattttttccccttctgagattcctttttgttcattatgcaggttaattctcaaacacaccaacttaagatatgtgattttgggagtgcaaaaatgttggtaagttttttattttttttattattttttttaatttaaagctgttattctaaatgctgataagttatgagagtttgtatttaggtgccaggtgaacccaacatatcgtatatctgctcacggtattacagggctcctgaacttatatttggcgctactgagtatactactgcaattgacatgtggtctgttggttgtgttatggctgagctacttctgggacaggtgagtctatatgagttcaattggtgtctaaacttgtttattgtggatgtactgtagtttgttttttccatcaaatctccctttgtttatgtctcctttatcaataagtgtattcactctgtgctatcacttttgttgtgtttgctctaaactgattgctagttctgatatgctggatcttgttttcatgcagccactgtttcctggggagagtggtgttgatcagttggtagaaattattaaggtacagttagtgttgatgtcatcttaattacttgttaactaataccgctgtattttgtattaatttgcttatacttttttcttgtttttgtccttttagattcttggcactccaacaagagaagaaatccgttgcatgaacccaaattacactgaattcaagtttcctcagatcaaagctcacccgtggcacaaggtcgagctctttttttcctttttttagtgtgatgttaagtagttcatgattttttttaaaaaaattatttggcgctgctagctgtaaatattcatttttctgaaatgatttgattttcagatctttcacaagcgaatgccccctgaagccgttgacctggtttcacggcttctccaatattcaccaaatcttcgttgcaccgcggtaagttaaatcactttacactatgaaacaatattttacatggtttgctgagggtttttttttttttttt

SEQ ID NO: 1729 - DNA, 1319 bp, Cannabis sativa
ccttgctttgctcaagataaagcaaccgagagaacactttattgcacatgaggaacaaataaggtgacatgggatcgccctgtcgaattcccctagctggattaaacttctttagcggagtgccattcaaaaggatggaataaaaaactgtcgtaacacaacacattatcatcttgataaaatgagggcaaaaaccacacttctccaacacaatcttcaagaatccacactcaagcctatcataggccttgttcatatccattttaatagccataagacctcctttccctttcttcttttttattacatccatgatctcctgagtaagaatggaggactcagcaatccatctccccggtaagaaggccgactggataggagctataaactgatcaagaacacccctcaacctttgagcaataatgcgagcgataactttatagacaaagttacataaagcaataggcctgaaacgatcaacgctatccggattaatgcctttcggaataagacaaatgtaagaatggtttaaacccggctccaagacacccgtggcaaaaaacctctgaatacatagcaccacgtcatctccaacaagattccagcacttgcgataaaaacaaccggaaaaaccatcgggccccgaagctttaaggggatgcatctgaaaaacatgggagtggatctcctccttttccgggatagcagtaagcatgtaattctcaacagaagagacagacggactaatcaattcttcgagtccttcataggaaacattcccgtttgaggagaaaagattaataaaataatccctaaggataaaaccaatttccttttcattagaaacaagcagcccactaggattcttgagattccaaatatgattccttttccaacgaactaatgtggaagcatggaagaaagaagtattcatatctcccttagaaagccaaagctctctcgaacgttgtttccacattgattctttcaaactccacagattagacaggttcttcaaaatggcctcctcactcactggatcagagtcacgaacttctttggattgaagagtttggagctcgacttcgagatctttaattcttttgtcacattctccgaaaacgttcttgctccaccaacgaagagcatgctgagttcgattaattttctttcccaaacaccctgcctcctcgttgggaaggcgacgtgtccaggcctccttaatcacatcccaactggacccgtcttcaaaccaggcttcgaaaaaccgaaaagggcgaaagcctttagctttggacactgccgaatcaaagattata

SEQ ID NO: 1730 - DNA, 2561 bp, Cannabis sativa
atatagaaaaagatttcttaacaaatcatggaaagcgatgtttgtcctcaaactgtcaacaaaagaatctaaaattatattattataatttatgagacagaaataagagagagctaattagtatactaaaatcatcgtggggtgcaactgttcataaaagaactaatgaatatatttataatataaataattcctccctagctaagtcatatatataaatggtatctaaatatagaactagtctaattcaaaactagcactataagaaactactaataattaaaatagaggcttcatttcaaaggctgtatatctatcatcataattcgtaaaggctttaattttgtgttttcatcgtcatcattacgaaaacttggtctaagcataagcaaatgagattttatataaaatcatcttgcatatagtgtagtacatttaattagttttcttccccaaaaaataaataaaagggaaatatgatgtatgattatattcttgctagaagctttagccgtcatgagcaaaaaaggttgagatatggagctatcatttgctgctttattctagtaatattgttcttttgctccttcttccagccttatttgggagtacctctaccagctgcttgtaaattctctatattttattacaacctatttttttgcttcttttattaactttaaatatatgtaaatataattatctctttctttatttcccttattaatatcaatatatctaataattttttttttggttttgacagtgaatttgcaagtgtcaatgggtagtgttagtgtcaacaaaatgctatcaattaaagcatttacaaacagctccgatcaccaaaatgtgaaaagcatgcacgagattaaaacagatcatcatcaaccatcaataaattccagtcatcatccccaaacaaacaactctacttcacagaatcttaatcaatatgattcgaaaaacgcgagtactaatattactcatgatcttcgagacgcaaacgcattagagaagaatattaatagctcaaaagattctaccaataatattattactcaacatcatgaagatatgggtaccatcatcaccaaaaacgggtctacaacattaattaaggcgacaaactcaactatttcagcaggtgattacaatagtactgctgatcataaactaagtacgccattttcaattaatgcatgtctatttatataaataaatacttttcgtttgaatgataatgttcaattaatgatgatattttctttcagttagagaagtaatgatcactaagaaaactcagccaacaatcatatgcaaccctgagaaatcgagatcagaatactgcgaactcgaaactgatgtgggaatcgtgggaaaaacatattccgtcttctttgttaaaccatcttctcaggtagctgagacggacaccaatattaactccacttcatcattatggagtgtaaggccttatgctaggaaagatgacgccacggccatgggctcagtgaagaaatggtcaatttcggcagtagaaaatcaagaagacgtgccggaatgtactatacaacacagcgttccagccttgctgttctctctaggaggctacgtgggtaacaacttccatgagttcaccgacgtggtgattccattgttcataacatcaagaaagttcaatggtgaagttcagtttcttgtgtccgataaacgactttactttatcgaaaagtacaagaaagtactgagagctttgtccaattacgatgtcatcgacataaacgaggtagaaagtagccaacaagtgcattgttttcctagtgcaatcattggcttaaaaagacacgaaaaggagatgcgtattgaccccgaacgacacacttattcaatgaaagacttcagagattttctaagggaaacatactcgttgaagaaagaaaaagctattcaaataataaacgataataacaatagtagtagtctccaaaaaagaccacgacttctactcgtaactagaagaagaacgagagctttcacaaacgagggagacattttgaaaacggctaagagtttagggtacgaagttattgtggcagaagccatttcgaacttgcagaagtttgctgagttggtcaactcttgtgatgtgttaatgggagtccatggagctggtcttactaacatagttttcctccctgaaaatgctgttttcattcagattcttccaatcggagggtttgaatggatagccacaaatgattttggagtgcccgccaagactatgaatctcaagtacttggagtataagatcaagaatgaggaaagcactttgatcaaggattacccacttgaacatgcagtatttactgatcctttttccattggaaagcaaggttggaatgctttcaagtccatatatttagaaagacaaagtgttaatctcgatgttaataggttcaaagccactttggttgaggctctccatcttttgcgcgcataatatatacatgagggtgaataaattataatgtaattaaacctagcttgtcaatattatt

SEQ ID NO: 1731 - DNA, 2617 bp, Cannabis sativa
attacaagtactccacaaagcaatagttcactattattgcttttcttgatggtttctgtgcaaatgatgatggtagctgaacaattggaggaaaagtttctggcttccaagtaactagcattgtatatatgaggagagacaaacaagttggttggagtttcttccagcaaaatcatcaagtttcagaattcaagttcatttatcaaagctattaaagcatttgatcaggggcaatgtgaaagacagctagttgagaaccagtcagacaggaacccggtatgacgggtcaatcattttcaagatgaacaagtttcccttatcacctctagacacactgccaatgaaacaagacatatcacctttcatgagttggtatttattatcatttgcatatggtccataacagaaaatcaaaggaaaatggcatcttttcaagttctactaattttctgtcaaaacaacgtttgaggacatgttaatgaacaacagccactctagtagaaagaatttagcactttcactaatatcgaatgagacaaaaagaaatcaaaacacaatgtttagtaaagaactttgttgtccttttaggccactcaatcctagaacagaaatacaaatggggattattgcaattgaaaactgactgaagtgaggcatttgataagatgtaattctgaagtctgattagtaaaccgccgtacaaataaaaatttctcctctttttttttcatttgcttctttcggaaaaacatttgtgatataattttattctaaaagatatatttaccacttgaaaagtgtattataattataaattactactgagtaaatcaaaataataaattattgtgattagaaagattagtcttggctatcaatatcataaattctcttgctttgctattatttattttcttccatttttgtcaaggctctcagaccataaagtgctcatactaaaagacaaaggaatgagatgtcttaagttaaaaggatttaaccgaactctcatatcattactatttctagttagtagactgtattaagaatgtcttcctccatatcatcaatatattgagcaaataagtttaatatggttggaatagtaaggatcattgatgacacaaaggctgttttctttatcatatctaattctttaattaattctattttccctaaagaacattaggagtatgtatttttagcatctataggacttagttctcagcatagatagtgaatacgagtttcaagctgtatgaacaaaaaatttcacaaaaccaacctaccagacctctttctacacggtaagagtttgtgtttttcaagcaaaactataagtttgaggtccttttatatgtaacagcaaatttcaggaaatcaatttagcaagactctttggatgtcttatttgttttgaggttgatatatgcatatgtatttgtgattttcaaggatgtttaacttaccgtaactcttcatccaagtatgttatttctaattctccacgggctctatcaggagctttaactggaatctgtatatcatgaaataagcaaatatgaattcaaccatcatagaaaacagttctactgatcacattttttttacatggctgaagccattatattatcaatgaagaattaagcatgtatcagtaattatttaaccgagacatcaagatcagactacgaactaccttttatgaaatcttatctattgtaatggagagaaaaaaaacttggaacgttgtaggagaactaaaatatgttagagcacacaaatttgaaattagttaaagaaagtaatttattaaagtttaaaataggtgtctagaagttccagcattccctaggaaagagttttaccaattttttacccctatgcgaaaatggtattgccatatgattttgtttaatctataaaaatgaataatgctaggcacaaactcattttaaaaatagtgtggtcgaacctataaatagtgggcacaaattagaatgattcgacatcacattcagacataatattataaaccaagaagaagaatttcccttctccaaaattagaaaaataaataaatatataagaagaagaaaaatacttacaagacctccaattttgaagtaatcaaactttactgccacctttcttgagtttaaaggtgttaaatctgccgttacctacaaaacgttaatgaaaattttgaaagaaaaaaatgtgtttaagagtattgtgcatggtggaaaatgttatcctatgctgctaactctgagttgaatgaaaaaaattcactttggaactttgcaatagcatgtgtggtaagatgggtttcccaaggttacaatagtttaatgatttccttacattttcaataaaatagtatatttgagactgaatcttcttgagaaaagctattaatatctaatgttaatgacctacaatacaacatgttgtaatcaacagaggattccaagccttttaaacaatgaagctgtcatatgtttcttgaactgttccctcaattactaccagttggaggtgattaatgattcattaaaacaaattaatgctttgatataaggctttacaaacatgctattgagtattgtacagc

SEQ ID NO: 1732 - DNA, 3033 bp, Cannabis sativa
cttcataaattcggtaattattgacgggcccaatatttcctaggcccaaattagaagccctagttagctaactcgaagctctctttcatggagggtttaacacttagccgcacctctgagtaaaatctttcacttctctctctctgtctttctcattctgccgcccaccgaggatcgcttctaactctaggtatgttctccgtcttactctttatctcgcacacttttatgtttggtatttgaacttgattttcgtttctctcattctccttagcctagaatcctcgtttggtttgtatttttcttttcaatagttgattgtttgcaattatatatgtgcgaatgtcatgatcatatgtagagaagttcttgattcaacgacttttgttttgccagagatgagtttaatatctcaaaatgttgtccgtaaggctaagagggagaagaatgacccacctttgtatcctgaagagggagaagacgataaaaatggtaaagaatctaacaaggatactatgaagatcaaaaagagaaaaaaaacactgaaggaggaggatgatgagaaagtggtagttgagcaggaaagggagatgaagaagcttgagaatgttttgtttggatcacttcattcgtcagctgaatttgggaaggacgatgagtttgacaaagggtctgctttgtactttgtggaccgctctgcgaataatgccctcactgtttgtgacgatggtgatgatgtattggcagaaacttctgatgaggaggaagatttgaaggtaaggaaacctgtttgggttgatgaggaagagcagagggccaagattaatattgctaaagttaacagattaaggaagctgagaaaggaagaggatgagagtgtaatttctggttcagaatatgtctcgagattgagggctcaacatgctaagcttaacccgggcacagaatgggctcaacttgataggaaagcaaggggtgatgggtactcctccgacgatgagtcgttggatgaagaacatcaggcagtactagcccgtggttacaaggatgttgaaggtgttgatgatatcctcagaagaaatgaggatgttgttgtgagaagcagtgcgaaattgttgcctggacttcttgaattttcaagacttgtagacgcaaatgcacaggagccatctaagggtcctatacattctgtgcagtttcacagaaatgctcagctgttacttactgctggattagatcgaaggcttagattttttcaaattgatggcaaaagaaatactaaaattcaaagcatctttcttgaagattgcccaattcggaaagcttctttcacgcctgatggttctcaggtgataatagcaggcagaagaaagttcttctataccatggatttagtgaaagcaaaagttgataagataggcccactggttggtagagaagaaaaaagcttggagttcttcgaggtttctcccgattctagcacaattgcatttgttggcaatgaaggttatatcttgttggtttcatctaaatcaaaagagttgattggtacactaaagatgaatggaacggttcgttctttagcttttgcggatgatgggaggcagttactgagttctggaggggatggacaggtttatcactgggatctaagaacaagaacttgcttacacaaggccattgatgaaggttgcctaaatggtacatctctatgtacatctccaaatggatcaatgtttgcagctggttcagacagcggtatagtgaatatttacaacagagatgagtacttgggggggaaaagaaagcctatgaaaaccattgagaatctaaccaccaaagtagattttatgaagttcaacaatgatgctcaaatattggctatttcttcaagcatgaagaagaacagcttaaagttggtgcatgttccttcatttactgtattttcaaactggcctccgctgaataggaacctacagtatcccctgtgcttggatttcagtcctggaggagggttcatggccatgggaaatgctgctgggaaagtgttgttatacaaattgcatcattataatcacgcctagatcatcggagacttgtgatttcagctgggaaagccaagccattttggattggagaagcaatatgatcttatatcaccttccattggcaacaactttgaaaccaaaatttggcttttcttgattgatgactccagagtgtcataaaagcctgcattatttaattactgttatgcattggagtggagcaccaaattcggttgctacagaaattttgttctgttgaatttatcatgtaaaactgaggtttcatatttgggaatctaattgtagtatcagtttttgttacagaaatatttttctctttaacccgaatatgtttaaaaaagtgcaataaactacaaagtagtttcttatgaaatcatatattgatttctggaacattatcttgattgaaatgtcattgtcaatacctgttaggtgcttttgaacttaatttaaaatcaaattttccaaagagcctgcattttttagttactgtttgtattgatcctttacctttttctcatccacaaatcgtttgtgaacataaaatgtgtagtatttttacattccagaaatagacgatatttttctagatattgaggaacagttcatttggaacttcactcttcaatgctcattgctctaagacatcatctcactatatttgactgactctttgtttttgaaaattaattttgttttctgttgaataattttatccagaaagttctcacaattgctactatggacagtacttggtggaagttgttgatgaagaaaataagagaagcaaaaggaataataagtgctatttatgcaaatccatataatgttgacaaaatacagagtatggtgggctaatgaaatgatattataatgtaaatttgtgtaaaagcttgaaacgttgaacacaacataccttatgacacgtaaaaatcacaaaataggttttctttttttttttttt

SEQ ID NO: 1733 - DNA, 1894 bp, Cannabis sativa
aattgttcatttttttgggtgatttgtttacttttaattagtatgtaatacataaataataatgataaaaatattttcaaaacattattaagttattactaatattgtacttgaactttgtccaaatattaatattttatcaaaaaaaaaatatatatacatatcaagtaaataaaaaaaattaaacccatttatttggtttgaacttctaagaattctaattaatggtctgaattaatcaaactgtcaacataaccaattttattaggtccgaccttaaatagtttagtctaaattcattagatgtgaatcatgttaaaaaacattctacatgatgtcattagaaaaagttttgagaaaggttgggatcaatagtgtcacaaagaaagaaaggaacaaaagaatatcatatatttacagggattttattgtaattttttttatttttataaatagtttcttaaaaatctttattaggaaaagttacaaaattcttcaaaagaacttttaattttttttaaaaaataattttttatttaaacgcatttcaaatgattttttttaattctaaaatctaaaagaggttatagaaactaaactatacggggccaaaattgtttccctccacattagtctatacttcctgtttttcatcatattctacccactaaaactatagtgtagaatgagtaacttgttaaacgagaaaagaaatggaagataaccacgatattgttggtaatttttggcaaacaatcggtgagagctcgaaatttctctctctcgcagtaccttaccttactcatagaatcacaattttgaagtaagtccatgccgttctcccatatgtcaaattaaagctaaattacaaattaatataattatctttttaaaactctcaattttatcattgatagacttatttaacgagcattgttattaggcactagtagtactagtattttttcgacagcgattgactagcgatactctctaaaaactattatattaaacaatataaaatttaatacttagttagaccaacaacgatattaacacataagaaagtgctactattggtatactttagcatttctcttatttaacaacattaagatggtgtatttgaatctacaacggaagaaagattaagaagggtgctcaaattattgcattaagatacaagtttcaaaacaaagagtactcaaaatttccgaggttcaacaaagatagatgttcttctcgagggcacggcaaagcatcctgtggtctcttcataagtagacgccttgactccttgatcactggacattagctgcaccatattttcatatgagaaaaaatatatacatatatattgccattaaatatagcaaactctcaaagagtcactcaaaatgctaatgaaatcgtgttttgtggtaagaaaaaatctaatgcccagaccaaaatagcttatcaattctttgtttgaacttctataaattccaataatttaaaattagtattctttactatgactttattttaaagttcatacagttaaattattgttcaaactacttttttatagacaactcaatacgagaactacaagtttcagaatatgatatagcaagtaggcctaaaagcaagggaaaaaaactaatttaggatgtaattcaaaatgtctagctcttaaatggaatttagttgggagaaatgaaaatataaaaatatgaatataaacggaaatgagaataagaatgtaaataagaatagaaattgaatgaaataaaattttaaaatgtataaagaaaattaataaaaaaattattaaattttttcttattatgcataagaatgttttttttttcaattgtaaattaacatagtcactctagtggaaaaaata

SEQ ID NO: 1734 - DNA, 1437 bp, Cannabis sativa
aaaatagttcatttgtatggttatagtcataacgggtaagcatttaggcacccgatgacattgattagttcgtaaagaaacgataggattgcagttcaaaagaataccgtcaattcattttctactctggcaatttctgagagaaggatggtttcctcgataaatggaagcttgtagatggcctggattccaagaaatacaaagtcatcaaattgttagcacaaacttaatctatagagttgccctatatgatactgaaatcaaactaatatctattttaatcaaacataaaaaaaaaaaaatacatgatgattgtagaaatcagtctttttttatttttaaacataagtaatataagcatagttgaagaatttgatcatgacaaaatacaaaatttatcttatactcagatgtagataattcagaattgaacgtacttgccaagaaaaccgtttcccattcatatccagctcaacatctgcagaaaaactattcattttaatgacagaaaatttaacattaaatggaaaacataaagcatagtaaattttagtgacctgttggataaaaagccaacaaaggtgatgatgcatcagtcataagcttcctataagacaccggaagagcatgtgcactgtacatgaacaagagaataaatatcatatgactaatatatgagagcaaaaatgcataacgacgaatacaatcttaaaaaatgaatgaaaaagaaagagagaaaccttgcagcaggaagtacggccatcaactgatcaaatggtttaaagggtaccccaagtgtgaattgaatctttaactcatcaataccaacaaaatctgaagcacatggagcatagtgatagggatagtacctgtagttggacattaaagaagaaaacatgaaacgtgaatgttgtgttactaaaaagtatgaaactttgtgtgaaaaaagattttttgtttcaaggactaaacatcaaagcagatataatttccaaaagtttactcattactcgtgaccggatgactagccctttgtaagaaacacatgatacaagacttaaaaataaggaatgtgtagaaaagctcacataccattgccaggaacagactccttcgtaataataatgcatgacccagcaaatcccttccgtatatttcaacacctacataaaatgaaccagaaattaagaactggactcactacaaacaaatataacacagagcaaaagaatgtgttcacattataagggtttgtagatataaattgaatacggaatcataatatcaagacttcatagcagaaaatcattctaacacaaactacatctgatatgtcacatcaaaagtaggaatttatagccaacccatatacatttgtagctacagagcatagatttttgcagtatagccaaaccattaaacgaaaacaggaactat

SEQ ID NO: 1735 - DNA, 1121 bp, Cannabis sativa
tatttatttatttattttgggctgttgggtatcctataaaaatgcaatttacagcatttcgcaacacaacactgaacttttttttctctctcaaaactcacaaactctctctatcgctttctctcactctctcattcgtacacttgtaagagttattcattcatattcatctgtacaacaactcctcttttttttcccaattgactcattccttttgattgaagaaacaatcccaacatattttccaggaaaaggaaagaaaatataacagaaagttcttggctggcattaaagcagggcagaagtaacagtagtggtagtagagtacagtgaaccccccaaaaaaaaaacacagttactcagtttccttattaactttggtagatagattctcttttctggttctaagctgtatacaccctttgttttccatcctgctcagtcttttaagtcctttctctttttgcctaacaagcccttcaaattagtttttcgatttttgaatcagctttggcctttttaggtaccccttttcacagtttctttttcccttgtctctcttatcgttaaataactcataaggcttcagcttcacgatttcgttagtttcctttttctttcgaatcccttttaattttattcgggtctaaatctttctttcttttcttcttttcgcttgatgagaatctgaagtgaaattttggtatagttatgatggagcagagtatcctatgtccgataaaatgcactgagcaccggagtatcaccaaaaagttaaccagaccctctaagaaatcatcgtcggattcaagtttcgccgttcccagaaccgtacggatatccattaccgacccggatgcgactgattcttccagtgatgaagaaggagagttcttcagtcgtcaaagggtgaagcgatatgtacacgaagttaacatcgagactagctgtaaacccaatcttgtctctaatgttcgaaaaagaccggcggttgaagccggacccacttgccggagacccatcaaaacctctaatacttcttcttcttcttcatctccggttaagaagtttagaggagttcgacaacggccgtggggtaaatgggcggctgagattcgaga

SEQ ID NO: 1736 - DNA, 1522 bp, Cannabis sativa
aaaattataattttataatatttattaagaataaaaataataataaaatagttactcgtataattaaaataaaattatgtaaaataatattaaaatttgatatttgatataattataattattattaaaaataaatggtaaccgcacggaaagagcggttgtttcttattttgcaaatatagcacgtgatgattagctccatagctgcacgaaaacactagatgttgtgtggacccacgacactttgtgtcaaagtcaaaacactcgtgggtttctgtttcacccaattaaattatatatgctatgctaattgtgttcgtgacctcaagttctactttttctcactatttggttagctctttgtatatttttcttcggactaaaaagtcgatattaaacttgatcaccacaacaaactaaaccaacggaaattcaaaaccgtaagcctccagcactaatgtattcatctgaatttcattacatctcttagtttagccattgagctaattccaaactgaagaatatacatatatatatatatatatttataaatacaacacttgttttgtgttcatttcttttttatcttttttggaaaaaaaaaaagaataagagcctgaaacattcttcgtctaaaatgtgagggagcagcatattattaaaagtaggatgttgagcttttctttgtaaggagtaggatgttgagttagattatcataactaatacaaaccgactaatacatatattattatatatattcatttacagaaatatatacttattattactaatatatatttcttcataaaattcccccatgtgtgaccaaataataaaacgcagaccaggttgtgcgttttattgctattctgtccaccacataaataaagaaccagacaaccaatcaaccgaggatccccacatagaaaacgacagcccatcttataatcctaaatcttaattaatcgctaataatctttacagacaaggaacaaagactaattaccctagctaattgacaacctaatcattcaactctgtctaatcaatccaatctttttaataacttttgtcctaatcccacttccttcttggtagctagctagctagcgagtgtatatatatatttatatatatcgtacacatcaaaatgagttattttttttccttattggaatgataattaattgattaatactcttcaagcaacactaatgatgctgtcaccattcggcatagcctggaaattagtgggcggatgttgcggcggtcgttgaggcggcgggggctgcgatttttcatccgtcgatgatgatgaagggccagagagcttcagcgatagatttgagggctctaacgacctgttcaaatttagattagccattttggcagatggcgggggaagtacggccgggtgaagcggaatcggccggattggcattgagatcgctgttttattcccttggctccccgattcgaatgccagtgtactctctcccgagttttctgtagcgattggta

SEQ ID NO: 1737 - DNA, 4639 bp, Cannabis sativa
ggctcatgactggactatgggcctaactgtctaaagcccaaactggaaaaaaccttttttcggggatattttaaaaatacacaaaaaaaattgtaatttagtaactacttacaaatatttaccaaaataatatcactcttaattatgtgatcttaattattgagattaattacttacatatcttgttgtttgtaactttagggtggtttcaatctttattcaaatattatatgtaatgatatgatatttttttatatgtatatttataatattttattttattttagatctacatcatgacacttaaatgtataagtttgtcaatcatttacactataaatgtactaaaaaattcatatacattataaatggttaatattaagaataatttgtagtataaatacttaagtttaatttttatttgtgaataattatctaagtttaatttttaacactaataataaataaaatatatttctaaaactttgtaagtatttgaccgttaaatattaaattattatttaggtattatttttttattggtatgtctaaacaattttttaaaaaataaaataaaaatttcatgatttagactaatcaaaaattaccacataataatttattaacacttaaaaattaaatttagataaatttaaatattaattatgtcagaaattattctaaattaatataattgtcaaagcaagtcatcatcatgtgactcaactaatgagatagataaccacatgcattaatgctataattgccacgttatgaaaatacaagggcaaaagcgtcataaaattttaattttatatatttttctggacaaaataatttcatattaatcaagttacagttttttgtctgaaacttaaaacataattatccatttttgttctcaaattcaccaaaaaaaaaaaaaatccatgtacggtgccttctccggcgaagaagctatggtttcgttctcaaattcattcaaaaatcctaaattctctatattccctcactccagttggttcttccggcaaaatttaagtttattccccaaattccatcaaaaaaccctaaattaattttcttccggtgtaccagttgggtccttcgcctgagatattgttgctttctcaaattctcacaaaagccctaaattatcgatcttctgctgctcaatttgggttctccgcccaaccccgcttcgccggttcattggcatcaggtactgttgttgggtacttatttttttcatttctgtgtatgttttaattagaaattttagttaatgtagaaatggttaagattcttgtgcgtatgtaggaaaattgaagtttaattttgttgaatttatttcttatagcaattataagataatctttgttttcaagattatgaacttttttttgcttgtaaaccaatttagaaaaaattcagtagattacggtgaatttggttggattttgctaggttgcagttcattcattatatgtttgactttattgactaatagtgtccaaaattctattttagggtgtattggaagttcttgtgaaattgaaccctttagggttggtgaattgggtctttgatcaagaagtttgataggagttggtattcaagagtttcaattaagacatttgacagacttgagtgtttataagaactttctctggttgtgaatgatggattgttgattatgtcgacttgtgataactttttttgttttcaacatccgaatttgaagttcaaccttggatagagttagaggaataaagggatttgaatatatatattttggcgggaaaatttgcatggcaggaaagggtgtgttaagttttccaagatctaatgctttggaagttcctaaggtgtgtaatctgaaggaccaagcaaaaagaacgattcttcgtaatgtgagatcgcaagggcacacgtatgttgaacttcgtgaagatggaaagaagttcattttcttctgtactttgtgtttagctccttgtcacagtgattctgtactgtttgatcacttgaagggtaatcttcataatgagaggttgtctactgctaaggctactctcttgagaccaaacccgtggccgtttaatgatggtgttgttttctttgataattcgatcgagaaaggagaacagatgacaattacaaatggaaatggaaaccaaaataggttgttggagtctcaagacaatggggaatgtctagctatagttagttatgatgaaaatacagaaaaccttgctaataagaaatctaggaatgatcattttgtacatcaaaatgaggatctagattatgcagtcattgattcagatgttaacttgaattcctcttcagagaatctgactgaatctggggataattgtgcagtttcaatcccttgtgttcgagttggaaatgaaattacaaatgtaaaagtgagggaagtgggttacggactagttgctgcaagatttcaggagacgggtagcatgtcagaggagctaaccaggatatggtgcgagtggttgggaaaaaataatatagtgaacgagggttcattcattgttcctgagcatgactttgctattgttacctttagttataacaatttaaatttaggtagaatgggttttcttgatgaggtaagagcattgctctgctcgagtccgtcatccgaaagtcaaaatgctgaaggcagtaaaaaaaggaaatcattttctgatcctgaggatgttagtgataatgtgagtaatcattatgattcaggcggggaagattcttcagcttctgcagtatcaagtttaatgttagatgatcagcttctgcaaactagatttatttcaaacaaggctgtaaggcgagaattgaggcgacaacgacgcttagcttctgaaagaatgtgtgatatttgccaacataagatgcttcctggaaaagatgtagcaacactcatgaatgtgaagactggaaggcttgcttgcagtagtcgaaacgtgaatggggtaagtctacttaccaaacaactcatatatgtttctttctagtcatcactataattacttcttctactatgcatttgttattactggtaggatctgttgagtctgtttggacttggatttcattgagagaaagaacataaaccattttcttgtgattagacttgataaaacatgagggataaacattgtggaaggaaaatgtaatgtgttttgggagtttttagaatcaccacacattgatgggaaagatacatatttcaacaggaaattttatggttctttaggaaaatagcttcctcattctttcaacttttcatttgcccttaacttttttatatcaccaaaatctaggtctcaagtggagccgagtttttttcaaagtcagctattttcttattttggtttgacttatatgcatgcaggccttccatttatttcatacttcctgcctcatacattgggttcttctatgtgaacttgaaatgctcacaaatcagccagatagtgtaaaagttaaacggagatctcggagaaaaactgcagctaagaacaacgaaatacaaaacgatggtgatatgaaagctctaaggcctcaaattcattctgtattctgtccggagtgccaggggactggagcgctcatcgataaccatgatgagaaaccaacagttcctctttcaaaggtttgtagtttgtacaccttccatctattaatatccgccttactctgatataaataatcaaaaaccgaaaatctaggtgggaaagaattttttttgtttgactcttaagatgatgatctttactttcagatgttcaagtacaagataaaagtgagcgatgcacgccgagcatggatgaagagtcccgaagtattgaaaaactgctcaacagggtttcatttcccatctcaatctgaagaaaagctacaggtctttctcaatatccttagcaatatttcctttcgaaatgaaagctagtgctagtagtactcattgttatttatacttcttcctcttctcttgatcatcataggaaaaggtgaaacaactgaagttgctgcgtttctatggagctcattactagagtaatcgaaactgtataagctattgtggataagtaagtacaatgggatattgtagatatacctgttgagtgttactgttgtctagtctaacacaggtgtacatgctgacatcatcatcatctgcattgtaaattgaatttaacatctacaactctttccaatgcatatatgtgtattttataattgtgcattctttctcttttactttacactttgttatttgttatgtgagatatttgattattttggtagttaaaaaaaatagcatagatacagactctggtgtacatgtatgtatctatcaaagacaagtttgcttatcatttgggggaagaagaaattatgaagactacttgcttttccttctttttcattcacaataaataatcagtaactttgatttatttttcattggaataagttttgctttcacatgtaaagagtttatatttgtgtggtgaacatattgtctgtgatttgtatagctttcaaatacacaatccaatctcaaatttcaaacctactttaaagattataaatttgctattaatat

SEQ ID NO: 1738 - DNA, 1667 bp, Cannabis sativa
tttcggtgcctcacggttctcatgtgtgtgccaaaactttaacatgctacttgaaatataataatttctaaagtgacacgtgtctgttgtagctcgcattgcagaatatgtgaagtgatgttttaaaggtctaaggttcaaaaccttccaatatctagttattgctttgtctacattctttctttttacctttaactagtttgacaaggattctccatagtcttgacgtcacacatttttgaaggagaaatgaagattatgtgaaagacttatccagtaatttgcaggtaacatgccttctctatgggaagactttgatctagtagcaaagaaaagaagaaggtttccttattttagtgtgttttttatgttacttcatttcctcaacgtttacaacttatatattaatttttctattgtattcatatatgaattctatgtttgtgcttgtttttcagaagttgctgaaagtatagtgagtaccaaattacgtgtattgttatatggttgttgatacattagattaagaaaagaaatttctttctaaaggtgaacattcattcattcattttgtctacaagatccataagctagtttggcataatgcaaaaaaaaaaaaattccaaatatatctaaactccttaagctgggtccaatcagtgggtatcttcttgaaaaaatgaagcatcaacgtgtcttctttacgttgttttgtgtatgtatgagtagtaaagactgtaaaattatacaaatatgtactagtattggtagaattattttgtattctctaaaatacaactaattacttcatcaccatattcactcaatacctttaacgtattagtgttggtagagttagtttgtacttcgtaacctctttactatattcactcagtaccttaacgtactagtttggatagggttagttcataacacatgcatacaacatgtataaaaatatatgtgtcatttatatagtaatcttacctcactttcataatcaggtgtgccaaccaacttgagtggaactaccgctcaacgattctgaggccctactcgctaactcacttttggagaagtaaacttaaaccaaaaattttcctattaataaatagcgtggtaataccctaaatatcgaggaaacactaaaatcgaaacacccaaaaaacaccccaactagtgaactgaatccccaaacagtccaccatttcttagggtcttgcctggggaaacagttcattatttctacaaaaggagtgaaccgtttcgtagcagaaaaacccaaaacttgaattttctaattcaattctacctcaaaacttacctcaaaataagatcccaaaacagcttctaaacaattcaaatgatccttacagaaataaaacaccaaaaccaaacttaaaaaccaagcttaacctcaaaatttcaaaagagaaaaactagagctttactttggtcttcctcccaattcacacttgaaaacctagctaaaatccccctgaaacttttggaaattttaccgcaattaactcaagccattactgtagtttgtaataaattttcacaataaattttcacaaccatttattcctttgttgcagctcgctcactacacacaagacttcataacaaaataaacgttgtggaagatgtttgagtgagctact

SEQ ID NO: 1739 - DNA, 1180 bp, Cannabis sativa
gtgtttgaaaatatataactgtcactggctgattcaggttgcaccaaaggtagatgtcctcaacactcttaggcggtcgatatccgtaataggctcttcgagtacccatttggggatcagctgggcaggcttccatttttagactactctaggtacgggagagccattatgtctttcacatcttgaaagctaagataaaagcatagtggacttttacttatcatgccttaacttgttcccggttccgagaggcttctccgtaataggattataatggaggattttaattagcgaaattatgaagttaatctctccttttatatgtcatgtgtcacatgttcagaaacacagagataataacttgtatgtcttttcatttgcctatgttggctttttgtaaattttgtcttaattattttatttaattttagtatacttcttattcttttcccttacaaatctatttttatttcttttttctatcttgtgtgttagcacttagtaataaaatataaagtatattttctaaaaaaatacacaattattttttaacaaaaataaataaataaaatatagcactatttccgtttgttcttttttattatttatttcactaatatttactattataaatgatatataaatagattcgaaatttttgaaagaattgtaaacattaaaaccataaaaaatataaatagtatatttataatatttgattaaattattataaattatatacaaaattataaaataatacaagatgttaaatactaaatgaaattttttatttcttatatgttaaggtaccgtttggtaatacttttattttttaattttttaatcagaaaaatgaaaataaaattttttgtttttaaaatttttatttttcaaaaacaaaaatacgttttatagccacttttattttttcaattttaaaaatagaaaacaaaagtgttaactgtaaagtttattttcatatttattttttaattttatttaagtcgggtctaggtcgggggtcgaatctgggtctaggtctggggtcgagttcgggtctaggtcaggagtcgagttcagtgctagggttgggcaaggttcggtccagtccgggtctagtcgaagtctaaaatattaatttaagaaaactgtttaaaaaattattgaaattttctttatt

SEQ ID NO: 1740 - DNA, 1475 bp, Cannabis sativa
  modified_base (724)..(725): a, c, t, g, unknown or other
actcatcggtggaagactcgatcatgttcccgacgatagcttcgaggacgagaaaggtagagcttgccaacgacgacgttctggggattcaacgattatatggctctaatcctaattacgtcactcctccttcgactccatctagaccgtccgttcatcagagtgatacatccaacggtggggactatagtttgggttctggtttacggtgggacccatttaagttcttcttgggcgttggattagcattgattttatcatagatttgtagatattatactttttaatgatatttttaatttatttatttttattatttatggttgccttctgcggttgtattcatcggctgagaccggcaaccatacttgatactattactatatacacacgacccacctatcatctcgtttttccttctaattatttaggttcattcgtcattataggcattaattttatcctttatttattcttcagtcttcacattttaattaatatatgtgttgtattcttttcaatcctttatgttcgtagacttttcagcagaagttacatcaaatttaaaagagtattgttactgcttggtaggggtggatatcccattacaattgaattagattggaggttaaaaattgaattctaattggattagatcagttattgaaatctcaaaatctaattataaacccatacaatccaattacatttatatatattaaannattatttatatttatttatataataaaaaaatataatatatattgagtatatttttattggattttatttttgtattaaatttataacagtatagttgttttgtgtatttattttcatggttttattttattacttagaattgttgttattttaattagttgaaacttttagttgcgttacattgtaatgatggcatgtttatagagtattaaacttaaataaaaggtaatagttaatttttacgtatttttcttcatatttttatgttaatattaaaatttagatgtgtattaaatatccaattaaaaaatcaattcaattcaattagtaattggattggattttgaggtctaattggattggatcggataatgatttttcaaatccaattactaattggattggattgggtgaggaaaaaaaagttgaattggatcggatgcccacccctactgtctagcattactttgaggtagtgctttatgattagtgatattttaacttgagaataagaacaagaaagaaaatcttagtattgagttcattaatcttccaaaggatacagtgagtgttatttatagagttagacatgagaacaagatcaaaaacaccataaactaactctaacaaactgacataacaaaaaaccaaaaataataaaatataacaaccactaacaactaattacaactaatcaagtgtatcctcaacattccccctcgagctggaaagagggtactctaatgata

SEQ ID NO: 1741 - DNA, 688 bp, Cannabis sativa
aaaaataagagaaggcttagaagtaaataccacactattatcatgcagaaaaaccttgaaagaaggagaatcagaccctagaacacgtgcctcattattcacttcaaagagaccctcaacataaacatgtaattaagacccgcccaattgcttttcacaaaccacctaattggtcccactaatcttaagagcttgaatacctatatccaaagaagtggtgacttgaatattttgagaaacaagatcatcattagaaatagaatcaacattaactttctttatttatgctccccaacttttgctataggaaattgggtaaccctcagaaggggccaccaaattttctacaacctttcattttgatgaattatgatttctcaaatcacattttccatttaataacaccttcatcggaggtctcttttttcttccatgttggagtaccaacgaccttaggaatgcatgccatagtagtactttcatgaacagaaccaaactaaacacattaatgcttagaccgagcaagaaacttttgaggagtagccttgatccaatctccatatttcatctgacttttaccattaatgataaagaatttagctctacattcacgtaatggatgaccaataataccagttatagcacaattcaggaaaatgttcaaacttatgatccaccgaattcttag

SEQ ID NO: 1742 - DNA, 1048 bp, Cannabis sativa
ccaaagattttatttttcgaaaatgtaatttatttttgggatttgactacaatgcagctctgttttagtgttgttgttattgtattattattattattattattattttttaatttgatgggtttagtgattgtaataaattaatttaattagatattattggcacatggataagaaagatgaaactgctatacccatttttattttgtgaagctttcttttcatttgtttttttttttcttaaaaaataaatgacaaacaatatgttgagtttgagtttgatgattatgtataattttgtgtagtttaattttatgttattttcttttatcgaaaacaacgttgtttgttttgggacttgacaaataaaacgacaattttccttaaaaacgacatcttcttgaatagtattatatataaaaaacggtaaccatttaaaaacgacaatattattaaaaacgacattttattagaaaaacgacaatttctttcaaaaaaaagttgcccattaaattatctttataatatgataatacagtttttttttaatacttgattaatgcaatgaaatcttcttgttgttgttttttttttctcttctttctagacagacatatatgcctttatacaatttataatctgtttctgtataaaattgatatgttgttttcaatatatttttttgcatggttggtaatttgccaatggagctgtccactgccaataactctgtttttattctaaaatttttgaaattgacacacacatcaattccaatgacaatacctaataaagttgtttgtcatttcagaaatgttaaaatgcagtgtctaacttatttctcgttgtcatattattattggtataattagtaacaaaattcatgtaataatttttaaggaatatcgctaattaatcgtaaaaagacacatatagaaaagttaaatactagtgatgcgtcaatgatgttgttattttagtagggctatgtggggtcacaaaatgatatttttatgccacttatttacagttgtcaatgctaacttat

SEQ ID NO: 1743 - DNA, 3918 bp, Cannabis sativa
ttattgttgatactaaaaacaaaagtaagtaatatttaagtaaaaaacttgatcggccaatttaagtcaataaacaatcttttttttcttctttataatcttctcttctccgaaatagtggcgtctataactcttactctgttacaattcccacttcccattaaattcttcagataaaaacacacatttcaatctcatcaactaaattactcaactttctcataaactctctctgtctctttttgacttttatttagcttgttctgtcaactgaagctttcactctctttccactagggacttgtcttgtctatacttgtactctctatttcattgggtcttatttgactaatcaaaacttgcccatttgaaaaaacagcttctttaacaaccccttttgagaaaaagctctgaactttgctctaatggaggaaacccaagaaattgtactgacccagatgaggaaatcggttgagaagcttggttcttctactgaggtaattaaaaatcaaacctttttcataaccccactactcatattgtctgattactaagaaagttatattttttgggcagaagcatggtgattcaacactgatgagattcttaatagcaaggtcaatggacccagataaagctgcaaatatgtttgttcagtggcaaaaatggagggcttctcttgttccaaatggtttcatttctgactctgaagtatcagatgagttagcagccaaaaagatttatttgcagagcttatcaaataagggatttccagtgatgattgttaaagggagcaagcattttccttcaaaagaccaacttcaattcaaaagtaattctccttttttattcattattacttttattgctaaaaacatctctacaaaccattttcctaagttgatcaggataatcctttgagggtttgtttcaaatcaacaatgcatttttttaggagcattacaattcattagcggtttaaaatgtgtgggacctgatattgaaatgcatcaacagcggtatgtctcttgtagtattagacaccttagcatttctaatcagtaggaccattcttgaatgtaccaacatgagaagaggaaatttaggtgtcagactttattactgtgactgacacctaaccatatggaccccattatattgtttcttaataatgtattggatgacctttcacattattagaaagaatttgggttgttttcatttggactattctaacttctgtgaataaattattgaaaggcagttaaatatgagtgaagtgaatcttcatagaggtcagttcatttgatctcatttgtctttttatatcagcaactttgcccaaaccacatatagtttaaatacaattaatgcttgttgtattgagagatcaggaataaggttccaacaacagcagcattttctttttctttccattttaagtagaaaggaaaagctaatttgattctctagtggtggtcctaaagatgatctttatagcaccggccaccaccgaaaaacatgagcagaacagcaagcattcattgttgctttctgtctcgaattaaatgtacttgaattaataacaaacatctcttttacatcatcgattaacaactaaatttcctttgtttcccatgcagaatttgtggtccacatccttgacaaaacaattgccaggtagtacttggttttttttcagtgatggggctaatgacattcttagcttaaggagctactttgctaattttgttttctgtcaaaacttttgaaatatgtatataaattatggaaattgttaagggtcacaattttgcaaaattgtgttttatagtagaaagagttgcataggacagaacatagtagtgaaagagagtttttggagtatttcgatcccgttactaaaataaggcaaaaacaattaagaattggattattgtttgatttggttgttcattctgcttcagttcttttaaaggaagagagatcgggaatgaaaagttgatcggcgttcttgatctgaaaaacatctcatacaagaacatagatgcgcgtgcactgatcacaggttttcagtttctacaggtgaactctcttatattttgaattcaacagagttgtatgtaggcatttgttggataagaacatgcatggcacaaaactgaagaaacaaaacggttattagttacttatttgttaaactactttgaacccgagaattctaccacacacagacccaacaacttgagctcgatttcaaactactttgaaccagagaatgcttgcctggctttaattcacaccctcagaattttccgtcgtgtcactcaaagattttgtcacatagttgaaaagcctcatgaattttgttgaagcaattgtaggattaaccaatattgagtgaattttcatgcctttcatatctaaaacaatttaattttgaactaatttattcttttgttgaagatggtttcatctttcatggtcgtttttttttttcctttctttgcaattgaattcctgattatcaaggttttggttcagtttagattaaagttcaccatttctatattgtggttaactatgatgcaaataattgtaaccatttgtgtacctacttaacctgcagtcttactaccccgaacgtctggcaaagtgcttccttttaaacatgccttggttctttgtaagcgtttggaggctggtttcgcgcttccttgagaaggcaactctagataaggtatacttattaactactacactacttcatgtgaatctatgataggataaaaactcatgaaatggtgcattgcaaatacctatgcatcaaatttgcaattcaatgaattgaagtaccatgcttaagaagccatataatcgagcttgatcaattcactatcgaacattggacattagtcactttatgttgccaatttctcaggagagcccacattatgaacaagtgtctgtttactcaggggcgaagctatgttgagcctagttagggcggtcacctcaccttaaaagtttagggcctttctcaattacttggagcctaagtcttagtgaatttttgggtttctatacaaatatatttatggtaaattaacaattaatgtagtaagttggtgtagggataaaggcttcttagagtataagagttcacaagttcaaatctcaatagtttcacttttatttttaaaatgaaaaattaaatatcattattgtgattcaaactgatagaatatcattactaatacaaagaatatatgggccatacactctaattaaccaaactataaatatttgttacttaaaatacacttacttttttacttaaataaaagcttaatgtggctttttattttttttttattttgggccctaggcacggatctagcctgcttatgcataaggtcggccctacactgatattctcatagttgcctaacttgatttatgtgatcaacaagttgtttagacaaaacaaagtttcatagtatttggtgggattttgaaatgcagattgtgattgtgaccaacaacgaggaaagaagagctttcgtagaagaagttggagaagaaaccttgccagaagagtatggcggacgagcaaaactaagagcgatccaagaggtcgaattggcaccattggaggattaatgaatgtgaaaaatagccaaaggtttggcctaactgctatcaaatggttaggtgttaatgataaaaatattgctgagatagcatagcagtttgttccaagctattttcttccacaagagttaattatgatatgattatgattaatataatctatacaatgttatgtaaataaatgccttcctatttatatatttttggctagtgtaagtgactcttcttcttagttgaacaaacacttagtgtatgtttggtaga

SEQ ID NO: 1744 - DNA, 3784 bp, Cannabis sativa
gtaacaaactatataaatatataacatattattattgagtattaggagagtcgtgttcaacattttttatagatggtatttcacgattgattagtaatattctttaaaagttattttcttaaattatatgaaactcgatacttaattacactaataacaatatgacaccgaaaaaagtactagacaccaatagtattattttttagtaattctcaaatatataggagttaattataaaaaaaaatatataaatattgagggcactaaactaaagggaaaaagatattagtggtcactaactatatatctaatatctatctatagtcatttaattttatattagtgtaattaagtattgagttcacataatttaatttaatttatacatagaatatcgctaatcatttataagacactgtctctaggtggaatggtgcctaatatcgatatgacgcgccatttttgtatttttaatatctgaatagttataattgatctctctcatttttttatataataatatatattgtatttatttaaaaaattctataaattttttgaaaaaattaaaataatttagaatacaaaaagtgggtttaatctatctattttacaagtgtataaaataaaatagacactcctataataaattgtttaaaccttatttttgatgtgttaaattattgtatttttttaaataataaaatagaatgtcatcatataaaaagaaaattagtagagtacacttatttttagggtatgcaccaaaagaaaattgggggacttttgctttgtaacaaagggtagtgcttggctctttgcttcataatttataaatcacatatttattattatttattaataatttctatatataaaaaagacagatctactatagcacgtatatgaaacttaaccctaaatcatatataatattattactacatttaaacattaaacaagtatgtagagatatgaatattttatatttaaattcctattaattggtcttggatcccaaaaaaagacatggttggtttgcttaggttgaaagagttatttatttaagaatctatttttttttacaccatttaagaatctaaattgtttaataattaattgacaaagtaatataatagtaagtgggcgagcatatctaagatagatcttgctttttagtataaatatatttaggaagtgttagaagttatttagattaagagaatatgaaaggttaactttgatattaattaaactttagttggacttatttgaatatacaaactttttggtggttaaaatttaatttacaaaacatgtttgaattgataatccatgttagacttagtaggaccactaagtctaacatcatagcaaatattctttgtgtatattgtttatacttatgtacaaaataggggatgattattttatgatgcaattattaggacgtaatctttgagacaatgtcaaacttcaatataataatttttagttttgtttcgtttaattgataattcgtttgtaaaataactgagcaatggactaaatcaggacttaacacaatcaagatcaatattgatgccgctttgtttgagaaagaaagctcttatgagtttgggattgttgctagggactcctctagtgccttgttggaggctgtagttgtgtgtaatgaaggttcatatgctattgaggtagttgaagccatagggatttaaggaggctctcagctggatcaaaaataagaattgagataaagtggaaattgaaactgatagcatgctcactgtttaggccattcgtagcaatcaacatatgtcctctattttcgggttggttgttaatggttgcaaactattactttcttctctctctaatgttaccttgtcttttattagacgactaacaaactgagttgcccactatgttgctaggcactctagatttttatctggttgtagcattcatgttcataatgttccgcctgatttacaaggcctattatactttgagtgctaaatttcaatgaagttactattttatttcaaaaaaagggttaagcaaatactacaaatttaccaataagctcatagtgtaatattttgcgtttgttttgactttttttttttaattaagctttagatttgttgctattctttgtgttacttagtttaagtgaactatattcattcacaacaagatggacttcatcgaggccaagaatgaactaattattaaatcttgggtggaattttttttttacctatttctcttagtaatctattattaaatattttctctgcaaacggatattatattttatattcccaacttagatgaaataagagaaataaacatctacattgtggtgtttatgagaaaatttgttaaggtgatatggccaatgtggtcttgtaaagcctcaagcaaattcgtgctcaaatcaaaccttgatgcttgaaatttcaagtaatgattttattagaacaacacttattatagattcttaactatggttattacactgtttaagtcgcgcaagccattgaacatcgcctccacctctattgaaattatgtgatgattatctcagagctctattgattcaggtccttcttaggttctacatcgtgcttgtaaaactttgtatagtaggccgtataaagatcatattatattaaaataaaaataaatactttattttgataaaattttgtattgtattaattattacgaccataaattttaacataataagcttgtattataatatttagaaataattcgacatcaaggtccaagatcgggggcagaggtttggggtcggaagtccaaggcctgaatcgtggtcctagtttgttgcacataaattatgaaagattattaatccatgtttactcatattaaatccaataataaacattattaaatttagtgtctaatacaacaatgaatttcatttcacttatctcacttttgctcatgacaatgaaattttacatagtcaaatttccaactcacttgaaatatattctaaataaggatgaatgaactaagagataatcctagcatgatcttgtaaccaaaacttgctcgatgctaaactcgtttcactgcctcatagagcagcgggaactcgcgattctacagatttcaatacctcttcgcccatttctttgcatccaaccagtttctgtgtaaacaaatagtaacaattaacgagtatttactacaacttataccgacaacaatcaaatatcgaacataattactcactgttccagatgaataaatatcacccgttcgaaaacccctatcgagtgtgtcaagaacagcggcctcgattctctttgcagcctcttcttctcctagaccgtacctcaaaagcattgcagcacttagcacggtcgctaatgggttcgccttatcctagaaaagaatcaatcgtgttacagattataagacatgttaacttcaagaggctaaagtaaactaacctgtccagcaatatcgggagctgaaccgtgtataggttcaaaaagaccgggtccctgtattcatgaagagtttcgatgaattaaaacttcctcgtagatcaaaaaccttgaacaaagtgaaaaaaattgactctttaccgattccccaagactagcggatggaagcatcccaatacttccggtaatcattgaagcctcatcagatagaatatcaccaaatatgttgtttgtcaccattgtatcgaactgcaattaaaccatagcaaaacatcacatatgtaaac

SEQ ID NO: 1745 - DNA, 1868 bp, Cannabis sativa
ttttgaggcacaggcaagttttaacgtggagtcttttaattattcaatactatttattaaggggacatactattggtgcaaactaatatagccaatctcctttaagatctctaatgatagaattctatgcatctaaaatcacaccttattaagttataacataatattagagtcaaattagaaatgtctgttgtctctttttaacttctatttgagaattttcggcaaatgtgtgttcgtttgagatttttaacctatttcaaaaagccacaaatttaccctacaaattttctaatttggttttatgagattctttcaaatatcacatcgacattgtagttttttaaagatcgttcgttatacttatattttctaagtccaacgtgaagaaagtgtattagagttagtcttacattcctaatgtttagaaataaaataccacatataagataaactaatcttgtgattgtccattctaaattctatatgtatatactaaaaaatagaattgatttttgtacaggttgctgattttggcctagccaagccatcaaatgacactcacacccatgtatccactagagttatggggacatttgggtaattaacaagtttcataatttggttcaatatcagtttccaattaactgggccagtttttttaatgttgaatttgaattggggttggggtgtgggtgtgtgtaataggtatatggcaccagagtatgcatcaagtggaaaattaacagatagatcagatgtgttctcatttggagtggtgcttttagagcttattacaggtcgtaaacctgttgacccaactcaaccccttggggatgagagtttggtggaatgggtacgtaacaattaagataagataaaatttgtattggttaataatatgtactgttaacatgttaatatatgcatatataggctcgtccactgctgattgaagcccttcaaagtggtgacttgagtgaattagtggatcctaggcttgaaaggcattatgttgagagtgaaatgatcagaatggttggggcagccgctgcctgtgttcgccattctgccccaaaacgacctcgtatggcccaggtacctaatattaaacaatctctcattttccatcttatattatatattttagtttatatgcatagacataactttttaacttcggtagagggtattttatatactacaattttttagaagtttcttttgtattttgggaattataaattattaagaaaaaaaattgtagaatattttaaatagttatacaatgtttataaaatatatatagtgtaaatatctacaccaaatcaagaacaacacatcaacaagaatattagaatcaaaacttaaacaaaacagtaataaaaattgcaaaccaggattactaaaaacagagtttttgtgtctaatccaaggggaagaacaaccacaacaatggcttagaattttttaattgaatctccaagagaaatgttacaactcgagcttcaagaagcttattagcttcacagattacaaaacagctcatttgatgagaggcaatcatttaacaaattgctctctttaacatcctccttctaattcttgttagaaaattgactttgtcaacaattttatttgaatgaaatttaagtgggtcatttgtaccccattgtttgtggggtaaaaatgatcaaaaccaaatgctatttatatagcctaagaccacctatacaaacttacattaattattatggttggactgaatatttttaattatattataaaatttatgaaataaattagacttttttttattaatacttcttagaaaaaaaaaaatctgctttcaagcttcaagacgaatt

SEQ ID NO: 1746 - DNA, 2061 bp, Cannabis sativa
gcaccggccggccaccaccgaaaatcatgaacaaaatagcaagattccgctaatttcctttcgtttcctttcgttttttttttatgcagaatttgtggtccaccttcttgacaaatcaattgcaaggtaatatttggctttgctaagtgacaacaagaatttatgtggcttagttaatatttttagttcttttcaaattttagtttacatttaaattgtaccttaatttataagtaaaattcaaaggagaaaacaattgagggagtgcctctatcatagattatatgaaaaaaaaaaggtttgtttcagagttgttggtgtggtgtagtcatagttcatagtaacaagggtagcaaatgaaagaggatgagtcataacaaacatgtcagtgtcgtgttcgtgccaaattttatttgagctgcttttatattttgtgtcaggcatgtcgatttgtttttgatttgagtctaattttatcaaccctaacccaacctgtaaaaaatcgtgtcatgttagtgttgaatattattgaatatagatttaggttccttcaattgagccttgttatgtttcttgaacctgaaaacaagagttgctattaggaattggagtaagtatagtctgattcggttgttcattatgcttcagttcttttaaaggaagagagattgggaatgaaaagttgattggcgttcttgatttgaaaaacatctcatacaagaacgtcgatgctcgtggaatgatcacaggatttcagtttttacaggtgatcactctcttatattttgatttcactgagttgtaattaggcatggattggaagagaacatgcattgcagtgacacaattgaaaacaaaacagttaggtggtgtttggttggagttaataaaatagaatggaatggaaacgaaataattttcactccattcatttgtttcggtggaatgattattctattttgaaataaaaggaaaaactattctaatgcaaaatgagaataatttttttatgcgttttaaatttaattatattctattcttattcttatattttcattctttctaactaaacgccatgttagtagttactcattttgttaaaatagtctagcgagttttgaatccgagacactttacacacacccaactacttgagctagactttaagttgcataatatataattgggtgttcatgttcatgctattcaattagcttcttcctctgttttatactttatgcaatgatataacagatttttagctgctgtgtttcgaactccttcggttgttgaaatttctcatgaattttcttgaagcaactgtgggattaacaaattttccttttaactaaatttttctacaatagaattctttgtagctaaggtttgaccatttcctatattgagcttatggttgaaatttttggaggttccattatgatcttctttaactctatattagtaaaagtgatatgtaattataatgtaataataatcaccatttgtgtaggcttactacccggaacgtttggcgaagtgcttcattttaaacatgccttggttctttgtaagcgtttggaggctgatttcgcgatttcttgataaggcaactctagaaaaggtatatttatcaacttcactcgttactaagtgattttgaaatgaaacccgatgattcttgtgaaagcccatcaaatggtgcattgcaagtacacgtgcctcgaatatgagaatctaactataacaattcattgttcgagagcttgattgacaaattacttcaaccttggacactggttattgccaatttttttaggacacaccatattatgaacaagtttttctatgaaaaccctaaaatattcattatggtaagttaaccattaaaaatccaatttatttgggacttcacagttaagaactttccattttctttgtgaataagatatgtaagcctttctatgcaccatttctcattggttctcaaatctcacttatgttatatgcgaaaaaagaaaagggttgtttattcaaaaagaagtttcatagtatttggcgggg

SEQ ID NO: 1747 - DNA, 4814 bp, Cannabis sativa
tgttagacctggtattgtatcgtgacatgaagagaaaggaagaagatgaaacagagaagagaaaggagaagaaagagagagaaagattgagctgaaagaatagctatcttgcaatagagagtgttacagagtttatatacaagctacaacagtcaagaaacagttggaactaacctaaccaactgtgtaacaaactaataacaaactctaactgaattaacaaactatcctcctttacactcccccccaaacttggaattggtgcatacatcaagaccaagtttgttacagaaaacagcaaatcgagagctagacaaagctttagtgaaaccatcagcaatctgatctagtgcagggacatggttaacacgaaccagttgctgtgatatcttctctcggacaaagtacaaatctaactcaatgtgcttcgttcgggcatgaagaacaggattagctgtcaataaaacagtactcagattgtcacaccataaaactggtgtgcgagccaatggaacacgaagttctgtaaacagagagttgagccatgtaagttcagagacagcctgtgcaacacttcggtattcagcttcagtgcttgaccgagatacagtatgttgtttcttacactgccaagcaaccaaatttgatccaaaaaagatggaaaaaccagatgtagaacgcctatcgtcagggtcactagcccaatcagcatcactgaatgcagaaatttcaagttcagtcactggtttaaagagcataccatgttggacagtgccacttaaatatcgcaggatgcgtttaacagcattccagtgagaagaaagaggattggccatatattgacaaactttattgacactgtaagagatctctggccgtgtaattgtcaaatactgtagagcaccaacaattgaacgatacaactggggatcggcaacaggttctccttcataggcagatagtttttgagtgctgatcataggtgttgggactggttttgctccctccatttgagctcgagacagtaggtccttgatatattttccctgagacaagtgaagtcctgcagtagtggtttgcacctcaataccaagaaaataatgaagattaccaagatgtttaagggagaattttgagtgcagatcctctattaatgttgagataagttcggagtcactacccgtgatgattatgtcatcaacataaaccaaaataagagtgacagaggatgaagtatgcttgatgaaaaggctatgatcagactttgatgaacagaaaccaagtgagtcaagacaatgatgcagcttctcaaaccatgcacgaggggcttgcttaagaccatagagtgctttgtgaagtttgcatactaaatgaggagcattagcaagttcaaagcccgggggttgagtcatgtatacttcctcctttaactcaccatttaaaaatgcattattaacatctaattgttgaatagaccattgatgagttaaagcaagagaaagtaccacacgaattgtaaccggttttacaacaggactaaatgtctcagtaaaatcaaatccagcttgttggtggaaccccttagccactaatcgagccttgttgcggttaactgtgccatctgcatttaacttctccttatatacccacttgcaaccaatgggagtccttccaggaggtaagggaacatatgtccaagttccatttcttttcagtgccaccatttcttcaaacattgcattacaccatttttcttctttaagagcagatttgacatttgtgggctcttgagaaaccaatagaactttacgcttgtgaatacccgattttgctctagtttgcatactatgattgttgagtaaagaaccaggtacagcaggcagtacagatgagccactggtgggaacagtgggagtaggagtactggactggtgtagagtacaggagggtgttgttgactgagagttgggatctgtggtaacagggttagattctgtattagaaagaaggactcctgaaggaatggctggctgagatgttatctcagtagtagaacatggtacattgttggccaaaccagaaagtggaattgctggtgcatcaggaacagatgttccagcaggtgcagatggagaggagaaaagtgtttcaaccgagtagttaataggagcaataggtatagcactagaggaataagtgtcagagatgatagagttggtatttgtagagaatgtagcataagggaattggaattcatcaaatattacatctctagaaatatacaagcgaccatttgaatctagacacttataacctttatgatttagactatatcccaaaaatgtgcaaggtgaggatctaaagtctagcttgtggcgattataaggcctaatgttgggacaacataggcagccaaacactttaagggtagtgtagacaggtttggttttgaacaatatttcaattggtgagatttggttaagaataggggtaggcaaccgattatgtaagtagactgcacatcgaaaagcctcatcccaaaattgtaatggcatagaggcttgagcaagtaaactcaatccatgttcaactatttgcctatgttttctttccaccaagccattttgctcatgagtggttggacaaggatgtctatgaataataccaacttgtctaagtggttcagtaaatgtcctatattccccaccccaatcggattgaaacactttgattttctttcctaattgtaactcagtttctgttttgaatgcaagaaaggtttttaaagcctcagacttatttttcagtaaataaatccaagtgaaacggctataggcatctacaaaactcatgtaatatttgtatccattataggataatgtatgagaaggaccccatagatccgagacaatgagttgcaaaggttcagaatacattgtattggaaacttttggaaagggcattttatgtattttgcctaagcaacaagcttgacatacactattggaggttttattacatgaaatattacaagagtttaatacagatgtgaccaccttgtgtgaagggtggccaagtctgttatgccacaaatcaaaagttgaaacagaagactgagtacaagtattgctggaagctgaaacagcagggtcattggtgacaactagagcagatttttgaccagaaaatgaagcaccagaactgagagatggatgggaagaattcagcactttgaaatggcctggatcaaaagtatacaggccattgtggaggatcccagtcaacaacacttccttggtaacctgatcctttacataacaagcatcagcatgaaactcaaacaaaacattattgtctaaagcaaatttagagacacttagcaaattcttagttatctcaggtacatgcagtaggtttcgaagaaataaaggcttatcagaattattagatgcaataagagtggtaccatggtgttgaatggacagacctgtgccgtttcccacataaatttggtcagaaccagtgtattcagcattagtcatcaggttctgaaggtctggtgtacaatgattggtagcacctgaatcgggataccaatttccatcatcaacagaggtggtctgagctaaattggcctgcattgaggaggcatcagcagtaggaactgcaccagtaaagcttttatcaaatcgataaaagcaatcaaccacagtatgcccaagcttgtgacaaagctggcattgaactctgtgttgttgaaatggtttgcctcctctggttccagcatttgatccccttcccagatttatggatgaggatgaacctcgatagaaattgccagaataagggggacgattagaagagtaattctggaaattagaaggagggaaattcggatgagtggagtaatactgacctcgtgaaggagcaggatatctgaaatttctgttgaaatgagcaacatttgcttcgagttgcaacatactatcagctgatcttggtgttgactcagcaagattaacattcagatcaaagtctttatctgatttttcgattctggattctgatgctaagagtaaagcttctatttcggcaacagaatactcttcgattcgagtattagaagagattatgaaggtgtcataatcactcggcagtcctttgaaaatggctgcaatatgatctcgagcagatagtgtttctccaacagaagcaagtaaatccacatgttgcttaactttcaagagatattcatctaatgacagtgtgcctttcttgagattttggagtttagttctaaactccagaaccttagaggagacttgcagcgtgtaatgcttttccaaggcataccagatctgcctggcagtgttgcatccgaccatacgaatgaggaggctctcattcatagaagataaaagccaggagactagtaattgatcttgaatctcccaattcaagaactcgggattgtatcgttgagctgtttgatctgcatcagagaggaatttcgaaggaggaggaacatcttgaatgaatcgttgaagctggtgtcctcgaatcgcagcaagaacttgctgtttccagagaagaaaattatgatcattcaacttcactgaaagtgtatgactgaaatacacagggcttcgtgtttgctctgtttctcgagttcgattccaacggatttgcagagacattggtctgagttgcctgaggatcggaggaggaggtatttcctccaccattaacagcaacatttgccattaatggaggaaagggctctgataccatgttagacctggtattgtatcgtg

SEQ ID NO: 1748 - DNA, 2981 bp, Cannabis sativa
tgtgtgttttcatttacgttttttaacattttgatttagtagtggctatattttttgatggcatcttaagaatcttgtttgtgtgattttttttttcttccaaagtttccaatttgttaaaatttgaatattatttttaattcaatttttttaattaaattatgaactttttaatttatcaatatttcacttaataaatttctctattagtgttatgctaactatttcttataacatctttaattttgagcgattgtaatgttagatatgtttgcaattcttggttttcttttgatttgaagtgttttttcgttagtctcctgattatttatgtaattgtgttcttgcagagtgttttttcacttagttgttcttgagctcgattttagtgccagtcagatttgaattttatttggggattcaaatgtaaaaagggtttttatggtcgtgcctctggggatgatcaaactaataactttcgttcttctgagatattccatgcggaaaaatattggagacctgaactgaagatgctaagcttaatttaataattttcaacttattttctaggattaggaaagaatattaatttgatgatgaggatgagtaagctaggaatattgaagcaatactgtggttttggggcatttagtactggaaaatgctgtattttcctgaaaatatcttactcgaataacaattttttgtacatagagagatcaatatgtaaatgtatatatagtttcaaagttgtaagtattattcatgaaatattacatataaaataggaagaatctccctctgcggttggaatagcgaattggattattggagatattttgttagttttgcaaatgcttgtagacttgttgttactgatttacattattaggttttctggattattatgataatatccaaaaccctaaaaaccatttctttctctcaggtctcagccatggcgtcaaacaaagatccggacccttcgttgggataccttaccaggaaagacacggaggtcaagcttccgcgtcccaccagagtcaagaacaaaaccccagctccggtacaaatcaccgccgagcaaattctccgcgaagctagggagcgtcaagaagctgagattcgcccccccaagcagaaaatcaccgattcaaccgaactcgccgattaccgtcttcgcaagaggaaggagttcgaggatttgatccgacgagtccgatggaacactagcgtttggattaaatatgctcagtgggaagagtctcagaaggacttcaatcgtgctcgttcggtatgggagcgtgctctcgaggtcgattaccgaaaccacacgctttggctaaagtacgccgaagtggagatgaagaacaagttcatcaatcatgccaggaacgtttgggatcgagccgttatgcttttaccgagggtggatcagttgtggtacaagtacattcacatggaggagattttgggtaatgtggctggagctaggcagatttttgagaggtggatggaatggatgccagaccagcaaggttggctttcgtacatcaaatttgagcttcgttacaatgaagtcgaaagggccagagccatattcgagaggtttgtacggtgtcatccaaaagtcagttcttggattcgttttgccaaatttgaaatgaagaatggtgaagttggtagggctagacaggtgtatgagaaggcagttgagatattggctgacgatgaggaagcagaacagttgtttgtggcttttgctgagttcgaagaaaaatgtaaagaggctgaacgagctaggtgtatatacaagtttgctcttgatcatatacccaaagggagggcagaggatttgtatagaaagtttgtggcttttgagaagcagcatggagatagagaggggattgaagatgctattgtgggtaagagaagatttcagtacgaggatgaggtgagaaaaagccctcttaattatgatacttggtttgattatattcgacttgaagagagtgtggggagtaaggaaaggattagagaggtttatgaacgagccatcgctaatgttcctccggctgaggagaagcggtattggcagagatatatctatttatggttagtttatccatttgagatttatgttggtgtattttgtaaaatggggttgttttattttgtctaattgttgtttgtttattcataatttataggattaattatgctttgtatgaggagcttgatgctggagatgtagaacgaacacgagatgtgtacaggtaatctgttattttgctataattagttataaactatgatcttaaagaacttatttttgctgtagttattggtaaatgataagtcttgatgaacttgtttaggtttcagtcttttgggtattcattttgttttacttgtatgaagtattcatgtttcatttccattcaaatttccagggagtgtcttaagctcattcctcatgagaagttttcatttgcaaagatatggcttcttgctgcccaattcgagattcgacagcttaatctcaaaggtgcaagactgatcctaggtaatgcaattggaaaggcacctaaagataaggtaatgtttttattttctttctttctttctattgtgctatattttgtatgaaataagctgaattctatggattgatgcatatttttatttatttatgtttgtttgttgttgtttttaacatcagatatttaagaagtatattgagatcgaactccagcttggaaatatagatcgtggtaggaaattgtatgagaaatatttagagtgggcgcctgagaattgttatgcatggagcaagtatgctgaacttgaaaagtctctgtgtgagacagaacgagcaagaggcatatttgaacttgctattgctcaaccagcactagacatgcccgaaatactttggaaggtatgtgcatggcattctagatatgtgatatttgttctca

SEQ ID NO: 1749 - DNA, 3329 bp, Cannabis sativa
tttcaacttctcccaatacctatgtacatgggcctaaacttcttattgggcttaatcttgggccggcccagcccaaatacatccacggcctttagatctccaaattttcaccttcttcttcctcgaacacgaaaacatttctgtaacattcccaattctccattcaaattctcactaaccactcactcaaatccctagatctgaaaaaacttcaattccaatcttctcagatctccaattttccgaaaatggagaaggaaaagtcatgtacgttactggttcacttcgacaagggaacacccgccatggccaacgagatcaaggaagctttagaaggaaacgaaatcgaatacaagatcgaagctatgaaaaaagctattttgctactccttaatggtgagaccattcctcaactctttatcactattattcgttacgttcttccttctgaagatcacattatccagaaacttctccttctttatttggagattattgaaaagactgataataaaggtaaagtacttcctgagatgattcttatttgtcagaatcttcgtaataatcttcagcatcctaatgagtttatacgaggagttactttacgatttctttgtcgtattaaggaggctgagattgtggagcctctgattccttcgattctacagaatttggatcatcgtcatccttttgttcgtcgtaatgctgttcttgctgttatgtctgtttatcgacttcctggtggtgatcaattgcttgtcgatgcaccggagattatagagaagtttttgtcttcggaacaggataattctagtaagcataatgcttttcttatgctttttacttgtgaagaagatcgtgctgttaattacctttttacacatgttgatagaattattgattggggtgaacagcttcagatggttgtgttagaattgattaagaaagtttgtagaatcaataagggtgagaagggaaagtatattaagattattatatcacttttgaatgctccttcaagtgctgttatctacgagtgtgctggtactcttgtttccttgtcttcggccccaactgcggttagggctgcagctagtacttactgccagcttttgctctctcagagtgataacaatgttaagcttattgttcttgataggcttaatgagcttaaagcttcacatagggagattatggttgagttggttatggatgtgcttagagctttgtctagcccgaatctcgatattaagaggaagactcttgatattgtgcttgatttgatcacgcatagaaatgtggatgaggttgttcttatgttgaagaaagaggttgttaagactcaaagtggtgagcatgagaagaatggcgagtataggcagatgttggtgcaagctatccatacttgcgctattaagttccctgaggttgcgagcactgtggttcatcttttgatggacttcttgggtgacaccaatgtggcttctgcgttagatgttgttgtttttgtacgtgagattattgaaaccaacccaaagttgcgtgtttctattataactaggctgttggatactttttaccagattcgtgcttctagggtgtgtgctggtgctctctggatcattggtgagtattgcctttcgctttctgaagttgagagtggaattgtgactattaagcaatgtcttggggaccttccattttttaccccttctgaagaaggggaggatcaaagtgctcagaagacatctcagcctgtaaactcaaccactgtgtcatctaggaggcctgtggtacttgccgatgggacttatgccacccaaagtgctgtattggaaactgctttgtctccacctacactcgtccaaggatctttggcttctattggaaacttgagatctcttattctttccggtgacttttttctgggggctgttgtagcttgcacattgacaaagcttgtattgagattggaagaggttcagtctttaaaaagtgaagttaacaaaacaactacacaagttttattgatatttgtttctatgcttcaattgggtcaatcctcggctcttccacaacccattgataacgattctcatgagaggattgtgttgtgtatcagattgttatgcaacaccggcgatgatgttagaaaaatatggttgcagtcgtgcagggaaagctttgtgaaaatgctagcagataagcagcgccgtgaaacagaggagataaaagctaaggctcaaacatctaatgcacaacctgatgaccttattgatttctaccatttgaagagcagaaaggtatggcatactcgtgttttttctattaaaatgcttttctatgtttatatatagtattatgtttcattatttcttcatttactttgagtaattttgataatcataaattttgtattggatctctatcacaaatgttattataaattgatgcatttctcttaccctctttaaattttaaacttggtttgtgctcaacacacattctatcgatacatcttaagtagtacaaaagcattttactaaactgttcatataatctatacatgatatgagtgacacttttcactaagatggtcatgtgttttgttaatgttttccttgatcggtcttttcaaaactgctactcaataagatacaatttgtcttcatcgtctatgtttatgccatgctattagctttcatatgattatcttacaagtgcatatttttcagggcatgagccagctggagttggaggatgaggtccaagacgatctgaaacgtgctacaggagagttcacaaacgatggagatgatgcaaataaactgaatcgcattcttcagctcacaggattcagtgatcctgtttatgcagaagcatatgtcactgttcatcattacgatattgtacttgatgtcactgtcataaatcgaactaacgagacactgcagaatttgtgcttggagttggctaccatgggtgatctcaagcttgtagagcgacctcaaaactatactctagctcctcaatcaagcaaacagataaaggcaaatatcaaggtttcttcaactgaaaccggagtcatattcgggaatattgtgtatgagacttcttcgaatgtgcatgacaggagtgtaattgttctcaatgacatccatattgacataatggattacatctctcccgcatcctgcgctgacgtgacatttagaacaatgtgggctgagtttgaatgggagaacaaggtatatatacatattcacttagtcattattatttgttgatttggatgcaatttgtatgatagtttgtatttgttaatggtt

SEQ ID NO: 1750 - DNA, 5782 bp, Cannabis sativa
tgcacacccaacatgttggatgtacaaatacattatacgtatattgtatgtgtactcatttgatcttgacccaacgtatacacaattcttgatcaatattaaagttttatactcaatctttaatttgcattcacttcataatacaccaaatgcattttcatgttttcctatacatatattatccactacataagaacttggttcaacatattctttgaacaataactttggctagacattgttgaaacataaaaagtttctcaacaaaagaagaataaaaaaaccccaagcacagaactgtgacctagaagaagtgtaaagtaaaatcaagattaacaagattagttatgaacaactcaacagatataagatcctacattttccatatcaccaaaaacaaaacttgttgcatccctaaacaccaggatcagcattttctcaaggttcaattttgagtgctttccaattcagcttcacaggtatcttctggtttagtatagcttaaacaagcctcgatagcctcaacattggccccggagaaatccacgagtgttttgaacacattggggagacttgttttcagattgtttaaagtcatggctttggttgcctgcacagaattttgatattgagtcttttcaatttccaattgtttctgtaaggctgctattttggcatcctttagtgtcaaaggatgtttggggctcaaatcggaaagcatgtcttcgccctcgaagctaccctgaagtttgctcaataactcatcccgcgagtccacttccttctgaactcttcggtctattttttcatattttctttgcaaattgtgctcctctacttgttggacaactatcgagtggatagctgagcaaagacccttaatggcctccgaggctgcctgaaaaaatgacaaggcaacaacggcgatgaaatctcaaatgaaaacaccaaaggagactaaacaaattatcaaaattaaaacttaaaagcttcaagagagaccatattagcaatatacttgtgtgggagcaatgatcatcaaaagtactgatcttagcaactatgtcagataaaatcaaatttttacagtttcaacattgagaaaaatatattagttccaaacataaaaatcttgtgtgtacgcaacaagtgaaggtatttatcgaaatagtttctcttctatcgataactatttattaatttagcagaagtgatagtgttactcattttgtaacttcaactgctaaggcattagattatgtttttgtatgataatataagctttcgagaagctcagtagtgaaacgataagtaccttatcaggcaatttgtctagtgcgagctgccattgatcacataagctttgaactgcagacaagtgaagactccttcgatcctcatccacgagattatcaacgagtttgatccacctaaagagagttctcacatactctcgttgagagtttacaactctgcaaaagctgttataccaacaactgacctcagtttcaagctgaactgcagcttggcgatggttagcagtacttggatccattttttgattgtcccctaaatgcatcaatagctgtgatttacggtactgagcttcgtgactctcgtacattgttctccacatctgcaacaacctacaaaatgattcattcaactatgtgaggacacaaggtagattgagtttcaagacagagactttgtgcatgattttccatgcaatttcgagcctattgctccattagttttagtatgaaattataaatattatgctgagccaaaaacactgaacctttcttataaattatcaggaggattaaaagactgaaatggagggaaatacttttctttctcgatagaactttacactgcggtttttgttaaaaatagcttcacaaatcacattgcaaacaccactttaagggtttaaataagaccacacaaaatagatattgtaattttcataaagtttacccggaagttattgcaatcaactgaggatacaaattctcgtcaatgagttgcaatatagaagaacaagccgttcttattatctcttggagttgcgagacaatagcctccagactcccaacgctctgtcgagttttatctgtcttttcccaatcatggttttctgcctcttgtttttgtagtaataaggatttcttttcaagctctaattttgttttcacttcctcctacacatgtataataaaatgattatatccatgagaaacaacttctggaaaaagaagactctaaaaacaagagagtggtcatcaaaagcaaactttttaatgcatataaacaattcaattgaaatgtataaacatcaacgcaagagaatataaactgtaaatatatatatatttacttaaccaagttttgatttagaagcttaccaaatattaaaacactacaagagacttcttacatatgcctatggggactaaaataggataatcattaagctgtattttcattagtaaacatacattaaagccagaatatcgaaaactacatacatacattgctataagaacaaataacttataaagtttcaaaagatagggaaagtatttgtccttattaaatacatacatatttcattcaacttacaatgaggtaacacttcgtgaccatgacagattcgattctccacaattacatagagattgaaactcaaaatgttttaaatgttttgtgaaatatcgtagggtcatatgcatattttagttgctaatatttctagcccgggattggcaatctagggttgatgaacacgggtcatgtaatcttgatcagtatcaaataacagtttgcttttgaattaaaaaatgcatgatttcatggactatataccttgactgccttgtaaagtttttgttcctcgtcgcataactttttaagtgtaacacaatgagctccaggcctgcatggttcactagaatcaacagaatcttcggtaagtgaccttgatgaccgactccatgacaatccactaaagacctttgcaggattggtacctttccctgtaaagaaccagtagttagtaatgcaaacaaaagaaagttactctatatagttgcttcagcatataaagaaatttgaatatacaagaatgataaagaagccaattttgaaaccaatagctatctagaaaatacagatataggctataacaaaagcaaagagcataatctaattatcaagtgttctagcatataagtatagaccaaaaatttcaatgagattgataaaaggatgttgaatttactcttgttctctctgaaactgtggggaagaaacatatcacttccatttatatccataagaacagtgatttcttttacaccagctgatgctttcaagaaatagtcatccaattccttagctaaagcctccaatgacttcttgcccctaagaaatactgcagtgccatctgcattgtctttatcacaccagctcgttgtagatgaattatcatcgacagaccctgcgttttgtagcttattagaaagtgtttcagtagcaacaacatctgtagtagaagctttctcttctgactcttcttcctcgaaatctgtcttagtctctgcccagttctcctcatccactggctccatcattccttcgttttcccaataacatggtgtagtagagcgaaaagggtcccattccaacgacgagcttataattggaggaaattgtaggccatcatactcactctttttaatttcctcttcatcagtctcttccaatggcgggggtgggggtggtggcggaggtggtgagggtggcaatacaaggcgttcggtggtaccttcagttgtactattttcaaactccaataattcagattcagtgaattgtctcagggttacaccagtattcttcaatgctttcaaataagctaattgggcatctgcaaattctcctctaaaccccactaactgtttcattaacctctttctctgcttgcaaatctgaaccctctcatccttgtcaaatctagaggcagcacagcccattttggcttaaacctattttgattaccactatccaagtaaggtcaataccaacaccaaactcttactcaaataacaatgaatattaagcataaatgactatcatcatatcaggagaaaacagtgctaaaagcaatcttcttaaatgtagtctttcatcttcaattctttgatcaaaaaccaaaatgtccccaaaaaactactgccttaagatttcaactcccactaactcaacttttgatgatctcctattgttacttaaggacttcaaagaaaacaaataaatccagtatattaagaagaaacataccaatgatgctgaagaagttccaaatgaaatgggtcttttcctccaaaagggataatcaaacccagaccttaccctccaaatcatgcatgagagaagagctcacagtctaaaatctgaggcaggctccaaagtgaagatcaacaaagaacacagttttcagaatctctaaagcccacaaacaaagctcaaagatagcatttttaaatttcaaaccaaaagctcaaagtcaacatcaggtcactaagaggattctatgaagtttttagctttaggataacaaaaagacaaagaaagcagtggtcctaaattagaaactgtcagagaacaggtaagaactggtagtactacattaaagatgagatttttcctttttgtttcaaagctcaaatctttaagagaagaaaaccccacaaaaccctgtttttatctcaatcttttaaacccttttacatattttttataaaagaaaataatgaacaccaaaaacccagaaaaaaggtacttaaaaaaagctcaagctcaagactcgagacccaatagggaaagaagcatccaaagactaaagtagtacattttaacacatacccattacattacattacattatttatatagtcatatgacagagaaagaatcctcttactgtattttacaacctttgttaaaataaaataaaataaaaaagaccaacattatcacattattacttactttattggctgttggattggaacattatatattttatattacttcttaactaagaaacttaaagcatgttttgcttaagctagtacaccattaaagagtcaatatatgctgagatgaggaggggtactggctggcgcattttatcatgaccaataaggcgcattttagcaatttaaaaagaatacaaaataaaatagaaaagctgcaaagaaataaaactagtttgtgtgttgtacctttctttccactttcttctttttctttgcctttctatataataaaaaaaaaacgcttttttatgactaataaataatgaagagacttaggctatgtagtagtggtggcacacatacatgcaagcaccatataacagctttgtatttagtatattttcttgtatctttttacatctgtgatctgtagcatttggtcagtcactcattagaggacagataataatactcgtaataattagggtgtattcatgctgagttgaaattgttacacactacactcctaataaataaaagtaagaaaagtctctttatgaaaagcaataaatgtttgattgagtctatgttagccctcataaataattctacattaaatgtatctttctcaattttagcatgagttcattcagcataatctataagttgttatagagtaagcccgtagacttatgaaagatacataacttttagaaaaatttaggaccaaaatt

SEQ ID NO: 1751 - DNA, 1285 bp, Cannabis sativa
ctaattcagatgacacatgcacaatcagtagtgagcctagttactttagcaataaaatatattatggtgacacaatttacaaatcgttttacaaaaaaacaagttttattcacactataaaattttataaatgtatattattttaataattttttttacataaaatatatgtattgaattatgttttttttttaattcatattttgaaaaaaaatatatattaaataaaaataaattatattttaaatactttaacaaaaaaattaaaattataaagttatgtgaaattttaatatacatatataaaaagattatatatgattttttttaaaaaaaaaatatgaaaaataaaactaaaataagtattgacattaacacaaaataatttgagaaaaaaatattaagagtaattttttaaaaattattttgagtttattttttaaaaaaatattgtagtgcacttatattattttaccgagtgcaaataaacgttacttttacaaaattcaaataaacaccacataatcttgaaaataaagtcttacaatcatgaataagtaaaccgaaaacaaaagacataaaaaaaaattaattactagattattaataattgttttgataaaaccacaccattaaatgtaataaacatcacaaattactcacacatatgtgggacaaacacattttttttagaaaaaatgtaaaatctaactctaaaaataagtatattattttagtcataactcttaaaaattgtgataacaatttagatagctatacttcattttttttatatctatatacatacacatatatgatattttacatcttaaacttttaacaattttttttaataaaattagaataatttacagtaatttattgtaggtatgcttgttttattttatataagtataaagtaaattattataaccttgttgtctatacaaataaaggaatagtgttttctaatgagctgaagttgttgtttaagaatgttatagttttattatttaaatgtttaggagtaattttatcatatgtggcttacgatatgaattctgcagcttagggtttggcaaaatatacttttcggttagatgataagctatcttaatttgagaaagtgtcgtcatcaattgtaaaacgttgtattattaatcatgtataattttaattactatgttaaaaaaataaaattatttagatgctcaaaatatatatatatatatatataaagggtatatttattttaaaattgtacaataagagaacctttagtttt

SEQ ID NO: 1752 - DNA, 5317 bp, Cannabis sativa
atagaagaattatttagatatgtatatatgatcttaatttgttcattaattcagcttttctttctgtttctgattttttcttttatgggggagagattaattagttatatatctatatatatgattttgttcttgaacatatttaaggaatgaaaattcacttaattaattaatgcatggttggctctttaattaatttccatgtgaaattaattaagttaattaatgaatgaatgaacaggaaatgagttcatcagattcactgggaaacattttagtggggtcaaagcaacaaagtcaacatcaagatcagaggaaacaaacaagtaagcctcatccagaacaagccctaaaatgcccaagatgtgattcaacaaacacaaaattctgctattacaacaattacagtttaactcaaccaaggtacttttgcaaagcatgtagaaggtactggactaaagggggtactttgagaaatgttccagtgggtggagggtgcaggagaaacaaaagatcttcttctaataataataataacaactcatcatcatcatcaactgccacatcatctgccacatcatcatcaaaattgatcaagcctagtcatcatcacaactcactcctattgcttccccaacaactttcagttattgggggtagtaatagtagtagtggttatgactcaaatgaccttagtcttgcttttgctaggctccaaaaacagtcatcatgtgggcagttattaggtaattttgatcatggttatgatcataatcataataataatgaattaattgggattaataatagtaatattgggtttcttgatgcattaaggaatggttttcttgatcaatcatctcattccaacaataacaataatatgttttatggatttgggaatgggaatgagattaatgggaatgttgttgttggaaatgatgatcaaaatttgggtaatcatcatcatcacatgtcttataatgatcatgatcatgatgatatgatgatcaaacaagagctgagatcatcatcatcatcagatcataataataataaggttttgtggggatgtccatggcaattgaatggatcatcatcagagaataataatcaatttcatggaggaatggctgagattgatcacacggctgggagagaaagttggaatggtctttcctcatcttggcatggttttcttaatactactcctttaatgtagttacttatgttattgcacttttttttttcttttgggggtgttttttttttttcattaattattattagtgtttttttaaatggatgaaaagaaaaatcatagagtttctgtcctctttagagtaaaattttcaatcccaaatctttagagggttatattatttattttatttttatttatcaccaatgtaatattgtgatttatatatttacttcaatcttgtttagttttcttttggtgtaattttgtacttattatagttcttttcaatagttttttaattttatcatttaaaatatatcactaaaattgttttttattttaattttatagtacacttttacattatactatacatcaattttttttaaaaaaatatattatcaaaatactaaaatttaaattttaaaatatattattcatttcaaaaatagaaaatttacatacacatgtattcctatataaaaataattattaataaaatatgtttaaaataataaataatattttataaatatagactaatattaaattcaaaaaagaaaaaaaaaatgtaacaagagtttaaagcaatagaatttttttggatatggttatttaaaaaatttaaaattttcttattttagaaaaattattgtgagtattgttagctaatgaaaatttcttatattataactttttttctaactaattaatatcacttcataaccaaaaaaaatccttaaagtacactttgattaagagaattaattatactaaatatagtatttattttattatgagattagatattttaattaaatttacaaatttggataagaaaaaaaaagggggggagtagtgaaattatttgagagtgatatttcatggttttttcagtgtctgaattctgtgaaagtatatattaaaagcagaaaaaaacattgggcactgttgaattgagtggtgttttcaagatattctgtcatcattgcttcttattttcaggttgattattcttggaattctctatattattaaattaataaacaaaaatattaattaaatatattatagtgtgaagaaaaacaaggaccaaacctgaataattcttatattatatgataatggaataattaataagcctctgcatataaacatttgaatttcagtgatatttatataaatatatatatcaccaatttcggaatagattttctttctcttactgataccaaatccaacttaagatttgggcgtgagagaatagtcagtgagaaaattcaattatatatatacaagtttataggccactactgctgtcactcatattattttattaaattaattaattaattaattagtgttttgtatttgaaaattaggcaaaccggcaatagaatttcattggaagatcatatgtattaaacaaattaataaatgtatgtgttttttatcttagtaacaatatatatatatatatataggtataggtatatatagctgtctgttgacaaagtggtatagttcccaattcccatgataataaacaatttggtcatgattttcaaattgatcaatatataattaagcatgtataaatacactaaacacaacaataggatataggttgatttgctaataattaggtttttgaattttggttacacacctagctaaatttgtgtttaattactttttcaatgttttgtgtagaaaatgatttagaaattattagtttgaatattttaattgaaaatgattcaacttgccatcaaaatatattattttattttcatgcaatttaagagaataagggtgaaggacacacaagatggtgataacaataaaattatgagactcttttctttacaatcactaagtaagggatttgattttttatgcatgatttaaaggtttattagttagataaacttaaactataggtaattgttagaatatgcaactttacttaaatcttaaaactacccctctcaaaatccccacacccattctctcttcttccctctattctctctgttcgtcccaaacgccggccacaaacgcacggaggagacccaccggcccacggcgctccccaccgacccacgatacctacgacgcaccaccaccgaaggaccaccaccgttttttattttttattgattttgtttgtgattttagtgtttaaaatagattttgttagatttaggttttaaaatctcaaatctgtgattttggacaaggtccgatgagatttgatagggtcgaatgcaaaaatatatatatattactttgaagtgtaaaactaaaaaatctctttatataataattttataaaatatcatcaaccatttgcaagacgcgctatcttacggcactgctaagcactactggtgtttaatacagcaacatcctaacaccacctaaatctataaataaaaacatatcatgaattaatttacatctattactttaattaatatgtcttaaagagttattctcactttaaacctttgtttaagaatgtaaaagagaagcatagcaacatgttcccactggtcttatataaaagtcatggtcaaccttgaaatatataggaagctctccattgtggtcaattattaaagtgatttgaagtgtgtttaacatgtacatatattagtgaagtgaccttgaaatgagaatgtttttaataataaaattaaataaaaatctatacgaaaatgtttggtaggagtataatttttatttcaccagtctctattttatatggtgttgtgcattttaattatagaaggcattccataagtttttttataaaattgaataatctattttatttctattttttaaaaaaaattattaaataatttatgttgtcaaaaaaattaaatttgtattttttagtatggtcggaggaccgtgctgaaaagctatagtctgagtgactgacgttgaggaatggtttatggttgttgtttgaattaatagctacgagaggtttttttagggctgttaaggatattgggaacatgatcgagtaggtgggagtagaaatagatgaatgaaaggaaaatgataaggctgctaataacttttgtcaaaaattactggtaagaaggcttaattcaagacgcgagataatgaaaatttatttatgataatatttggaaggatgtggaaggggatcatagggtggagtgccaatatagttgaagagaaaggtgagccatcatatgtgggggtgcattttactacttgaatggatgctattgaatggatgctaagaatgttcttgcaaagaaaccatgaatcttcaatggagacttactcgtgttggaagagtggccagaaatagttctatggagtgatgcaaaacttgaaaaactgtagtgttgggttaagatgaaaggcttcacaattaaagcttttactaagaataacgttcaacgatttggtgaaatggctgaactcatgtggggacaagaacaaaatatgttttttaatgggtatgtacgtctaaagaaaggtttccctctacaaaaaagtatttttatagaacgatttataccaaatggagggaaacaacattgggttcatgaacaaaaagattgtcacaatgaaaatgaaatggttttgcaaagaagtttaaatggttaaaatgtacctaaatatggattatggctctaagaggaagatccaatacccaattgtttaatggttcatcaccaagatcaattaggcattcaggaaatttaagatgcagagaactagggggtgagatattgggaggtgatgaagcaacagaggaggccaaatttatgtgtgatcggagcaagaagaaacatcgtctagggaacgtcagtgatggaaaggtggtgctccgatggcttcaaagataatcgctaaatcgattgagacgattgagataaataacaaggtggaaactaaagtttaaaaactgttaactaattcaatatacattattatcagaattttgggaacttgtttatcactacaaataaagaattattgttgtataaacttcaatgaaattgaaggtttttttcttaggaaatagttaaagtagaatgaagtaatgcaactcaaatt

SEQ ID NO: 1753 - DNA, 3171 bp, Cannabis sativa
aatatcatattcacatgatcacatcagctatttttttccaaaatgaaacataatttatctttgtttattattttttttatatataaaaaacaatagtttactagtagcatagtaatactactactattacctaattaaaaataaactcaaatgtgtggtcataaataataaatttatgtgattcaaagattagttacaacattaatgaagtttttaattattaataagtgaaatattattattccatatattttaataaataaataaataaattttgtaggattggtttaaggtttgattttgtgtagatagaaagttctttctccagagttgctggattctgatcctactttctccgccagccaaaatccagcaacatcaatacaaacaacacaacaaacattattaattattctcaaaatataatttcaaatataaataataataaaaaaaaacctttgtttcctcctcctatgtccaagtcattccattcttagttttctgcgtccatagttgtctgttttcgttctggtattctctctgggcaaaggaagagagggaaaggaatggagagtatagcagtgtggcaaacggggactctctgtggactcatttcatggattgccatagcttcgtacctcaatgttacccaaaagcttagatctttgattcaaccatgggtgactcaccatgtcctcacaggaacacctttcattatccagatccaggtttgaacgatttagttcaatttaaacaaaaagaagaacaccccagatcataatcttattaaaaaatcattcttgtactttgaatttgtgtgttaaagacgttttctaatttgaatttgatgggtttttcttattcagaattaccagcatgggttattggatgctctcttctctgggttatcttgtgttgtttctgtacctttctacactgcctttcttcctttgcttttctgggtaaactttctctttctttgaaataattcaattttgctgttttgagtttagattcgattcatcattattagtatttgaaggatattgctcaagtggatattgcacaatttctttgtagaccgggcatggaaaattggcacgccagatgactcttttgatggcgttttgtgattatctaggaaactgtataaaggtaattactaatattgatacaatcgcagtcttcctatttgggaaatggatttcttgttaagctacttagttttgttatttggtgtgtgtgtgtgtgtataggatgttgtatcagctcctagaccaagttgcccacctataagaagagttaccgctacaaaggatgaagaggaaaatgcaatggaatatggatttccatcttctcacactcttaacacagtttgcttatctgggtattgagttttcttcacttttctcttcttttatgcataacagcccagacagttatgttggttatacttttgatggggttcttatatttgaaacataaagatatagatatcatgaatagcaatttgaagttatcttataggctaaaccatgcccgagtcataatgtgaaaagtggtggaaacgttcttagtcaagcttcattttacaagttgaggactttccctcagcttaatcctcctttagcatctcattcatttggattgaattcttcccaatggtgtttattttagatacctgttgcactatgttctatcttactctcaacttgaagatggtcctttgaaattggttggagtattccttgtgtgcttgcttgtgggcctcattggttttggtaagttgatctgttttatttctcttgtgttttttccagctcgcttggtaaacttcctaacttatataattatattccttggtaggaagaatttacctgggcatgcacagtttgattgatatcataggaggacttactctggggttggtgattctttcattttggctgacaattcatgaatatattgacaattttattgtctcgggacaaaatggtatgcctacttctagtttgtgaattcccttttctacatgttgcagttaaatgactgaaatttcaacatgtaaattgacaaagcgttattcctaaatttttacttctcttctactgttcctgttgcagttacaaccttctggagcgccttaagtgttgtacttctctttgcatatccaactcccgagttcccaactccaagttttgagttccacacagctttcaatggtgttgcgttgggaattgtaagcgatctttaacataatctgatatttttgcttcatttcacttctttcgttatagacagttaacaggatggcaagtgtgtttttctgaatttagagtagaaaagctgagcatttagcataagaatctatgattcacgaacagaactatatttctttcttataaaatttacgattagaagaatcgatgtctcctcaggtaaccggcgtccagcaaacattccaccagtttcaccatgaaggagtcccacgcatatttaccccacaactttcaatcccttcttttctgggaagaatgcttgttggaataccaacaatacttcttgtgaagttctgtagcaaggttctagcaaaatggatacttcccattgtgtcaaacaccctcggcattccaatcagatcaaccacctacattccagcactaactaaagccagcaacgggacaaaaccgaaaaaaccagaagagctcaagcaagcaggcaccctgcagaagttgtttttcttctcgaatcaaggtacatttgatgttgataccggcataagattcctccagtatgctgggcttgcatggtctgtggtggatttagttcccacccttttctctcacctgagcttataaagcttggtcattcttgtacaacaactattaatgtgctcttagcagcaaaagttccggatggaatatgctgccacttcaattttgtaaatcgtatatagtttttgctgtttattgcatttttatttctacacaaagtggaaatctttttgtggatattgtaaatgccgtcagatcatagctagctagctagtgcaagcataccatttagccttcaaaatatggccaaaactcaaaaggcactgcaccaaactaaaaaagattgtgattaatttgctaaattatctatgtgccaaaagagcattgctattaggca

SEQ ID NO: 1754 - DNA, 2375 bp, Cannabis sativa
ataaaagtaggcagagaagacataataaaaataaaattgaaaatacctttcagcctaaaataaatttgcggtctcaaaaattaaaaattgataggaagaagacacaagaaaaattatgacaaatatccttcatgtgatatttgtaaaaaaaaaaaagagtcacttggagaaaaactgttagttttaaagaaaacggaagtgtaaaaaaattgtagtaaatttggtcacaatgaaaaaacttgtcattaaaaaaaatcttatcaagctaatttttcagaagaaaaaaaaaatgatgaaagtaatctcttccatgtctatgaagatacatcaaaagaagtaaaagatacgtggtatcttaatagtggttgcaataactgtatgacaaaaaataaaagcatgcatgtaggcttaacaaatacaagactaatgttaaaatttttaatagtggcttcatggaagcagttagtaaagacaccactgtcatttacaataaaaaagcaagatatacatcaatgatatatacttagtacccaacatcaatcaaaacctaataagtgtaagttaaataattgaaaaattgtactctttgtattttgaaaaagattcatactcaatctatgacatacaagataaatcatttcaaactgtaaagagaaaaatgaaagaaaatagatgtttttctataaaatagagatatgctagcaatatagcaatgcaagtgcaaacagatgagtcgtggctatggcatataaggttcggtcacttccatttctatgggctcaaatagaaaaatatgctgtgagactccaacaatcaaggtaattaacattgtctgcaaagtgtgcatgctcagaaaacaacaccgaaaaatctttccatctgacaaagcttagagagccaaaaagcaactagagcttgttcatacgacgtttgcgagtcaatgctcactacatcaaatgatcatcaaaacatgtaatccattctcttcatcgatgaccttacataggtttatttttttacgacaaaaatcataagtctttggtatttttagtagattcaaaatctatgtcagaaatcaaataacatcatgaaaatcaaaagtgatggactcaaataatacacttctaatgaattcaataagttatgtgaagatgagcaatcaactcatagttggatacacaccaggacaaaataatgtatctaagaagaaaattaaataggagtgttatggagacagcaagagccatgcccttagagaagggtctcccaattttttttaggcagaagcaataagcattgcagtctactttctcaacagatgtctaactaaagctctataagaaagacactagtcaaagcttagaatggatagaagccatcactataaagcatctcaaagtcttcagttgcagatgctacatccacattccaaaagaagaaagaggcaaagaagaccaggaaaggaattttgttaggttatagtactcaatcaaaagattataaagtctatagcttagaaaatactaaccttataatcaatgtgatgtcaaattggacaaagatgttgtatatgagacaataagttgaaagaaataagattgtcaacattcctttactaccaagaaaagaaactaatgaagacatagatcaaattgaatatctaacacaaggttcagcacaagccattgaatccccaccaaactcactagtaaggcaagaaagatcgctatgagagatctacaagacatgcaacttagtgcttatgaagcaaaaaaaaatatacaaaagcaagaagtgtggtggcaagacatgaatgaagagataaagatgattgaaaagaatggtacttggagcttgttgatcgtccacatgacaaagacactataagagtcaagtgatcattaagataaagctgaacacatacgacttaattcaaaagcacaataaagcaagattagttgtaaaaggatactcacaacaatatagagttggttacaacaaaatatttgcttcagttgcatgccttgacatagttacaactttgactactgcagtcacacaaaagaaatggaaaatctttaaacttgatgtgaagtcggtgtttcttaatgttagggtatcaacccaagtcacatatcgaaagaataggcaagagttaccttgaatataatgttctatctactctatttgtatgagatctttcaggaaggtgtccaaaataaattcgtgagggcttaggcccaaaacggataatatcatactaatgtgtgagtccaggtgaggtgaaagcccaacaaggtggatgaatggggcctaataagtgtgatcagagccaaagatttaagagtgcaagtgggttacatttgtaaagtgta

SEQ ID NO: 1755 - DNA, 979 bp, Cannabis sativa
tctttgtgttgattttttaatcatttttcttccaatctttgtcgtttactaatctatatcttgcttaaagaatgattagaagacaatacgacaatcctatcaatcttttttgtttggaaagtaatggcagtatccgactctaatattataacgttaaatctttcataagaggggtataataataaaaaataaagtgaaagatgaaagtgaccaactttgactcgcataataacaaactgaagagaatgacaatcacaaaaatgataaactttagatacaatgattcgtgttgaaagaaagaaagaaaaaaatcaggacgcaataagctattaataaaagaggaggagcctgttcctctcaaatttcacatcacataacaattcaacaaaataagataacccttttctgaatgaacgccaactgatccatacccaaagagatttctttctttctttctctcctgtaaatcctccaacacaaactcagagggaagaattataaagtcagatgtgggcaatgaatgtgctttctatttttacctccttttcctgttgtcagctcttcaaattgggtatttggtaaaagtaacaaattttaagtctttaatgccaattactcttccacatcctcactcacctgctgttgtccttgtcccccatcagcagcggctctggccgctgtgtgttttttatgcttcttgtttttggctttcttggccttcatccggcgtttcttctcattggcgtcaatccaagtataatctgatggtatgtggaaagggtccacttcatctttaaaccggtggctttcgccatcgcttgattgcccacctcggctccctctcatccatgaaatccatgaagaagatgcttctgaatcttttgattttgcatcctgaaaatgtgctggactggagagaggtgttgagaactcctcgattggctgtagctcctcaaattttgtaaaagtgactaggact

SEQ ID NO: 1756 - DNA, 4355 bp, Cannabis sativa
tataaatatttgattggttctggtggattaacaaagaagatgaagaatttgactctgttaaacatgaattttgaaaatcatgtcataaaaacttctctggttttgaaacgtagctcgatatcattccaatgttattgttcatagttgactagctagcctgcttagttagtacttcgtatcataactacttttttaaaaaaagtattagcataaatacttatttcaatcaagaaagtaataagatcttcgagtgacagctaaagttataactcaattgtgtttgagaggctattaagatgatgagggcttggtgttaaatggtgtggcattcatttgatgacactgcattattataaaatttaatgtcagtttatattaatggggtttttctttcctttttaatagattgtaatgatacaaagtttttaaatctgaagtagcaaaagcaggatccaaggatgttgcaaccagaagaaattttgaatcagaagtctcgaaagaagaagacacaaaaccgaaaggctcctatgcttgctgctaatgcaggtcaagatgtacaaggttctatgccaatgaaaacagcgcaaaaggctcctaaaagaaatgtgatgaatgtggtttctccattggttcaccaatcagataggtcaaactcagattctatgccggattcttcaacgtctgggaacgagtatcgagcgctcaggaggaagtatttgctgcttgaggaagagagtttcacattgggcggagacttgagaacaatcgaagaggaggttaacacccttgaaaatgaaaagtttgcactcttggacaagcttgttgtgttagaaggcctggttgatccttccgagttaaagtctcaggggaaattataactcattagtttcttacatcatcacagcttgttgtgattctatacgactatatgtttgcagatatggatcaaatgttgagctcggacaggtagtcagctctccagaacttcttttattttgggtagtaaatgtatgatgaattagtgaaatgaatatgtcttctgatcttgtaaatagaggtggataaaacagacagctcgctcgttggttttgtttattgtttttaactcttagataatatacaatgtacaattctgagatgatctcgaaatgggaaattcattgataatcttcttagaggtccaggttatataaaagctttgtattttatgagtggttgcaaatggatctgacaaaaaacaaaaaatgatattttagttagaatcgtgtgcgtgtaatcatcttttaaagttaaactcagcagtttccatatctacagtgaatttttctttatttgacattttgatctacttaatacataggattgtaattatagatttagaatgtgaatgtgaggattatttcacagtaaattagcaagacttcatcctgtgatatgctacaagaaaaaactgaatcccacccatttgtacccttacactgactccattgcgctacgcctatgtgatccctaatatcaagggacaacattgtagtaaagaattgctgtatgagtgtcatgttttctagaaaataaggactatatctttgtaaagccaaagaacctggaattgattacaaatttaaaacaagggttcgggaaaatgtcattcttttcttctcatcaagcaatgaaatacggaacaatttcccttggggactgtttatgctgcccaagtggttatgaattggaagttgtccaattcttggacaaagccgcataaagcatactagacttattagttgacgagaaaatatgtacagctattgacagttttctgtaaataaaggtttgctgccaatgaaagtagtgcaaaaggctcctaaaagaactgcgaggaatgtagagatggataagacaaacagctcataggtttgattcattgtgtctagctcatatatcttgaattgggaaattcatttttattcctcttagagaaaaaattgttgtttgcatagatttcaaggttcactttcgatattggtgatcatcctcactccttaacagaggacactttgttagacattaaagagatataaaacttggccccatcctaacctgatgggggtaaaattggacaagagcacaattaaattgtgaggattgtgacagtaaattagcgcgacttcagtctgtgatatgctacaaaagaaaagtgaatcatatgtacaaaaagtattgaaagacttccaaatctaaagacctctcctgtcctaccatcgatttcctttaccccagtaacttggaaaaagaaaaaaagaaacaatatagaaactagaaagttatcaccactcggaaacaaacaacaaagctactttttcctcacctaacccaacattttcttttccaagaaagaaaacaatccattatccattgggccacgtgtcacatttaggaacagttaaacttgggttatcatcattgccttgtttctgaaagactagaggtagtaggttcagagtggtttgctgggggagattgttgtaattctaaatgactttggttgctgatgtttgccgctgatgatcgttcagagccaggtaatagccacagctgagaatgttcatttggggtactctcagagtcgtcaaatgactgagccgacgtgaacattactggtctgccatgttttgttcccatagactcctgtaatggaagacggcaaactggacaggtagactgtttccttaaccagacatcgatgcaagagagatgaaaattatggccacatttgggcatgattcttagcacttctttctcttgatattcacccaaacatattgagcatctgcgttagaaaaacaacaatgaaatttcagtcttcacctatgttatccataaaaagaccaataatctatttagtattttaattttgtcttaatttctaatgctcagcatcaagcaatgacacaaggtgtttacagctgctaatgatgtatgtatcctaatcagagtaggatgacaatacattctcattaggactacaaaaagtacctctacatagttaaggttgagaatagacagtatcaattgcagagataacaggtaagagaaggaccttgatttacagtttagggttacaaaactataagattgtattgtctcagcagtattattggctgatttgatccttgaatacaggcattctgctacagaaattcctagttcttctactttatccttattggaccccaatcaacacatcactttattgcaaaattttggaaaagatgataatttaagggttatctatataattaaatagaggtaggtaggtagccaaactcactgtgtgtcttctatagaactgaaggcctcatggttgaatttcatagtagggattgcagcaaccaaaacaggttcaagaccactaccctggtgctctggctgccaccaaacaatgaaagcttaaaatccatacatctccaaattaaagcactaacagattgaaagaaagaaaaaagaaaaatgctaaaacgtcaagatcaacacaaggaatagaaaaatgcaactttgcatttatctcacaaagcctcctacaagtagggtataaatttagataccaggaagtcaaccaatgtcataatctatctatatttagttaatcacaaaaacagagcaagcaatctttacaaagtgaatttatttgtcctaaatcttcgttagatatttcacctatcttccaacttcagcaatgtcttaacaattttcagctaaaaaagtaaatcttattttctaagattcgtttcttcaccattttaatctcagtacaggaacagtagagggaaattatttccgtccatttcagagcttgactcagtatactaataataaaaaaactcatattaaaacaatattaactatatcagccatcatatactcccatggaaaaaaaaaaataagacttgtaaaatcaaatctctcatctctgatgaagctacggatatgcatattgatatctagatcacaccatatgtagaacagactcaaatacgatatactactagatatatattaatacagaagtaagtgtgtctaacgagattcatatatgcagaaacccaataatatagttgaaaatttcaggagatggaatcaaacatacctgctcaagatcaatcctggattcaatctcgaacataggccgggattcgttccttctaagcctcccacaaataattcttgtgcaaacaaatacaataaatgttgcgctcataccaaatccaataacagtagtaatcaaattcatgcctccacccaccatatttccaaggtctcctacttctatacccgatttcaagatgaccaaaaccaaa

SEQ ID NO: 1757 - DNA, 3777 bp, Cannabis sativa
aatctttaggattcttggaccccatatatcctcgcgaatgggtgaaataggttgagatggtttattaggctttggtacataattgacttcaagactgaaattttcataggactagcatcagatataacactaacatatgactaggtcctatttaataaacacattcatgatcattttataaatatcttctatctgttgtcttttattttatggaaaagcatatacaaatttgatgtagcacaaatgcatctgactaaaaagaccagcaacaaaactatcattccaaaaataagtaataatacttttatgagttacgtggaaccactatggagtgtggcctattttattttacaacttagcaacataactaatgagaaccacctcacaatccagtcttcccattgcttgaatctaagaacttgcaaaatgataataaattgcatctttgtattgcaatatacatcagtctcaatagacaaagtaatattaaatcgacataaaacacagagagaaagagagcaatacgtttggtaatgttatagaaataaaaaggcaaagaaaattgaacataccataacctagggtcattgggtgttacagacaatctagtcttgatgacatcaacagctgctgctttcttcttcaataagctgtgatgcatttcacacttttaatgaaattcccacgcacagcagcagaagatgtatcaaaataaaatatgaagtaatttgaagaatccattaagtgatgccatacctgtaacaaaaaataagactgtcccataactccaaatcctcgtaaatcttcaatgcttctccaattaaaccacagctaactaaaagttcaccatattctctgaaaaaacaaaagacaaaaaaaagagcgagacaattacacaagaaataatatttattaagaaagggggagaatataacaatatctggagaataacatggtggccaatcagcatagtccctaaacaagtactggcaccaaggggcaaatgtcagaagaaaaagtccttaagttgtacagtcatataataaaagagaatcatacttccgtaaggaagcaattgttgggatgcagaccccataacaaagtggaatcctttgcgccactcctggagaagattcatacatcccctggacctaaaaacagttttaaaagaatagtctatatgagatttgaattgcaataaaaatatacatatattgattcatataaatataaatgtataaactatataaacaacacacacacatatatacataaagagaaaatagccattctagtaaactaaataaaatgttataaagacatcactccctcccttaacaaccaattgtcgaccacttcaaaaccagcaatcacaacagataaaagctcgaatatctcgaagatcaatatacattaacaaattgttcaaaactaaaaaatttacattaacaaagataagtcgtaccaatttttccatcatcaccaaggcacgttccttcgtacgactacgagttgactcccatcgaatgcgtaaggtgtcacaaaaacatcgaacctgataatataaaatagatttattaaatgatcattaaaaaaatatcaaaagaaaactatccatgttagtgagaaactgaactttaatataataatgaaaacgaagaaggatgcaaggttaataactgactgcaaaatgcacacccataaatcaagaaacaaaaagaaaaactagagagacccttctgcccaaatgtcaaagaaaacctagaaatgtgtaagtttcaccaacaataacaacaatttgtccaagaatgaaagcatgtgcctgaacacataagcaacatgaagatactatgaaatagagtaggatcactcacatcagtgatttttggaatggttatcctcttgccgtaactggcaatgtagtcgttgaaaaataaattaacattcaagtcaatgaaatcacaaaacaatagcaattaacaccacatcgtaaaatttgcaacaatttattgaaaatttcgctccttgtttttgtggtagaattacaacagtccattaaacttgtaaattggcatataactcccaaaagtaaaatcaaatcaacaaaattacaaaacaacagaaattaacacccacatggtaaaattgtaaatagaataaaactccgaaaactcaacaatcgagttatgcactaatttttgtaatttaatgaaaaaaaagaccactttgctaattagtaattcacaacaaattcaaggagctattctgtcaataaaagcctttaagtgagaacacagcaatatggaattaaatatttgtaacctcatttgcatctttactatcagattactatcatttgcattcttttttcactttatagtcagtgactattttgcatttgcctgttattttttaaaaaaccaatgaaaactcattgaagaaacacacaaaattagtaaccagaacacaccactgaagggagaaattttttttaaaaaaaaaaaaaatcctggataacatactcttaaagagtgagattctatccatccttttttttaagagagagaggtatcatgtccatgagtaacctcaaacaccaactaattgtgctctttcaatatttggtgatgtttcaatgtttaaaaaagagacaaagaccacatgtccagaatttcgatttctatccatcacatgtaagttcagtaaacttttaatgttttacctttgtagctagttaagtttagataccaaggagtgtgtggactgtggatcatgagaagtaaactgaaaagatttgagaatgaacaaaattacatattaatggtataccctgctattattagtatgtgatagcataaaaggagaacaggggtatataggtcattgtgtgaaaggatagtgggtgagtgggatttggttatagtgcagggagaaaatagggtcatgctggaatggagagacccaggctctcgaatttctgttaaagcttgtgacctctttgctatttctgtttcaataacaattatctctctttcattgcaacttttctacttaatttttgttgttctactgtatttgtgctactactatcgactgggtttcatagcaggatctggttcctatcataatacactatcacagaaaccacagtttgggtagttaatcaacaatattctcaagtaaatttattattattgttgatattttttgtaaccacggttttcctccgccataagtgagggctctcaaactatatgagagagggtcagtcacaagtctgactcctgtccctttttcagaaaaataaaaaatacactatcacagaaactatagacaactgcattgctttcaatttgttataatcaaagaaatatcatgatgacgattaaagtcagaaacagaatattgtagaaatattttttgacctgttcaaaaagcaatagaaaacatgaagagtttattataacttgaggttaactccctcaatgctggcattaggcaacaagtttttttggataagaaatggaacttgttatttatgagtaaaagaccaccaaaatgtggtttttttaactgattacttacagcaaagcacgatgactttagagaatcaattgcctctatgtatggagccatatcccaccctgaaaaagaaggtgaagaaattgaataattatcaaattaggcctccaacaaagtgtgagggaaaaaaatggtttattatactataataagtatactaagaaaagaaaaacaatattaaaatttacagccagt

SEQ ID NO: 1758 - DNA, 1076 bp, Cannabis sativa
gagagagagagagtttgtgtgataaatgaaaattgacttagattaattaatcttatcctattttatctatattcattttagctaaaatcactaaagataaacatggaattaattgcattaattacttaatactacccttatgccaaaagaccaaaatacccttttttcactaagaaataacctagatggtctaggattaaaatggtcaaaaccataatcctgaataatcttaacattctaaatgtcgaactatgttaccccgctaaatccaagatactctattgtgtctaacggactctaatagccaaatcgtcacattccacaattaccggacacgaaatataaaaatcataaaaattcatatctatatatataacatatataatacacttaaaatttaataaatcttctttgttgagaaattatttctctaaagccaatttctcacaataggttctattttttactaaaaagcataaaatcttagattaacaattaaatctccaattatctactaattcacatatataaactatgtggtcattacactcctattggtcagtaccttagagcaaataatacaatgcctaagtctgtgaccttagaaactacaagaggtggaaataaatttgctttagagctgtcacttcctgtatactaactgctacttcatttttatttggcagtgatgacgacgaactttcttgggcttatggaatgcaatatcaagaggaagccttttgttctcaggcttgaggctacatcctcccacaaggttttatttgttggggagtcatctaaggacccttctcctcttgggaagagagcaaggactagggtaaaggtcaaagcagctgccacttcatcgattgaacctcctctacctaaagacactgaaaaagggaaggttgtagtggaagagaccacactacccctcctcctgctaagattccatccaatatcaattcaataaaggtgaatctagactcgaagacttccaagagtagaaaggcttcgacccaaccaaagaaacttggcaatgagatattcaccacgtacgactcttatttcattaa

SEQ ID NO: 1759 - DNA, 1833 bp, Cannabis sativa
atttcacccctaatgcaaacatatttatgagtcaaaaaactcaataagaaaagcacaaaacgtataacataatactgacttgtatctaggcgctcatacacctatttataaggcttcagatacattaagaatgttcctaacaaaagtacggtccttgtaccgcatgcactaactactcgtcccataatagtgttggtagggctgaaccgtacctcgagtaccactgagtactgtaccacatgcactacgtactcgtctggtactagtgttggtaacactatgtcataccctttgaacatcatatacttgtatcaatacactccgtaccacaaccgtactagtgttagtagtatacaaatcataaatacaaaatgcttaattataatacacgtacacatatacatatacatatcttatgctaatattacctcatttcctaattcaagtgtgtcggtcaacttgaatagaaattcatgcactgaacggaggtcctatgatataatatgcaaaataggtaaacaacttgctaaaacttttccgggcactaaaacccaaaactagaagtttccctatcgataaatagcatgataataccctaaatatcaaggaacacacgaaaaaaaaatgagaatgcaaaatttcttgaaaaatggtaggctgtttctctaaaaacgacacactatttttctaggtaatctccagtaaaaatatccttttctgctgcagaaaaataaaaagtctccatacaactacaaatcgaccccaaaatctttcaaaactctcaagaacacttaatagaggtccaataaacatattccaagcagtgaacacaattatatagctcagaattataaaatctaccattgttgagtcaagtttgagttcttgctcaacacctcccacaaccataaaaacaacccaattaagcttcaaaaactcaaagaacaagggtttctaaggcttaacttgattctagtctaactccattgatttcttgctgaattccttgggaattaggtgaagaaacaaatggctgagctccttggtttcctagggtcgaaagaaagagagagagaaaggaagtggttaattgttttttcttattttttggatgagaaaattatctactccttatttgtcttattcaactaattgggttcagaacttaataaattattctacaaaaaaatccatcaaaataaactaaaaacatatggcaaaaatttcatttttgcccttgcttcacccttaagcaaacttaaagtttaggagtaaaatggtccactaccataaccctgcttaatctcggtattacaaatatcacatatgattattccactaaaataaaggttctaaactattcccgtgcgactctaatcgataaatcgtcgcattttctatcgttaccgatcaaaaatcataaaaatagtaattttcacatatgtcataaataataaacttagactttaataaaatctctagaattgagaaattataattagtaatttgatattcgatcaaatctaacattttcacttaatctaatccaatccaattagtaattagatttggagaatcaatatcattcgatccaatcaaattaaacctcaaattcaatccaatctaattcaagggataagttgagaactactcttttttattacacattaacgaaatataactacaaatttgtaatcttttataattaaagtactaaatataatcatagatatacaaatattttatatgaatcaccaaatttgaacattattattttgtttttaactactattctattaaaaggttgaaaaatggtcagtaggactatgctgt

SEQ ID NO: 1760 - DNA, 3584 bp, Cannabis sativa
aagtaacaaacatagctgcattcatggctaaatatgaaatcttgttataaacagaaagaaccttcctcgacggttttatacccgagctgttaaatgagtctgtacaaaaactttcagtatgcaatgcagcaaagaatatttatatcatatccagtttattaccgcctaggtctgcgttgtgcattattcgggaattccagtaaatgtaaagcactagattttactaacaactatataaatcaagaacaaaaaatagatactaaattacaagcgaaaagctcgatgtcatctctacactttgcaagaaaagaatttctatatttacatgagaagttactatgttttgtgtctttctttctttccttcttctgatttaagcatatgagtagttagtgaacaaaatagatagtcaacctggtgtctgcccacaaaggatgaaagcatgaataaggcattgagcactagatatttgattaggagtacccgaaactgaaaccagcccttccgtggctccaggtttcatatcgtttaccaccacctgagcacctgagatctgaaatgccgatgtatacagttgaattaggcatcacaagattcacaacaaagtctaaccgaaaaaagcattatgtataaaacccacctggcggatctgtgttatattactgttgttatctccataaacatgggttaacaacttttgagggattgtgatctcaacagttgcgggagctaaatgctgtgcttgattttcactgttaaagagaaggatcggcgtgagataaacgaacaaaaattgtaacttaaagtcaaaaggagaaaaaatcaccttcccaaggaaccatttcttgcatggaagcttggactattatcaattcccctaggatttccacagttaacaccctgtaagaatcccgtgaaagaaacaaagaattaataacaaaatagaagatagagattacaattattcccgcagtgatgagagtatttgaatgcataagatacccacctgagaattccacattcttggagaagatggtctatcaaatggtcgaccttgtccatggcgttcacttccataatgatagggagctctgtccattggagatggagcattgtggtccatgccatgtaaaaatccatgctggtgatcatgtggttgggatggaacagaagaccgatcaattccatgaggaggcccaacaggagaaggacatggacctggggaagctgggttatgtctaggcctgaacattggaggtggcatttcagggtatggaggcatgtatggtgggccatcaaaatttggatgcagtggcttcaaaggaataattgtttcccgtagtctacttgtaatgtgaaataaggcatcctgtacacactgaaagcttccaataacctgccaaagaatataatgcaacaagctttcaatatccgtacctatttaaaaactggagacaaaacccgctgttagaaaaaaaaaaggatgataagaaatcatgctataatattaattcattggatccaacacatagaacaaacaatacaaatacagataatctagacaaagttcaaaaggcaatgttctgttcttatgttcttctggctcgtagagtggaagaagcaagtaattatcttcatgcataaaacaggtacagctggatatcgagtacataaaaaggctatagaaaatgactccaagttacccaagcaacaaaaagccgcaatcataattacctgcacaacttcatcattgtgtgaggcacatttcgggacttggtcctttgtaaatatgcgaatgctagcaccagtagctcttctcatttcagaaataatgaaacctcctttacccaataaacaacctatctgttgagaatgtacaagaagcctagcaactactgcagcaccgggttcaaatccaatctctgcaattcgagaatgcacacgaataacagcgtcctgtgaaggggaatgtttttgctctgaattctgtaacatagagaattacaccgcaaaataagaaatttatgataagaaacaatgataatgatttcagttgataatgtcttagcaatgtctgatgtagtagtcagaaaattagttccagagcatttatgggtgagttataatcactgttactgttcatgatggcatggtggtataacatggcataacttacttttccacttcaattaagtaaagatggtccataatctaggataactactcaaatagttaatcattactcactgtatgagccttttacatgggagaccttagaagaaccaaaactgaataattgatttccagtcctcatcctctgcacaggatctacaagtcaccgaatagtaacaaatgaaagacgtctcatgtccataataccacctatggacagcttcaaactaataaatagcggtataataagaaatgtgctcggtaagattcttgaggtaccaaaaaggatcagaataactttatctaaattctctcttaaagtcatgtcaaaaaggttatgtgaaactaagaaacatgtcttcaatataaaggtgctctagaaaaggtaaaagtgcattgaagcttggactattatcaattcccctaggattaaaaaagaataatcgtagttaatatttcatacctcccgtgcagatatcataacaactcgctcatctgaatcaggtggagcatcagctatcttgatgtatgcgccagtatcattttgcaaatgtcgaattacagagccacctttccctatcaaactaccaaccttatcaacttggcataacagcttaaacaccacctcctcttctataaacattctattatgacccgaccccatattttcaggccctgaaacataacaataactccgattataagcaaaattaagaaagccagatgcgaaagtctgttgaaaatactattatcaatgtgctgccataccatttccatgatgcattctccctgaaactttactgccaccatagttggttgcattctccctaggcttatcctgaagacaacctgaaacagatagaagtgctttctttacagctgaaatgttccctgttatctgcatattcaatgcacccaagtatatagctttaaaaaaaatataatatatatctcataaaagaacaagtcaaactcaaagaatccaatcactcaatccacctaatgccattccatactctcatctcaattcctatccaacacaaaatattacaccattacatacaatgaaaattaacagattatggacccaaaagaagttccaagcaaaattgataacatgcacattagttcaaaataaaagttccataattgactgacttttaattcatcatttaaaccccatatgctaaaaattgttctataacatgaaaaatcactcttttaaagcataaattcagaaaatttaatcccaagcaaattgatataccatgaaagtgaaacaattcaccatgaaaataaaagattctatctaacacaaaatattacaccattacatgcaataaagattaacagattgtaaacccaaaaagaagttccaagcaacattgatagcatgcacattagttcgaaat

SEQ ID NO: 1761 - DNA, 1575 bp, Cannabis sativa
aggcatgacaagtgattaatcccagtctaggactagtattgttaatcaatacataattatgtattggctaaagtatatgcaactaggttccctataaagaaaaaataaaccttttacacaatcatatttaaggaaatatctaatccaatgaacaagaagaagcacctaaaaagaaaagcgccggaaaaaagttaaaagaaaattgggaaaatagccacagggatattggcccactcggtgaactcaacatctctacatctttcattattagaatatattagatgtattgcttttacaatcaaattcaacttgaaactctggaataggagattttttatttgggtttacattaaattttattggttttattataatttggattgcttaagatagttctttgctgtgttagctcatattgttggtgattaatagttaacgagcttggcatctgtgtgtaaagtctagataaaacaaaagtgtgggctttcctagttaactgaagcctttgatgaactatgtagctaagtccctaactttataaatatatattatctcatcacaattgtatacttttgataatcagataaataaattgtttctgacttaattagagatgggaaagaagacttagatgatagtattacattatcaaattacggtaattactatggatcaatcaagtacgcatgtacacctaattattatatattattatcgtgttttatattatataccgatcttggatttatttttaatttatctaacatggaaaacttctttgtatacctaattgtagcccatctctaatagccacaagttcaacaagaaggggagtcatccattctcttttcttggcggccgcataataaacatttccagtagagtcttgagcaacagcactaattaatgctaaatcatcttattagattttgcattccagcattataattgatagtgcaggtggctggcattttgtatttttaacttttgggacattgtttttgttgttgtggttttcaacttttttttatactttatgacacctctccagtatatctccatgccttggactatactcaccatgggttactccatttctaacatttccgaaccttccatgacaccaataaaataaaaataaaaatatttgtgttgaccatattttttaaagttcttgtaaaataatcattggatctgctgtaaagactattgctttatctgatcccaaagaccattttgttttcataccaaactgttggctttacatccccaaagtgcatatatattacgatcttcatcttgacctgtggcacatcttttaaacgctgccaatattgtgatcttcttatgcacaagggttgcatttgttggaagcaaagaatggcaaaccttccaaacaaagtgtttaacctttggtgggatttttatcttccataacttcttccaccaattgctccatttcggccatatcaaattacatttcctcttctttcatttcacctgccacccaataaccactattgactaaatactctctatttttgatgtaatgccacaatagtttatcttttaatt

SEQ ID NO: 1762 - DNA, 4462 bp, Cannabis sativa
acttcccttgtttgaaaatttctaaccgtgcttatttaaagccttagcattgcgcttatccagtgatattttttgggttgaaatttcgttagttgtttatatattttttttctcgtttattttgaaatataattgaatgagatcccatatgcatgctgctggagatacaaaaacatgagtacgattcaaagaaactcaacaaccatatttctgatcgtcttccttcactatcaagtatcaacaaccattagataagctcaacactttgccccaccaccaagcgacttggtttcatgagaagtactataatatttgaatatttttcccgcttcttttgttcacaacaatgagctcattccctcaaaattctcatattatcatgacagtttccatatggtaccttgacaagttccaaaccactaacatcatatatattatttatctagacgattgccacaatgaatacagataaaaattatatgttataagatcacaagtagatcgtcaacctaagagtactaagctttaagctgtaatgatttgatacaatggggatgtttctcaaacctaggcaataaggagatttaaaaggacaatgagatatgcacccgaaaggattcttcgacagcacgttccaagagcactatgctcatggaattttacactgctgtccaagtgagcgtacttgaattgagcacgagtttgatgtttgtccgcataactctgcacgtcttacagctggctgaatgttttcacaatgaagattcgatgtgatgatgctcaagattgcgaagtacgattctagcaaatattttagcttctagaggagcagttgctgctgcagcagcagctcgtaagactcttcctgctcctgcattttgcataaggcttgcatggtggactgcatgtctgccaccagggattgtaaactgtagaggaaacaaaatgggacagattgccacaagtttaagattttccactaatagaggatcacacaaatgcaattcaattcaaacatgcgcagcatacctgtaggagagcaaacgcagcacatgccttgagtacagatgatggattccgtagcatggtaacaaatcttccaatctcagctccactagaagatgcaatacagagtcagatgattcaggcagacaaaataaacatagttaacctaaattgggtttggaagagatcatagttaacctaaagggggttcggaagaaaattacacggaagtgaaattatgctcttatgagagccacatgaccagaaaggaaagagtcaactgactcagtttataactggggttgccaacataagaggacaaagtggaaaaggaattgggtaaaaatatgttgagcaaaaagtcaggacaggttggtagagactaatggcaagttcaagcagaagatatactttcaattgccagtagaaatgttggtccatttaacagataatataaagttaccaaaaattaatcaagagagtgaatcagtaaacaaacctgcatctcaaatgtcctgcttcctgaattcgagctccttctgttacctgtgctaatgctgcaggggctgaagatgcagctgcggcggcaaatgattgtggatcagagaatgtaagaacaaaggcttcaatgtgctttagagccatccttctagctccatctaagctcacactctttgacatactgtctgatgaagtcccaacaagagcatattcatccattctgcataataatttaagtagtgccagtgatatgtcaaggagaatatttacatgccaatgaaagaaacaattattgatttttaaagaaatatatatttctctcatataaattatttctacacaacaggagaaaacaaaagaattagtaatatgatcatctcagctatcgtgagaacacaatgagtacctcccatcaaacatgtatgccaaagccaaagcagccatgaaacgtgccatctttgaaacagaggaagagcaaagatgaacaagggcaggaactcctccttcctcgacaatgcggagtgcattaccagggttaaacgccaaattccatagagctcctgcagcagtttcgtggacatcctgaaatccgaaattaatatcagttatggcaaagacagtccagtagataaaaaaaaaacatatacattttattccctataaattatgggcttcggccttactatttctcaacttcatttgtggaaagaaaacaatcaaagcaccacatagtacattgtacttatcaccacccacaacacttcaataaataagtaactaaaattataaaatcatacttacttctgcttcagagcgtgccagtgcaataagaggtgcaacacccccttctcgcccaatagcaatgctaaaaatttacaaaacaaaattcattaaaaattgttgtcttaagtaatcctaagcaaagtcgacatgactaagattaaagtactccacaggcactaaaattgataaacaaaagtgtaaaatggaagacttctgttgcaaaccaatatctatgaagtatgattccttatccatacatgcagtttaagcataaattccacaatcatgtaacatgtatagcaataagaaagaaatatggtgcttcaacatgctagcaaaaacaaactctaaataatatttaaaagctaactaatctgcgaagtttaaaattataaaactggttcatacacaagtcggaatagaaaagactagacattaatggtaatgcttttcttgtttagtcatttaaatgcaatcaatcgccaataatttaggagcagagtcaacagcaaacaatattttttaaggattccaataaatgatagttgtaaacaataaaacctactgtcatacagttgttttcagggggtccataacaaaaaggttacactcagacaaacctattgacttctgagacggacaatccccagagagcaccagcagccctttcttgtagacctggggaagcatttgaacatgattgtgcaagagcaacctaataagcaacaagaaaagttatatgagaagaaactatttgattacagaaaaactcgggaaaaaaaataaaactgtatttaatccaacgcattcaattagagatgtaatcacattgtataagttccaaacattaattgttatgcttatctttcagaggctattgcattgatatgcttccagctaaattcttatggaaaataaaatattttattttatcaaatgggatgatgatatataaataatggaagtcacttttgtactttttcacatcagcctcaatatttatactcaatgatcattgatcacatatggtgatgttttctgtcgactagtcaaaaccaagaattacaatatccagagagttataagatcaacaatgttataccaaggcttcaacaccgccagctgctgcaattgcttctcgatttctatcatcaaatgaaagattccacaatgccccagctgcttcttgcctatgggagaagtgcagttattggtatcaaatcaaactaagaaactaaggaacatataaaacatccaatcctcctattacatggattaatttacacagcacaaataaaatgggcaccaacccatactcaatttgactccatgtcaagctaacccacgcagcaaaatatataaacaaatgaatgaaatcattgccaataataagattataattaggtattcgcaccacctcaattagacagagtgagataacattaatatccaaaccacttcaacaaagggcgttgaatacagattatacagtacctgacaccttcatgtggagattgtgtaagctgtacaagtgcttcaagagcgcctgcttcttgtccaactgcagcattgttgctgttactatctccatgagcagccaaatttgccaaagctcgggcagcctgttatatacaagaagaacctataagtttaaaacagacagatgcagtcggacatacaaagtgcattcactgaaaactgtaaacgatcaatactagcatctaaaccatgtaaataaaaaatcgctcacataacagaaatgtgagacgtaaaatgttgtttcagaacactttcagttaatttaatatctcagttattctggtagtttaaaaagggcttaatgagtaaggcacttgcgccctataatataatggaatgtactgttactacctgctcttgcaccccctcaaacttgcagttacgagccagcatcaccaaggcatgtacaccacctgcaactgcaacctccgtgctacacttatcatcagcggccaaatttgcaagtgcacctgctgcgcgttcctataaccacaaatacaatatgaatagtattagattcaatagttgtgccattatagcatccacctaaaaacactataaatcctaatatctaagcattgtacttaaatagaaaaaatttcatgacaaatttagagtaactgaccagtactcc

SEQ ID NO: 1763 - DNA, 2063 bp, Cannabis sativa
cactcacaccagaccagacctccatttctttctaatatcaataactactcattttctttcttctcaatatatgaatacaaggtcattttctttctaaaggttttgagatttagttaaaagcatcacactttctcctgacctctccctttcgtccagtcttgactttatggacagctaatttctccatggcgtgagaaaatgcatcgaagaatcgcttctgatctgttgcatacaattcaacaattggttttgttctagggtccttgagcatagcgttgtctgaagacaaaagtcccaaacctttcttcaagttcttgtagtacatgttatcaaactttcctggtgtcataacatcattaaaggctgacatgccatgatctcttgtgtagttttcacaggtaatcttcaatgcagctgcaaacaaggggtggatatctgggtcagtactgttggttttgctgaaatggaataaccggtcggcgaactctttgcaatgagagaatccgatggtgtgggcaccagttaaggccaccatttcttggacagtaaagccattgctttcaaagagtttgatcatctggtccacggtgtcattgacccttggaatgtttccttctacaagagaagctttggacaccatgccatctttgcgtccaagtcgaacctacatacgtgtaaagatataatcattgttaaaaataaaaattactattatgcaccaaaatggctagcttgtgtgatagtatataccttataaaatgggccaccaaccatgatgatgaggtcccgagtggtttgagcgaggatgtcagaacaagagacaatgccggggcaagaaagctcaagagctgtcttagcacgaacaataacatcaaacgcatcaccggagagggagaggttaaggtcggcatcacgttcggtgtccttggcatgatttgaagagattaacacagaggcgtcgcaaccctccaccatgcaatcatggaagaagaggcgaagagtgcctgccgccgtggtgggatttgatatctgttttgctgtgactgtctcccttatgatcttctcaaaatcaggacatgttttgttgtaatagccaagagagagtttcgattcgacgtagacgaaaggattaataatggagagaaggaggattaggagaagaggaggaaacaccatggctatgggaagaggggttcaagatcgaattgtggggagtttgaggcctacacctcctagcttggtcgtaataatttcctcaaaggaggtctaattactagctaggtagccttatactgtttggaaaaagaatttgtgttgaaaatgaaaaagagaaacgtaagaaataattagttagagaaaatgaagtaaaaagagttggaatggaaaggaaataaggttgtgaattttgtgggagagagagattttaggagagcctttctaatcttataattaagctattattttggtgctctgtttttttctttttaatacattgattggtacgtaaggttggagtttttctttatttttaatcggcaaaatctcatatttttgcatgagattaagagagataaagggtacgtagatattattagtaaattaagataatgattataattttctatttttaaataaaaatgagcagtcaacggacaaaatatagtcttctaaaagaaagtaaagttcaaaactattgttatacgaaatgacataatatccttgcttggtaataaataggtgttcgcgtcgaaataatttaaaatgaatggtccaacacttttggaaagctgtgaacaaaatctacaacttttatttttaacgatccaagtctaattctaactgaaaaaacgtcaaaatttaccaaaaagttatgacttgtgaaaccgatcgagctctccggctttgaccgtctccatcaaaatgtactaaagctactcaaaatgactctaaatatatgattaaaaatcatcaaaaaaatttaacaagagaaataattattatataatatttatatagttgcaaaagtgaaataatcaaaatgagcttgtgaattcactacacct

SEQ ID NO: 1764 - DNA, 3222 bp, Cannabis sativa
gagagagagagagtagaactgtagaagaacaaaacaccctattaaactttcctcttctctcatcaaacaaccaattcgattccatgggtatgtttttctttacttctcaattagtttcttaaacttttttttttcttgtttgtttccctagaaaatgttataattaggggtttcaatttcagtctgcctttaaaaatagtgttaacggtatcggtagttttggtgtttattatgggtttatgatgtgcagacgcggatatggaagattatgggttcgaatactccgatgaggagcctgaggaacaagacgttgatattgagaaccaatattacaactccaaaggtttttttgtttctcttttgattatttgggaaattttatttgtttgattgaatttatcatttattaggttttcttttaccaatttgtttatttgaaaaatgaaggtttggttgagacggatccagaagaagctctttcaggatttgctgaagttgttcgaatggaacccgaaaaggccgagtggtgagtgatacagaataatcacatggacagtgatttagtgagttggtcattaaaggaattatgtaatgtattgcatcatcatcatattcagccattgctttttactgtgaagttaagagattatttgtttgtttgtttttcatcataattccaaaaacagaactttgtctttattgcacattttatgtttttgttttctttttcattgcccttatagttaaatcatgagtaattcgattgaaataaatttttgacaatgacattttagctgagcttctaaaccttttcagaattgaattcagtctcttctttgctttgcacgtgcatccatttacattgaatcatttaagtctcaatgttcagattctgtcatgcttatttaatcagtcatggtcttttattaccaaattttggttttgggcattcttcaagttttcagacatgtatatttttggtttatacaactgaaacttaaaacttaaaaccttataatttacacaaacattccacacacacacacttatggccactgggcactttctatattacattattcagcaaaaaatgtctggacacccacatcacttctactattagactaggctactagattttagagatgttaggtgtttccagttttatttatttttcagttgtaatttccactttaaatttatttatttatgttcttgattatgattttaagtaattcaatgcattgatctgcatcagtgctcttataacaattcccaagcaagcttttctaaatattggctgagttattttttatgccgcatgtttctaggggctttaaagctctaaagcaaactgtcaagctctattaccgtttgggaaggtacaaagaaatgatggattcatatagggtgatgttgacatacatcaaatcagcagtgactcgaaattacagcgagaaatgtataaacaatattatggactttgtttctggttcagctagccagaacttcagccttcttcgagaattttaccagactactctgaaggcacttgaagatgcaaagaatgaggtaggcttgtggtaatccgctctctctatagccacattttgttttacgtcaagttttaactcctgttttgctgtactgcagagactttggttcaagacaaatcttaagctttgcaagatctggtttgatatgggggaatatgggcgaatgagtaaggtagtttatttggatatctaatattgtgagtcctgtatttttccaattaagaatgtggaaatatgggaataacttgtagaacatatttagatcttgaaggagctccataaatcttgtcaaaaggaagatggttcagatgatcaaaagaaaggaagtcaacttctggaggtatatgctattgagattcaaatgtacactgagacaaagaataacaaaaagcttaaggtaagatatttttataaagattgtttgttgaaaacctttttaagagagaacattgtgctttactgaccgagtttgcagtgcaattaatttctggtcttctattgtttttgtgcactggatgacttcagtgtcatctgtcacttagttgagcagtaaagctaacattgtcattcaatgcagcaattgtatcagaaagctcttgccataaagtcagcaataccccatccaagaattatgggaataattcgtgagtgtggaggtaagatgcatatggcagatggtcagtgggcagatgctgccacggatttctttgaagcgtttaagaattatgatgaagctggcaaccagaggcgcattcaatgcttgaagtatgttcacattgcccttacacttttctactttttaaactctacctacttctcagatgacctcacaatctctttctctcccttttctctttctccatttccccttatccttgtatgttgatatgtgaaataaaactcttgtcatagttccataaaatggttcttttgtttatagttgtcttaaaatggattaggcattaacaaatttatttttaacaaatatttatcctcgctggatcagtttgtataggcacaaaggtcaatgttcttttattaatctccacaatgttctttattgtgtggcagatatttagttctagctaacatgctgatggaatccgaggttaatccatttgatggtcaagaagcaaagccgtaagtcctgacaattttcttcattgtgtttacgaatgtttgctcttgttctaatcagtaaggtacaggtataaaaatgatcctgagattctagcaatgacaaatctgatagcagcatatcaaagaaatgagattttggaatttgagaaaatacttaaggtatagctgtacccacaatgctacaatgtaatgggtttaatcctttttttttttcttttttttgcatgtttggctgtacctgtgtctatctatctccttattcctgttactaatcttctattgatgcttgcattagagtaataggaggacgataatggatgatccattcattcgaaattacattgaagatcttttgaagaatgtacggacccaggtgctgcttaagcttatcaagccttacacaagaattcgaattccttttatttcgaaggtacacgttagtttttgctaagatcacattcttgtgtgtttagttacttcagtttaaattatgtactttccatttaaatcttccaaattatggcaa

SEQ ID NO: 1765 - DNA, 1576 bp, Cannabis sativa
taccttttacggaaggataaaaatcccatccagtagtttttgatacctagtaagactgaatggaccaaaaaggctctaccagccaagaaaagatgatgactcgtcgacccacgtaacttcttttagatcttctccacaatactaccatagtttgaatctttctatttagtaggcctcaagtgataaggtacttcaacggaaaagaaccttcagtcaacttcgaggacattgaaagctacttcttaatactcaggtctatacctccaaaataaattgaagttagacaagttggccgctaacccagtggaacaataaaaatccttgaaggcattttgaataatacccaaagaagaaatattacctttgctaaagataaccatatcgtcagcgaagcaaaggttgacaagtttagggacttacataaggggtgaaaattgaaactttttgctttggaggcttgtaaaagaagtcttgtaaggtactccatcaccaaaacaaaaaagtaagggagagataaggtcaccttgtctaagaccttgttcaccctaaaaggagccatgaacacgaccgttgagaaataaggagtacaagtacaccttaggaaaaccatgacccaattgataaatcttgaggggaaacaaagaccctttaataaatcagccacaaaattcccgtcaattgtatcataagccttgcttagatctatcttcattaaacactgaattgagatatttttcttggtatagtttttaagtaagtcttgaaatattaaaatattgtgagcaagcaatctgtttttgataaaggcaccctggttgcaatgcactaagcctggaagaacttcactcaatctagagaaaagtaacttagatatgcatttatatagcatattacaacacgctatagacttatattccactgtagaggcaggagagtcaaccttaagaatcaaagaaatcatggtcttgttaagctccttaggaatgtggccatccttgacaaaagaaagaacaatagaagaaaatttcttgcaaatttttgaccaaagccccttaaaaaatgcagtaccataaccatccgaacctagacttttcgatgaatggatgctgaataaagcatctttaacatccttttctaaaaaaggcctaatcaacttgagttagttttgtaaatccaatatggatccaaaagcaaggtcctctaggtctattttttgagaagcactactctttttacacaagaatttaaaaaatcatcaaaataatgagacacaactcttgagtaattgttaactactatgccattttccacaaatgttgtaattctattttgttcctttctctttttaatgctcgcataaaaaaactagcattttctcaccatatctaagtcaagtaattttactgattcgcaaaatgtagctggtatacagcttagaagtagcagaagaaccaactacgacagctagctcttcctttagccaaaatagaattagtaggatcaactgctaacttagtttgggcagagatatacctatccatcttgaaggagtaatccatagcaacatccgtcgagt

SEQ ID NO: 1766 - DNA, 1641 bp, Cannabis sativa
ctcattattttgttgtataccattatctaataccaacatattatgtactctttaaagtataatatctaatcacatgtcacagtaggtaagaaatactcttttattattattgaatcttaaacatattatttatgatgagctaaaaatagtccaagagaatgggaaggatggtcataaacctttcttccttccttccttgttttaatatctctttgcctgtttcgtttgtttctctttccagctgagtgtctttcttctacttttcttagtgtgtgattttttttctgttctcgttttttcagcttttggttgtttttccttgtgttttttttgtggttgtaactgtttgttggttttgtgtgtgggttggtagttggggtcgctgactcagtttactgtgtttagtgtgttttgtggggctggttggctgtgtttgtctcttgctgtcgggtgttatggagtcagttaatgtcaccaactccccacttaaaggcaagtgttttacttgcattgaagactctgtcactttatccccttgtgctgcttctcttaaagcactctctgctctttgcttatatggaaaggcgatgttgccacagtttctgagtttgtgacaaaaagttgggaaaaagttgtgtttgtggtgaccttattggatgttcctttacaccaactgtttcgagtttaggtttgaatgtgttgatgatcgaagctggggtctggagaatggatcctggtgcatacgtggatattccgtcatacttcaggcttggactcctagcactgcaggccctgtatcttttaaacgatgcaaggtgtgggtgcaaattcataacctcccacatgaatatttctcgatgtctaatggtaatctcttgggtggccttgatggtaaggtattatttgttgacttggaggaggataaacctgcaacttggaaccattatctcaaagttcaggttgatatttatgttgctaagcctctactttcagggtgctactttgatttgagctcagtggttaagcgttggctccagttcaaatttgaaaaaattaggatattttgctacaaatgtgggtgtttgggtcaccaaaggcgtggatgctcattgtcttctccagtcacggtggcaaatagttatggcaccccgtttcctctctacggacttctatctactgcatcgtcctaccaggatgtttaatctggtgctcactctgttctttgactggtttcctcggccgcttctccatctgtggccatgctccagtctccatcaacggcgaggaatgtgtctgatggtatctcgaagctccctgtttccaaacaaggacatggctgcggatcgaggagggtgaagatggtgacttctcgagagccagctgatcgaggctcttctcagcgtgctacctggattccgaagcccaagcctacaaaccgtgaatcgaccattactccgttgggtaatgagcttactgctgataggtcttgatttgggttgtggtcaaggattacatgggtcggtcaacatttctagtgggccaaatggtgtttgtaaagttcaaaatggacatgggaacttgtctcttgtggagaattgtattattgagggtggttcggctatggatcgggttattaaaggg

SEQ ID NO: 1767 - DNA, 2493 bp, Cannabis sativa
tattacttggtgtgtataacagaaaactgatcaagaattgttgaaagatgtaaacttggataagcaaaaggatattgatgattggcttccaattacttcatcaagaaatgcaaaatggtggtatgctgctttccacaatgtcactgccatggttggagctggtgttctaagtcttcctttcgccatgtcacaactcgggtggtaagctaataataaaataatggggaagacttatgattaagtgagctcagttcattaatttaaatacttaagtttgagatttccttaatctcaaggcgaaactcttacactaaacaccccaataagataaatggagtaaaaatagactgttgaacaatgctattttcttggaaaattggtattgactgtgttgaattttcaggggacctggagtggtgattatgatactctcatgggttatcactctcttcaccttatggcaaatggttcaaatgcatgaaatggtgcctgggagaaggtttgatagataccatgagttgggtcagtatgcatttggtgagaagcttgggctatggattgtggtgcctcagcaactaatttgtgaagttggggtggacatagtttacatggtgacaggaggaaaatctctgcagaaagtttacctttcagtctgcgaacacaaaaaatgcactcatatcaatctcaccgagttcattatgatcttcgcctcttgtcacttctttcttgctcatcttcctaacttcaactccatctctggtgtctctttagccgccgcagtcatgtctttaaggtacgccacaacaagagaaatgctaaaaggcactggtgcctaatacctttctatgtgtctttatagctattggtgcaaataaatatcgtgtctcatatagtttaatataacttttagagagtatttttagccaattacaaaagaacatatctaaaggtgttaggcaccaacactagtgtctattaaaaataaaaatgctcccacaactaaaagatgtttataactttgcttcagttgatacttcatactgttttccttaccttacagcacagttacaactattaatattgcataagttacgagagtcaaccctaggtaaagataagctacatctacacttagggtagactcaatcgagcccaaaacaaaattatttcttaaaattacatattttttttttattaattttcaaaaatattatatattttaaattagcacctaatactaaattacaaattttatgaatttttatactttgaggtgcaaaaatatgaattttttcaaaaaaattatgagaaaaatgaaaaatatggagaaactaagggtaacgagatactcttagggtaaccagctactaaaagaaatgccattaaggtaatcagttacttaagctgttttctaatattttttaatttttccatataataacttttttaaaaaattatatatattcttacatacttataccttaaaacttataaaaaaaatgaaaaaactctttctttcctaagattccaccaatctcagggccggcattaccaaactattgtttctttctttatgtatacagattctgttttttaaagagtgtttttgattgtatttgtagttactctacaattgcatggggggcttcagtgcataggggtgttcaaccagatgttacatacaacagcagagcatcaaacacaaaagatggagtgtttaacttcctgagcgcgttgggagatgtggctttcgcctatgcagggcacaatgtggtgttggagatccaggcaaccataccttcaacaccagaaaagccatctaaaggtcctatgtggaatggagtcctcatagcctatttagtagtggcaatgtgctatttcccggtagcattcattggatactatgtgtttggtgacaaaatcgacgacaacattttgatcacattagaaaaacccaaatggctaatcataacggcaaacatgtttgttgttgtccatgttatcggaagctaccaggtaagttttagggttgtccaattcagaggttggattttactatctgatccaatctaattaatcatatatatatatttatatatatatataatattaagtataacaacataaaatctaattcgatccgatccaattagacatataaaaataacattcaattcaatcaattataattaattagatattaaaaaataacatctaatctaatcacaattgtatgtttggaagctggttgtaattatatttgatcgatttttgatgcacacccctaagtttcaaagtgtcaattctatttctaaaggatgtttaatacaaccattgttttattctttcttgtttttgttatttttagctatatgcaatgccagtatttgatatgatcgaaaccgtattggtgaagaaactgaaatttaggcctacttggtaccttcggttcatctctaggaatgtatacgttggtatgtacaaaattaagtt

SEQ ID NO: 1768 - DNA, 2151 bp, Cannabis sativa
aattcacactacataacaggatttagatataatattaattaatttttttgtcccttttaattataaattcatctgaaatgttagttgaaaatgaaatttctatactcatcatttgataaatagaaattaaagtagtgtttttggtattaaaaaaactgatcttaaatttgatgtaaacaagacgataattgtattatgtaaattaaataaagtaaaattatgtttgggatagatgtacgaatttattcaaagacaccacgtacgtttttgtcgctatatatattataatttcacctgtcattatactatagtcaataataataacgaataattattataatttatacggatgaaagttattaggagaatgttttacgtacattcatgaccataattaagtagtaatttactatttccatcaaaaatacgtcattcatgtcttattatacgtacaatatatatatatatatattttcgcagaaatatatacaattcaattactatattatattaacctacaaaaaaattatatttctttgtttttttataaaaatattttatattttttctttgacaaagtcattgtcatggtggtatagttttagaaaacatattcattatacataaataatccgctttcaaataaataaagaaataaaaaccctaataaatattaatttttttaaaaatgtattaatatgatcaatattaattaatatatagagactaaagcaacaaattaagaacaacgttatataataagaaccatatctacactttattactttcttgaatgcatattaacaaaatctttacacaaagatattatcttttccagccgaataaactaaccctaaccctaaccctaaccctaaccctaacaaaataataataaaaaagaaatgtatattatatatatttatataattaagggcattgcttttttactgcaagaaaagctgtgaactcactaaagtagagcatacaaatactgaaagcgtatattccctgaagaccttttctctattacgatgaaacaaatatatattagaaacaagcaaatgcaccacaccacagccacaaccacaaccacaatcacaatcaccaatattcaacatattaattctctctcagctcaaacttcaaaaagtttttgaaataataatacgattaagaacaaaatagttatgtgagtaatttttgctttttattatttttggtcacaagtcacaaactttgggtttttggcttcccgagccaaagcaaagcaaagcaaaaagggagatggaatggttcagagttaatgatttaataataattgtttattgtatttttgggtttatggtttttgcttttgatagggattgggagatgcttttgaggaaaattgaatgcattggaatgtagccataaatatatttatatatataaatatcaaattaatgtaaatatatatatgtgtgtgtgttttcgtgtttgtgtgtatgactgcgaccagggtttttcacgcgcaacattaatgattattattttggcctttggcgtttgcttttggagcaatggtcattcaagaaccccaataccttttttattatttacttttcttttttacataatattacctagacctatgtacccaattctacatatcaacttacaaaacaaatcatgatcactagaactattttttttcaattgagggtgactagaagtagttcctatttcattgacactttaattattaatatatatattttttatttttttaataattacaacttatgcatgcacctttcaaaacgaaaaaaaagaaaccaacatatgtaaaattaatgttatgcaattaataatattgataaatcactcatttataattaaaaaataataatttattataaggatatttaagcattcaataagaagtttggtcacattattatcatataccgccatgacttccatttcaattaattagtataatttataattacaataaataatagacaaatgagtaaatatatatgtttgttagttgtatagcatatcgttaatgcaattcttcatgtaccaactttaatatggataataacttaaatttcgtggggatggtggtggtgaatattattaatcacatacaactatatatatata

SEQ ID NO: 1769 - DNA, 1606 bp, Cannabis sativa
cacattaagttggacctatatcttgtgagagaaaggatcttgtccaaacaactacaagttaaacatacccctgctcatgatcagattgtagacatattaacaaaggctctctctagcactaggtttatgttacttagagataaaatcgacttattctcattggtcaagttgagtttgagggggtgttagagatgttacagagctttatctttctgttaaaatgtttataggttagcttagttaggtaacttatgccatgtgtaattagttacagttagttattattgtatcactttgttaggcttgtatacatagagcttatgctcattcagttaataaattatccatttcacaattcaattctctctttctttcgattatgttattcctcacaagcttggccaccacactttaccatatccaaagataaggcaattttagcaagattatgagcaaaggagttctgcaggaaaaattaaaattgtatccctacacaactctctcacacacacattagtgtacaaggtcatttttgacctttcctggattttgaattgtggatagaattttgacacgtttttctttttattactttctttaagtttctttaattttaactttacaaagttgtaaattgttctaaacaggattcgagagatacgatctcaaccagagcataaatcaattgaaatcaacagctcaagaatatgagctcaatcaaagaaagcaacaaaaaactaaaaaattaagcaaagaaaagagatgagagaaattgagaaacaagcatagaattttacaaggttcaccaccaaatttggggatacatccttggtgagatgcctcagagaaagctcagatcaaatccactatcacgatcaatgattacattgagttccaagtcacattcatcgactggtaacccttttccttcaaactaggtaagaatcactcctctatcactcttttcttctctggatcaaaatcgattcctctcttttctctctctaactcctcttctttttcttctctctgcacttgagagcttgtctcactaggttcacactctggatctcacttcactcaatcctgggaagaattttctgaagttgtgttatttctactcttcttctcttctatttatagtggttgtgtagttgggtgagttagtaagagcaactaactatttgctgatcttgatttgtgattctattaagttggacaggattttatcttagatgatttgtttctgttgtgataggtcaacttatatggggaattagttccaacaagttcgcagaatggttacaaaagagaaacttagaaacattaacatgattacaaataacgtaaatgtgtttaacaatcattcaaaagaaagccaaaaacatgtctctcttcttcaagatatgaataacacgttgcaatctgatttgacctccacattgttgataccaaggcgcgaacaaagaaataagccatggaagactgccatagcttctaccattggtgggtagcttctaccacttgtggggaaagggatcccaaatctggaatagtcgcagaagccaaacaattaccccgttgatcacgcaccactaccccgtac

SEQ ID NO: 1770 - DNA, 2802 bp, Cannabis sativa
actttctacaccattactaatacaccaacaaaaactaataaacaagtagagagagttcatcaaatcaaatcaattgctttcatatgaatcatatcttttgttaggttagatatagataacttatatacgtatacatttgccaattgtcatgcaaaaatacttatacaataaataattaaataaatgaccaatctttatgtcacattaacaaaaaaattagcataatcttaccataacaaattatataaaattttccattgggattcttatatggtggacccataaaagacaaaaacaccctacaacatacttcaactctctctctagagagacatagcattaaaaaattggaccattcccaatcccaaaatcccaaaaaatatccaaaataaaaataaaaaacatatctttaaaaaattgcattaaaaacccaaaacttttacttcaccaatgctccaaattccaaaatcctctgtctctctttctcttccttggatttaattttggataaaatatatcaaaaaaaaaaacatttctttttctttcttcttcttcttcttataaaaaaatccagaaaaatataattatatagacataaaggtacgatcttgatttaatgggatacctttcttgtagagctgaatccgccgtttccaccgccaattctcaaaacccatctgccaaaacaaccgccggtgtcggctctggtcaagacaagcccattaagatccaacatttcgagtatagtgatcttgaagctgccacaaatgggttttctgaacagaagcttttgggtaaaggaagccatggatatgtctacaaagcagtggtccgtggacgacacgtggcagtcaaaagaccttctcggcctcataattttactgggtcacgacccaattcgacgccggagatcaccaatgaggtagataatgagatcgagatcttatcgaaaattcaaaaccctagacttgttaatcttgtagggtttactaatattaataataataataatgattcaagacataataatagacttttggttgttgagtttatgagtaatggtactctgtatgatgttctacatactaatcctagaccacccaattggggtagaaggattagattggctttacaaactgctaaagctattgatacccttcattgttcaaacccacctgtaattcatagagatattaagtctgcaaatgtgttaattgatcgtaattttaatgccagattaggtgattttggtttggcattacgttgtcatgttgatgattatagacttagatcaaccccacctgctggtactatgggttatcttgatcctggttatgtgacaccagataatttgagtactaaacttgatgtttttagttttgggattttgttgttagagattataagtgggagaaaagctattgatgttggttattcaccaccttcaattgttgattgggctattccacttattaaaaaagggaagctttttagtgtttatgatcctcgaatttcgcctcctagagatcttattgtgaggaagcaattggctgttgttgcagctaagtgtgttaggtcttgtagggagagaagaccggctatgaaagatgtggttgtttggctttcggggttgagtaaacttgttcctttgcattcatggaatagttttaacaatccttgtatgatgatcgagaatgtggggcgtccggttgaggtatttaatcctcattcgaattggttcgataataatggagatgggaatttggatggtgtggattctaagtatgctaggcaaattatgaggaattctaggagagtttactctgatttgggatttagtagcaatttgatggagcttatggctggtggtaccgatgaggagactgaatacagaggtgaagctgatggagttgttgtgcctaaattaagatctagaaatcgaatttcgagtactaaattcggtggtagtgaaagatatggcatcagagtgaaaaatctatctcaaacttgtactgataaaaatgatgtctttcctttgagacgaaaccgttcaataggaggaggaggtgcagagatttgttcaagaagagatgatataattcctcgaacaagttttcgttctcagggcgcagcagccattgaaaagattgagcgaagctcggatcagtaagctttttctcttgtttgcaaagtttcatttttttttcttttcaaattgatgtatatttgtttgtagctcattgctttgtttggtttgttgtaatgaacatagaatttaatcaatctttctatgttcttttttaacttttgtaatttcttgtaattttcttcatatttggagttcaatgacacatttctcatgtgtcatgatcatcataggcttgtggtccttgtactgttattctctttgctgttatgtttctcacattcaatacaaaattgaactgattcaaaattcactatactaattcttttaaattttggattttgtactctcttttcatattatcaccatgtcttttgaacttgaaaaatgctaatgtggtactaataaaatgggttaaaaatgtaaactttagcaaatatcaaggaagaaattctataatctgcttcataattagccaagtcaaaagttaacttttttacattatgtcctaaactatgacccacaaaaattgaaaacaatactcaatattctaaatatgaaaatctcttataaaagtctcaacaatgggtagtgatttttttcccataatatttataaattatattagaggatatttctcaattattattgccatt

SEQ ID NO: 1771 - DNA, 1688 bp, Cannabis sativa
cactaccggtatcttttagcaattctctttattataacttaactagttaaagcaatagggccttgcattcaataataaagtacaaagccaaattagataagttacaatatttttgaagatatcaaatgtatttcccagtggagatcaaattcatacattaactataagcaaaagccatttttctcagactttctgctacctatgttttatactaaatacaggtctcagcatccattcgttccagaatgcggcgcgcttcttcctctgttgctggaaccacatttcgaatcctgaagccattcttcgcagcctttgcctccggtcgcacagtgaacgagaaataaaacgtatttgatacctgcatgatcaaatatattagaaaggccaactcgggtactaaagaattgattcgagtagtgtttacctcgcttgaacgtagctctggcctactaacatgagcaacaacttctatgttaattaaaggttgatccgggttatgtagttcggtgtagagcacgcatgatttcaatctcaggaaatctccaacgtccacctgctcataacacattgtttacactgtcaagcattgcttaagtaacttaaaatgtagtgaagtattaagtatttactcacaggtcttaagaaatcaacatggtcgatttctagaaagtaagggaccgagcctgcaaaggcataggcggtagagaaagcaagttcgaatgctcgatgcagcaagaacccaccgaagattcgaccatgaatgtttctctgctgtggttggcagatcagagagttctcctggcgtgtatctcttaggagaatgctatctctgtctgctaaagcaggcatgtcacagaatattctaccttcggctaatagtgttttaagtctatttgcttctccattctcgaattcccttctatcttgttctcccctctttcttttcctcatgttgctccttgcttctgcctcttcaaagagtaacttttcttgttcggttactggtgagagtcgattaacaggagcagctttagctgtttttgagtcacgagctacaaaaatgaagttggctgagagagctacatcatctgaagaagcattagagccttctgcaaaaccgaaatgctcatgttaagacgattacactactcgaatctcttataggagagacagaacaatcgaaatagttcgggaagattgaaatattaccttcagtggactgaaagacttctagttgaatctcaattgatgaccttccaacccagatgacagcaccaactattttcagatcaatgtctacactaatcggtttctttaagacaatcttgtcaacagaagcagtgaccaacaatagcagccttgttgtgctatcatcatcagaacagtgctaatagaaaaaggaaatctggattagtttattatttcaaatgattaaacttaacactcatttcatcataatcaatttatgaagaaaaacacattattagcatgcaaaatcatttagcaaaaaattaacttaatggaagaaaattatagtaataatcataacacacaaatttggcttctaagtttcttaactgttagagaattatagaacaccaggatacaatattgcatatagtttaaaacaatgagtaatttaatgatatagaaatttctctatagacatcaagattggaaatgcatta

SEQ ID NO: 1772 - DNA, 1371 bp, Cannabis sativa
gataaattaatgtttttcaacagattccaatcaaagcaatcaagagaataagaaaacaataaagctaaattctttattgaatctcgaaagagttttacaatccgagacaaaagagcttagccttgcacaattacaatttacctcacttgagaggtattgatcaaacacgtacgtaatgcactcttcaacatccttctcattctctcacatatgcacttactaactgcctagacatctctggaccaatctgtcggagtagctgaatcatacaacataatataatggaattttcaatatttatacatcaatcaaaaagaattaactacaattagaccataaactttaaaatctttcaacttaaagaattttaaaatcaagtctactgtgaaattgaaaaatggtatttttgaacatcaaacctaaatacaccaacctaaacttgctctggggctaactatttagttggtatcactacaacattttagaccatatattagagagaaaaaaaaaagtgtgtcattgatcaattaataaataaactgagaacattttacatttggtggtataagtgaaaaattaaattaaaagcattgggctgagttaggtgatatgggttcgtattcggcccatttgtctctgtgtctgttgtctctctaatgatctggttatggtagagaagagatatcggaacaaggaaaggaaagggaaggaatggattggggtttcgttggtaaagcttgggaaaagtgggcttccttcaatgttgctcttcctcttcctcttcttcttcaggtaactaatcaaatcaaacccccaattcaatttttgagaatcaactctgaatttttaatgataaaaacaaaagaatggaatttgcaggtgaggcagcattgaaaggtgctattttgattaactatgatccaacagggccatctcgcttgttgtccatcatgtaatttatcaattcattttgattttgattttgattttgatttcaactaaattaaactaatttcattttcttggttcagtgcagaacaagaaggtattaaagcaaaccccattcagatgaaccacttgttggatttcatcaaacgtgacaaactcaccacccaaaccttcactattgcccataatcaatgtatgtatgtatgtatgtaaataacatgtttggtttgatttgatttgatttgatgagtaagttaagtatatgaaattaagatgttggattgcagatgttgttacatcaatccatgagaggtggttctgtggaaggtgcctcaacacatcaaagcctgctggtgaaggtgccattgttatgcaaacagcagcctttatcttggttggcctgtgagtaattatatatatata

SEQ ID NO: 1773 - DNA, 2951 bp, Cannabis sativa
ggtttacgtaccttggaaaatggagaccctatgatatctgcaaaaaaagtgtcatactccttaacatatatgcatgaagaacaatgtcagtacatgttcataatctgttgctagacagtgtcaatggggctctgctaatcatcatacccgcgaagaaactaggttggcccttaagggcgaaaacttgaatctgcttatgtataataacacatacacttcagttacaatgtggcataacgtagtacaccaaccttacagagactgctatccagaaagaaacatgcgtgaccctaataggtcttcttctatctatgaataagaatctttatatagaaaactttacaactattacaaaagagtatagctaataaaatacacctctaaaggtggacgagcttaactagaaatgacaaacaagtctttatgagggagagaaaaaggacccaatttttcttgttttgggtggctagggactcctcaccaaaagaaaagaattagaagctgaatcaatacctttaagtcatcatgaatgcataccccccttgaatatcaacatagttcgtagttttctctttcgccttagcaatcattagtattgacaagtaggattgagaagcctcgcggactggcaaggtagcagggatcaaatttcttttggtaacaaccatgggcaaaaacaatatcatccatctagttccaaatactcatcatatactctaccgctagcacactctaatagagctttagcattgagttctctaccaaatctccagatgtaattcagaccaacaagaagctcagtaatcattgcttcagttttttcctgattcgcaaagtaaagagtttgtaccagaagcacattagctctagaaaccaagttctgctgctcaaagcttcgctcagactgccatcttatggtattgtgtgctagcggccccaaccattctaatattgatgtcatcgcatcgttccactctcctgcaaggactggatcatagcttgatgaggccaagctcttgctgcatggttttaactttgccctaagagcagttctcacacttacaggcaacatattgtacaggtcatctcttgcatcaagtccaatcaagtgtggagaagccgctaacttctcaattacaacaacaacatttgcatagtgaagagacaaggctgcagcaccaagggtatcaggtggagcagccaacaacttagaattagatatagaacttgatgaattaagctctatgttgctggacataattaagtctgtgttggcatcattgactccattcaggattcttgagtgaattccatttgaactcaactgacaattggtgacaggagaactgtttccacccatcatacatcctttaaaaggccccacttgagtcagtcgattagctttcacgttagatttctttccacgggaatggtcatgagtttgccacatcttcttggtcattttactaattccagaaatcggacctgattttgtagttgacctcccaataggacctgaatgaaaaatgttccgtttattgccagtaactggaccggaatttggtgttgaggcaccaacactgatagggccagaataaaaattattggttttatgtgttgaggcaccaacactgatagggccagaatagaaattattggttttatttgttttagacattggccctgatttagctgcaaacttcccaaggggacctgatgcaaatctaggaagactgctctcagattgatgagctgaagattgcaacattgcagatactgattggctacgataaatctgatcagaaccagaatcttcagtttcaccaatgtcaatcatctgtggagctccaaagacatgcttgatcctaccaaatagcgtgaacataaatcgtgccaagagaagaaccgtgtaatcataagtcctgttccaaagggagtcatcttttaaacgcttcacctcatgcttcttccatgtgactttcttctcaaactccagcaaactggcagcatctgaatcttcattactcttcattctccttaacgtttgttcaagatctgcaaacacttccatctcttgatacaaatttgcattaagcgaaataaacttttccatcttcttagctttcctttccattttcttccatgtaaatgcccacccatttggatcaacaccatatctgatccactcattgaaagcttgttcaaaactcttcaaagtggggtcattgcacttctttccaagtctagccacggcttttgccacatgcaaaacattatcaatcatttcggtgcatattaatttcacaatgtattcatcatcatctgaaattagtttctttataccaactgagtttgtaatctcttctctgaacctagcaacctgcttatcagtcagagactgccataaatggatcatcttagacattaaactcgctacttcaaatgccaaaactcctataattgctttctccacagcagcctcatgcttttttggggtcttccaaaggctgcgaaaccacgattctgcaaccatctcttgtcccaaagatataatctttacaccaaattcaacatcacgtttattgattctgtagggaatcagcaatgataggaaaaacaatgaattgagttcagtggctgactaggtgggacttaaactgataaagaatcaaaagaccacctgcaaaagaataaaaattaaatcacaataaaacctccaccagactcaagctactacatgaaatttaagaaaggaataaactgaaccctaatttttaattgatggacaaataaatcagaataaaaaattaatccaaaattttgtgccatataattttacacacccaatatctagaaacaacagaggaaataagtccaccgactcaacttcttaactcattcctagaaatttaaactcaattccagatgaagtttctctctctctctctctc

SEQ ID NO: 1774 - DNA, 2362 bp, Cannabis sativa
aatattcggttttggatcatctcttttaatattcatatggaaatgtgggactttgctaaattttctttttcaaatttgtactattatgtttgtttttcagattagatttcatcttgaaaaaatggagcaatttcgtcagattggagaggtgttgggaagtttaaaggcgttattggtgttccgagacaacattcaaatcaatgagaggcaatgctttctgttatatgatgtctacaactctgcttatgattcaatagcagaggagatgagacttaatctgagattcgaagagaagaacacgaataagtggagaattcttgagcagccattaagagaggtctatggagtttgtagagaaggagaagcttatgttaaacaatgcttagaaaccagagattggttggcgaaagcccttttactccatcataattccgattgtgttgagcttcatatccacaatttgctttgttgcattccaagtgttttcgaagcaatcgaaatggttggagaaatatctggttctgatcaagatgaggtacaaaagaagaaacgtttgtaccatgggaaatatttaaaagattacagagattggaaggtttttcagtggaaatttggtaagcaatacttggttagtcaagaattttgtaacaggtttgagatggttttgaaagaagacaaatgggttatgctcaatagaatcaaagataagaaaatcttaggcttgagtaagaatgagcagcgtcttttagattttcttttcgaaagctttgatgggtcggagcctttcaatggaaagctcttaccactttcaatcctactaaaatccaaagactaccaagttaggagaaggttgggtggtcgaagtcaatacaaagagatcatttggtttggtgagagctttgtcacaagacacttcttaggtgatcctgagcctttattgcctgacatttcttcattgttgtctctctcacaccccaatataaataactttctttgtggttttgctgatgaggaaaagaaagagtggtttttggttatggagcttatgagtaaagaccttctcagctacatcaaagagatttgtggcccgcgtaagcgaattccattttcgcttcctgttgcagttgatctaatgcttcagattgcaagaggaatggaatatctccacttgaaccgaatctaccatggagatttaaactcttctaacatacttgttagagcaagagcaagtagtaatatcttcacagaagggaactacttgcttgcaaaagtttcgggttttggcttagcttctgtaaggagctctacaaatcagaatgaaacttttccattcatttggtatgctccagaagttttggaggagcaagaacagactggacatgctgagaattccaagtactcggaaaaggcagatgtttacagctttggaatggtttgctttgagcttctaactgggaaagttccttttgaggatggtcatctccaaggagacaaaatgagccgaaatattagagctggagaaagaccattgttcccttttcagacaccaaaatatgtgactaattttactaagaaatgttggcatgctgatccaaagcaaaggccaagcttctcatccatttgcaggattcttcggtacatgaaaaggttcatatcattgaatccttttgactacaacaaccagcaagaccctccagtgccacttctcgattactttgacatcgagtcaagccttcttagaaactcaacttcttggggatgccctgatcagttctcatcaatatcacaaatcccatttcacatgtttgtttatagaagtttggagaaagaaaaaacaaattcaagctcaaaagatacctctgaagaatcaggaagtgatgcagcttcgatctgtggagatgaaggagtgaatataattgatgatacattgccatcagcacaagaaaggaaatctttaacttcatctgatagcatgaacaagagactctcaatctccaagaaaccttcagatgcaaaaacaaagaaaccaggtttgtcacctccccccattgctggtttaactgaattgtgctagaatttggtttttctgtttgatcattaacctttaaaaacaaaacaaacaggtacaataacacgagcacaatcgcttaagcctccacaaataaatcctaacaggagaagtatgcgaagaaattcagaaagccagctacttatgataagtccaagactaaaaagaacatcatctgggcatgcctcagattcggagctcccttagatctttgttttacaaaaaatacagaacagtttcggtttcagtcgaaatctgagatatgaaagacgaaaagcaaaaaaatgtatattt

SEQ ID NO: 1775 - DNA, 3852 bp, Cannabis sativa
attgctctaaaatttatgtaaaatagagtatttgttgtatgccatattttttaataaatttatatcttttcttgtctattttaaagaaataccaagtttagagtgctcttacatatctggtttccatttgttattgtcaacaaagtaattaatatttttatacaaagagtgtaaaaatgtcaacttgcattttgtattttgagtaatgtattactaacaatggttatattttgtatgacaattcatgtctgttttatatgaatgtgtgaagcataaaacacacttggcatagaatttaataagaaaaacattctcattgttgtctccatttttattgaacaagtactaaaataacttaattagttccaaagtaatgtagactttgttgaacatccttattgaattgaaaccagttctttcatgtcatcactgtcttagaagagagaaagcatggattgaccgaacatctctctcgattccttctcacactccaatgtgtcttctccgagatagtttcgaaaataggctctgcaaagaagttcactctccactctgctcacaagctctccattcactgcacccatcaaaacttgtaacattagtaaattttatgttacatatacaatacaaccataaaaaaatggtaaaaatttatttagtatcttatattttatccaaatataaatttgattttatactttaaaatcatacatattgttttttgtagtctaaccttttgtttcaagaacatatcctggtagtttagatacaatcatttctgaaccaagtcttaacttaattttatcagaagtagtaccgaaaactctacaagaaaaatcacaaaaacacaacaagttttttatatatataagaatgtttaagttaaataatggttggttgtagaaagtagaaaagaatttttattttgtttacttgtttgaaagttcctcatttttttggccagtgagtttcttcatagattctctcatagcttcagtaaagccctttttggccatgctcaatttcacaccagaaaaggatactaccattttgatagtcatcccaaaatcaccatcaattgctaactgatacatctcttctgttggttttgatggggctttttctatttttgacttcaaaacatctttcaatttatcactatctacatacaaccctgcaattccaacgatattggattatatgaggttatatgcaatttagttagttacgatatatattataaaaaaaatgatatttatagatataatataaattttagtataatggttaaattaaattacatataattgtaaattctaagtctgtttctcatacttattatacctatgtttcaactaaacaatattaacaataaataagaatgaattaagaatatatataccaaagccataagccttaatgctaagcccaagcaaagatttcttattatagccaacacaatacaagattttgccatcatccaatttcatcggaaaagaaatgccggtcttcggctcaacttgaaccgcctcttctttggtggcggcgttggagcttccatctgaggttgccattgtttgagagtttgtgttaataagatgaaatgaaagagaaagagagttagttagtatttgtgagtggtgaatacaatatacattgtgactatgtatttatattggcatgaaaataatgtttttttttatgtaaatagcttcaataggttcttgatcatggaaaattattgtccattctagttgctacataggtaggaaagaaaatgttatgttatagaagcgttcccatggaaaaaatgatcatttttatttataggtttttttttttaattaaaaagaattatgaaatatttaaattacaacaaacatttcactatacattgattccattaaaccattaaaccattaacaggtaagattatcttcaatgcaatatctaatatttgatataaaaaataagtttgtgatatatttagcccactattcatccaacatcttattttttgaaaaagcctgatacgcaaggcgttttgggatggtcttttcagttcactcgaaatttttgaggtgcgaagaggaaagcccctctgcttgttggttttagggccagcaaaacgggtcagacacaataatacgacttgaaactcgtacgagatttagcaggtttaggtttgccttaaatggatttgggtcgtgctcaggtcgacttgtctaacccatttaataaacggatcgcgttcgggttgacacagctaacacaaaactgacccgttaatgatatatttaaagttattttagtactttaacatgtcataaataggttataaacgtattgaatacttcataaacgtgttattggttgacatgtttaaacaaaatatgcttataaacgggttacacgggtcgtgtcgtgtcaatctgtttataaacgtgtcgtgttcggattttattttctgacacggttattaaacgggtcgtgttcaggtcaagcatatacctgttatacatgggtctcgacacgacacaaacacgacccgcgaacacgaatttccacccctagctggtttactagtctcgacgggtgttcatgtggctgctgatccgtgagtgtcgcctgctagggactggaaagttgtttggcttttgtttctactctggcgttggatacgttacatctgcatgttgctgaagctatggcgattcaccatggattgttgctttattcctctcttggttttcagaatgtgaaattaattgtcaacgtgttacaaacatcctgcaaaaaaaagaattgttgttggctaactttagttcgattctccaaaacatttatgttatttgtgatcatgtcaaagtgtttaatttttttattattattataatcgttttataaattttattgctcataattaattttattaaatttgctttatcttttgataaggcgagagtgtggtagccgagttcattggatcttttgtgagtccttgtggcttggttttttggtcatcgtctgaaaaattcattctattaaaaaaaaaaaaacttattttttgtaaaaattcaatttcttctatcatttagtctactaaaaaattgtcaaaatctaataatttgcatacttaaagcttgtgaaatattaggtttatggtaggctatggctgggttaggtttaccggacaaaaatcttgattgagaaaactaaaattttaacattacatatacaatgcaaatgtataaaattatagcactatccaagttattatattgttacatacaaagcaaatgtagtacagtactataaacttattatattgttattggtgtatttaaaatattaaattaatataattaaataattattttaaatattactaacaatgtactacactcattgattgaagtatgatacgatagggtaggtattggtccttaaattaattaggcaaaacctctagctaattatggatgtagagaaggtacataagtgtgaaaactattcattttaagtgaagtgtttgcaatggcattagttatggagaaatttggcatgaacttaataaatggtctaaaattttgcacttaaaacttatctatggtgtggctggcttaacttttagaaaggaaaattacatcacattacataataatatagaaattaattactcatttgttctttaatattcttaaattttagtaataaataacatatattttttttagagaaaattaaaaattttcattaataaacaaatcagccaataatcaattacataataatatatcgctagtaaaatcaacaaaataggtaaattatatcgtttacaaatataggaaa

SEQ ID NO: 1776 - DNA, 2831 bp, Cannabis sativa
atacatcaggagaagaatcttcaaaactaccaatcatatgtacctgcattttttaaaaacaaaattctctggttaatgatccacaagacaatagttataaacaatcaaatgaaattacaacaatgatttgagaggaatacatctagatcatcatccaaacaacgatcgataaatgatgaaagcatctggtcgaggcccttatcgacaatatttggagaatccatatgagcaactgaggttctacaattcaaaagtaaatcaggaacattgaagtggagaaaagtattttatcaatagtaaatttattatcaataaaatgaattcttacattccatttttccgattccttatagcaaatccaacacaggttgttgcttcatcggttccaataaactttgcatttaagagatagatacagacaattatatcagattgggaaatgtaactcaatcttaatttgaagctaaggttatatcatgaagcaaatataaagacaactaaacggtaattaacatattagagaatgaaactataactgggttataagggacaaatgcaaagaatcattatgattaatcacctagaacagattggatgatcattacttaccaatatcatgtgtgtgaaccaatatcaaaacaacattacttttaatctcaatagtataattgattaggattttgtaagttgagttgtcaagtgcttagtggctgaaatgattgttaagtgtgcttaattcttagttaggagtctttgttagcctagactagagattcttagagagagtctcatgagagatagagaatttggtgtgaattatttagagtaaaacattgctcttagggagataccaaactgtctcaaaaagtttggaattttgtaattcttactctgatattagtaaaatgtatattctctaattctttgaagaactgaatcggatcaatagtgtatcatagttatgttaaccgaaatcaaaagctagccttgatttaagcataatctaaactgataaaaacatatatttatagtagatggaaatgctaaagtggtgcattgcatcctcctaccgttctagtgtcaatatcgttattggtgtaattaagtatcgaatttcatgtaatttaatgtaataacttttaaagagtttcgctaactaaattgcaaggtgacacgtctagaaagtgctaggcactactaatttccaatagcaatactctaaatttaaacttttatctaattgtaaaaatctgagttgtaaataaaagaagaaatacatacatcaaccagtgcaggatctgcagttgcatattctctttggaacaaatagacccatttacttttctctaaccttcctgggcaagactcttcaggaattttaaatttcctctctggaatagccttgattgactctgaagcagataccagtgtagggtggttcatcaaagcaagaagggtatcattttcctgtaacagaaatattttatgatctatatattacctattaacttcatacaagttgagaaattctatgggaacaaaactcattgatatatttcaacaggactcgttcagattgtattgtatagcatccaatcatataatactatgttaaaattttaatttatatcaaaatattttattcatataattttatataaaatacaaatgaatataggagttttcaaaacagtttttttttttacatttttacagaaatctacatagaaattcacataataaccaatgaagcaacttaaattgaaattaaaatctacatattaactcacataaaaaataccagaacaactcaaactgtaaattaaaaaaaaatactaaacaatacaatacgacataatggtatataggtaattcctaagaatataatactatgcaacataataccacgtaatggtgtaccaaactagctctaattgttctgttcattatataatacatttcatgttgaaacattcaaattcaaaagcagtttaatcaactcaaaagcattctaatttccaaaaggaaaagtttacatttcccaatttgaaatccataatatatacataagttcaagagaaatggagactatttggttgtgaaatatgataaaaatcagctatgaagttaacctaaccaccttctaattcatcaatctattaaaaaagaaaaactatatgaaagctaaacatgaacaagttccaccctttttaaaatatatagcattacagaaactatacatttacagatattaataataataataataatgaacaatctgtctttcccactttcaatattgaaaaacaaacaaaaacccaacttgattagatttagaggcagtgcacagagatgggtatttgataaaaatggtttgaagctgaaataatataaattaaaagataaagtgaaagagagattacattggaagaagatgaagaaatgtggtcgtgggtatggaaaggaacaccattaaggaatatcatggtattggattggagctgatctagtcaacaagcttctgacttttgacaatcggcttctaccattaccatatgatgcattatttctttccaaattccatagcaaagtggaatttttaaaaataaatttaaatgaatttttttatatatatttattaaatatttgatggggataccataatatttattaaaaattgttatatatttattaaattttttatactaattaattgtttgttggtgttttattagtgggatgaaaagtttagagattttcttttaagatattttaaggttttattctctaatttttctcaaatatatcttactttttgtttagtaagaggg

SEQ ID NO: 1777 - DNA, 651 bp, Cannabis sativa
tcgccacgtgtatatttgtgtacaccatgacagtccactttgacactttactgactaaaatagacggaagaagcaaaacgattatcgagttcagagagtttagccatatttttttaagaaagagggttaaaccgtaataaacataaaactataaggagtttgaccgcaaattacccttaattttttcttctctaaatagttagttatgtaacttacagattggatgtacatttataagtccaattggattggataattggatttttcgaaaagaggttcgatctaatgaacaattgctcgaaccgatccaactatactatacgggtgatccaatctaatgaataattgagaacagatcctactatatttatatatacttttaaaatataattattaattttattctcatttatatgcgtttatgaataagtaagtatacatcttcaactatatgtgtacatactaagatatagatagattagaattgtatcattatgtaggttggattagataatttgtattatattgtgatattttaattatgtgatcgttggatttatgtttaatatgtatatatatgttgaatttgctataaaaaataagttttaaattaattatttttttgaataaaaatcataaaatttattaatt

SEQ ID NO: 1778 - DNA, 3970 bp, Cannabis sativa
gagttcaggttcgggtcccgagtttgggtgcaggtgcaggtccaggtccatgttcgacacctatccgggtccgagtcatctcgggttggggccggatccgggttcggatttgggtctcgagtctcgggtctagatccggattcgagtcccagtctggatcccgagtcacggtctgagtcctgggtctcagttcggatcccgagtcctgagtcccgggtctcgagtcttgggtctcgatctgggtcccaggtcccaatcccaatttgagttcgagtcttggccctagtttgggtccaggtccgggtcctgagttagatccaggtctgagtccctgatcgggtctcgagtttgggtttgagtctgggtttaggaccgggttgggtctgggtccaagcctgagtcccgagcttaggtcctgagttcgggtctggatccggatccggtctcgggtcctgggtctgatgagtttggatctcgggcagccggttcggtacgagtttgggtccagggtctaagtcttgaattaagtcatttttttaaaatataatgaaaccggatcggatctgatctagaaaaatatttattcgaatattttggattaaaagtgatcaattgaatcgaaattctgttctgttccaattaaataaatctttttgacatgcctaacttaaatttattattattgtcttggctaaaaataaatatatgaaaaggtcaacttaaaataacaaaaataatattgtatatggagaagacttcacagtgaacaatttaataaatataaataaataaaccttagttattattgtccataattgatttttgatgatcccactgcttttaatgcaattttacttctgccctatcctcaaacacacacttatctataaatagtgttgagtattaattagctttatataaacaattttatatatgtgatatatgtatatcacaacatctttttgcagtaaagtgagaaaagttaaatgggttgcttgcttatgatactccattgcatgacctatataattatatatagccttcaaattagggtaagtgaagaaagtgggcaataatgaaaagaaataaaaaaaaaaagtagacaataattaaaatataaataaaaatgaatatagcctcactttttcttatagccatggaataatattagcacttatcaacaataattgaacataaccttaaatgtataaacaataaagatatcaatatcaatcttaattatatgtatcttatacagagaccaaaaaaaaaattaataagtcattacacaacaaaaattgtgcctacgagttatattttcagtggcaacaaaaaactaattttaatttgtcactaaaagatacatagtaatttgatacatattcactacactaatttagttttaggcttttttttttttaagaaaatgtgtcaaccatattaaaacactaacaaataagtcctttaaaaaaatgagagtgataatttattcaaaaataggatctgttatgaacagatcctgaatgcatttaggactccctggccagtaaactaaactactgcttgtcgtcaaagcaagtttggtatgagcaacactattacaagacttattataatgaacaatattaagagcatctccaatagagtgccaaaaaaatggtgtattattatattttagcacacttaagaaaaattactactctaatggtattctaaattgtgttaaattggaccaaaaaaaaaaattgtgttaaattggcacaagatataacattgtaataaatttagctcacaataaatattacttttttatttactataataccactaattattattcataaacttttactacacttcacattcttaatttatttatcgtattaccattattttaataataaaaaaataaaaaaaataatttttatatattctcaataaaatattaaatgatcatcaatataatcaattatttttttttttattttgcatcttgtgcattggagtacaattataaacaatgtttcaaatataacacaaactaaattttttagcacaaatttcaaatattccattggagatggtctaacaattttgagcctattacaatgaccaagaatatcatctaacactagacctaaaaaagtaatgaaagaaatattattttttattttcagcacaatactcaaacaattaaattcaataatgatttgtcatacccaaaagagagatgttggaacaaagtttttccaatagctgacgcttcagccacctcgggaatgaaacaaccatccaaacgctaactcatcgaagcataggcaacacccgaatcatctctaataatcatagccactacaattacttgtagagcttagagttgtgtcagtattgactttgagactaccaagaggagttgtccatttgggagctgcctaagaatttgaaatgtacgtgctgcaacggaggtaaacaagaagagccagtcaccgctagtgtgggaggataggtaatagtcttcagaccctgcctattgtgaaacgtccccaaaaaatcacgagtccaataaatagtaagagcacgagacaaaataactttattatgaactatttcattacgcttgaaccaaaccctccacatgatcaccataactaattcaatcatctcattgagagtagattaataaattgatgaataaaatcaagaaaatctacacaatgaacaagagaatctccttcacagattttcctacactaaagcagagaactacaacttcaaagagcatgatgagtagtttcattttccaacccacacaaaggacacaacccatcatataagagaccatgacaagataaattgatcttagtaggaatccaattatcggacacttaccaagcaaaaagtctaacctttggagggagattaagagaccaaatcttttttcacaaactcgacaaaccccagatggagaaactcgaagcactaccaagttgcaaagagctagtcaataaccactcttaactgaaaactatatcatgacttctcaaagttccaaataatcttatttggcacatcgataaaagatcatagaatagaaaggatagcctcagcttcactagccaaaaagctggaacaaatcaagtctttatcccacccctaccccttgaaacatcccctaacaaagagaccttgcttgactcatcaagtcaatggggggacgtcaaaatagacggtgacattaaaataattcaattatctgtgtaaatggcaatgttgtttccatccacaacacgtcagatcacccccgaattaaaaagctcactgccccataaaatattcttccacacaaaagagcctcgcttagacttcttaatttttgcaaaaggcctgtttcggaagtacaaaccttttaatacgcgaccaaccaaagagtcaggaacattgtaaatacgaaaagcttctttagcaagaagaacttgattaaacaactgcagatcccgaaaactcatcccaccatcctccttatgcaggcaaaatttgtcccaagtacaccaatacatcttctttttatcattattatctccccactaaaaatgagtacacatacgacgaacgttttttataaaagtttttggaatcttaaagaggttcataatatatgtaggaatagattgaataactgttttgataagaaactcacgacttgccatggagaacaattttgatttctaccaattgagttttttccaaattctattctgaatggcgttaaacaaacccatcttgcttttttccgcaaaacaaggaagacctaggtaactctcgtgacaatcaaccctcttaacttccaatatgtccaccaatttaactttctcagtactcaaaatgtttggactaaggcaaactacaaacatatcgaatttataatattattttcagctctcatataactaaaaattaatattagttcatt

SEQ ID NO: 1779 - DNA, 838 bp, Cannabis sativa
tgatagattgattctcaggataacatgtgtctgtttagttaaagagttattaattccaacttccaagcaactaattaaatttcttccactgtgtcatcacatttaatgaaatttctcatatgagcaacgttcattttttataggaatgtggctttacaccatcagttataagctatggatgtttgatcaacctttatactaaggttaacatccttttccctctcttttccattagctatttttattttctttagctcttatacttcaatactacccaggaaatattctttctgaatgatacccttagattttcgttgaaaactctgtacttcttttcagattggaaaagtttccaaagccttagaagtcagcagaaaaatggaatcagttggcataaagcacaacatgaagacctattccatgttaatcaatggatttttgaaattgaaagactgggctaatgcatttgctgtttttgaagatgtcataaaggatggtctaaagcctgatgtaattctctacaataacattataagagcattctgcggtatgggaaacatggatcgtgctatccgcactgtaaaagaaatgcagaaggcttggcataggcctacaacacgcacatttatgcccatcatacatgcgtttgcaagatctggcgatatggacaaggccttagaaatttttgatatgatgaggatgagtggatgcattcctaccgtacatactttcaatgcgttgattcttggccttgttgagaagtgtcaggtaacgcatcacaccaaaattgcagtatgatatagaattatgtgatgtccaagattgcttaaggactcta

SEQ ID NO: 1780 - DNA, 1169 bp, Cannabis sativa
aaaaaaaaaaaaaacagagaggtcaaggtcattgaagactattatcaatttcatacaatacaagacaggaataacaacaccctaactatagcaaggcagaccagaaaagccaagaaaacaaagagaggtggtaaatggttattgcattaagccttcaaaaatgactttatgtatctcatcagcccaaaaacagtagtacgagataatattctaaagttgaagatatgaagttagaattacatactgaagattggcaggcttgccacactgaagacatgacaaagaagaggcttcagccacatctgaaccaccggccatcaactccgcacggctaactaccctcttatatatgtacctgccctgtctggctcaattcagaaaataaaacgatcaatcagtgttatacgccattacataaccaaaaattgtaacttcatatctttgactagtaattagtttggaggaaaaacctcacgagtcacgaggaggttctgagtatcggacagatgcagagagcgacagaacgcaaaggggagatgaattagggttttttgagagggaaagagaaaaagaggaagtaattcttcaaacaaaagaaatgtcctttattttttatttattacttttttagagacaaatgtagtttatttataattttataattttgaccaagttataaattttttaaggctaattcaactcaaaaattcaaaaatttataaaatactttttttttttaatattaaatgtataactttttttatctttcttatattttaagaaaaatacatccagagttactttttctttattctcaaactctcagtctctgattttgccatgcgatattgtgcagtttctaattcagtgttggtgtaaatatagggttcaaggttgagagtttttaggctgtgcgggtttacgtgaggaagggtttgggtcatgtgagttcaaaggttgaggatttgggtaattataggaagatataaggtttgtgtgatatcaggttggggtgtgtgtttctttgagggttggggtgtgcaattctttaagggtgggggtgtgcgattggttatctttgtgaggggttggaggagttctgttttggcttcgattgttaccaattatggcttctagaagttgtcggttggaggattagaggagaagta

SEQ ID NO: 1781 - DNA, 2197 bp, Cannabis sativa
cactataactttttttttttcaactggtgactcagttacctaaactgttgatatataatttcatttttttcaaaaaacaaaactatatttttgtaaatgttgccaagtaaaaccataaaaataaaaattcccctaataaaagtaatacttttaaaaattgggtatcctaattgaagccctaactctaagcacaggcctagttgggacatagtgtttcagctaaataataagctctactagttgagaccatataaaagataattcaagttcggctttaaaattggtgggtcttaagaaaataaatattattactcaaaaaaaaattatgtagtatttttataaattattgaaaaaaatttgtatttttaaaaggaaactatttttttggccgcagtgggttctaggcaagagtctaatctgccttaattcaggcccgaccgtgaagtaattttgattatgttgacaattttcacagttgttttgtaggtagaaagcttataattgccattggctgtctatattgcatagccaaaaccattttacacacctgaaaaccagattcaatgaagataaatcttttgtagaactagtctctgctgagtaatttatatgtgattttcttattcatgtatatagtaaagctatgtcaaactgttacaactcacaactacaatgactacaaacaatttttaatctaaattctaattaaagcctttaattactatcaaaacatgaaaaacctcaactatacacaccattaagacatttttatttggatctttatatacctattatttattatttcgctacataaatggaagtatgctttatagaagaagagcttcaagaattggcataacagaataaatcaacttgtacaacacacaaatcaagctaagtgaactgttaatacaatctcaaaaagaatgaagatcgagctcaatatgttttgatcgagaattaaataatgtgttctggcagcactttgattaccaaaccaaagaatgggaacatgaggcagagtgaattgaagtttttgagtaaataacttagctacttaatctcatggagacattagaaaatctaaactcacttttctcgtgcaggaccaagctacaacctgttatttctttgcagaccaagatactaaatttttgccgaacaacataataacataacctcttgatgatttatcatcttcaagaatcaaatgcggagttccatgtccctttcaactgcacaaaactcgaaatgcaacttgacgatgaacttaagctcttccgcgaactaagtgacttacatacactgttttttcaaggtgctccaactctttcttctcttcagaggcagtcctaaataagtactgaaaacaaataccaactttaatgagtcaaagaaataaaaaaaaaaaaagtaaagtaagaaactcttccaaaaaaaaaagttacttacatgaattgattgtggatcattctgtccaatcacagatgaaagtgagatgattgtttcaaaatgaaaactttaaagtcttgtctaactactaaaagagtcctcacttgtttttattttcttatttctcttctttgtagcttctgcaaaagaagttgaaaaacgatactaatcaatgcaaacttaaaaatcacaatcatgaaaatgaaatgcagaacagcaataattactatttggtgaaaatgcatttaaagataactaacctttgtcaactttttcactatcttcatggttttggagtgttaagactatgcaagctcatctcactaattgaaatacatatataaatatatacatgagagaattaggaggatgtgaaacactatggccttgggctcaaaccagctaattaagagctgatgttgctgactgatggacacttgagtttgagggttgcaacaaatcttcttcgtaccatatttttcttccagcaaaggacaattatacagaaagatagtttcgaaagaaggtgtaagtaaaccttcaaaagcaggtggcagcccttttactggaagtgactgcaacttggggcacccactgatgtgtagttctttcaaggatttgagttctcgcaaccccttttcgtttaaggttttaagacaaccaatgaaagtaatggcaagggaggtaaggctagtcggtagcaacccttgctctggaaaggactccatatcttcaagttcatagc

SEQ ID NO: 1782 - DNA, 1986 bp, Cannabis sativa
taataaatttgggtagttatcctgcatattgtttttattcttggttggaattatttggttttagatttttttttttaaatggttttgtttcaattcataactgaagcaaaaaacaattagcgtcattgcattggttttttgcttcggttatgaaccgaagcaaaaactctttttttttttgcttcggttcataaccgaggcaaaaaaacatttggcgtccgttctaaactaaagcaaaaaatataactatttgcgtctgtggttattacgtcggttaccctaaccgacacaaatactttatgtgtcactttaaaaccgaagcaaaatgtcatttttgtagtagtgttacttacaggcactctgccaaaaattctaaggagctccctctcaaagtataagaagataactagaataatctttactgtaatgaccttgtaatctcaaaaataaattgcccaaagaggccaatacaatggactcgtagactaacgatcattaatgcctaaaccctgtaagaacctgtctgtttattaattattattcttatttctttaagctctaaatatatttagtttccaaaaaactcaataaataggttggatcactcctttatatagaaagcaagtgatcattcaatttacataatcgattagtctggattattacaatgttaattatattcaattaagataaaaaaaaggtctataaaataaatgacaacagttttgactattcttatttaatatttaaatgaatgctgacgtcgcacatcgactatccttattctgagcaactgtcatactcacgggttccctgatgttgttcgcatatgaggtctttataccgtttagaaacgtataaaaagcctcttggagtgtatcaatgcacaaacatttaggggttccttataaaatagaatagctgcgactatatgataactctacaaaataaaattatttctcatcattaatcttttagatttgtgttagtttagagtctttttggtttattttcttatgttattttattcattttgcttagttttagtattaatttgttattgtggtatatatggtaggaaaattttgcaagaaagataaagctgaaactataatttaaaatttaactatgttctaatcctattttgataaaagtcaaaacataaaactttaagatgtctttttcatctttcagaagaagtttttggcaccattttcggtgactgaaaatttatcaatgtcaaaatagttaattttatttttaatttatttttttagtttaatttttctatctagtttattgtatatgtttgtgctacaaggtccatgaaaaatgatacctcaagcactataagaaaattgcactttccattgatattctaacttttatttctttaaattaataacatttattttaaaaaaataataatcaaattcaaaatattatgctctcaaaaattcgacagcataacatcttaaaattgatccttcctaaatttttaatatctgcatgtgaggttgtgttgaattatagtgtgaatatcaagattggtttataaagtttttaagcttatggtacatgagcttaaatgattatactgtctactgttatctaagcctttcattataaacctaaaaacaccttttgattcttaatcatgcattgatttatattagtggaaaatatatagcgagtagtacaaccatatggaatgaattttgttgatagtttgatggttgtactgacatgtataaattgtttcaattgttggttgaatcttattatgattttatgagctgaaagaaagaattgagttaatggatgtaattgagctaaaattattaattagagcatatgatttgaattttctaaaaacaatgttgcatgtctttttttgtcaaattaaggcttatttgtattttgattgacctgaataagttgcgttgtgtcttgttaagttgtctagtctaaggttaagttgtttac

SEQ ID NO: 1783 - DNA, 711 bp, Cannabis sativa
gagaggggagagggaatactgtgcggtagtgatgtgcataggaacctacctatggtcacaatcatctctgttctctctctgccaaacttgtcctattatggcaaaacacctcactggcctcctctttactacttcaacttcaaaaactcaaaactctctctctccttccaatcacaacacaacacacatctgtcaattaactttcctcacttattagagacttgagtttctgtttctttgtttttctctttacctttttcctcaaaagagaaaaacccaatattatatattattattattattatataaacactcccagaaaaccttttctcctctatcagattttattcattcacctaaaataactactgcagttttaaaaggtttccccccttcagagaatatatatatatatatagatcaacatcatcaatatccactgttttaatttgtttcctaaaaaaataaaaaagtattaactatttatatcctaattatttcatcctagaagtaatatttagacacaagtgtaggtgtgattctccttttcctttatattccttttctatttctcaccaatcaccagtcacactttaacttgtttatttctctctctttctctcttaagtcactactactagctaacactctgacaaaaagatatatatggaaaccatgcaaatgcaaaatctagatacagcagcagcagca

SEQ ID NO: 1784 - DNA, 2890 bp, Cannabis sativa
tctctctctctctctttctctatttcgagtccttatctctctctttgtcttcatatttttgagccttatagtgaaagagtacattcccacccatagcaagtcaagtactcaatcatagtgtttaagattgtgtaagtactcaatcatagtgtcaagtcgagagtgatataattaattagtttgaaggtctaggagggtgtatgccttcatacaatcaggatgtcctagaaaaacagaagctcggcttctaggagaaaatttatgtctttgagaatcaagggtggaagcataagctaaacacccaaatgttcttagatgatcataatttggttattttttgtgtaaaaggaggaaaagtgtttttcctttgaataggactgaagtcctactgattaagtaggtggggtttgaatattgtagggccaatatactaaaggaacattggattgaaagctcaatgcccgagccacatttaggaggtattcgtgttttctttccacaatggagttttgttgtggtctatcgacacatgaatgatgatgtatgatgcctttagaggcaaaaaaaagttgttagattgaattctttagcattatctgaacgaatagttttaatagaggtagagaattgggtacatatcatgttatgaaaatcaggaataatggtctaaactttagacttggttttcagcatgtatatccaagtataccttgagtggtcatcaataattgtcaaaaagtatttgtaaccctctacactgattatgttaaagggtccccatatatcaatttgaatgaggtcaaaattagcagcaacaaagttattttgggaaataaatagtaatcttttttgcttggctaaatggcaaatggaacaatgagtatttaggtgtgaagaaaaagaactgtcaatctttttattgatcatgttttaaatatacatggaagggtgaccaaggcaattttgccattggtctacattgttatgaacagaaaatatagggcgatttggcatttcaattacattcttgtaagctgtatgagaagattgacatgaagtagttgctgatgcacaactttggtgaagcaggtatagatttccttgctttctagttgtcccaatcggcaaactcagagatggatcctaaatgtaacaacaatttgtgtgaaaaaccacattatgagcattgttgttaagataatcattgacagaaaaaggttgaacctaaatgatgggatataaagcacattatggagagtaatgtggggtgagatgtgaactgtgccaatgtttttaacagaaatagatgtaccatttggtaacaaaatagatttagggaaaggaatatttgaaaaagatgcaaaacaaagtttattgcaacacatatggtgtgtagcactgctgtcgacaatccaagagaaaaaagtggaagaagaattatcggccatattggatgcggcaggggcaggagaagggtcaaatcgaggagcttgattgttgagttgttgactgagcaaagagattagttattggcattgagaaacaagatcagtgttggagggagaagcctcgtttgaatcagtgagttgctcatgagaagtgtccaaattaacaacaaatttgcctttgtctggttttgtttggtcaccatatccggggggaaacccatggatgaagtagcgtttttccacaagatgccctagtttaccacaattggaacaagaaggtcgtggtttatttgtgtgagattgagtagaatggtttgtttatggtcgagttacaacagctaaagaaagagatgatccaagggttcgttgtcgtccttcttgaacgatcatggaaaaaaccttggaaagagagggaatatgttgatagagtaagatccgagctcggacgaaaccataagactcatttaaactagtcaagaactgaagaacttggttctggttatagtaatccaaaaaaggattttcatagcaccacatgtgcaagtagtagcaggttgaaactctttgatttcatctagtagggatttctattgagtaaaataagaactcatagattgatcaccttgttggaggtgggtgagttgtgtttgtaattgaaaaattctaggaccattgccttggttgaatctctcggagagatcattccacatatcagatgcaaaatcaacaaacatgatagtttgggatatttcaggtgaaacagaatggaggagccaggacattaccatattgttgcatctagtccaagaattcagaaggggataaccagcagtaggacgagcaagggatccgtcaatgaatccagtcttgttttgagctgtaagagccatggtggtggcacgcttccaagattggtaattagatccagtcaagacagaggagacaagaacgagactaggatgatctccagcgttgaggaagaatgggatagaaacatcttcgtgagcgggtgaatcagatttggagcttgaaatcctccgtggagccatcagtggaagaaccgtgggagttggagagtcaactgttgtgattggatcttgactttcaagaggatcagtaggaatggatccatcattcgagagaagatctggttgtaggtcgcgccataggagtaaaggtgggttgaatgtcttctgataccatatgagaaaacaccagagaagagaaaaactcttttaattgattgttattttcttggaaagaaaagaatatgttgttacagagtgagggggagagtttatatagggcagagttaagcataggtaaaagaaatagacctaactaattaataactaattacagttaatataaaactgattacaaagtataatactacataactcaaatactccaaaagaagaagaagaagttgaacccccccc

SEQ ID NO: 1785 - DNA, 1873 bp, Cannabis sativa
aatgttgttctctctcaacgttgctctctattctacatcacttggaattagagactgaacggtccatgacatcaaaaggacaagttagccaacccaaaatttggaacctcaatatacaaccatagaaaattgaagattgaaacaaaccttttgttgcactgtagaaaaatacaccatagctaatggcacttccaaaaatggaagtatacaaaagtgccaatacatcattcgttgtgaactccccgagattcccactgacagcattgtcatgattcaaaatagagattacaagtaggggcaaaccacccaaaaccatgtgctgcaataaaataacatgcacaagtttctttagttcttgaactgaatgatgtttgtgacttttttgtgttgaatgcaaccttttttttttaataattatgaacttcttgtttactgattaaaataggaataagttgagcttttttagttatcagtatatgttcaatttaattcatttctatcatattccaagttaattgcattacagaatttttttttaaagcataatgagctcaaaaatttgaaggttaagtttaaattcaggtagttagatcaatacgagagtgagttgatacaacctacccatccagttgccataataggatcggagtacttggaaacccagcggaccatgactgtgccaactgccatgctttgagctgcaagaagcatccaccactctccacttccccacaatgaaaagttactttcatcaaaagcaagtgcaggtacctgtatacaaacaatgtagcatcacaaaatagccaagggaaatcaacaagccttttaaaaaagcaggaagaccttatttagcttacatgttaggtaatcagatgattgatatgagatatttacatcactatttacaaaataaaaggaagtacaacttcagcgttatataaaattcatacccttcttttgacactgtatcctaccaaacatggagcagaaccaatatataccgtctttctatgagcacccaaataaaaacgtacattttcatctattctcaatgtaaataactatactaacgcctcagtgcatataccactccacaaataataaataaataagaaagcagtacataaagctcattccatattcagctcctgatactacgctacctaacacctcaggttgaattattcatgcgcaaggcatgtctaaatcatcagaaagttcattactttttattgtcccattacaaccactcaataaatcacgctccctagcattcttgtctttgaaaagctaagaaaaaaacgacaagaattagcctgcatgtatgtcaatgacattcaccaagttaatatatcagttaattgtttgccttcactgacaattatttctacaattggaatttgtttacgttgtgtaacacatacaaacattaatatataactaagtcactttccagtactgcttaaactgaaatatcaattcataaacaaaccaaatacttgaaaagaagggtacagatacaatgcaacgctttcagtaacatacacagcaattataaaagtttccttgtaattatttatttattttgaacaatatcctatgtccaacgaataactttatgccacgttattcaaaacatttaaatagaattaataaagttagaaaactattttaataattacttatgctaaatagtttgtcatatattcaacaccttttgttcagatttaattgtatgccactgtttatcaaaaaaaaaacataataataataattctatgccactgcaaaagtatctaaacataagtccaataaaccaagaactcctaagacaccagatggtcaaaggcagaatcagagagagagagagaga

SEQ ID NO: 1786 - DNA, 796 bp, Cannabis sativa
cccttctttctgggtctgaatccccaaaactacacatgctctgcctctgcttcataccataaagactcttaccaccacgagaatccctatacaaactttacttccttgtcttcaatcacacgaatttatttatatatatataattggaattttccaagttcactggatctggttgagctgagttttgaagctaaacaacatttccatttgcatggagtattaaatttaattacattttaggctagtcttttcttttggttcatgaagctaaatgaagcggaaggtagctcagtcgaaatcaaattacaaatggaagaggaagctattggttgtgatgttcgtaggtttttgtttcggaagcttgttttttatgcagaaccagtacagtcgggttatgactatggcttcttctttgagcgttcaaaagacgaagatcgctttcttgttcattgctcgaaatcggcttcctttggatatagtttgggatgatttctttcaggttttaacttttatttaattttatgcattgcttaatataataattcagtacttaatttttgtttccatttatagagctgtaaaatgtgtgcaaatttacataaagatcagaccgaattatgttattatgcaactcagaatgattaaatgacaattgtgtaataccatttttggtcaaattctactaattgaagtagttttctaattactttcataatttagagttaccatagttagtacttaatttccttattgtttctattaatagtgctggaaaagtatgcattgactccaattc

SEQ ID NO: 1787 - DNA, 2047 bp, Cannabis sativa
  modified_base (1599)..(1604): a, c, t, g, unknown or other
aaaaaatatataatttttaaaaaagaagattattttttagatccttagattaagtgggccttaaacacaaatttaatttacctatgaccagtggaagccgtgataaatgttgtcggtagattgagtctgtttttcttgtatacatgcatcatgaattgtaaagagggaggttttgattttaaaagtgtgtgatgtggtttttagaaatagcatagtaattaagggtaagagacaacatggttaagcaataattgaaagaaaaaaaataaaataggagacacattcggaagtaatcaatgtgacataaatataagaggagaatattagtgtgatttatgatacaaatattggttggccactcatttggcactgagttgtagatttgatgtgaactctctatacttttaacaacacttactattaatgtccccttacatgttatcaatcacctccaaatttactatacacatccattaattaattattaattatgtccttaaataatatttcagattattattaacttgatgcgtatattaaactatctccaatgtaagatttaaaattttctcactaatccaattacaaatctaaaagagaactaaaacgatggagattgcttcttggtgtggggagcacttgtttgatatcgtgagtagatcgatttagggatttaggatcaacacctccgagtgagtagatggagaagaaaaagaatttttagggtttttgagattcgatagagaccaatgcgcgagagaggggcacaagagatggagagtaagaaatagggtctgggcagaggcgtctaagcaaaggcggttctactgagctactgtcagcattagcagaagaaagatagagattggtttagtgaacggagaagaatttggacggctagagatggacaacttcgattggatggttagggttgggctagttctcatagaagagggaagaaccctcaagcagaacttggaaaaaagaaagaaaaaaaaatgattttttttttgtcttttgtcttttaattatttattagaaaaagaaaaatgatttttaagtttttattttattttatttttatagtatttaaataattaaaataatatgtaaccaatgaaaatatactatagtacataagtgtacacatattaggaatacacgttggcatttcacttataaacactaatagaataattggtttgtggtttgtggagttaaatgtgacaacttaaaattaagatagtattgcccccaataaattattacaaaaaatatttacttttaatgtcaattttttagtcacaatataaattttagggactaaatataatttttagtcacaacgaaaaattacttgtgattaaaatataatatttagatacaaattgtcactaatttacttattgtaactaagaacacatttaattataacaaattataattgttgtgactaatatatttagtcacaaaattttttggacatgaataatgatttataattggtcatccaatttttttactttagttataagttttattataactaaaaataatatttgtttatagtgaccctatatattattattattattattnnnnnnattattattattattaaaaagagttatattttttttttcaaaatctttgtgtatggatggattattaatgatgcatatatggaaagagagagataggacccaataaaaagtgaattaggaaggtgatagtgatggtaatatggatttagtgaattagtggtgacagggtagctggtggccggtgcaatatatggccagacactcttttgcatcttattaataaataataattgtatatactaaaaaacaataacatgcatatacttacacatgatataaaggccaactatacatgcattctaatttagtagctttattaacaattaagctagcattttgttcgatttcatgttataaaaaaaatattttttattatcaataaacaagtaattaaaatcaatttgttttgaattgagttgtttatatattttattagaatgaat

SEQ ID NO: 1788 - DNA, 628 bp, Cannabis sativa
tatatataatataacagcacatgaggaattaatatgtaccctttacattacattatataactttgaactgaattatatatcataatgacataataagtaatctagtttgaactgaattagatataacttttcagtacttaattttctcataataaaagttaaatttcaattgatttttatcacaactatatatatatagttagagtgacacttttatgattggttagtaatatttttaaaaaaattatttttttaagttaattatatgaaactcattatttaattatactagaagttatgttgttattatcaattaattaacttatttttaacaattttatacaaataatgtggatatttttttttacagaaaaaaattatatattattaaatgttaattttgtggttctcaataaaacagttccgatcgtaaccttttaaaaaaatgaaatatgcatatattcattgatgtgagtaacatttttttaggaataagtgatgtcagtaagattttgtttcaagtttcaacacgttgtcatcaataattaatcatatatatataaataattattttttgagcattgttattgaacatcaattggtgtttagcatctctagacatgtcact

SEQ ID NO: 1789 - DNA, 901 bp, Cannabis sativa
tgttgttgttgccatttttggttttacaaggaagaggtaaagaaagagatgcattgttggggacacaatctgatccaatgggatgagctttgctgtaaaaaccagatgaacaaccacagttaccggttgcgccacgaccactacaaaggcctaattttccacaaaccataggaacttgacagtgttgaaatggagcagagtactcttcaacagagctgtttttgttgttacctataaatctaactatactcaatctcccatcatcacccaatttcatcatcctaaaaccctctgaatcaccaagcattatatgatcaaactcaaacaaaccagtttgattcaactccacagcagaaaccttccaatacgtcgtcgtattcttccatttcaacaccaagtctgtactgttattaaccgttaatccatactcacctgttgacacatcatcaggagacttggaactgacgagtgtttgaccgacacgtaagcgctggccgacgaggattgtgtcagttgggtaatcgaagctctgccaaagggtggtgttttggtggtcgagtaatacgaggtttccagtttcgagaagttggagagctgagacattggtggtggtgaatttgggtgttgaccatatgactcttgaagttgaatggttggtgattgagaggcctttggtggttagtgagaggagtgaggattgagagatggggttgtctctgtttgctgtccagaccacggtggaggtggtgacgtggacgacggagaggtggtaatggtgagtgtggagaggaggtgattttgagttggttatggtggctttgaatgacccgtttttggagactaagaagtcccctgagtagttgatgaatttggtgtttgaggctgtgaagtttggggtgat

SEQ ID NO: 1790 - DNA, 1846 bp, Cannabis sativa
aaaaggaatatatcttatacttttccaataaataactccataagtaaattgggttgggccatgatgactaggagcccaattcttatcccaacccaacccaacccaacaagctcatgctaattttgtgtttgaaaccaggaactcagggagcgttactgtgagtttgtgtatcaaggtatcctctaccttagcccacatatggcgctgcggtttctgaagcttcccagtcacatcaccaccactcccaactcaaccttcttttctctatccaaatcccatcttcataagctttccggtaaattatctcccttttaatgatgacttgttgttggtgttgacactcttttacttactaatattctcttaagcattttcacaaacaccttgtgttctagctgatttcaacttggatttttggagtcgtgtatggtaagttttcttattttttgcttaattagattgatttttttttttcagtgagatgggtcggagctcaaatgcatattccagtaagaagctttgctgttgcgaagattcaaccgccaaaaaagtaagtttttttattcttctgtccaactcgttcatactgtgaagagcatttttctgggtgttataatatggtaataatgaagttgaacatggacaattagtaactttcttaaaaggttttggatattttgtgagttttgggaagttggttttgactactgagtctcctgtgttgcaattaggtagtgaacccatctaagcctatgtataatattgctttgtactcactcttttttatcataactaagtttgggtgggctaatgaaatttttcaggaggaaaaggcttgatgagatatgtgttgaaaggtttcaacaatacagccgaaccttcatacagtcttggatattacaaggtaagccgtaaaagtatacaaaaatatgcagtcagaccacacacacacacacacaattccttatgttttgatactttgttagtttgttatctctcttttggcaccgttttgggatttctatgttgcatccatgagtaaagaagtattagttttattaagttgaaagtttcctctgcatttagggtctttgtggctgacacttgtagtgatgcaggtaaagtatttgtggatgggaaggtagtcaataaagctggaacacctattcctgataaggctgttgttgagataaaggctgaagtgcccaaatatgtatgtaggtgattacttcttgtaacgtccttctcatagttttgctacctgaaatcccatttctgcaattacacaagactggcagcaaatctaataatgttaatttattgtctttatattttacagagcaggacacaagttagaagctgccattgaaaatctgggtgttgatgtttctggtaaagtagctcttgattctgggttgtccactgggggatttaccgactgtttacttcagtatggtgcgtcatttgtctatggggttgatgttggttatggacaggtaatatggtatagatattgactcttataaaataaattttgtggatatcatcacatagtgatggtgtttatccacatatctactatggctttatttacatttagtgtttccaagttgtttataaacagatgatcttttccttaaatccttaggtagcagacaaaattcgaaaagatgaacgtgtttgtgtaatagaaagaacaaatttacgatacctttctgaacttccccagaaggttgatttggtgactctagacctctcattcatctctattctcctggtaagatttcaaatactgatgaaggtctgatttctttatgttggtagatttaagtctcacttttttttt

SEQ ID NO: 1791 - DNA, 1765 bp, Cannabis sativa
caattccaattctacagtttaataatttgtttgacattattttcatttacttttctttgaatttatttattttctcttcaggaaattaactaccacaacaatgttgcactagttccagaccataacaatttatctatatctgataaagaattaagcatacttgcaagtgctctaatataaaaaaagtgatatacctaataccaagctgcaaactgagcattagatcataactcctgtgtcctttaatgatggcttctccaggtctctgaacctctttgaccatcttcttctgtcgtcttttcgcccttctagaactttgtgaaaaattattggcaaccactagctcactaattaagacaccttgcatgtattctctttccaatatcggtatggcattcccaacatctttttctccaccttccgacatcccagatgatgagtcaaatccaataagtttttctattgatacttcaagactccagcgccgttccagggaaacatttttgccacgagtctgttccaaatttaccaggtttcttttggaaattttatcagaagcattacgtcgagatccatgactctccccaactttaatatttcccatatctactgaagtagcatggtgaatatgaccattgttctgctttctcatatcaggtaatagtcctcttttcctcaaagcactgaggtagacgtcttgcacaggtgagagtcggctgccttgagggtaaaaggatccttttccatcctttaaacctcgcgtccatgttccaacatagaagcccccatcactccatgtatagactccaaacccatgcatcatgtcattcaaccaacttccttcaaatgaatcaccatttatccaagtaagagttcctttacctgacattttccctcctttcatatttcccaaataaacattcccattagcccatgtatacttaccaggcccttctggtgtaccctggatccaagacccttcgaaaacatctccattagaataaacctggtatcctaagccatgtttgagatttaacctccatcgccccttgtaagtcatgttatctgaaccaatataagttcctgtaccatgcatataaccaccagaaaattcaccttcataatatgcaccagaaggccattgaatttttccagtcccatgtctcatcccccttctccacccaccatcataaatgcaaccatctgcccagacatactttcccctcccctcaggcatgtttccatgcagtgatccagcataagattcactgtttgggagtaatagctccccgactctgaagccagaagcttcagaagtgtgatcaacttcaccattactcgacacggaaatggtatccttttcatgtatgacatcaagagatcttgttctctctgtaaaagcatgtgtcccttctactctatcaacaatggccacaggaccagacatgcataatgttccaaaagaatatggctccttacacaatcaaatcaaaagtccaggcccataaacaaaactcacaaactgaacttcctcttcctttgtttggcctattaacaacagagaaaacattcactcctcatcttagcaataacaaggagtttgaagagcaaaaacatagataatatttgaaaaggctaaaaaaaaaacagatacaccataacagaatttcaaagttcaacttcaagtataaatataaatagacaaaagcataccaacaaaattgattcaggaaaaaaaatgaaaaaatatctccttctaaaaagc

SEQ ID NO: 1792 - DNA, 1881 bp, Cannabis sativa
agttatcttgcaatttataagaacattcgaattaattacatataaattgcaatataatcaaacgtaaagtaatatttggtactaaattactaattaatggtaaccaagagctatttagctaactatagctagattttctattaacaaaaagattgtggctataatatatatcagtgcaacttaatatatatttttaatttccttttatataattctatgtataataccgctttcgtatgattattcatcgagagaaaattatttaaatgaatagtgatcattaagataatgtttttaacataaaagggtattacataaaaggtaacctttttaattcagtgttagcaatcgacagggagctgagtcagctgactgtatatactagacacacaacacaacacatcatgcttttctatatgtaaaaataattttaattatatacattataaaaggaaactttaattaattaattatattattttagaaggctattatggtcatcagattaaaatcgtggacctttaaatattggaaatcattgcaagtatcccgtgaatactaagccgattgccttatataagttgggagagtaagcctataaataacccttcattctctcatttttcatttcttctaataatttcttatacaatttcatccttcttcatctccgaaactttgtcaaggtatgaattttatatgattacatatataaatattatgcatttaaataatgtatatatatagtcatatattttcaatatgtatgcatgcatatgcattaacattattgttttaattatataagaggttgattgtcatgattcatgtctccatattcagcatgaaactaattacataggtttttttttcttcatagaaattgttatgattattagttttgtaactcatgttgaattgtttatttttttcccgttaaaaaaaaaaaaaccaccgtacttttgaacgggtgatagtgatatagaaatcaggcgctgagatttttctaatgtgcgccgttatttacaatataaaaggaatgaagttgaattggattaaggagccacgccttgcttatatgtacgtaatttatataattacttgttagcgcatgttagcagtgttttaaggcgggattggtggcggtcaatgccacagtcaaacgtcttcgagttagtttagttctctaccatgcaagtcccacgaagcactttaatcgtttaaaatgaccgtagtgcccatgattatagcaactttagttaggtgtctacgggggcaaaagagtaatattttagtacatagttaatttcgtttcagccttgtcttaataaagatgttcaagttatacaaactttttgggtcaacactgttatatattaatacatagttttttttgtgggattttttttttaatattatgtatttattttttaaaattttgtcatcttttaaaaggttgacaataattaaaagatgaaataaaataataaaaggtagataattaattaatgggtaaattgcactaattctggtacaacgttggctatattgggaatgtttcattcatatatttccttgtgtgttctaattttcatatatctaccttttctataattagtgagtatgtaccactatatatacgtagggggcagcatatatatatatatatatacatattctatttagttttttttttcattaaaattaacaaactttttatttatcatataaaattgggagatcaatttgcatcgtattgtaaaatatatctataaaatatatataatataacatcgctagatctccaccacatgtcatatttttgttcatgtagggagtgtaggcaacacttggcacatatatttaataataataataatt

SEQ ID NO: 1793 - DNA, 2499 bp, Cannabis sativa
ggttggttggaaaattgagttatcttactgtgaccagaatttgcattctcagtattaatcaatttatgccatctctaacaatttatcattggatagcgttagagcaaattttgtgctacttaaaaggagcaccaagacgaagcattgtagattgagtgtttctaagatgaatggggaaaaagataaatttcaaaagtgagacaaggaaaggaagatggacatttttaagacgctattacatgagaaacgcaatcttatcttccccgtaaaagcaatgagtggatctaaaaataagacggttatgaataagtaattagttttaaagcattcaaacccgaaagcttttaaactgaggggaaatcgttaggggaatttccccttcttaatttaatatgatatttattcaactgtattcgttacttaattaaatataagcaagaaagccctccttggcacctaaagacttaaaacactttgtttcattaaagaaaaggagatttgttgtcttaaatcagccgaggcaggagtaagggtcagaaaggaaagctacctagaagggaagctcagtaaaatacaaagaataaaataggaaagcggtgacacatggtccaataggaacacactctaaagtccccgaatttgccacctttccctataaatagcccatagaatgatcaaaaggaaaggataggttgctagctagtcgaagatttgttggactcaaggctcgccgttcacctaaccactagagaacctccttcccaagaccccaacacaaacttgattgcagaaatccatggagtattatcgacaagaattattatagcgaagagaaattgtagtctgtaatcacatttgttgttaggagatttttactcaccaacatatacatattgttctttcatgcatctactgaataaattatttggttctgccaatgtacatatgaacgtccatttatacgtgaccttgaatttactgaatcacaataaagtatgaaatcaaatgacaaattaccttttcaataaatcttcaacgtctagggaacagcctgggacaaagaagataaccaaatgggtcgcttgagcaagactattgctaactctccctccattcatttgaacttcaacctttaaccgccgcagtgcaagacctaacacaacttcccaatctggttttcttcacattttttccaaagaagagtcagaaagaaagatagtacacgtacaaaataatcaaataaaactgaaaactatacctacatgattatttagaaaaaaaaaaaacacttacaaatattgtagtggagcataaaagtagatgaagcaatcgtggaagtaagaccacttgggcggccaatgctttttcttgtaatgatcagtagttctagtgtgttgtgctccattcacattgcttaagagctgaaaaaggtaacataaacataaacttctgtcacatacctccttatgtaattccaaatgcatccattttagctagaatccatagtgataatttaaatggcttcttccttcattcaatatcaaattatcaattacagaatactctcaaaaaaattccacaagccatataatataaacctaaatgcatgtaagcagacagccatagatggtatggcattcaaaatatcaatcatacaaaaatgctcgaaaaattacacaaatcataaaccatataaatatacacctgtttgatgtccgcaaggtctagatcccagtagtaagtgtcagaaaattcatcaatgtcttcttgtaatttcttctttgaaaagtcagataggaagaggtaataccttaaatagaaataatttcaagtactcaatataaccagagaaaaaaaaaacatataagaatatttaaaaaaaaaatgctactgacacatttaactagagtataagagatatgtatgcaacaaaagggttggattaagcaacactgatacatcactaactttggctgtagaggaataagcttcctttgagagcagcaatccaatacccatgagtaatgaacaatatccccttgacgctttgctgcctgatatttaattcctgccaaaaaattaatttaaatagcatccatcaaaatctatataattgcactgtgtatgctgtgttatatgtccatgagagagagagagagagagagagagagagacctttgctttcagctgcaacacaatgagtgacagaactgttcagattcatagagaaagtgcccccattctcagcaatcactttgtgaaaggattccaatgaatgagttggaggcacattagcaaagtctaagttgtcaaggacgatataatactcaagacaaagtctcattatttagtaaaggatatataaaggaaaagatgcagacgacaaacacattctttctgcatgcgtaaacaaactaagagttactgccttttcctataactaacccctactcctccaatccattcaaatattcctccctttctacaaactccccccca

SEQ ID NO: 1794 - DNA, 1510 bp, Cannabis sativa
tctctctctttttcttctctgttagattagaaagaaaatgggatttagtttttcttgaaggaaaagaagatgaatgaatgtttagaagaattagcttgctgaggaatattatgcatggtagcatgaaatggtgatgctattaagttatcattctagaaaggtcattttcttcttcttcttccattatttattttattttgtttatattatgtttagtacttttcagtttttcctttgatatgggtggttgaatgatgattataataggaagagcatgtaagaaaatgaatatgtatacatgtttggttgtataatatgcatgtttggttggtgtggttggaaatgaaaaaaataaagtaaaagagattgcaagagaagctttttctcattttgtctgtttgtttgtttgttttgggtgaaaagagtaagaaaaagaaaggaaatgagggcaggtagagtgattggagtagaagggaaaattgcatggaatgaaaaggttgtggagagagaaacagaaaagtcctactctttaattagtaaaaccaagaagtaagaaccacaagaaagcagttggaaaaagaaatatgtttatttattgtaaaacaaaatcaacaattatacatgtatatacactgctatcatttttgtatattagggacatggatttgggcaaagtactaataggtatgtattattatgagaagaagcatatatagttgttgaattatgtgtaacctatatctatataatattctctcttgtacaagttagtatatggaagctgaaacaggtacacgtataagcaactgttggccaatcatgcaattcaaacacctctacttaaattcatgtcatcagagtcaatgacacaattaaatgcttagccagctagctagtttaataggtaaaaactctttgtcatgtgaacaatctttggctaaaattagctagtaagtttattatcattatcttaattatattgttttgattaatgggttctgcaattttagggataacaccctaatttctattcacaaaatcctctcttgtaatctagtgagaaaggggagattaatcgatctaaggttgaattgccaactcaactaattaataatgaaaatctaagaagaattgtgtattgattattcttacttgatgtatcttgtagaataattaagttcacattagggtaaacttaaatttaaaagtaccaaataatatagaattggtatatctatttcctttgttgtggttttggtggatgtatgttttgtacctgaaatgtatatttctttcttgagatggaaacaagcaatttcttcttagctttcttttagtgtcattagaaacaagtattggtgtttattacaagagattgtttgcaataaaattcactattttatgtctttttgtattggaatgtgcattagtatatttgagatttgatctttctacaattaatatcaattgacaatgactaacccaaccacttgcattgtttatatatata

SEQ ID NO: 1795 - DNA, 1276 bp, Cannabis sativa
tgttggaacaacttatttccaaacaacttgagataatcagcccttaaaatgatccaacaagctaacgcaagaaaatcaaagctagaagttagaattaaataaagcatgaaggattaaaagccattacaatgcctcacggaccaagcagataaaattgtcttggcaaaaggaaaaaaagagttataatcttgaagattctaaacaaaggccctgcagactgggcttatgaaaacagctatgcaaatagtgaaataggaagagtataaaaaataataataataaaaggaggagtaaattatggatttcttcaaggagggacatctgattgagtggttggatctataagcaacactccaggagcatctttagaaagagaattgtcatcttcaaagagaatgtccacaacctctgaagtttggttgtcaccagcctgtgaattttctgcctcctcaacaattgttttagtcccgtcatcgacaatggctgcttccccatcgtaagtctcgaggtactcatccacaaaacagtcaaaagctttgactctcttggcaaagttatctacatccttacgtaggtgattgaagatgtgagggatagtctccttgaggcgggccaaagttggggacccttgctcctctcggcgctcttcccttttagcatccagctctttgggcggaagagaaatctccttcaaggtgttatcgtgaccttgttgatggtagagcttgatgtcttgtagctctttgatggtgttagtttgtgtctcaattcattggtgcttttcctcaatacaacccttgagagctgtgactttgtcttctgcaatcttttgaaaaccatgagcagtttcaactcgagcctcccaaccgttgttgacattcgttttgttttgaagctcaagaattcttgacactacttgattctcaaggtttgtcttggctttcaaggcattatcacgcttagtggtaagggttgcattggtagccttaagctccttgagatgggccttgtattttgcttgtattttagacataaaggacgtcttataatcattatacatttttaatgtaagtatcttttattggccacctcatccatctccttgcggtgagctttagcttctttcttaacattttcaatttggagctgtaaagccttgtgggtggttagagaaaggtctagctggactaccattatttgcacctccctgcaagtgcattacacaaagaaggacatctggaacaagttggaaaactttcaaggatggaaatggcat

SEQ ID NO: 1796 - DNA, 2247 bp, Cannabis sativa
ctcgtcaaatattcttttcaagacaatatatgaaaatatgagatttcttctcaaggacctagtcccctgaacacaactagtatatggcttctcaggatagagcatcgcttcattgttgggacacacccgtatcccccttacagtagggaaggctctgaccaccaacataatgatggctcaattgctgataattgatgcaccctcaacctttaacgtcatgataaatcgaccaactctgtatgccataaaagctaaaacatcaatctaccatctttgcctaaagttttcaactaagaatgggatcaaatgcctggaaggagaccaaaggtcagtacgccaatgctacaacattgtcttaacaaagaaaaataaagaagaccatatcgaccaaggctcaaaggtcaaacaaagtattgatatatcggagttttcccaaggcaaggatgattaaatggatccttgctttagacaccctagtacaggtatcagaccagtggaggaattaggagaagtagagatcgatcccattatgccgaccaggaaaattaaactagggtgaggtttgttgcatgaaataaaatttgctttgatcaaatttttaagagaaaacctggactttttttcttggttgcatgaaaacatggtcgggatcgacccatcagtgatttcccacactttaaacattgatccttatgtccgaccagtgcaacaaaagtggagattgttggataaagaaagggcatgggcactcaaggaggaagtggaaaagctctgagcaaacatgttcataatagaagtttctacctcatctggttgtccaaccccaatttagtgccaaatcccaataaaaaatggcgagcatgatttaacttcaccgacctcaacaaggcatgtccaaaggactgtttcccacttccaaggatcaacaagttggtagatgctactgttcgtcatgagatcttaagctttatggatgcctactcggggtacaattagatataaatgcatccaccagaccaagagcacacaagtttctgaagagatggtcttagtgtacaaatttatgtcgttcggattgaagaatgctagagctacctaccagattttagttaatcaaatgttcaagaatgaaattgggcataacatggatgtatatgtggatgacatgctcattaaatcgaaaagggcttgtggcatatagagaaactggatgaatccttcaaaatacttatcaaatacaacatgaagctcaaccctcttaagtgttcctgcagggtaggctcgtgcaatttcctaggtttaatagtcaatgctagaggaatcaaagccaacccagaggaaaaaggccttttcggtatgaagtcacccacacaaattaatgaagtataaagcctaacttgttgtatagccgcccttaacaaattcgtgtcaaaatctaccgacaggtgtgttccatttttcaatatccttcgagggaacaaaaatttttatggaccgacgagtgtgaagaagcttttcaagaactaatgaagcaactcacacaacctcctatcttattgaagctgttggacagagaaaaattagggatatacttagcagtaaccaaatttgttgtgagcgtcgtactaatcagagaggaaaatggcacccaacatctaatctactacgtcagtaagagattaattgatgctaaagttcattatatatcctctaatgaaaaaactaacatatttcttgttacttgcatcaagaaagtttagaccatatacttccaagctcatcacattattgcatacacaaaccagccactttggcaagtactgtaaaaaccagatgcttctagtccactaatcatatgggtaattgagctaggacagtatgaaatcacataccagccaagagtggtaataaaaggccaagctttagcagaatacgtggctgaatgtacgaataatgaaaaagttgttagtgaagacaagttctaggccaaagaaaaagtgagaacaagagaaagagccccgaccagagaaaaagaccaaaggaccaatttggaagctatatgtggatggatcatctactgattatctcttcggtgcagggattgaccttatcacaccagggcaacaattgtacagaactttaaaatttgggttcacagcttcaaacaatgaagtcaagtataaggcactcattgctggactcaaacattctagggagatatgcactgaatactaggacaattgtagt

SEQ ID NO: 1797 - DNA, 2677 bp, Cannabis sativa
agttagggtgttacaattatattcttaaaagaatattttattatagataatacttgtatatatatacgaattttatactataggatgtagaaaaagatctgctatactcaatttttgaaaaataaaaaaaagtcaatcatacgactttaaccaaggtttataaatatcaaatgaattaaaatatcttttttgagggccccatgatacttttagagaactcgaaaacatcaatcaaccatttagtaacgaaactcacacacctaagtgtgcccaaactagggttcatgggcccgcgcgagcgttttcaccttagaaacctcaattcgccaacaatgacttgacttatttaggtataaaaataacttaggtttgtgcataaaatcaatatggcatcaaatcctcaacaaaaaaaaaaaaaaagaaagcatatgcgcccactgccatatggaaatggcagtgcccatcaattttgataggcactgccacaaggaatggcagtgctcttcaatttttattggcactgctacaagggaatgacagtagtcgctccttacaaaccatgaaggaaaaattgttcaaatgggttcccttaacaccaaggagttaaaaacaagtgagaaaaactattttccacctagaatttaccctagccgaccactgccataataaaatggcagtactcttcaattttgatgggcactgccagaaggagatgacagtggtcggccatgtagataggaagtgagatttcttgccaacaatgcattttcactaataatatgtcaaaaccaagttaaagaagccaccaagtggtataaaaatcacttggccgaccactgtcataaggaaatagcagtgtccatcaattttgatgggcactgctattatggagtggcagtggtcgacccttgcataaggaaaagggtttcattggccaagttacattttcaacatctatatatcaaatacaagttagaaacaccactcatggcttctgggaagccatgcccaaccactgccactgttcgactccaactagtggcagtggcctcccaataggattttagatatcgaaatgagatttttgggtcacgagacccccaaaatatgactcaccatcaaaaaataagtcataacataccccgagagatctgagaacatgcactggcgagcactgtcatttgaccatgtcaatgctcgtaattagtacaagttagcataaacttccttcagtaaaattagcataactctctcaatttttatccaaatgatctggttcaacttgcattgaaaagataatttcaagacgtatcaaagtgtgtctcatatagtcatggctaaattctaaagttattaggtccaaaattaactcacaagaaagactggtacattttactcgaaaatttagtaatgtggttaagtgatggttgttggaggacactgccacaacccatgcggcattgtatgcgagcattaacactccaaaacacatattttaaatacttatcaccaatatttatgcatttttagccgagagggaacatcccatcactctatttcaaattggtgcatttcaaccgaaaataactaattttttaatatttgtgggatattggcctagaaacaatgagatttttatagatatttattttcttgtaatattttatatattcattaaaaagagtggtatacgaaatttgttagtgagataccccgacatgtggaggatcactaacaaactaacaaaccctatagtctatatatatcaagtagaaggatgagctagagaaggacttttggacctttatatatagatcaagtagaaggatgagaaagagacttttggacattcttggagactcttcttctgattttttgaactctctcttcgaaatgttctccttgaaactcacttgacggcagccaagaacaccacacttattccatcatcttttccattgagtccaccatactcagtcgacaccattcctcaaaacactattgatacacatctttctttacactttattggtttattgttctcaagaaatttacagccacaaatttagatcagatttatgaatatcaagtctcgtatgagttatattcataaatctcgattaagatttcacatagaaatattttgctatatttttatccatacacttttgagaacataactttggtgtgtcagatctaatcaataaaaataaaagtaaaacgcaacccatttctatcgcgatataggaatgaactactataaattcattgtgtctatttaatttattgcgattttattagtcacattaattcatcgtggtcctctttatttttataaactttttagatcagttgactgaaaaccgcgttaacaagatccatgagggtatttctattccaatcaacgattgccacgtcgtgtaatattgtgaggatagttgtcgagtataacatattatttacttatttatttaatcaaaaagtggtttacacgatgatgtgtcaaaaaaaatactatttaagttaaaaaaaaatattcttctctcatgaagtctcatattttataatacttttgggttttctttcaaatttcacacctagatccatgtgttctttgtattcttaaacctctccccacaatgaacctttaatattagaatcacaaaaaaaaaaaaaa

SEQ ID NO: 1798 - DNA, 3656 bp, Cannabis sativa
ccatattttgatcttaaagtacaatatcattagtgacatgattttttaaaaaataaaaaataaaaaagggttaaaaatcccaccatacaacaaaaaggaaaatatctaaaaaaaataaaataaaaaaaatgaaacaaaaatatctagtgtgactagtcacatgcactttttttgtgccagattggcaaaaaggtaagtggaagaatatctcatttttattttttataggtaaagatctttactatttgtatggacccctacatcttataatgagatatttatttatacatataaatctataaatatttatatatttatatatttttgtccaatggaaaagccttacgtgtacaatttctcatcatatcttcacaactctgatattttctgcttcaaaccaaaactgaaaaaaaaaaaaaaaatcaaactttttcttctcccttaacctccattgctggttccttaaagcttcaactttttcctccaatcttttcgacccttttttcattcctcaacaaagtttggatctttcgattcaaaccatgttttccctttgtgatttttgttcttcgaagcctgcgcttctcttttgtgaagctgattctgctaatctatgtttgttctgtgatcgtcgtgttcactccgctaatactctctctgataagcactctcgttcttggatctgtcataactgtggattgaatcccgtctctgttgtttgctcgaagaacaaggttttgctttgccatgattgtaattgggactcgcacaccaactgttcgatttcttgtcttaacgagttaacttctgttgaagtattttctggttgtccatcggcttctgggctcgcttcttttcttggattgaatttagaatctgaaaattcagttgatttgagttctgggtctgatcaaatccagcaaaagtttttcgtttcgagtgatgatgggtcctctgctactttaaagagaaggaacgagctttgtgagcagttgattgagatggggaaaaaagatctgctgcgagtggatgtagatgttgctcaaatgcgtcctaggactcctcctagtagatgttctcaacaggacaacatagatggtcttgttggacagaagactgatggtgatgaattgaggcatgaaacttcttttgcatcttcagttgtgttaccaacgagtttggacctcaaacagggtgattcagttgctgaagaagatcatctttgggattataaccacacctatgattcttctctggtatgtgccaaaccaaaaattaagctcttagtaaaaattacgaattttgttatgttgttaagtttattgctatgcaagtcagttttgagtagctttgtgtacacactatagttgcagagaatctgggtcttgtttgcctttaaggaatgtttgattatagctttgaaaaagggtatttaatgattatttggtgaaactactctcgtgctctgtagtaataaataaaggcaatttgatgttagtaattgctaaataattcatgaaatgaaataccgtttggtatctaaatacacacatgcacatatatattatacttcaatttcaggaaggacagcttcacttaaagcaatggtatataattttaaagtcacagctgaatcattggcttgaagtggcttgtaagagtaagtggaaagttatatattggtgaagcaataatgctgtccttggttaaagatgcattttttggtagccatttattgtcgccagctaactaactttctctcatgtctaatatccatttttatgtcaagcacttcatctcttagatatcattgttgcttaaatactttctggatattacatctagttattatatcatcctttttgactcttgcagatatggcactttcaactggaagactcaaaagattgtgaagaatcttgttcagaaatcacagaaataaacaatccttgttcgttagtaacacccaagtatgaggtctctactatatacgaagatactctatcggaaaacgtaagccattagactgacatatcttcatggcattcattagactgaactgcgtaaatcttgaaaatattaccagatgaaaccaattcatgtgaaaggaaaattcataaaattgcttctctgcatattagctacttaaatcataaaatttaagtaacaaccaattatcttcatatcccacttggtctttgccaaaacatatttcatttgttactgataagtttgactgaaatcgaaaattgcaggaccaactattatcaaattatgcatcccaacttggagagaacacaaatgatcagtctttaggatttgaaacagaaatggatttggatatacctgaaggttgcaatagccccagttatgtccaagactcaggccatgaaattttgccaatgagtgatcccactaaagggtctaaatctatgatggaaatggagatgcaggcacagaacagaggcaatgccatgttacgctacaaggagaagaagaaaacaagaaggcaagtactctaattctattcccttaagctattactacccaatattttagttatttgattaaatgtactaatacttttttgataaacttcgaacaacagatacgacaaacacattcgttatgaaacaagaaaggcgagggctgatactagagaacgagtgaaaggccggttcatcaagtcaactgaagcttccaacgacgcatagtaagataatagtgtttcaagcagtgctcatcgccccatcccctatgataagttgtaccaaccataccatattgattataatattgcagccttcttggctctccatcctttacacctgtacattcatcttcgattgtagaaaaaggaaagaaaagaaagtaatatatagctagaacaagaatttgtatgtgtatcgaattcaaccggatcagatctcgtatagttttccaaatgagagtattaggggaaaaggaaaggtcattattcctcacctacaattatgttgtataattttgttttaatttaaatgaatggtgtcattatatatatgacaacaagtgcttttatagcagcaattatggtaatgaatgaatgctcaaacacaccgtaagtggtgagaataagcaagttacataagtggttttttggctaagtttaaggagcattttgaattagacacaccatctgcggagccaggctgtgaccatctttggtaacatgattgatcttaattaacattgattattactcccatgcatatgctgaataatggcttattcagatctataatgaggttttcactccaaaaaaagatgaatcgataatgaagttttgtgggggtggcaggcagattcattcacacccacttaaacaacttgttcatgtattcctatgtatctatgtatgtatatataagaaaaaaaaaagaagatattttatcatatgtataaagttgaccataaatatcacatcagaagatattagattctatagcttttttttttcctccttttcttttcattcttggattgtacactgtagtattataatatctaaataaattataaatcatgaaaaaaatgaaatttttgtctttattctttgtttgtgtcaactaatacctagtagtggaatgttcttaaatcttttttctttttctttt

SEQ ID NO: 1799 - DNA, 3195 bp, Cannabis sativa
agagagagagagagaaatatgggatggagcaggagagatcagggagagaagagaggcttaggttttgggttttctgggagccttgccatggttatttgatgtagaagagagaacgatgagagagagagggtgagcttgagagattggggttggagtcgcatgcagctaatagagaaggagagagagagagagctcagagagagattagggttttcaaaagaagaagaaagaaagaagacgaaagaaaaagataaaaaaagtaaaagtaaaaaaaataattattttttatttttatttttaatttttttaatatttaaaattattttttaataattaatataacgttgactataaaaatactaatgtataatgagtaaaaataagagtgaagtaaaattaaattcataagattaagtgtagtgaagaatgcagagaaatggaatgcactgaaatctcagctcaagtggaggctgagtactaatcattgtatttataatgagggaatgaaaccctgatgattacaacagatggtaaaaagagaggacagctggtacaggaaataacagaatgaataagacaaaatagtacaccagaaacgtgggaaaaatagatgcaagggcagagtaagattaagagcagtaaacacaataatcctagattagctattctaaacatgtcttaacaccacccctcaaacgcaggggtgaactcctcactccaagtttttccaccagtggttgaaactttgtataagtcagaccttttgtgaagcaatctgcaatctgctcctgtgttgggatatagcgaacttcaagtttcttctgcaggattttatctctgacaaagtgaatgtcaagttcgatgtgcttcgtgcgttcatggtaaaagggattataagcaagagcattagcgctcatattgtcacaccagataactggtattgatggcagggtaaaatgcagctcctgtaaaagtgattccagccaagatatttcagcagctaattgagctaatgctctatattcaaactcggtacttgatcaagctaccacagactgctttttggatgaccaagcaactaaagtatctccaaagtacacacagtatcccccaattgacttcctgtcatcaggacagcaagcccaatccgcatcacaataacctgaaatggtcagcttatcactatacttgatgtgaatcccatggtgcgttgtacctttaagatagcgaagaactcgtttgacagcacaccaatgtgaagtagtaggacatttgagaaactgacttagcttatttacggcaaaagcaatatcaggccgagtatgggtgaggtactgtagtgcacctatgacgcttctgtattgagtaaagtcttgcagttcttctccatcttgtagagacagaggtttgcctcctgtcataggtgtattgcatggtttgagattggccatgtcaagttttttaagcagctcaacaacggatttgccttttgacaggtacatacctgttgcatcacgaaacacctcaatgccaaggaaaaaattcagtgttcctagatccttcaaggagaaggctctgttaagtttctcaatgaaattgttcatctcttgtgtgtcatttcctgtgataacaatgtcatcaacataaatcagtaccataatgacaaatttttgtgtcttgagcaaaaaaagagaagtatctgtacgggaattgacagaattccacttgagtaaagtttgtttcagttgttcataccatgcccgaggtgcctgcttcagaccatagagagacttgaccaacttacacacatgattgggtttatccttgtcttcaaacccttgaggttgttccatgtaaacctcctcttcaagttctccatttagaaacgcattattgatgtcgagttgcctgacatcccagttgtttgcaacagcaatagtgagcacgattctgatagtggaggccttaatcacatgactgaaagtttctccaaagtcaagactaggtctttggtgaaacccttttgccacaagacgagcttttagcctttggaaactcccatcagcattgaggttttccttgaacacccacttgttacccactatgttcatgccatctcttcttggaactaagatccaagtattatttctgatcaaggcaaaaaattcctctgtcatagccttgttccacccctgatgcaggagtgcctcttgaactgtaagtggttcaacagttctttgctgcactttgctttgagttgagtaagctttgggtttgaagaccccggcctttgatctagtgatcatttagtgtgttggagcaggaacagtactctttttctaatgttgagtttcaggattggaaagagtttcaatctctggtggtacactgtcagtagcagcaaacttagagaaatctaagtcaacaaagaggttgttagaaatatctacctgatccgtgtgtgtaggacttggcatcgatgacagttgtgtatcatgggactgctcggaacgatttatatcagcttaagatgcaaagttgtgtggctgaatttcaggttctggtgtggcattgagtgtgttttcaagatgagtttcagtttcaggagaggcaaagggaagttggaaccagtcatttggagacggaacagtaacctcagattccttttggtaattgttgagaaatcctgccttgaaaggaaactccttttcattaaaagtgacatgcctagagatatacaatctacgattagagcttaaatatttgtaccctttatggaagtcactatagccgaggttgacacatctagtggaatggtactggaatttgtgagattggtaaggcttaagacaagggtaacatgcagagccaaacacctttaggaaggtgtaatctggttttttatcaaacaacacttcaagtggggatttattaccaagcactggtgttggtaatcggttaattagaaagactgagctttgaaaagcatcacaccaaaatttcaaaggcatgtgtgtctgagcaaggacggtgagacccatttcaacaatgtgcctgtgtttgcgctctgcacgaccattctggctagatgtgtgaagacaggaatgagagaaaataatgtcactttcagtcactaaattactaaaggattagtattctcccccccaatccgtttgtaatttcttgattttcctc

SEQ ID NO: 1800 - DNA, 2343 bp, Cannabis sativa
gccgcagccgtcggggaggtctcgaccgaggcttgtgaaggtgaggaggcaggttggagctcagcatgcgaggtcgaggattggttcgagtgaggttgggttgggttttaatccgttttgttcgtcgaatggggatagtgcttccagtaaggagaatggaagtgtagggtttggttttgatagtattcggagtggtctaagcgagggtttgggttctgtggagggacatagacagttaagctctgatgagtctgggaagtcgaatattggcaatggaatgggttttgtgtttggggccaaggaaaatgataccacaagggattttctcggggaaaaggagcaagcttttagaaatgggagacaagttgtttctgatggtacggagataaagaaaacagagtctgaaccagtaagcggaaagtttgggggttttgaatttggcaataattggaatgggttaggtttgaattctaatatggaaaaaacagaatatggtgattttgctaagaatttaaactctgatgtaagtggaaagatgaaacctgagactggagcagagtgttcaaaggatagtaatgtgggttttgtgtttggagccaatcttaatgggttgagctcaaatttgaatttgaaagtaggagaggacagaaaatctagttcggagtttgtgtttggtgctagttggtgtacttctggatcgaattcgagttcggagaagagagattccggtgatatcgaaaaagaagttcccagcaaagttaatactaatgagagttcgaatttgtataaaaatttaggtgcttttgtatttgaaagtagcaataggaaaagttctggcttgactgagaatttagggaatttccatggcaatgttgaaagtgataagtgtaaatgtcgacatgaaaatagtgataacattgctaatatttctgatgagatgaggaagttgaatattgatgcttctgtaaatgttcctgggactatgaaagctgaagattcgaattcgaaaccatttttcaatgttggggcagcttccaagtcaagaagatttgtaaaggtttctagaccaagtagcaaaggtactttctgctctagtagacatgtagaaactaattattgtggtaagagttttgaaggtccttctgttgatgtggaaatcaccaatgggagtagctcaaagataaatgatgcaacatcaggtatatctaattctgagccatttacttttcaagctggatttgttgagaatgataatgttgggcagtttcataagagtgaatcagttgataatatagaagcaaatgtaggttcctcacagtcttcattttcgactaataatcccgagtcccaacatagtgtttttgaagcaccttctgttggagtagaaaaggactatgttaacagttctactactaccagttatcaagatggattgggattgggagtgggagtgggagtgggagggtcatctatggagttcaaaactccagcatgtgatccttcatcccttaaggatagcttatttcctaaagtagataagaaaccacaattcattgtaaagaataggacaatcaaggataaaagatttagggatacaaagcataagtcgaaaaagccttcggttaatcaacggcttggccaagatcatgcctctaagcaaagcagttcccaagaaattccaaactctcctgaatgttattcccccatggatttctctccctatcaggaaagtactatgcctgatgagctctcaagagaaacttctgcaacatcaaatgggtccttctaccaagacaataattgtaaaacttgttcatcagatgcacctgtacctgctgatcttggagttgatcaggaatctatacaagaaaaggaaaatgttgcatgtcatgatggatcatctcttcagaagtgtccatcagtttctaaggctgaattttcctgtcccgatgcccgaacagagcaagctggctgccacagtggtgttggtttgtcttcgttggaatctatagcaaattatagatcagacccagagaatcaagaaaacagttctacaacgcagttctattttacttcaggtctggaagataaggagagaagttttatgttttccgcagcaccctctgggcaggagagattatctgcaaaaaagcatcgatttagaaggaagattaggagtggtgttggtcgtgattcttctgctgtttcttcaagctcaaatcaatcttcgtccaatgcagcaggcaaatttgaagcaagtaaacaggccaaccaagcgcaaagtgcctcagctgaaattcaagaaacctgtgagaaatggcgactcaggtggactttccttaa

SEQ ID NO: 1801 - DNA, 1648 bp, Cannabis sativa
  modified_base (396)..(400): a, c, t, g, unknown or other
actgtaactaaaatcgcaacaaaaaaataatataaaaattcttattataactaccgttgtaaccattttaaaaatttaaatcgtaaaattaaaaaaaaaattaatatatgagataattatctaaatttatttataaacaagttaaataaattgtattgtgtcgtgtgttggagtatgtatttatttttaatacatgaatcagttgatgacaaaataaaagtgtctattagtattagtagtagggtacataaataatattaaataaatagtgttttcatcattcaaagtattgatttttgttaaattaaattattttgttatgaatatgaagagagaaagtgggacccatctagtttcatttccatgggatttttcattttttcttttttctttttnnnnntttcttttttcttttttattaataataatctgctaccatcccagttgagagagtgaagagcttaatcttgttctttaaatagctgcacttctgaaatcgtcttccccccttctctctcctcttcacactcactcctttctctctctctttctctagctggttctatcagagtaagtttgattaaattcttcaaagattcagttttttcttcttgggtaatttaaaaattgtttttttggctctcccaactacggctactacatttttgactgattatctgtttttgggtaatgtgattgcagagtttttccggcggtggttggccggagaatggcatatatgtgtacggacagtggtaatttaatggcgatagctcaacaagtgataaagcagaaacagcagcaagagcaacaacaacaacagagccatcaacagcagcaactcactggtctaagtcccttttctcttaatccatggagtactgttactcaccacaacaccatgtctaatgctccgaatttgggtggttatgggttggcgggttctggctttcctgatccatttctagtcactggtggttcggatacaggtgaaccagggtttcagtttcctcacatggatcaccactcaactgggtttcgattttcagatttcggcgccggtccaggtggcgagtttgagtctgacgagtggatggatagcataatgggcggtggagattcaacggatagttcaaatcttccttctggttgtgacgcgtggcaaaacaatgctgcagatttcgttctctacggtgctgctgatcccttcgccgcttgcccgagtcgactcagtatcccttcttcatcatcaccttcggatctcaaccgagttaatctattcaacgaaacccagcagaaaaaccctaacccacttcagcagactcaagtttcgccatggatcccaccccaagctcctcagtctccgccagtggtatcgaaggactcaaaatcgacaaatcctccaccgtcgcatagcgtaaggaagaacgacgttatcggcgtgtctaccagctcaccagaaatcgaatcggcgccaccgctttttaaagccctaattgactgtgctcgactcactgaagccgaaccagaacgagctgtgaaatcattgattaagcttaaggaattagtgtcagagcaaggagatccgactgaaagagtcacctttcacttcgccgaagcactgtataacagagtttctctaccggcg

SEQ ID NO: 1802 - DNA, 1005 bp, Cannabis sativa
aagttcctaaccaccgcgttggggaagagaattcgccaattcaatgtggctatcgctctatcgagacgagctcttttaagcaaaattctgttgctctggtcttgagcttgtttgaaccacgtaaacttccctcccatgcaccccagatcaatgaggcccgttccattgaccatacgccgaaggtcaaaagaatatctagcagagtttccccggtgcgcataattaacgcattcatggtcttccaaagtcccgttgagatccccaatcaacagagttaggtcaccattctgaataagtaaatcccccacttccttccaaaactgttctttctcagtgtgcataggcggaccataaattccccagaaacatccaaggtcgtcctgggggattcgattcaatcaatcccctgaacaagttttttgaagatgaacattccgttaatttgactccatccttccaacacaccctcagacctcccgataggccaatgggggagacataggctacattggcaaaatgaaactttcgcatttgacgaatgaacttgtctttgaccatccttgtttccgtaagtagcaccagatcgggattgtattggcgaatcagcgtcgccaactgtcgaactgtcgcagcattccctaacccgcgacagttccaagctaggaacaacatggggattgtggagacttttttaggcaagtctccatagccccaaagcaaaaaacctgattcgaatttcctccctcttttccttccttagacgtactcttatcaatagactcattctcaatttctagttcctcaatagtacacttaggccttctatcattcaccacaaaatgattttgaagatcaattgagaggtcaatggaactcacctcccatagatttctgtagtatcctttggtctgccaattcttcccttgtcttttaagctttctcgacgacacaccaacggaagacggagatttggccggtcttcctcgtttcttagcctccgttctt

SEQ ID NO: 1803 - DNA, 2696 bp, Cannabis sativa
catagcaatagacattgatttgtatgaaagaaatctaaaaattgtatttctcccttttgagcgcattagattgacaagctttttttgatggagaagaaaacttttaggtgggtaaagagagagagagagagccaattcctattaggattttcttttcattatatagaccttctatcaatgtcataataggatatatatgacttttttttattaaaccagtaatatttattctcttattttagtaattcacctggctcgtttaattatattgaactttaaatgttgattaacatgggtccaacatatatgtgtatgtgtttgtttatatacgtgtatgagtgtgtattgtatatatatacggtacgtgcatgattgtcatacattagtgagatttgtgatctttgatgaaaataaactatttatttcacgagtataaattttttaatatatgtgactatatatatttacactaattacgtacttttgctgcgtaaaactctgtctaataatataatttgccctaactaccatacattatgcatgttgcacccatcctataattcaaattgaatttcatacacccatcattccatcccgccaatggctgcttcaacctaggtacatacctacactcatcactcgatctctacactacatattatattaatttttaaaaactgttttcagttttaaaaaattaaaaatgtgttttatacgtcaattagttttatttttttaattttataaaatcgtaccaaacataacctttatttaattagtaaatcttatcacgagttataacttacttgttcttaagtgtaagccaattagttagttggtaggtataatacgtataacgacttaatttacatgctttttgcatatagtaaattttttaagttagacttatttggaagaaaaatttcatgcacttcttgtttccttttcaatcttaatttttttaattaatgaaatttaattacacttgaaaaatcaggaaaaaaaaattatgtttaaatagtttatgatttttttttgcaaggtgattatcttatcttttatctaaaaccaataaaaaatctaaagcatatatatatatatcttataaatataaattatattaggtaaatgacacctaccattaaaaaaaaaatcacaatttcttctctcttacaaaaatttccaccacaaaatccaatcaaaaaaaaaaaaaatctattatgctacttttaaaaatgctcaccttatttcctaaaaaagtcactaaacattctaaaaagtacaaataataaatatatccctatttcaaaaaaaaaaataaaataaatatatccctatccttccttggtgtccagtactgtccagaatataataaacatattcatactttaccctaaataaaaaagttttttatggaataaacgaatttcaaaatcaatacaagagaataattatttattttaaaaaaaataatattctttctcaactagcatgattaaatatgaatagagaataaacctcatccaatccgacggccaacaagaatagatgaagtttgactctgtagatttagtatatctcttttatttatttttttttaaaacgaaataaaataaaaaaaataattggtaatgtaagtaaataataagtatattcgatagtccactaaagaggttaagtggtgggaatgggtcaatggaagtgatttctgctttagacaaggactcaaccaaaccgccactactacacaatccgcaactgataacagactccacgtgtcactcctgcttaactcaaaacttgttttacttaaactcactttttttttcaaaaataaaataaaataataaatgaagaaaccaaaaacataaagagagtatttaatttgttcaaaaaatcagatttttttttcgacaataaaattaaaataaagcttcacctgaaataaacagaggaggaagctgtttgactgaggagatcccggtcgaagaagacgaagaagaatatatatatatatatataaggttatataggctttgttttagaccgtggaatctgtctcaggctttcctactccaaaaccctaattacaaaaacaagttaaatcttttttaagggttttacgatgaaatttttcaaataacttagagaggctgactctctttaaatcatttcctctcctccgttttttgtaattttttatttatttgtcgatatacattataatatatttttactagttagtagactagatagtagtgagggccatggaagatgaagctagggttccggggaattcggtgcgatcggaggaggtgaagccgccctcgtattggctagacgcttgcgaggacatatcatgtgacctaattggtgacttggttgattttaccgacgcttctgttttgcccgactgttcctcggtccccgatcgccatggcacctccaccaactgcaatcaggaggatttctttggcggaatagaccacattcttgacagtttcaagaacggagatggtctccctctaatctcggatgtaatttctactgatgatgcttctcggagctgtactcctaaagaaagcttattattattacagaacggtggaggagtgacttctccagtttctaaggccgagcttttgggtttgcagaataatattcagaatggtaatggcttggatgcaaacaagttg

SEQ ID NO: 1804 - DNA, 3122 bp, Cannabis sativa
tatatatatatatgtaaatattttctgtagttgttgacttgtaaataagaaactgtatatgtattatatattatatagttttgtaatgtaattaattttgtgagctttgaaattaaggtccctgacaacaaacctcaatcaatttgagactttactactttttccatgaaatgcataatatgaatatttacttttctataaaataaattattccttttttttttttttgaaagagataattcctttcctttaaatattactcattcatttattgaagaaatcttagagagcagttccaagtagattgcataagctaattttgatgttatatatgtctccaacgacattacattctgcagcttatatttgtcgtgtgattacagtgcacgacatatatattgtggcactatagcaatgtaatttaattttcttaaatatatatatttatattataattatttatatttaaaaaaataatatttaatttattgtgtgtaaattaaaatgtacccttgtctatttcggtatagagagactttataattcgtagttctttctctcttttttttttgtcaaaaattaaaattttgttagaaattattgtcaaccctacaatcttactcgattgggcacatctataatatattatgttattatcgctgtatttaattattaaatgttatatatttttaatttaataattattataaaaaattgttaatcacttataaagtgttattttgtggtaatgttagtactagtaatacttaataacaatacttataatataaacataacaattatgatgtttttgatgctaaaaaataatttaagtatttactttgtcaaaaaaataatttaggtacaattaagtactacaaacttaataataatttatgtactttcgtcttaaatatctttaaaatattattgattgatttttttttttcattcaaaatattataattgagttgtatagatttatgataggtgttagaatataaggattcattagtcaagtattatgagactaaactaagtttataatattattaattagtggtagtaatggtttttggggaaggtgattagtcttttgaggttcatcaaacccaatgtaattagaaaatgtccttaaattaaacctatttgtgattaaaattaatcatagtgtgatatttaaatgaaagaagattgagaagatgatctttgagaaacattgaaagatgtattagattagtaatatatgctacatggggacataatatggtggcaagttggcaaccaaaactagctttgtcaaaatcaacaacacatttatcatgagctactactgactttgcatgaatgagaagtattcaatgaatttttgaaaatatcaaacattatatatgttgaagagaatgctaaaacacgtgtagaaaatgctagaaaccacaaatatttaaggtcagctttaagctaaggcaggttaaacccgcgcttaagtcccactcattttaaggacccaaataaaaaatacagaatccaaaataatatttcttcaaaattaaatttatcattaatgattgacatccaccataaagtttttgacacaattcaaataatatcaccaccaaataataccaaaaatagcaaataaaacatatcctatgaatttatcatgtatattattttaaaaattcgatattttttatgatgtggtaaaatattttcataaatacaaaatatgggtgattttcaaaatgaaaatataaacacctagctaaatattgtgggtgatttttcttctatttagtagaaattttgcttatcaactcaacttttgcctataaaagttaaaaacaaaaatcaatgaaaaaaaaagtcaatggagcataagtttcatatgcatgataagaaaagaccgattgcgttgcccactatctcaggatgctaccccatcactagttgtttgttcaggtggaatactagtgacacaccccattgtaggttaagacgacccgcttaagtaggacctttgcgaacattaattggaaccctctgggcaacgcccgagaggggagccacaaattacgcatcgcattgagggtagagacaacccgtctaagtgggaccttgtcgaacatttttatcggaaccctcttgacaacgcccgagaagggagccacaagatatgcatcccattgtaggtagaggcaacccgtctaagtaggtggagacgacccatcttgtaggatctttgtgaacatttattggaaccctcttggcaacacccgaggggagccacaagtgacacatcccattgtaggtagagccgacccgtctacttagaaagtagacggacgcttgaggagggaaccacaagttgcgcatcccattgtaggtagagacaactcgtctaagtgggactttttgcaaacatttatcggaaccctcttggcaacgcccgaggggggagccacagtggtagaccccgtcatttttttgcaccaaaatataacatacaaaaataaataaataaaaaggacgtagtgtgggatgataatggagaatgcaaaattagtaacaagcacacacacacaactataagaaacaagaagaatctgaagataaatggtactacttcgaaacaaatttttccaaatatttctaataattttagtcaaaataaactagcaaacctacgggtgaaaagaaaaagctaccactcataatcaagcaatcaaacctattgttgccatagcgaacaaagggcgtaaaacctttgggttttctgcctactaaacctgccggggctgagcaccgccataaccagcagcagcttgtgaagggtcagatctccatcctgcattagaataacctgaattaccattgttctcactatacccacttcccatataaccgccactgccttgttgatctacccctgtggcaccaccactagcattgctatttggggcacgcccactagaagggtacgagccagagtaagggccgtagcttccactgtagttaggatatccataaccttggtttacgtacccagatgcaccgctgggagattgacctctaggagcagaagcagccccaccacctggggcggcccaaggagctgtacc

SEQ ID NO: 1805 - DNA, 1976 bp, Cannabis sativa
tttttgtagagatcttagcttcaataaattagaagggccaattccaaattttgaaaatattatggcattggacacattgtaagttctaaagacttttcataaacttttcacttgctttgttatatgttcttaagttattgtgtttcacattgaataggtatttaacaagtaactcactcaatggacctattccggattggatcaaactcagagatagccgttagtaagttaccaaaccccgaaatcgtatgcatcacaagcataattagcaatgtgaaaacatgcttatagagtttagagattggttgatttgttacctctttagctaaggatgaagtttcttattatgttgcagccaaatagatctttcttacaacaatttttcggaatcatctgagccatctacttgtagagaaactttgtaagagttcctctattgtctttctttttctactattcattgcatgatcatgtcaaactaaatacacttgtgtttttcatcagcaatctctttcgaagctcatctggacagaaaaacaactcgtaagcttcgaaaaactattgttgcaacaacatgaacattacttttcatgatagttttactatgctaatgcttgattttgatattttttttgatttagaatacttagcaagtgtttggctccatgttcaaaaggtaagcaagtctttcaaattgtttgaatagaattgtaatctgctttatcagaaaccaaacctgatagatcagaatatataaaacactatatttttactagtccacgaggccaataaaggttgtaatagtaatgtgcaatgttgttttgatcatgtgtagatcattattcattgtatattaattgtggtggaaaacaaactaccgttggaggcatcacatatgaaggggatcaggactctggaggcgctgcaaaactcgtccataactcgccctcgtggggatttagcagcactggtgatttttgggatgtttggagcaccacaaaggattacatagctgaaaatgtgtctctactcagaatgaacaattccgagctctacacaactgcacgcctctcgcctctttcgctaacttactatgctcggtgcttagcaaatggaaattacactgtgaaacttcattttgcagagatagtattaagagacaatagatcttattatggtgttggaaggcgaatgtttgatgtttatgttcaggtaatcataattttcgtcgactttggttaatagaattaatgcaatttgtgatgagcctatatttgatttggttaagttcttatagggaaaacttgagttgaaagatttcaacattgagaaggaagctaatggagttgataaagaatatatcaaagtagttaagacagttgtgagtcataatacactggagattcgccttcaatgggcggggaaagggacgaggaatgttcccaagagaggaatgtatggttccctaatatcagctatttcaataaagtctggtaagtattttctatgaggaagaaactaacatgtttttaatgaaaagtaaaaccaattttcttagtaaaaaatcgatgttttcttttgcagatttcgatcctccaagaaaggaaaaaccaacaaagttcatcattattggagttgtttcagctttttgtctagttctcatagttttaggaattctttggtggaaaggctattttagaaagaaagaatcaaaggatgaaggtaactaaagatcatactttcatatgctttcttaggcttaaaatttcttttaaattatgacattgttattaatttattgtacagttttgagaggattagacctgcaaactggtttctttacctttaaacaaatcaaagctgccactgataactttgatcccgcgaacaaaattggagaaggcggatttggatcagtctacaaggtatctaaacaactcattacttttcataactataagaaacttgatatgtca

SEQ ID NO: 1806 - DNA, 2190 bp, Cannabis sativa
tgattcagtttgagtaatccacttgttatcttgtcccttacgatgtggcagttgattttgacatgctttgtacgttcaggtaaactagggttttcaaatatgtgaattgcttctttattatcacaaaagatggttgctggttttggtacttggatattgaagtctttgattattgtagtgagccattgtatttcgtaagtgacaatggcaagtgctctgtattcggcttcagcagagcagcgggatacaatctgttgctttttttttatttctaagaaatgagtgagtcaccaaggaaaatgcaatatccaaagatggatcttctagtgtcaggacatcaaccccaatcgacatcagcaaaagcagagagttgcagtggtgttggagctgtggcatggaaggaaagtccttggcttggtgatccctttaagtattgaagaattctgtaggcagcattgagatgtcgttgttgtggacattgttaagtattggctaagcttgttcactgcaaagttgatgtcaggtctggaaattgtaagatatgtgagttttcttatgaggcttcgatagatggtagaatcggggagaggttctccattgtctctactgagtcttgtatttggttccataggagtggatacaggcttggcgccaaggtaacctgtttcttgcacaagttgtagtgtaaatggtctgtggctcactgatattcctttgtcactacagtcaacttcaaggcctaggaaaaaacgcaagtctccaaggtccttgagtttgaattgagcatctagggaatctttgaattgttctaactcgtgcaagttatttgtggcaacaattatatccttgttgaatgagagttgtactgagctttgcataccattagcgagaagcccattttaaaccatagagacttttttgtaatttgcatactgcattggggggggggggattgttccttttggagtgtatccaaggggagttccatatagacatcttcttttaaattaccatggagaaatgcgttgttaatatccatgtgatgtaagtaccaatttttaatgacagcaagtgctaaaagcaactttagtgtattgaattttgccactggagcatatgtgtcaaaataatctatgccatgttgttgattgtgccattggttatcatgatggacattacaagaaatatgaagactattggcaggagtaatctcttgtttgatgtagtaaagattgccaagcttttcagctgtcccaatcttcgatgtttgagaagttccttgtatataacaattttttgatgtgaacattatgccattagaacaagtttgtaaaatggcactaacagataaaagattaaatatgaattgagggataaataggacatttgttagtgtaatgttgtcatttattcgaacagtgcctactttgtttatattgacaatagtgccattaggtaatgttactgattgggcatgaggtttcaattgaaaattagtaaaacacctaatgtcatagcaaacgtggtgtgtggcaccattatctataatccaaaaattttagggaaatgaaaaaatgttaccagagaaattggttgcagcaactgcttcagtcgaagtggaagttgcaggttgaagttgctgagataacatcgagatcgattgttggcattgatcattggtgagttgagatgggttgatttccttacatggactagaaacttgagatgcctgagatgtggcatgattattgttctggtttgtaggttttctgcttgtggatgcagattgatcattggattttcgatttccataatcaggtggaaatccatgaagaaagtaacacttgtctttcaagtgacctagtttatgacagtaagaacaagtaggcctcattcttttatttctcgaggcaagattggtcgatggtgatggatcagaattagtttcagatgtgggaggggggtttgatgtacaatcgttgaaaaaactttattcaatggtggccaaggatcaagaaggaggatttgggcacaaacaacatgataagattcatttaagtcagtgagaaattgtagtacctggtcatgattcagctgttcttggaattgggcagaagctgcataggtgcaaggaatcttgggtcgaagctggttgattttatcccacatagctgttaattttgtgaaata

SEQ ID NO: 1807 - DNA, 1873 bp, Cannabis sativa
aaagttttatcctaataattgtgtattaattattttgagagggcattggagaaaatgatgtttaagagtaaagagataggcaggtgtaatatgttcccctaacatgtgctacccttggtcctgctcatgtgaaacccacatgtcacccatacccacgtaatcaaaattgtcacgtcctgccttcgatcaattaataaaacccaaaaatcaaaatatataaccaaacctctctacctatatataatctctagttgacaatttctattttattatacctctcttttaaaattaaaatgcaaacattcggaaaagtctatttcttcgtctatttacgcaaacaaaaaaaaaggcatattatttgattctagttaattttattaattagttatatatataacagtttattcttcttaacaacaacacatataaatattaattctaaattattgaaactctttttttatttctgttaagggagttataaatgaaattaattaaggttataagttaactaattataaaaaatggaatgcatattattagtttaattaattaattataatacgaaatgatatttgtacgtaaatgatcaattacgtgtgatgaattccagatgtggggaaattctgtgcattattattatatattattgtcttgttatttaagacagtactagtactctatttacaatatatattaattaatgcacttaaaataattaattaatgacatttttttctaaccctttcttttcgatgtcttttgattataatggtaagagtttgattactgtctaattaattatgatgttggtgtctcagtgtttgtcgagaaacaactttattaatcaaaggttttttgtgtctgtgaaatttttataatgtcttcataaaaagccaaacaattagcagattgctgaccttaacgctgctttatttagtgaattgtcaagcttattaaaagtactaagctaactaattagctatagctattccttaaaacaaaataaaagtcacaaatttcttattatttagatatatctttttcctgtaaattcatgaattattaaatattcccaagttggaaagcgaccacttgaggaattataaaaaacttagtagtattgagaaaacaaaatttccgatattttatatgtaaattttaatctgtattattagatggatcatatcaattaaataatgtataaatgatatataattttaataaacaattagatttttggattctcgaaacttaataatgatatgtatatatatatatatatatatgttccatcggcagccccctgatctccccaccgtttatagatgataatattaatgacaaaatcgtgttgacatactacttgaaaattttaatataaatggaaacatatatatttgcaatatattaatgatataagaattaaattaaggacaatattattaattaaatatgcagagatctcgatcattggctccaaataatatatatcatcacttagatatctgcactatatatatataatatttatatatgtagaatatgtatcatattaaatcacccttttagttagaaatattggtactctctcttcaacaaatgtaaaatggtcaacaataacatgggaatcgaccaaaattccacttctttatatatttgttaattctaactctaatttgtatattattattcttctataatttataattattgagaactaccaaacttctcacatgcaaggatcatgggtcgtttaattaagttgcaaagcaataaaccgatatatattattacccatttttatatatggattgagaactaagaaaaaatcgttacaaaatatgtttatactcaatgttaaattaatcag

SEQ ID NO: 1808 - DNA, 5304 bp, Cannabis sativa
ttgaatgaactattaggtgtgtattagcatcgatattgtcaatgatgatcccatgaatgatctcccaaattctccttatcccgccactcctcagatcctgccttaacaacttcatcattattttgtacttctaacggaccacttccttcagagccatcctgatcttcacccaacacggcaatcatctccagttttcacccagtcactaccatatagcggaaccaatctccaagataaattcttaaacagcatcttatctttcacacatagcttttgatcttgattaacgatggctattgtagaagaagcggaacaagggtttatccctcagaagaagaaatcaccctctgatgaagataagaggtgtttatttcatttactcgaattacttttaagtttttttatttgaaattgaatgtatatgtatgaatgtgtgtttttcttttttgggtatgaaaaggaagaagaagattgttccaggaagtttgatgaaagctttaatgcggcctggttggggtgattcaagaccatctgacggagatcaggttaagtactaaatagattttattctcagcttaaaccctcttgggtggagaataatatgaaatgaaaatgtgtgattgttgaaattgagcttatgtttttcaggtcatttatcactgcaccatccgaacattggacggagtagttgttgaatcaacaaatgcaaacaatggaggtcagttgtttttcggctactttcagtagtttaaactatacacatgctacctactagaatcagtggcatgaaaattccacacacattactgtttatagcttttgtattgttggtattatgaatgcatcgtcgcaatatttgtaccaccccttcaattaatgatgttctttttcgccatactttagaagttggcattcttttcccttaaattattatatgaaacagttcactttatcttctgatttaatctttgtgtgcaataattccatttggttgcacaagaactactttagactccaatgaacctttaactgaatgttgtggattcatagctgattttttctttcttttcctattctattcaattattggaatgaatatatttataggcaagggaatgccaataagaaatgtcctggggaaaagcaagatgttattaggattgcttgaagggattccaactatgttgaagggtgaaatagcgatggtaacaccttcttagtttccatacttcttatttttatgtatgctcaatttatagtagttgatacaatagagggggaaaacagacacaaaatggaaccataaatcttgagttttctacgttatctatccttagcaatttttttagattgggtctttccaaactttaacaatctttggagctacaatctctacaaattactatataggttcctatgagcttgaccacgagaccgaaagcatacatattcattaaaagtgtgtgtgcgtgtgtgtgtgtttttcccctttaagaagcactatttctttttcttttaggtattgtatcctagcctaaatattggagaatgcattattctctctgaggtgtataagaacaagttgaataaagaataaaagaaaaaggaagaaagaagacaggaaaattccagtgataattagatatttatgttagaagtggtttattttagtactgattttttttcctttgttattttttggtttcagtttaagatgaagcctcaattgcactatggagaggatgattgtccaattactgctcccactggatttccaaaggaagatgaacttcattttgagattgagatgatagatttctttaaagccaaggcaagaatgttatgctgcaactcttactttctacacacatgtctatcttctaaaatgtggtgtcgttgagggatcatgtttgcacctaatctttacttcttttctcttttttaatattactgtctttctgtttatttcaggtcattagtgatgacttgggtgtcataaagaaggtactaaaatgatgatattttttgtgctaatatagtgctattacatctaaatattttttaagttgtcaatcgaacaagacacgtattgaagaagtaatgcacatgtctaggatataggtctcttgtacattttttctttgcatagaaaagaatgttcaattgccagctagcacaagcactgaatcagttgtcttgaaatcatattctatattctttttgaaagagtattcaattaaccacaaccacaagcacataactaagttaaaaaaatgtttggcataaacctcatctttatttaaaaactaggaataggcattataaggggacagtaaattcaaatcattctctgtgatacagtcttcatgtttgacaggtcataactgagggaaagggttgggaatcaccaagggaaccttatgaagtgaaagcatggtaggatgctctgtttgcaccccttgctgctgattttcaataattatctattatttcattaaaattgtcaattatttgtatgttactgatcaggatttctgcaaaaacttttgatggaaaagagattatttcacgtactcaaagagaaccgttcttctttacctttggaaagtctgaggtttgtgctacattgttttttcttgctaacactcttgattgttatgaatattgctcttaatgtgtatgcatgttggttccaagttgttcttaagtgtactggataatcttaatttaataagttgaagtgacacattatttatgttgcggtcatgatttgaattcttctgtataggtacctaaaggtcttgaaatgggaattggcacaatggctagagaagagaaggcagtgatatatgtcaaaagccaatacttaactcagtctccatttatcccagaagtagaaggttatgaagaagtatactttgatgtggggcttgcccattttgttcaggtaagcatagctgttcctgctgcaaattgtggtttgcttgaatatctatttgtaatccatttttccatcacattttttttcattggagttcgaacttcttaagttgaaaatctattcagttgacaaatgtttaattccatagttgatgtgttatgctggttttaattgcaacatgaatgtgatacatatttgactaaaatgggttataaatatatagtcatgtaatcaagtctttttgaagtcacactttatttagcttagatattttatggtgtctgtaaggtttcctaaatgggttttttaaaagttttattagcctacgaaacgatagataattggtatttcaatcagttatttgtgaatataaagattatcgaaacacctggttgcacattgttggtcattctctaagtttatcattcttaaccgtcaagctactagttaattgctcgttcaatgtttgtattagcaaaccaacctacttgataatgcataattgttgcttaagttttatcattttcttattatgtttttatatctggttgtagtacttaaaaaagtgtgcaagttgttttagtttttctttttcttctgtaacgcaaggaaactgctgatagagcagtcttaagagtaaatagggaaatatgaatatgatatgtgtgtattgaatcaaaatgaagaaacaaactggtacacggtatttgagagacccatattcaaactcaatataagatcactgttaggatcgcacatttaagtatgtgattggttggtggtatatgactaactacttggacactttcctctcttacttaggatagcttttgagagtgagttctacccaagtgggtatcaagtggtttcaaagccatgctctctcaagtgagactaacgttgtggaaagggtgacctgagtaagcccagagtgtgccaaggcagagtaggccaccataaagtaggtgccgtggacgtcgaatcttaaaggggttgtatttttagtatcctatattgaccaagtatggaattgattgggtggtatataactactttggcaaccctcctcttttagactagcttttggatgtatcgagatccatgccctcttctaacactcttgccccttttaatactcttaaagccttccataacaaacaacctttcgcagcaagaaatccattagactactgtcgaaaccttctagctaatattctaacacgttacacattagctttattacaatgagtttaggtaatatgaaatatggatatgggatcttccaattgcagtgtgtcaacctactgtgtacagggtatattgtatatttctttttacaaatttcctggtcccttgctgagaatatgataagaatgacaaacctcccctaaggttcaggtatggaaggaggaagtttagaaacaaagaaattagcacttcttaaaaaagacagggtagaagtattgaaagaattgaatggcaagtgattccagaagctttcgcaaggcacctagagaggtcgtttgatgaagatgaagttaaggaggtagtattcagctgtgaaggaagtaaggtcccggggccaaatggatttagtttggccttttttcagtctcagtgggaggtaattaaggaagatctaatggaagtcgttaaatcgtttgaaagagagggcactattcaaagtagcatcaatgaaacattcatctgcctaattccaaaaaaacttaacagttgtagagtcaaagattatagaccaatcaaccttataactattgtctataggaaattgcaaatatgctttctatcagaattaggagagtgttggagaatactattcttgaaactcaatcaacctttgttgaaggtcgacaaattctggactcggttctcattgctaatgagacagtagaagatcttaaaagtagaggctagagcagtttggtcttcaaaattgactttgaaaaagcctatgatcgagtagagtggaatttcttggatctggttttgtgcaacaagggttttggagatatttggaggaaatggattaaaggatgcatatcatttacttcattctcggtattcattaatggcaggctgagggggaaatttgacggtttttggggccttagacaaggtgatccaccatcacactttttgtttactctggttgcggatgttcttgggagtatggtggctaaggtagtaagtttaggcaatttctctggatttgtggtaggaaaagagaaagttcatgttagccatttccaatttgcagatgataccttattttgtcaatgatgagaaaagttaatgagcaaaagtcaattgccggggattttcttggatgagaggaaggtgtc

SEQ ID NO: 1809 - DNA, 619 bp, Cannabis sativa
cccgcaaagtgtgacaaatagcaattcaaaaatatataatatatccattttcactcaacctcataaattaaataaatgggaaatatatgtttgaatatagtgtagtgtagactttgcttttcctaaaagatttgattggggttgcaagcaaactcacacatctcaaacttagtaaaagaaaaatccaaaatcaataaagagaagaaaagaaaaagaggatgtgccctatctataatgccattcaaattgtttggtagagtggagagtgaattaatagtaggaaagaggtatagtataaattaggtttcttaataaaaagtagctcaacaaatatttacccatgttttcgtgcacagagttacaaatatatacagccaaatttattggtggcttacaccaaattcctcatacacttcttatgacttgtggaaataaataatggtcaagctctttctattacatgaaatcacaaacttaaaccattcaagtcaatattagttttatatttatggaaccatctaaatcggcaaaaaattcaggctttccttactgttttatataataatgagttagaaatgcttcatcacaattcacaattgatgacataaatatatatata

SEQ ID NO: 1810 - DNA, 1367 bp, Cannabis sativa
cgttactattacacaaacgcaacgtgatttattttttacaattatacagattgttgtttttcttacaagaaagcaacgtaaaagaaatattcttctgtaaaaaaaacaaaaacaaacaaacaaaaaaacaaataaaaaaatccataaaaattaaataataataaaatcgtaaaagtatatttgaaaaaaatcggtgtaaattttcctagtattaggattgtgccaataattttcatctaactataaagcccatcaaaatatatgtagaaaatattgttgggtcaaatatatattaggcttgcttaacatgaggattaaggttagagagcccatgtttatttgaaataattgacataataaacccataaaatcccatcaaaatcaaattgtgctagtggtttcctttccttttctctctctctctttcctcttcttaaggaggaataatgagaccaaatcgaatcactaacttgaccaaattggttcaaaaggaatgcgatagttgataaatggagtgtgaccaatttttataccaaagtgacattttatttttcagatataagcaaattgacattttgaaagtaaaaaaaagaaaagcatggtttactatgttcaatgatgacacttttgaattttcatcatatagatcgatcgagtgaaatgcattttaagtaaacctttattgttttggacaaagggaacggcgccgaaactttccaaagccttggtctgctaactgacatctggaactgtaatctttttgccattatttttcttctttttttttttttttaactaagtagttttataacatttgaccttattttatgactacaaggattattttcaatcagtctcatggaggattacgaattaaaaaaaaaaaacttttgtactattataagaaacaccatcttcttttctggttctaagaagaaaaaaacaatggatactttcccatcttgtgactatggatactccaaaaatatgaaatcaatgcacacacaatatatctatttatatgataagattataaatcatttgagtaattaaaaacacatttatgcaacagataacaacttagaaataaaagaacaagacatcctcacaaaactatgaatcactctattagcaaaacagtaaataaaaactaaaaagacatccatcatggaatgtaacaattttttataaggaaagcattctaaaactgccaggcacagctagtagctagtaaagtcatgaaattagtttaaaattgtcttaactttttaggagtccctttagataaaagagggctacatctacctaagactagtagaatagaatagaatgcgtcaactgtcaagatctccacgttttaatttata

SEQ ID NO: 1811 - DNA, 1038 bp, Cannabis sativa
tgtttctgttgaagattagcttcatttgaggtgcagtaattggtggcttccgaataccaggctgaatcactcacagagtttacagtggaaatcatagcttgcataggaagagattctttgtcaacattaccagcaccaaggctaggaaaatctatgatagatatctgataacacttagaagagacatggcccacctttgtacaaagttgacatgctggttaagtactggtattagaggaactaggagtactttgaatacttgtggcatagggattctaggagatatttcttaaaggatgagcaccaaaggaacctcgaccaaaaaaatgaggtggtggagtagatccataggaattggaatttgagaaaccagatcttggtcgagaattgttgtgagtgagccaaatttgctaagagactcgaatcaagtttaagaccatgcttctcaatcctatgatcatgagtcaacatcagagattcaatctcagcaagaatgtatttttcatgaagataattgatggagatgataaagatatcataatcttgatgtaacccattgaagatagcaaaaaaatgtgttcctttgtagagaaatatggccaacagattcgagcttgtgcatcaaatatttgagatgtatagaataacacattaacagaaattgagacattcttgaagttgtgaagctgagtttcgtgctgatcaaccttggtcaaagtttgagatgaaaaatattgctcaaagcaccttccaaacatgagcacatgtcttacaaccaacaatacgagttagaattaggactaaacaattttattgggtttgacccagacctggcccacccgcccagacccgacttaaatacactgctgatttcccccaaaaaatgtgtagtttatttaaatttaaccaaatgtttaatataggataaaaattgtattcaaatataatttttttttttatatttgttttaaatttataaattattttatattagtttctacttcttagttatattattgtctatattttaaatgaaaa

SEQ ID NO: 1812 - DNA, 2039 bp, Cannabis sativa
tagacagaaattcttttatacatgagcattaaatgagtgtatatatctataaatgaaatttgtctgtttgaatttaattaaatatcagtttcaaaaaagaaataattaaatatatttattaatttccttccgtgaaatatccccgagtgatgccaatgtgttcagaaaatatctgaacgacacttggcaacttatgatgtgaacacttgtatttattttatttttttttaaaaaaaaaatggttgttttttcgttctttctttcttttgaaatcgaacacttgtgacttgtcggacactcaatacataatgccatatatatatgcgcttagtctttttgttaacaatgacaattgacgagcttgagtttccttctcattaaattgtttcgtttccacagaaagtccatcacatcgtcaaattaaattaccacaatatttaataaatagtaaatagatatataagttaactttatttttggaatcatcattagttttgttattctcatgaatactccccattaaaatctctagaaacgtctggttggtgcctattaataaaaataaaaaacacttgaaaatgaaattaacggattataattgactctagggtaggagagacaggtacaacgaattaattaattggtctttttttgttattattatttttcttttcgaaggcaattcttacgtgacaacaacatatttaaggagcttaagaacattttgactacaattaggccttgactaattaattattcttttttttaaaaaaaaaataataataaataaatatagatcagggtgatcatctttcgaaagtagtaagtacgaatatataggagtcaatgtgcataatgattatgacttggtcaaaaatattaataagtggggtaaataaacaaatatattgtattaatttgttttttaggtgttgtaaacttaaaataaaataacaaatctacgtcactcaattaattactcgccaaaaagaaaacgcctacatacatttcagtctttgaatcaaaatgtttaccagtccagcaaaaaataaaaccaatgtgtaactactctcattcttaattatagggtcaacatatataattacttcattaagatactaatcaatcgtacctaattcctatttttttggattatgtactctaagagattacttaaaatggtagctagaatgcttttatccgtggattatgcagactttttattttatattgaattaaacttactttaacaataatacataatttataaatttaatatacccataaaggtgaagaatttttaattttttatttaaaaagcaatagggaaagagatttcgactttgtcatcaacatatagttttatatataatcaattgatttatggacccttcattgattttaaatttggaaaagtcactcttatgatcttatcttactctcgaaatatatatatttatatatgtgtacacacacgagcacacatacaattaagtagaataacttaagcattaattggattattaacgtaatcacaattcatatagcctttaaaaaaaaacatttcaagttaattaaacttccctatagtttgggtatttgcaagttgcaaggtctgtaatatgtccctgatcttagtttttaatactcaagtggatgaaaaatattcgaccaaatcttgatctgccgccaaatggatcatagtaataatactacttaattatcacatgtataaacaatatatatccatagtccatgcacaaaggaattgtatataaatatagatatatatctcccttttttattcctttttcttcttatgtgattaaaatattaccaattagttttgcttgcattacatatttctaaatctcaaagtcaagagaaccactcaaaactatgacaaattttattattaaaacgttttattaatttattatttcttaactctaaaataaaattaaaaagaatacgtaagcggtgacatttagttaatctacagttcacttttaatcctttcaactttgttggagttaaac

SEQ ID NO: 1813 - DNA, 1386 bp, Cannabis sativa
gatatgaggaaaaaattaaaaagaagcaacttatttgacttttcgattaaaaaaggttagattgttcatgatctcatggatcatgagtaagaaaaagtaaactatataacaaaaaggttagattgttcatgatctcacaagtcatggttacaaaaatatactttgttcggcaaaaaataaaaaaacaactaaaaaacaacgaaaaatcaatctcatgacaactaactataagtaaactataaaacaacaaaaataaccaaagaaatacccacatatcaactacaatacaactataaataatatatatataccacaagaaattagaatgagattccaactcagcaccttttgagattttgagaagagttgctctttagagagcacagtacgataaaagttgtaagctgtgttcggaggagagttattatctatggtagaattagtactcaaggggtatttttgtaaataaaaaagttcaaagagtaaaaaatgaatttttttttttttgttgacttatttttgtaatttttttttaaaaaaattttaatttattatataaatttttctaattacttttttaacttattttacattttgtgcattgtagcacaattataaataatagattaaatataccacaaactcattattggtgctaaattggagatggactaagagctgcatatcattaatagcccaatatcccactcaactttatcccccaccatcaaattagaaacacatctatccattatttgaaccacttactgtagtcatcaacatcttgcaacaaattacaataaaaatatatttgataatcaaattaaaaaacaattaaggtactataaaactatagtacttctcaaacacaacacataaatattcagtctttattgttaaagcagaaattaaagaaacatatataaaagttacattaatacattacagtaaaatagcacacacagcttatgacaaattaaattcacgaataacatgcaatatatatctataaatagttgactattttataatagaaaatacagtctgtaagaaagcaagaatgagaagagtaacagcaactaagactgaaataagtgcccatggatgtttgaagtagtcacgcttaagcactcttcgatatctcggccatctacgtccacaatatttatttatatcatcaacaatatcaatataataatgttgacatatagtaccattagagattcgattgaaaaatatggttgcatcgtccatttccatatatttttccataatatcattgtttactaatatttccatgtcttcggcactatcaatgagatggttcagaaatatcatgtaagaagtgatgacttcattgtaagaaaagagacattgttctaagca

SEQ ID NO: 1814 - DNA, 3353 bp, Cannabis sativa
aactaagatccattggtacaacttacaagttgagaaataatatatttggtacttgatcaagattgagaaaggaaaaaaaaaagtgtaaaaattattatgtgtgatttgaattagtggaggggctagggtgagagttggcgtttgcagtggcatcttggtcaagagtatcttcaactccaagttgaacaatactactgggactgcctcggatagtaaaactagaaggctctgattcttgatgtggcctctttttaaaggtatgagaagacaagtctttttggtcaaatattctaaacattagacgtattcttttccaaattgaagaccaagaaacaacatcatcatgatgaggttgtgtagagctcaatatcacgtgcctttgactatagacaaacattgcaccatgtattgcaagagctgctaatgaagaaactccagctataaggaatagtccccaaaagctttcaagcccgagactacttggttttgaagaaagggcttgtacgctatatgggtctggacaattgttggtttgtgactcaaaccattttttttcaatctttttaagagtatctccttctgttatatttagtattgcctttgaaacatctgggattagaggagaccctcttggaaagacctgataattattgtgttacaattaacatgttttaatattatgaagtaattattaattaataaatattagagaaaagagagagaaaagaaagcttacaaagccaaaaccgtctgtttttattgttggaccgaccatggtgtatttggagcaatattctctaagaaaaagcttcatgtaaggaatttcatcgaatgcagctgcaataccttggtcacgtgatgatgaggttgtgtgttttgaaaatgcttcgtctagttcttttttagacttataaaccttaagttgagactcgtgaaatcctagcttctttaagattccataaacaaaagaggcttctaggtaaccaacgttgtctttgttctgtagtagttgggtaacgcttgtaacggttggttggagttgttggaccgttagaaatgatgttagactggcagtgtaactttgagtcagaatcagtaccacaaacacccatatgattattacgaaccttgccatgttgctaatcactctctcccctgttaattaataataaatagttactccattgtttgtcacatatgtatgggaaaattctcaagtggtacgtcgaaaacaaggttaaagcaagaaagagaaatggatacttactatgtgcaaagaccatggttgagaaggagaaccagaaactggtgccaatttggtgcaaaggggggcctcgaaaatcctcgtttattcggtgttcaagagcccaaaccacaaacccaatgaatacgaaaaagctagcacttgctacccaaagatccaaagtcaaaggcttcaaaaaaacccaagcattcttgctcctttggtctttgactggcactatcatttgcacccctgattctgtatatggcaacgtgaaatcaacgtataatgacctgtttgctctgatcgttatgtctcccaccacagcatcaaaattctaaccatattaaaagaagaaaaaatgatagttaaaaataaactcataaaatgtaaatggggaaattacttgaattatatataacgtaccccaagataaacttgataaaccaaatcatcataagttcccctagaagaattcacaaatggaatgaactcgtaatcaatcttgtagggtaagatttccattacggctttaaatatctctatgcaaaatccagtgacattacttttgtcactgctaagattataatatgagacattaacgaattctttgaaaccatttctcaatgggacacccacttttaatttcgtcttgttttttggaatatcccatcctttgggaatatttaattttgatcccccaggccacataatcggatctaaattgtccttgaaagtgttgtatgtcgtgcttgctgttgttgtgttcaataatgtcaaattccttaataggccatgtttatggttccaaaatccaatcccattttctccactaccgttcacaacattgatgatttggtatgttgaagactgcaattgcccattagcaagactgaaattccctgcaagcccttcaaatcttatgcttaataaggcttcacgaagttcagaaccactcaaagataccccaaatgagtcaagatccgttgatgaagcatttttgttcttattgtggaagcctaatgttccattatgatggttcccaaaaacgtcttctactgccatggctagagccttagcagcatcataagcccataatccaaaaacattcaaatcttcgtttttaaattcaattttccacctttttctaaaatctgtaaccccttttgactcaggaacataagtctttattcccaatactccattcatagaataaaccacagaaggcgccatggtactaattaaattagtcatggtatttgtcataatccaaacatagccttctttgaacattccaatctctccggctttagtgaaaatgttggctccaaacgacatgtcgtttgtatgaacaataaacactctagtttccatattcatcaacttgtgaagctcttcagcaatttggtcaacggtcggtgaaagaggaataacacttctgtaagggacacgagcgttgacttctaacaaggcatcggtcaaaatggggattagcccttctccatattcgtcgtttgagtaaattggcaccacttgtttccatccaaaggcttcaactagagcacttatggcttttacttgggacacttggttttcagtggctcgaaaaaaataagagcttcggctcagagttggactcgaagctgaatatgatattatggggacttgagcttgttctccaagttcaactacaaagttggcctcacttgatgtttctgggcctataatggcttggacttgtacgttttttataagatcagcagctgtgtttcaaacccaaaaaataaataattatatatatccataaatcaatttcacatcacttatagcatggaaaattgttgaaattaatattttgaaaaatttatcatatataaaagaaagagtattcttattagacacctgtattatctatcttttattggtgacgactctataattggttatcaataatccttaaactattttattaaattatatgagatccgataattaattatatatagatacttatagtagctttgaccaagaaaatcaacaattgacaactattaattaaagatttattatttatgcgactgcattaattctgtattttgatcttaataac

SEQ ID NO: 1815 - DNA, 2104 bp, Cannabis sativa
caaacatattcaagaaatgatctaacctaattgtgttgttttgctttggggatttaaccaggacggtcctgtccttaagcaagctcagactcgtccagtgttaagagacggagatgcttctaaatcagcaaaagaaagtaagccaattgatgctgataaacttaggcgggatctatggaaggcaactggagttatagcattgtctgaatgcaacctgcaggtataagaatcaaattttgtttggatgatcagacattgtcaacatttatctttggtggtcgtacctaatgcattcccatgtttttcatcagggatgcattcttaaatttgtgctaattatatttcacttatgattgtccttgctatacatcattcatatacgctgattcatctttatgctagcatttaaaatatattgctagcatttacttgtaactaagtgttcacatggcttaattttccaaatagttgaattattgttgttgatttcctttgaaggccatacctgatgaagtttgggcttctggaaatgtcagacttcttgatcttagtaacaatgctattgaagaagtgtctttcccagttggttcctttcatgtgcaggtattgataattttgtctttcttttatttctatgtatttactttgatcagaactattcgactctcttattgtaagttctaaacatttcccccaattctcctgttgcacagacattgttgttgaatgcaaataagataacagatgaatctcttaggtgggaaggaatggcatctatgcgaaatctaacacttctttctctgaatcataatcagtgagtatattttggccttaccggttcaatgcaagttttttttttttctttttcaaatgaggtcaaatttcgaaacaagtacaaatggaagaatttgttcttgattttgatttattattttcaagactccagcctatggcttgagtttacttgggtcagggttcaatttctctagatcacctatctggagaagggccaggaagttcatacctatgattgttattgagttcaggattgagttgcatgtcttacaaatacggagttaatgggcgtgatagaaagagagggagagcctaaaaaccaaataaggacataacgtcaaagaaagttctgtattttattttctttcatgcaataatataatatgtttcccttcttcagcttaactactttaccacctgcactgggcgagttgacttcacttaagcaacttcgtgttgcaaacaacaagttgactagcctccctaacgaaataggacttctgagacagcttgaaattttgaaagtcaactctaacaggtaatgttttgagtattctgatatatgtttagttcttgttctattatcatggggggtaaagtttagttctcacaaacacggaatcggcatcattgcatgtaaacatgggaaaacactagatgatttatatttatttttctgttatctttttgactgttgggaatatataattttgtaataataatactctgctgaccagaaagattctagagccattatgctaattctgacattttcttgttaatgttacacctcttcgctcaggataaccgaaataactgcatccattggggattgcagtgctcttattgaggtactacaattgtctccatttagttgaatctcactctggatatggttttttgcctgtctgcttattttgttctggcacaatacaggttgatctgacagcaaaccttctgtctcagttgcctgatacatttggcaatctgcacaatttgaaggtccgtgtttcctttgaccttttagagcattgctatttaacactttaagatgcccaacaccacactgatgtagtgtcctataattagttagcggtttcccatatcatttattaaattaaaatatgtaagacctaatattaaaatgcactaatagcagtgtaccacgtcttgtggtgcttgggaccttaaggtgcccgtttttcttataattatgtccatttcttccattgaagaagcagtaaatacttttcagtccatttggagagcacttgaatgaataatgactttgagaaaatggtggtttttt

SEQ ID NO: 1816 - DNA, 1066 bp, Cannabis sativa
tccctatcttcttggtttgtgaatttcactcatccttgaaaatcgtgttgtgcctaggatattgtaatgacagctatctaatatcaacgcatacatcaaggagaatatagatgatacaaaaatacctcgagtctagttaggtgcataaatgctacctttctggctcctcaaccgttggattgattatggtgctttcctttgattctcagttgggttgctagagggtccactgtgtggctgaccttttttgtcgtggacttctttttcttcccttgctatcagccgcagtgttgaccttctggatggcactcatcaaatcacttaacatcctggattcaagtgtatctagcaaaatgaaaacaccagcataattaaaacagtcaaagaggcaagaaataacaacttaaaccacacaacttaaaataacaagaatgtcatgtgattgcaattgtggaacgagtaattataaggttcccctcttgcaaataaagttacttcttcttagccaatgaagttatcatattccctaaagcccgagaagaacatagtaagaaaaggacccactttagtgacatttagggagaattcccagttatttgagtacttaactatattatctactctatcgaaataatccttcattggatacctacgaggatcgaaacttaggaaataatggtcaaaacccccttggtctctaagtgacatctgagataaacaaggggtacgaattacacggaagggattttacctcttccagaagtacttgttctagaaatcttcgcatctggatatgctgctaggaacctagcctgaatttcctcctcctagtgaggggatttgggtgatgactggcccatgttgcagcgaggagctcctcatctttagttgccttcgttatcaaaactgataattccaaagcggtatgctccttaaggtcgttaggggtctgtggttgacccctgccactaactccgtggatgctttggaaagtggatatcaagcgatactggcgcagtaatttggtagtcacacagtcctccctgtggggttttatgccctaaat

SEQ ID NO: 1817 - DNA, 2224 bp, Cannabis sativa
aatcaacactttagagaaaaaatattgtccaagaaaataatgaaacaaaacaaacaaaaaaatgcaagtatttttaagaaaactcgttataataagtcataatttgttttttaataagaataagcaaaatagatttaaaccttgatattttttctaataaaacgaacaccatgtctgctttgtctttgttcctaatgaagagattaaactcataagaatatacagaagttattctatcaagctatgaactagtgtaaaaaattcatacaagttaagcaggacaatgatttaactcagtcaacaagaatattttaagcaatttaaacaatatgtaacaactttataagaccattttctaatttatataatttttttcttctaaaaattgtgtcaagcataagtgtgtaaaagtgaaagcaaggaacattacctaatttgtcaaaaagactttttctgagaatatgtaaccaatgaagatgatgtcacactacctcaatgatagcctttttttatggtagtgtatccgctacataactcctaattatataatactaacttactcagagacgactttcacacattgagataagtaactctattcttccaaaggagcttaaacacaatttttaatacattttttttcaattttcgaaaatggtagcttacataacactgtttgaagaacttaaatattcttatgagtagtgaaaaaaatttcctgaactaaacctatgtcaaatcatgacactaaaaatcaattcagattcacaatatttatttttctctttaagatctttgatgttgtgagataactctttattaacttttactaatgaacgattttcaccacaaatttgtaactacttaccaaacattaccttgtaagattctgccaatgattcctcatcaagttctagctcatctgaatctgaaagagcttctttatcattttcatcagtcgaagtattgtttaaacacaaaacttttctttttccctgtaaatcacttgacaaaacacttgttaaagcaacattttcatctttactattttcaaaatcatcatcacttcaagtaacattaaaacacatatggttacgtcgtcttggttgaacgccccatatggcttaataactttatcatgggctgtagtaaacaatgtaggacaatattcttctgagtgccctagaattccacaaataaaacaaaaaagagggacatgttcatatttaaagttacactaaaactcctccgtatcgatgttcttcacctttcttcttctcttcagtggcttattgacatcgatagtcattttaacatgtagataatttctccacattcccataaaattcttaggaacataattcacaaacttaccgatgtaattgcttatgtttcttgcaactgcttcaaacataaagccaggccgaggatcgtgcaactgaacccagatctccacctactttcaaacgcttaaagaccaataagaacttattaaatgtccaaggactttttttgatgaccttttgaatatcgacttcatgatagaactggaataaataacaattatcatccaattcttagacaaatattcctctaccgggttgccatagagattccatcaagtgttgcatagcatcgaagtcaatgctgtgctaggtgaagaatcgacctactaaacatcaccgatcatcaactgtaggtattggttgtaatgtttcagagaaggccaaaacatcttcagattcatcttctaagtcaatattagcccattgcgttgttaagtcttgaacaaaactactactagaagccataagtagaagccaacaaaatgacaccaggagaagaaatcagaactaaaaaacgattgacaaaacaacaaataagaattctagtcatgtcatagagacaggacgaaatttgcttttatagtattttacaaaaaaggttttttttttttaatataaagattaaaataataaactagaaagaaaataaagatagacattatgctattaagatatagttaagagttaatctccaccctcaataaccgatttccttcttgtacacacctcttcatgattttatccttcattctatttctcatattaccttacttggataactgtttcttttaggtttacattaccgtgactccgaagcgccaccttcttcatttattattggagacgaaagcagttatccctaatgccttgcccctcta

SEQ ID NO: 1818 - DNA, 1356 bp, Cannabis sativa
aaaagaagaaaaaagctgattcattgactaagggatcaatgaatatcttcagtccaacaagacagaaaaaaactaaaaagaaaggaaaagccaagggaaagacattaatgtagtcaatttggctcaaaaatctacttttgagtctatcaagtctcaaatttctaatctcataaatgatgtgaatttttcttttttatccctttcccttttgagtgtttgactagactttggtagtttcaacttctcacaattcatggaaaaaaaaaaaaaaatgaccaacaaaattcttaaaaaggatgtaaaaatttacaaaaatctctcaaataactaaatgaacatcatcatattataacaaataatagggtaaatagcggcgtaactacccaaagttttatgtttgtaagcggcataaatccaatatttatttttagcagcataagtacttaatatttgtaaaactataatttttttctaattttatccgtacaaattctgttattatcttaaataagacacatataaagtccaaattctagattattgggtctaaatagaaatatatagtatcaattactttcaaatgttcttttaataaattcaaaacagagtctaactaacgaaactggaaaaaaaaaaatgcagttttacaaacattgagtttataccgcttacaaacttcaaacattgggtttatgccgctatttaccccaaataataattataatttctacataccaaaatggaaaaagatgcaccaaaaaagttcctaaaaccagtgcattctttgttaaggatttaactatagaattattgctgcaaaaactactataacaaaaacaaagaaactctacaaaggaccttggcagcaagtaccacaacaaacctatttcaaacacattattatttcacatgcattattgctacatattccatagtcataagaagaatgatcaaatctgcaaaatgggatcctcttattttttgctgaaactattaagaattcttgaaattcaaagtataattgcttctgtttctctgcagtggagacacagattcagtggttccagtcactgccactaggttctctctcagtcatcttaacctcaccacaaaaactaggtggtatccatggtatacaggaggacaggtactcaaaatattatacacaaacatattatgagatattgttatttctaaaaaattgtgaagctaaatatttattatgctaacttcataggttggaggatggacagaggtttacaagggactaacttttgcaacagtcagaggagctggccatgaggttccactctttcaaccgaaacgagctttcgttctcttcaaatcgtttttggc

SEQ ID NO: 1819 - DNA, 2816 bp, Cannabis sativa
atttatttatgttcaaatgaatgttaacttgagtgtaagatgataagttcaagtaatgattctcttcttctctctagatggtcactgattgctggcaggcttcccggaagaacagacaatgaagtgaaaaactattggaatacccatttgaacaagaaaacatctgcagtggggaaaagaaaacgtgtaaacaataacagtgaccaccaaaacgacacaaaaagcactgagacaacaaacaaaacgagcgaaatccaagaccctcctaatcccatgttgagcagcgaaactcaaaaaatctccaatgatcttatggatgacacaaaaagcttcaactacaaaatagaaaatcccattatggctacaaacagctccacttttgtcttcgatgatgagcctctccctatcataacttacatggattccttcgtttgttttgaagcgtttggacacactgcagggttggagaatcatgcaaagataggaaggcaatcagtgtttccataacgtatcttttttaagaaaagaaaataaggaaaagaaaaaagtagttttatttatagggactagtgtactaaataaataatcaaagctactttcactcctggatggagacccactcattcactcacatacttgtcgtttgtgtataagtgaatacaagtctcactaatgtacttgtgaaaccaacatttaagggtaggaactaaaatttgaaaacattgctggatcgcaacactttgtgctataatttcccccctttaactttatggccttgtgttttatcctgcaatctcgacggatagcattatgtagtttagttattgttatattaatatatattttatatgtattgaaacaaaggttctaatctcctagcaaattttattcgaagtgtttgcagattagatgtgcgtaccctttacccctaaaccaagagtttctctcccttcaataaagaagcaacgagaagtgagcctaacgtatctttgccatcttttgaaatcgaatccacatgatatagatgataagagacatgggaggtgatgatatcttgccagtggaccttatctccaaaaatcttaataataattttacataaaagagaatatgaaaaataaaacgtgtataggaatcccgtgatctaattaagtagaaacaaactgagacaatcccaaatgttggatccaattgcaattaaagagagacagatactcagattcaggtaaggaaatctaagagaatatactttcattcccaagaatgattggcaataagtctctgaaaaactcttaacaattacagaagcataaaatgtaaaataaggtgaatatgttgggaatacaaaaccttataaatcctcccattttgataggacagtgaaaagaactacaatacttcatcatcttgttgagaatacaataataagccattgtcaatgggcaatgaaggtggagttccgggtggaatagaagctgcgccattctccccagcacatatgcacaaagcttctgcatctcttatgactgcatcgagctcaatttgaccgctcaattcatttatgaacttcaacagagtgtcaaagtccatctgctcccccattattttatttcggtaccgtttcaaaatcgcaacacaaatgtataggtgtaaatgctcagacatataatgagtccataatacttcccacaatctcattgttttctcatattcaaattccctggaaatacaaaaggaattctgtcagctgcattgtcttggacatggaagatttaatgttaaagctaatagctatatgttatacagttaataagcagcataaaggataacatagtccaaagttaaaattaatggaatttggaaaacaaacaaaataaatagtgaaccagggaacccaaccttttaaattgaattaagacccagcgaaagcaaaagaagtaattcaagcactcctgttgcttgaagtaattatgcaatggactgtccaacaattccaccaactgccacaacaataattagaaattattaagattgcaacagaaagaccactacctgcctagcgaaccaatgaaaacatacagaccaaaagacacaactcgttgtgacatgtaaaatcacattggaagctcattatattgccaccaaaatatcatttacttaaatgattaaatgattgggagtattattttatttttatgataaggaatttcctgaatgattccaagcgtcacattatttatcatatctcaaacgaagaaaaaaatattcaatagagtacaatatgtttatccaagtctacaaaattgataaattttcccaccaaatagaatttgactttctttttcagtttcatattatcccctgctcagcaataaaagtaatacaacatgttatttcaatttaaactatgacaccctatttggacaagaaaaagcaaatgaaattcaaaatgcatggaaaattcaaaacaaaagaaatcaaatcaaatacaaaatattagaagctagtgtttttagtgtgacatattactgtcaatgtcaatttgttgcgagtaaaatataataaatatatatatatgtatatgtatacattcatgaagaaagaaagaaagcaaataccttagaaattgcaaaaagttgagtgtgcatgccattttggtcacggttaaaattaggtcctagacgctccatcagcgaaacaaaacaccaaaaggaatcagcttcattccccattacaaataatattggggatagaaggtcactcataccctgagtcacagaccaacaaattttacttaatattacaaccaatacaca

SEQ ID NO: 1820 - DNA, 1619 bp, Cannabis sativa
taaagccacaagtaccacactcaaaccccaagataattctctcgattctgaaagatacaaaaggatatcactcccaaaaacgaatcaacagagaatcaaagagagggaccccaacaaaaattcttaagaaaaaaaaatgagaaaagaaaagaacacataaaactaaactaactattcattaactaagtcgatttaatcagtgaaggatttaataacagcatgggcctcgcaggccttagcagctggggtgggctcaacaactgggctgggctcaacatggacccccaaaagctcctcaggcaagtcccctttgataccctttaagtaaaaagtgtagaaaagcttgaatggaaagatgagctgttgcagcttcacctggccgtaagccccttcgaagattccactcccaccggtcacagcaaggtaagtgtcttcgtaggtcaaatacgagccttgtacggataagtgaccgtagtcaccgaagtagaagctgtagatcgcctcgtaacgatcacctttcttctccgatttgttctcgatcagaatgcatatcccagctgtgatcccaatcctcttttgaagacaaccagtgtacaactgccattatagaaaaatcaagattgattatgatgatgatgatggaatttcaatagtttgtaattaaagtaaagtgaagagttaatttactttgttactgaaagggactagatctccgagtgagttaacttctttcttgcttaatttaaggaaagcagggctgttgcgatcccgctcgtttatctcgtaaacgcatagttcttgaaccttagctgaaaatataaagaaggaaaaaaaaaagatttaaattatgttattaatttaaacagaggggaagaattgaagggaaatgattactaattacttactgggtctttctgattctgatgaagtggcttggcttctgcaagagaaagctgttttggaggatggattagaggtgatctgaagcttgggagttgagatcagcgatggggttaagaccttactgaaagagagagatgaagaagagaagagtgatctggtgttgtggagtttgggagaggaaaaggatagggttttgagagtagtggcagagctagcggaagccattgatgatggtggaaaagttgttgactaaagagagagagagaggtagagaataattgtgtttgggaagagagaaagttagtgggaaaatgttttgagtaaaatgagaatggtggggacttatttatatgaacatgtggaggagggaaagcttatttatgcctaaaccacgtgctaattgttttttttttctgacttttcatggacggttatcggaaaaaaaaacatttaatatgaaaaacttgaatggacggagattcgtagtcgtacagacggtggcatgttaaaagtctaacgagtaaggagttggaacgttcaacaaaaaaaaaaaaagagttggaacgttcaacaaaatttactttgatttttatttttaaaattaaaattactttgatttttttgaaaggaaataattactttgaattcaattgggcaataataaatctctcaaaataattattgaaacgataagtcaataactgtaatgtgtgtct

SEQ ID NO: 1821 - DNA, 802 bp, Cannabis sativa
aaagtcaacgcacttgtttatgcaacttgctttgctgatgtttcaaggtaatgtagcttaagctatcacaggatttgaacactttgtttttacacgtattctgtgattgtcaacctcattcttaacttatgtggtttatttccttcttttttggatatctctagtacatcagatgcatcattggcatatgtgaaacttatccaacatttagcagtattcaaaggatataaaggttaatttaaatgcttaaattccttcataacacttcttcacatggatttttctgtggtttagtggcacattctctctcacatgtatttttatctctatatctgtagaggcatttgcggctcttaaaatggcagatgagaagtttttaactgtgtcaaagtcacgaatcttggtactgaaactgcaactgctccatgagcatgctttgcataggttagtttatttgccagtctcttgcttttacttatgttatatttttgccataattctaaatctaatatgtggtaagtatcatttagaggacatctgaaacttgctcaacaagtatgtgatgagcttggagttctggcctcatctgttactggcgtggacatggaactgaagacagaagcaggtcttcgccgtgcgcggacattgcttgcagcaaaccagtttagcgaggtttgataatcagtatattaaaattcttgaagctaaattaattcatcgactgagtgcattacagagctacatatattgtaatttaataactcttgggccatgattggcataagactttatctccagcaga

SEQ ID NO: 1822 - DNA, 4240 bp, Cannabis sativa
agcaaactagtaaataagaatttcaaaggggaggtcctgctctcataccatgatacttcctatgcattgcgggagtcatacaagcgaagatggatggtctcttcttctgctgcttgattccgaagataaaagatctcaatggaatccgagcccgagtcgcttgcctcagctgaggagtagtactgttatcattttcgctctgctttttagatgcagccaaggaaaagtccaccttcaaagtggtcagtgtcttctccacatcaatctgcattgttgtcacatggtccatccccgcctgcaactcgtcagcaaccttgttgttctcttgcttcatgttcagaacctcaccttggaactttgctgcttggtagcttgtgaatttgaaaaagtcatcgtctgcctcggcacttgctttcagcgccgtagttatctcctcttgaatttcacacaatgatgagaatcgtccctggagttcctccttcagctgaccgctcttctctaaccagactatgagttcggtctggatctctctgaggtgtttgtacaatggccgagcatcagatttgagtaggttttgaagagtgttagtatcattagagtcttccttcatttttttctcatccaatttggatatctctgattttaaatctttgatttcagtgtcaaatttctggatttgatggaagcagctgctgaatctgagccaaaattcaaggttttgctctagcaattcgtcaatctttgttcggaatttctcttcagttgctgacaatgtacaggtttgatcggttaggattgccttgatgtcttcattttctgccaaggatttaggattttcgtcagtgaggatgagatcagacaatgagccagaggtttcagggttttctaactgtttgagatttctttccctgttttcgtcattcaaagtctcttgtagaagtcctaatttcaaacgcaatgatctgatctcttcatcttttttcgaattgtcaccctttagttcttttaaaagaagggatgtttcaaattgcctgtccaaggttttcttctctacatcagtcagcctcttcttgatgtccttgtagtttcgaagagttgtagtgtactcagttaagagagttttttctctgtttccgattccatttaaaaacagcttctgccaatctggttcatcttcttcccttgtttcctttggttctgctttgagaagatcatccttcgtctctgaaggagtttgtttatcatctacagcaagcagtttctgttctcccccggattgtgaaaacagcttctgccaatcttgttcatcttcttcccttgtttccgtaggttctgctttgagaagattatcaatagtctctgaagaagcttgtttatcatctaaagctagcagtttcttttctccctggtaatgtgaaatatcttcttgctgattatgatcagaagtaccaaaaaagttgctgtattcttcagagctgtcacccctttgtactatgttctcttgtaactcttctgaaaatcctaaatctgctggagatgtttcctcctgcaacacagctgtaatttttgcttcgtcatctgattttacattctgtggaatttcaaaatcttcaaaaggagtcttcttctcttccagactatccaacagttttggcgaagttgctacttcttcattgattaaatctgatgcatcaatctcttcatctggcttcacgctttgcagtttcccagaaagatgctcaagattacagtgtgcttcagtgaaattcgtttggagattaatgttctgctccgtaaaacttttgttgagatcctgaattccgtgcaacttttcctccatttcctttagcttgctgctcaaattattatttccatcatgtaaagtagctttgtcatcttccaaagttcgaatttgtacttgaagcccatcagtttcgctttttagtctctttacaagagcagcctgtgatgaaactgcagtttctaaggtgatcactttatttacaagttcatcaatcttctctaccatttctgatactgtaagagatttgtttggcatggtgtcgaattgtttcttgacttttgcttgcagtaactccatctcttgcctctcttttgatttactggccactgcttcttgatatgagctatttgatgcttctggtgctgagctcttaaattcatatttcccaagttggcttttttcattggtctgattatggtgatattctcctatgagaaactcaaacctctcctttacactcttaaccctttgggactcaactactgcctcctcagctgatctttcctgtttctcctgcaactgagtcagcgtctcttggcatgattttaaagcagccgccgccatcagatttctagcttcatcatcttcaatgaccattccctcaccaaattcatcttgcaaattgcacactatttcttgtttttcattgatctgattgtcaatttcccagtatttcgcaagtccattctcataagaacccttcacgaactctttctcagtttgcagggccaaaatatctttctgaagtcgatcgatctcttccaatgcctgagttcttttaagacctgatttagaaactgttgaggtagttgctgttttttttgtcattttgggaagcaacttttttgtagcttttgctgttgtaatgatattttttaactctttaaagggacctttcggagcattagggacattctttgcaacttcaggaatctttctcggaatcccattagacacttcttcatcttcttcttccatggcaaactgcacttgttcagggaaaactgtagcgattgtgttgttggcattttgcagctctgttgaaatgtgatcataccgctcagccaatgcccgataagctctgtatgattcttctacaaagcttatcagctccggtctcttcttgtagtacatttctgctctcttagcaaaggagtctccatcctcttcaatgagttttagtacaatttgcaccttttcctccatatctgcaatcccgtacataattcatattagtgtttgtttgcctggaaaaatagagaacagaaataacaaactagtgctggagaatgataatttacagatgaagtttgaataaggaatacagatgaagttttgaacttcagaaccttttattatacaatatttctaaatttgatcataagaaagaaaccacaatcataattagttatgaaagttatgcttagaaacagacatcaaaactttttgtcacaacttttttagattgatcattttccaaatgagatggatcataatatcggttgaaaacaaactgttttattgcaacttcatgtacagaagacaaagcacatacaaaattgaattattttttattattctaagaaactgatttggtgatgaccaattcaatctgcttgttccaccctataagataatagctttgtgataaaagaccacaattcagatgatcgggaaaactaatcacaaacggaagcaatggcaatattcaaaaataaacaaattacaaaccaaacaatattatgaaatttctagacaaactcaacactaatttaccttggaggttttgctccagccatttggattgctttgttcttatgtggcttgcccaccaccatgaatatgcattgcttgcagctctctgcaacatttcttcttcttctacttgatagacccaaaatttgaacaattttttttctctctctttctatctatgcaaggaaaggagagatggggatcatttatgatttagagaaataaaggataaaaagatttgtatgaaatgagaaactaaagaggaaaagagaagaaaaaagaagaaagaaaaagaaaaagaaaagaaaatggaaaaatgatatagtttgagagaaagaacgtggtgaacaatggaatgtggcaccaactttctaataatggggttcatggaggggagcaaactccgccccgaattcattgtcaaagccttatttttcttaaaaacttttaaaagctttttccacaaataaataaaatcaatgcataacataatcatattactctggcttattaattacaataaatgtatattttatgggtcagtaaaggtaggaaatcatcaagtagctttttttctttttttccttcacatgaaatctttgcttttccagggtgtgaaaaaagagcgcacacacctcgcttttggctttatgaaatcccatacaataataataataataa

SEQ ID NO: 1823 - DNA, 2101 bp, Cannabis sativa
aagatatatgtgtccatgttgatgtcatgtgaagtataaacttgctgcggctaactggccatcaaaagtagagaagtctaataaactaagttacctggacaatatgaaaactgtgaatccatcttgtcaatgacatggtatctgacctgaaactttggctgaccaattgattgcttagaagaagtcacataatctggaccattcgggaggaatttcggattcagattatataacttattccacaaagatgtcatccatggatctaaagcagcttcatacctatcaatgtaaactctttttcgggtaaaaactataggtaaagtacacaatgcaaacaggatatatagcaactagaattacacacacaagttactaaaacttaaatgccttaacaatatttacttatctacttatgaatcaaatacaactgccaatgtatcatttgtatatacataaagccgcatacttataccttctcatttatttatttccatttttagagtcaaacaggagaaaatagaatgaagattgacagaaagcccttactatagattgcagtctaaaactaaataggttttcattgcacttatcttcaaaagctaagctgatacagttggattgccattaagttcttggaactgcagttaggcattttatttgttataatctggtgatgtattggaaaatttgaatttctttctttcctgcctcacattacctaatcacctccagaaatcaaaatcaaaatcctgacataggggccaaaaagtatgaaagtaggactaagacaacttatgtgctaatccttgatcacttataatttctagacatattacgtagttataccctgatggatgctgatcatctcccaagcccttttcgacaatggctgctgcccctagatctgaaagtctcctgtcaagcttcttggcaacaaactaaagcagtggcaaaaatttataagtattagttagtaaactccatataaaaaacataaataaaacaaaggctgtttaatcactttccagaagaactatgtagcaatagatccaagttacaaactggtacatatctcaaatacataccaacacctataacacaagtaaaagaacattttcaaaggaaaagagaaaatatgtatcattacattatacttctggtaaccagaatcacccaaaccaaacacagaaaaaggaagtccttctagccaatggtgacttagatttctctgcagaaggtatttccaaaaaccctgcatacaaaaataggaaattaagatagccacatgacaaaaatatatgaattataattctcataattcatattgctataatcaaatattccaactccaaccaaaccttcatggaatctggagtatcaccctggcccgtagtcgaaacaaaaaaaactacagcactctcataaggcaaggaaacctgagaaataaaaaaagcaagagcaacatagtgataagcaaatgttataattttggtgaatattttctctataatcaaatagaaagatgagaaagtgagattcagattgaacagaaatgcttacaggatcatattcatccaaagaaaaaagcttgacaaagcagcctctgaggtctgcttcacgcgccaattgctctgctgcatccaatgcatttcccgtttgactagcgtacagtatcaacaacttaggtctatcttccatacctggaaatttttcctctcgtttcattcactggagaattttgtgtgacccagttttattaatgcatttccagtgagcaattgaaatgctcaaccgtatgaaatgactgaagaattttgtgttaccttgggtatggctggttggaaagaagagtcaatgctcacaccgtccccgcttaaaaagagaggaagtgagcaattgacatagagaaagggagagaccacagtcgaccaaaaagaccccctgagagtatgcaggcaggggcagagtggaaagcgtcaggccggaccttgctccgtcaaggtcgaggcgccagaggtgccggtggactttgctgaaagtatcgggacactaattcaaaaaaatcccccaattttatacaaatatcaaaaaaaaaaaaaaa

SEQ ID NO: 1824 - DNA, 2025 bp, Cannabis sativa
aaagctggaaaatttgatgaagccaaggaaatatttgtttctatggaagtaaatggttgtattcctgattcttatacttgcaacttcgttttggactcccttgtccagcaccgccaatttgatgatgcgcgtagtataattaagagttttagtcgaagagcgcaattcatgtactagattctcaaggtacgaatagattatggggtcggttcgtttttttctttatgtgtgaagattttgatcttataagctctatatgtttttattttttttactctttcttgtgtgtttgtttctttggttatacctttctcttgaggaagttaatgctctttcttaatttataatttggtgttaaattttggttttcaaaatcatctattacttcttggtttgggatcttttttatgtttaattttatttgatcattcttgtaaaagttacaagaatttatttagcttatcatcttaaccatgaatgctttctgtgttggtgaaatgaaaatgtaaaactttggaaaatttggtttaaatcatcacaaggctgaatgatatctatggcaacattcagtggagtgagttttgagtctctacttgttgaattttatgctatctcttatgatctttattcaacttatctatcattggaaaaataggttcactttgctgcaactaaggaaggaagctttgtcgttgtacttagccaagtgcggtgccattgacaatgtgataatatcgatcgatccagtaactgctaaaccaaaagggtaatgtttttttctattatgtaacaataactggttttggaacagcatataaggctcttcattcctttctcaggtcttttcgagcaaggactctgtggacaaagcagtggcactcggtggaacgacctttctttcgaggacagacaattcaggtatatgcttatctttggtatcctttgagcaacctatcatgcttagttatgcaaaatcaatagcttagagttgtaagattcttatgtagttgttcagaaaaccatttcggaaagtcttcaaaagttttgatgatgttgttacctaatggcaacaccacggtgactctcccacaccccgccaaaccatattatttgaatcatcatctacaatggcgaagagagaatgccatcagccttggatagtttttcggtttgaccagagaggagaatacttaactacactgatgtcaatactctgcaccactaccaattggattagtttgatttgccaagtttacctttttgtaaagattgatgcatatgtagaattaggattgttcccatactacgtaattcttggttctaaatcttaaccaatttggaccaaactatttgagacctgaccaagtgaatttagtgtcaatggtttggtcagtcttgaccgtttataattttgtggcttgatcatggttttcaaattcttgtttgtggttcaaaccaaattaaatcactctttatatatatatatacttaataggatttttttttatttttgttattaaatattaatatttaagaacaatcttacttaatattaataatgtattttaaagtatttactatttagtctcattgtcatttacatattataacttaagttttaaagtaaaagaatttagtaaaaaataaataggacatttacgacttaatttcaaaccaaactaatctgttctcaactggattggtttggtttggttttaaattttaaaaaaatcagtattattggtttggtttgaaaaaaaaaaaatttagatcaaactaatccaattgagagagaaaatcatggtttgtaaattgtcttgatatattataagcatgggaatgaaaagggggtttgttttgtttaacactaatcaaatctctctacttcagtttgatcaagtaaattatataattttctttttcttcttttcaataaaactattacttggcttgtatataaaaaataaattgagtcaagagtacttttaagcttgttaccagataagttctaattcaatttttcta

SEQ ID NO: 1825 - DNA, 4096 bp, Cannabis sativa
ttctttctataacgccaatataaaactaaataaaaatattttgttaaaatgatttcacattatttatattaataactgataataattaatttttgattttttttaataaaatatgtatttttgatatatataaatatatttatgtatattgtcaattaataatttattattatcttatttttaggtacaagagcgatctgtattactttgaaatacagtaacattacaaacaaaattttaaatcccaaattaaagataacctcaactattttaaatcatttgatgtcaaaaaatgactaatctgtttgaataaactcaaaattttaggagcggactagagtttttgtttagtctaccatttctatagacaccaagatagctactactattattatgaagtaacgttttataattaataagtgatttttaataacttttattaaaataaaatataataaactccatattaaactgtactaatatagtaatatatatatcataaagatgttaaacaccataaatatcttttagtatttctcaatctttaataaaaatgtgtccatgtgtcaccattaataatatatattgatattgttacaattaaatattaattactatatgatttaatgtaataatttttatagaatatcattaaccgccaccttatatatgcagtggtaattactattattacctaattggaatacttccaaggaaaaaaaatatttacttttattgaaacgtatttggacttccgaagaaaataaatgataattaattagttaagagaaaatggtgcctagtttctattctttatttcctcctagctagctcaagttacaagtaatttgagaatgtgatcacgaatgatgattttttaactaagaacaaaagtttcctctaagttattgatattaggcctaactaccttaccaccccatataattctttctaactaattgagctttgccaaaaaaataaattataattaaataaataacagaagaaggaaccatatattgacaaattcacagaaaaaaaaagcctcgagttagtagcagccattttaatttcaatacacttttgacaattaccgttacattactcgacaatataccaaatacatcgtttatttagtgctctttttctcttctctttagccaagtatatctaacacgcaagcagacacgtattttatctattatacatatataagagaaagaaactatacataaaggtaaattatccacttttttcactagaaatcaaatcataataagttagtaattatagtaagaattttggatagtttaactacccgacatgtaaatgaccatgtgtgcatctcccattaaggcatgtataatcatgtgagctaattatatattatttaagcaaatcccactatttgtattattctaagaaaaaatgcattaggttttgtacgtgtcagaaatgtatttcgttccgaagaacatgtattttaaattattaagcccgtacaaaatcaatgtaggttgtcgacaaaccacagatcttgtctcaacgtaatacatgtataaaaaataaattaatattaactaaattaccatacatatcaaataataataataatatagattgatcaaagatagctagcgtttttaaaaagttatatattattgtagtcaaacagtattaggaggccagaaaacaatcgacgtcacaattattttttccacgagactaaatttgtggtcccatatttgctaaaataaagggaattaaggccaatagaagtgaaatatgtaacacatactcatcccaaaacaaaaaaaaagtacatataatcaaagtacacgtggcaagggacggcaccaaatctctttgacttcaaatgatatgtcaaggttgatattctcctagtatatatatatgatggcatctctcccttttggagcaataaaccaacaatttctctaccttgatttagaaacatatcacaattaaagtacctataccacctttctaattaacaggctatagtactgtcttcactcctaccttatccaaaagaagaaaaacaagtatgggaagagctccttgttgtgacaaaaatggtctcaagaaaggtccatggacccctgaagaagatcttaatcttatcaactatattcagaagaatggacctggaaactggagaaaccttccaaagaacgctggtaattaaatatggtttaaatatatcttattattactttattttataattttaattgcatacattattaatattgttattattatagggctacaaagatgtggcaaaagttgtcgcctccgatggacaaattatttgaggcctgacattaagagaggaagattctcatttgaagaagaagagactataatccaactacacagtgttttgggaaacaagtatgttcatgtccaattaattaatcttatttttttttttaattatcatttttggattgaccctctaatatttttttttttctttttaaaacaatattttaggtggtcagctatcgctgctcgtttgccaggaaggactgacaatgaaataaagaattactggaatacccacataagaaaaaggttgcttagaatgggaattgatccagtgactcatgcacctcgtcttgattttttggacttgtcttccattcttgctgctaactcctcatctttttgtaacccttcacttctaaatctctcaagccttttgggtagtactcaaccccttttcaatccagaactcctaaggttagcttccaccattttatcactcaataataataataagctagaccatcaaaatatcaatcccgagttgtttaataatccccaaaatctacaagaaagtcatcacttattttctaatggtcaaatcccacaattggtacagcccaacaatcagttccttcaaactgctcctatctcatcagaaggctttaataatcctatgcaagctcccaataatgttgataataatcaatcaaacatgccaaaaatcatctcttcatcttgtccagtactttcgagccaagaaaatataatttcacaaccaaactatgtggactgtaggtctaataatagcagtactagtaatattccaagccttaatattggtgattttcctgaaagttcatacttccaaaacttgttggatagttatagtgatgatcatcacgaggcttttggcttgaattctgttatgtcaacgccttcatcatcgaccaataatactacggtcaataataatatcaacagtacaagcagcaccgaggacgagagagaaattagctactgcagcaacttgttaaagttcgaaatccctgagagcttggacatcaatgatttcttgtaaattaatatatatatatacatgtaatcatagagatcgattatagtatacttagctagactgctatgatatacatcagctagagtttctagtcttctgtttttctttatttgatgagtttttgttgataaacatttgttttatttggttttctttcttccctagtttttgtatcgtgttcgtgtgtaagtagatgaagttgatgaaattattttttggttttttcattcactttaataattcatatttatatgtatttatatttcatttttaatcacatatacatatatatttatttatagttgcattattatttatacatatatattatatctgtccacaaaatttgaggcaagctcctaactgcaaatgatcatgatatataaaatacttaacagattgaatttcgtgatcaataatagaaaaaaaaataaataaataacaaaagctaatgtaattaccacgcagcactagagataagctagcaaaagcatgtaatttgacgtgaaaaataaaatataagaataaaaatggaaatgagaataggagtagaaatagaattgaaaaaaattaaaaatacataaaaagaaattgataaaaaaaattattaaatttttttctcatcatgtattggaatggtctttccttctatttcaaaatgaaatagtcattccaccaaatgttggaaaagctacttcattgttttctttcttttccattctattt

SEQ ID NO: 1826 - DNA, 2006 bp, Cannabis sativa
attttatgatcgaaaataagtcttaatttttatagactaaatattataattttctccatgaaaaattaaaaaaggtaaagaaaagcagttgacatcaaaatacatagtgatgagtagcaaagattacattgattaaacaaggctacgatactgctgattgtttaaaaattaggaacaaaaaagaaattgggttatgatatgaagagttgataggttggatgcttgaagagttgacaggtttggggttattcccgttgattccattcctcttgaactgttatgtaatgaccgtgaggtttaacggtttcttttaagtaatataatcttcaaaaaaaaaaaaatatttagtttgtaaagattgttgtttttgctacacaggtgagcttttatatagaagctcaatgttggttggaaacaaccaattcatttcaagaaatttctagcattctttagttcttcaaccattcttagtttacaaggtggttttctaagtcccctagaaaattattttgaaaatatgtagcaacaaaacctattgaattattctataaatgattagttgttcaatattgcaattctcttcagctgattaatatatctacaaattcagtactataacatattaagcttacttgcattaattgttacatcaattgtcacatacataactctagactcaaaacacaagcataaagacaaagtaactcattcactcacttatatcatatatttaaacaatattatattaactactctttgtccatagaaaccacttatttgacacagctaagggaaagaacctatcaacaatgtcatcaacacatttataatgccattgtctccatctcttgcagaacaaaagtggtccaaatacaataccaaacccaacaacaaatccaagttcaacactcaatacattccaatcaatgctatgttctttccttgtattaggcaacaaagttccacttccctcttcatcatccaagcatttattcatcaaggggaatccacaaagtcttttgttaccaacaaaagaatcctctgaaaatgttctaaattgattagccattggtatcctaccaacaagattattgtaggaaagattaaggaatgataggaaagtgagttgctctagtgaggttggaattgaaccaatgagattgtttcttgagagatctaatgactccaattgcctcaaatcacctatagaagatgggatttttccagtgtgagcattgttggacaagttgagaactgttagagcttgaagctctcccaatgcagctggtattggtccttggagattgttgcttgaaaggtcaatggaaatgaagatattaaggatctttggcagcttcatttcttggcctttggatgtaactgtcactgtataccgataatatacacctaaaatgctcatttggtttagattcaatgtgacagaatagagatgagtgaagccaagaacattagaatttgtggtattgacatttgcttggagattttcattatgagtcatcattgcctgcattgtttttaaccattgtcctggtattactccactgaaattgttttgagctagatccaatatttgaagcatttcccaagttccatttgtgttgggacatccaatggtacctgcaaagttgttggatctaagaacaaggacttgcaaagttgttgtgttcttcaacaagcaaggaaattcgccgaccatgttattgtggccgaggtctaaaacctctaatgcagcacaattggctagagatttcggtatctttccttggatggaattgccattgagatccagggtcttcaaatcacaatctgttgggaaaaaggcgtcttgaatcgagcctcttaagttgttctgtcgcagattaagtacctctaatgaaacacctatttcaaacaaacatcttggaattttaccacttaatttgttgtgagacaaatcaagaacttgaaggccactagcactgcaaatggattcaggaatgacccca

SEQ ID NO: 1827 - DNA, 2149 bp, Cannabis sativa
aaaaacctgaagacatgctcttgattacctcgtgaaagtctcctgcataagtagcgcctcgattgcatgcttggtgtctctttttcttaatgttggttcaggatccttcttaaagtaattgattacttctgatgttcccttcctctgatgcagttcacaataatcaaataaacaacccaccatcgcaccataaaatataattatagaaactcaaattttagtttgatagttgtgttgtcaacatacaaacacagatgtaaatgacaagtactgttaaagtgacaagttgtttgatgcaccaaacataccaatatcaattcaaagaagacaagcatgcttccaaaagagcaaaaaaaaatgttcaacatccgcaattacctcatttaagatatcagctccttgagatgagatatcatcaacgtgattattgtcgcaatttccctctgtgtaaatagagacacataatcttgtgagaagatttaaaagagacccaaagcaaatgcaaacttttgcctgctttaatgaagtacaaagctaccatgcttcttatagctaactattaaaatagacatatacaaatgatacagttaacatgtcaatataagcactggttctcagttgtcacctaaaacataatatattactagctacagcattcaagatcctcggccaaaacagtgagaggcaatgtagaccaaggtatttaaatgtctccaagaagtaacaaactaatattaaaatagcattaaacagatatcttatacaatagtgaacttaaaatatcaggcataggatatggcaccatacaaaatccaaactccaagcgaaccactcaaaacccaaaccctaagtggatcagcacttctttaacacaatattctccaaataattctgttaaagacagccgcttcgactgaattctctacactttgatataaaataaaataatgatacttctccttttcattttcccaaactaagtaaacattaaaaagaaaatcttagagctcaaatctttaagaaaaaaagaaaggtcatgaactctcaattacctagagaaaccaatccaagaaaaaatccccatttcaacaatccttaaaataataaaacgttacttacctgaattggagtcagagcccaaggaagaagaagatgatgatgaagaagaggaagaagaatccacattaaagacagacgagatgagctttccagcaccgctcgcaatcatacgagtcggagataaaatgatcttggaaagccaattagggctttcaggttccagatttgtcactctaggccgctcatacggtgtagccctagcaccaacagttcgcctatttcgaacaatcttcccacctgacctagcttcaaggttttgttgggatctaggattggtcatcatggttatttgaagataatttaactggtccacacaataaaataaacgaagatgagtaaatctgtagttgcaaagattagagaatcattgtgattatggactcttgctactacaatcaaagaatgcgtcctgtgcttttgaatgaaacgtcgattatacaggaatcagtgtcccatgcattatacagaaactcacatgccatggtgtgtatatatacacacatatatataagtgaaattaaataatgggcaacagtttcattatcacggccagcacatgctttggcctgtgcaagtgcaacacctaacaccaaactgcggtaataaagacaagtaattgcaccaaaactgtttgaacatatatagctttcaaaaaatatgaaaaagtattaatgtcagttgtcacacattctccaaaagaaactacattatctctggtgtgaagagccgaatatttaatcatagctatgcctatcaaatgttgctccggtttctcattatagacactagcaataatatgttgggcattttgctctgctgttagcggcatctgaatcaatgtctaaaatagctcttttgaggcaaggcttgcctcaaagccaggcattcaggagtagctttgatgcttatgccttaggcaagagaagaaaggcataagcctctcattttgaggcacccgaaaaacgagtgcctcaacattatcatgaggccttaacctcacttattatttcttattttggcctgtttaaag

SEQ ID NO: 1828 - DNA, 2995 bp, Cannabis sativa
aaagtacgaacaaaacaatagaaaaggaaagacacaatagataaacaaaatgtaaacaaaactaaaatttacaagaaaaatgtagaattagccaagatccattgtttttctttatccaaataaagaaaagtcgccaccctcttctctccaccaccaaaacaagcactaaatttgcacattgcacctcttcaacagccataggattggatttggtgcggtgtgctcaaaactatcaacagaattggatttggtttaacaaatgtctagttagaaaataatgattggtggcacattcatgcttattttttcactcttcttcttcctcactactcatatccattatctctttccatacatcataccccttttcactattctccaatgcactctccttctttgccactgtcctccaaactcagcggttgaacttgaagttgtctcggattcttagtgtaatgggaaccttggtcctgtttttgaggaatttgatggtgcaaagttgatgcgtatagattctcaatctcaatttgatggaaattttgtggttgaggtagatagaggtgttgatgatgatgaacaagtttctttaggtccaaagtcgataccgacagattatgaatccaatgtaaatgttctggttgaggaagttgaaaccaagaacatatcaggaagagaagaaggggtgttagaatttggcttctgatgttcaacaaacaaccttgtggttgagaatggtggtaatgatgatgaagaagggattgaaaatagtctctaatttaacaaaagatgaaaaactgataatactgaaaatgagactatatgtgcttcctctggtagtggcaatggcaatgacaatggtaatatcactataaccaattcagatggaggagactgagagaagagcttaagtgaggaagagaaaaagagagtggacaaacaagtttcaacaattaagggtgaagtacttaagactagttaagatagtaggtggctcgattgaagattcgatagcaaggaaggttctttaaggttggcgcttatttcgggaaggcaagctggccaagaatttagcttggaaaatgcaaaggctaaggctttccaacttgaatagaggggaatgatgttttggagttttccttaaacacatttgttattgggaaaacatgtgttggcaagagtgccaccataaactccattttttggagaagatcccaatttatgcatttagaccctccacaactagtgtgaaagaaattgtctgaacagtggatggtgtcaagattagggcttttgatacttcaggtagctgcaatggaacaaagcactaagcaaaaaatcttgtctttagtaaagaatgtcacaaagaaatgcttacctgatatagttctctatgtggataggttggacactcaaagcagagatcttaaagatttttcattgttaagatcaatcacttatgctattggtccttctaatttggagaagtgttattgttaccttcactcatgttggatcctttccacttgatggaccatctagcaagggtcgagcctgagctaaggcgggctaagcatcgacttaaggctcaccaacctaggggaccaaaattttaaaaaaaaaacataaaatttttgaaaatacatatatatatttttttttaataattttcaaaagtatttttttgaaaatacttaaggcctaatagtcccaaggctggcatggccctgcatcttgcacacctttgaactatgaattgtttgttgcttagcggtctcaaattgtctagcagagcattgaacgagctgttaataattttcgaattatgagttcaagtttgatgaatcttatatctattgctgagaaccattctaacggtcaagcttgcgatctcagttattgttttgagtcattttatgaagatattgtctgtaacctctctattaacaacggtgtcagtggatcaccggaagctctttagttttcactcttgttcacctccccttctatacttgttgtcatggttgttgcaatctcgtgctcttccaaaattgtcagctgattgaggtggagatattggtgattctgattctgatgatggcgaaaaagatgagtatgatcagcttcgacaatttaaagctctcgggaatttctaaattgctaaattgagcaaaggacagacaaatgtatatatggaggagtatgatcacaaagtgactcaacttatggagcgaatttaaaagtgcatctgaggaggcaaattttcccatcagccaagaccaattgccgattggtttgtctttggtgaaatggaaaggggacttggcattgggggctgatttgcaatctcaattttcttttgggaggaactacaaggtggtcgttcgtgctggattgagcaacaagctcagtggtcagatatcaatttgcacaagcagttcaaaacagtggtagccattcttccagatgtaaggagtatctataagctcatcttcctagggttggagctgagaactacaccatatactagattacatgtatagcttctcattttgattagtgttataattattattattattacaattggcttaattataagtcagtctctggcttttgtttctcattgaactgatattagataacggaacaagttttttatagttgcaaatgcaatgagctgaagtgagttgaaggaagaatgtaataaagtttggcaatttgaagtaagataaaacctgttttccatgaagtcattatcattaaagtctcttacgagttttctagcagattatataatacaagtttgaatagagttttggtacagttacacaagtgtacttggccacctaacaaatcttacaatagaacagtaaacaaagattttgagtcccataacagaacagaacacaagagaagaaaaaagacacataatcaagccctgaaaagttttgactcctgacatggatgataggcttcattggggcttgggttgatt

SEQ ID NO: 1829 - DNA, 2429 bp, Cannabis sativa
tagaatgacactgcatgagagaatgttccattagagtgaggtaagtttcatttcattgtacataaaatataagaatggtcgttttatggccctgtatatttttctcctaagaaagaccctctattttttgtatatattattgaatgttaatgaagagatgtcgtgataaatttctattatgtggttgggtagatgtagaaataaataaaataatcgactaggtgaatatattaaaaacaaaaatagaaataaaagattaatcttatgtttttttttttgaaaaatgtaaagtaacttccaatagataaacaatgagaattcaagttacaattaggggtgtttaccacattgcacaaaaggatttcatctgggaattgatcttagttagatcgaattgagttaatttgtgcctaatttataagaagatcggcgcatgaatattctaagccaggtcatagtttggttgagctgtgttgttcggctcatgttttttcaggttgtgttgacgggttgtacacagtgcagttagtagaaactaaataggtattagaaaaggaaagtgagattgtgagaggcaactataatatgtgtgcacgatcggtctgagactcaagtgtcatcaataatttaaccaacccttgaattttctggcctctttacattacctcagcaacggtactaggaaaagaatgcaatcgttatttaggtgacaatatctttatacttattctctgtaaatttcctgtaaaatctcttatgaggtttaagtgtttcaaaaagatggcttgctctcataattacaggtcatcatctaatagctactcaccttaaacaccctaccaccaccaaaccttctactgttctttatggtgtgacaaatatagaaggcaccctcaaatttgtcttgatcatcataattctatggatcagaacttggatttatatgattatgatctcaaaagtcaatcttatgtcatttggattggaccaatcacaacaaggattatgatatagttttattccaactgaacgacgttatggaattacaaggaaccatgtttggtattcatgctagattatgtgattgtcaatggagtcttgtacttaataggccatgaaaaagtagcagtagtagtaagattttatctttcaatttgtgctgtgaaaaatctgatgatgagaatatgaacttgccaatactaccaattaagggtaacaattcatttcatctttctaaatgggaagactcatctcatcactttgctttaatttttgggtgaagggagagagttattgtgatgattggaatatggtttccaaacaaaaactccatcttagaccttagaccttagaccttctcttattttagtcacatcacttaaatgtgacattggttgttgtttggaagaagggggtttcttttctcaagaaggctatcaaacaacattagagtgttatttgagagtttgttgagccgttgacctcatcctcaatcatcaaacactactttataaaaattgtaatcatcttcaatacactgcagagactttggttttagttctttttgtttttgggtccattacttttttatttaactattttagtttgatttcagtatatatatttctttattgaaataaaacatataaataagaccaacattttagtattgtaatctccatcccaataaaataaaacttatggtgaaaaaaaatataaaaatctgtctttgtttcaaagtgactcttaagtttggttgttcttgttcatcttacacaccagaattgttgaatttatacacatttttctattaaaaaaataaaataagtataataagtggttgggttgggtggtggtggatttggatgtttaccatttttccattagccaaataaagatttactacaatgcttgaaatcttctgaaagaattttgatttttgatttttgatttttaatctttaatctttacaccaagaataaaataaggcattgaaatgatgcccggatacacaaaataataatgattagaaaatctagtaaaaagctttgttttaaactaagtgttggtacaattcatcttcttcgtctccatcaaaggttgaggagtcaacattatcaaaatcctgcagattacagtgttgtaatgtcaaaatttgaagttaaaattaaattaaaacgttggataaaagtaattaaagaaataaagttgaacctgataatgtcttttgatgctattttgaactgctgtgattgttcgaactaatacaaacattggtagtacaatgccactagtccttaaaataattatctgccaaaaattcacaatagctagattaaacaacactattttatatattcatttatatatttataaagaaaaatgcattttttttaatgttattgtacaaaatgattatatgtgtaaag

SEQ ID NO: 1830 - DNA, 1078 bp, Cannabis sativa
acctagccaacaaataccaatatgaatgagattcatatatgtatattgtttatttatatttatttattttttaaaaaatatttatatatttctattttgtagcctcaataatgtaatgccttggtctttgaatgactttagactaagatgagaagggaattgaaaattgaaatattgtccctttgaaggtgtaaactctctctctcatgcagaaaaggaataatatttgtctcaaaaatataccaaaagcccatgctttgctttgaccaagtaaactatgaaactctcaattatatataaaaaggagccttttcaaaagcatatcaccctctctctctctccctttctatttgaatatcattacatgttatactaatttttaacacataataaggtgtaaatggttcccaattccatgtgtaatttttcaatctgcaaaactttactaagaacatcataaaaaaaaaaagtatcaaatctccacaccataaaaaataacaacaacaatattattactttcactttgagaaaccaattagagtttgatgctcccaccaccattctaacccaatgacactctctctatattattagaaaaacatacaaaattaacaatgtataaatctatttttaatcatataaatgtcttccctcacctcaaactttaaagttttttcttttttctagtacaaaaatcaaaaagatattaagaattgttaaaatgtactattggtgcttaggaccttctttgatgttatactattatttgtttaattaagtatcggatctcatataacttaaaaaaatagtttttaagtaatatcaataactaatcataagttgccacctatagaaagtgttgggcaccactggtatttaataacaatgctcaaagatattataagagataaatcaactgctaaagcagcatagttgctataggaggaacaccccctttccaagtatttttatttaaagcatttttcgctacaaaatgagctactcaatttgtcaacctggatgtatacacaccctgcaaccctagcaacattggcttttttttaataccttatttcaa

SEQ ID NO: 1831 - DNA, 2518 bp, Cannabis sativa
ataaaatttgatgagaatttcgtccacgcctctcttatatcaaattttaatcgtttaattaagcatagacttgtagctacactacaagttcttcgtaaataactatagtactagtgcaaaaatattatcgaatataataattaactatttcttggtgatcattcaatcattcttttttatttattaatagtcagtttggttattgttaatatcaattttattattggcatagtactttgaagggattgttgagtctaaatgttaccgttattaacaaagaagccttagaaacctttctatgttcgcttataaggtagtccatatatatgccatgacttaatttgcttgatcaagaactcaaaaacaatattttacaaaaagttctgaattttggaatctatatgttatatgctcactaagtttacgacttttgttttcattctttttattcagagttgccaatgaagcttgttgatcaagaataagcaaacaaactctttggtgagattattattacagccatggcatgtacatcatttaatgttcccacctctccaaggaaaggaggcaccttcaaagaccatatgatcaatggcctcaggaggtctgaatcaagcaaagatcttcaaagtagagccatgttgagaaaatcttattcagataacaatttagtctgctgcatcagtaacaagattcatgcttcaccaccaactcaaccaaaactgaagaacagtcgttcaatgggaattttcccatttcagttttcgggttcaattctcccaaactcgcttcggtcgtttctgtttgatccggaaacaagcaaagatatgagtatggtagataaagaaacaactatgactgcagaggatgagagcattgaggagataagtagtagtgatcatgtcattagtgaagaagaacaagaacaagaaatcaagagagctaattgggtggaaagactaatggagattagaagtcattgggttaaaaataatgaggaaattgatgaaggtaatgacagggtttgtgatgattatgataaggaggaaattgatcatcatgattgtggttgtgatggagaagatgataatggttgtttggtaagttatagttcagatgaagaagatgaagaacatggagaaaagatattggatcaagaatcttttaaaaggtttctggttagagtaccatggtctgctactaagctactttctcagctagctttcttgtgcaacatagcttatgttataccagatataaaggtaataaattaagcaactctgtttgttcacttcgtttattatataacaaaagataatgacaaagctaatttctttgcaggcaaaggatttaaaaaggtattttggcctacaatttgtgacatcttctttagaaaagaaggctgaggcagcagcagtaaaagctaggctagaccaagactctactcaggtacctggatcttcttcctcagatgatagaaaagttagtgtttcagctaatgaagctgtggattcagagcaaaaacgtccaatccgtgcttctgtagcatatgatatcgcagcctcagcagcgtcttatgtacaatccaaagccaaaaacatgttttcaatcgcctcggaatcaaagctagagggttcatgcgataatgataaagaacaagcggtggcagaggaagtagaaagtttgccgtcgtctcgcatctataaatccgaagttgcagcttatatggcagcatcaactatgacagcagtggttgctgctggtgaaaaggaaaagctagaggctgctaaggatctccagtcacttcactcttcaccttgtgaatggtttgtctgtgatgattccagtacttacacacgttgctttgtaattcaggtaattaaattttaaaaaaccaagaaaagggtgacagaatcaactgctatgacttataaacattacaaggcttcatatgttaaagttgtgtttgactttgcagggctctgattccctagcatcttggcaggcaaaccttttctttgaacctacaaagtttgaggtaaactaagattaagaataaagatagttaaatgtctcaactacttccctgcccacttctcataatctaatatctttttaattgtttatggtaggaatcggatagtcttgttcatagagggatttatgaagctgcaaagggaatttatatgcaattcatgcctgaaataactgaacacttgaataagtatggggagagggcaaagctgcagttcactggacattctcttgggggaagcctatgtctcttagttcacttgatgcttttaagcaggaaggttgtcaagccctctgctctgcgacccgtcgttacatttggctcgccatcggtgttttgtggtggccaaaagatacttgatgaattggggttggatgaaagccaaatccattgtgtcatgatgcatagagatattgtcccaagagctttctcatgcaactaccccaatcatgttgccaatgtcctcaaacgtctaaatggctc

SEQ ID NO: 1832 - DNA, 4116 bp, Cannabis sativa
gtgtgtttattatttgactcccatcatcccatatcataaaaagtaaattacaaacacttatttacttctactcttgtaatttttttttcttctttgatctatttatcctagatgaagatattaattaatcaactacctacttgccaatttgctagcttataaacagagaaactaattataagttgtctcatatatatatatgacacattaattattatttcgtattatttatttttctctagaaagtaataccatttctgtttgagaaataataaagaacatcttgagataccaagtaccacaagaaatagtatattcttatttatacattttaatatcgggtctaatatatttagatttaataaataatatgaaaaatcgctaccaattataaagtatcaatatgtatatattgttaaaaagtttatcgtgtcatattctttttttttttttttttgaataaaagatgtaaatttattaaatcatctcttgagcaattacatcaagaatactcggcatagaagtcgtcgagtagctacgatcagcatgtaaccatgagactctaactaagccatgagcaatacgattagcagacagtatcatactctttttgtttacataaaactaacatgttttcttttttcttttttgggtgcagtgaagccagtgctagttcaacagaaaatgacatgggaacatgcttttgcttcacatacattagagatgtaaagccaagacctttcgatcctttagatatctttcaacaagttgagatcatccaaaagcgtagtggacgattcacggcagcatctgttgccgaaaatggctttccacctacgtttttgaggagaaaatactggcaactctgcatggggacgcctcgccattaccaattagacgaagccccaggcctcaactcctcgctgcgttcgcagcttcctgatctgaaaatcttatctgattcgagtactaatgaaagtgtggttgtgggaaaatggtattgcccttttatgttcataaaggaattagagggaaagctcaaggagcagatgaattccacgttttatgaaatgacacttgagcagagatgggatagagtttttgaatgtgacaatattggaaatgagattaaaatggtgagtgttgatgtgtttgttagcagagaggaggcttgtgttgatggaaaggaagctatatgcgagtggggtcatgttgatgatggagtcatctggtttaaaagttcatcagacggcggtaaaggacaaaatcaatcagaaaggttattggggttgagcaaattgacaatggatagaataaggtgggaagaagagagagttgggttcaaagtcgatgagtttgaaaggcaagtaaatgtaaagagaacagaggagtttgatggaaaagagtggagcaaatttagatgttatgttttggtagagagatttgtggttgaagagagtaaacggcaccatttttgttgacacttgattttaagcataccagccaaattaggtgcacatgggaataagaataatatacaattcaatacagaagagtttgtgttctgctctattgttttgtcattgttttttcttttgatttcaataaatgtatgtgatattactacatggccaagtacgttttggttcatgattttatttactaattcattttgcgttttggcagcacatatacttctccccaccgcaacaccttcctataaattagaatgaaatatcttttatcatcatgaaatgaaattattaaagggagacaaagaagaaaagggaaattagcaggatcttacagtgatgaaaataatgcaggatcataactccaagatgagaaccatggaaaaccaacatgttccatgaaggtggggcttaatccttcttgtaactttccaatctaccaaataaaaataatatttaaaaaaaaaaaaaaatacaacataccacttagctaatccaataataactctatgtgggtacctaaaagcttactcaccacactgatgccatggtgttgagctttgaatgctaaaacaatgagtgtggactgtggagacatactatcacacacgccagtggggctcctgctgagacccagaacaactttggcctttctatgctctgcaaagattcatttcctaaaaaagttaaatactgtatcactattttagagtctattgctattattattgtacttgtatatttatcatcctgagaggttttgattcctaaaatatgaaatagttcttgtaacacttcaattattgctatccaagataattcctccaaaccaaaaacagagaatctattcttctgagattgcagccttgccaccaaaaaaccaaaaaaaaattataaatctatacataatcaatattagaaatctatataaaataaccaaaaagttcatattgtggaacagcatgaactcagctcaagtattgttcctgatatagctaagcaattatgtcacttaatcctttattattgggaatataatgtttgcttgtttcaagcttaagccaggattaaaatagagatctctttataatatcaagtcatgtttcaatatccttgaaatttttgtggggaaaaaccttcatttccgagttttaacttaatgatttagctgagcatctttgtaactttttttatataaaagtaaatttaattgatgaaactaattaccttataaagtctcccgaacctttcaattgatggttgacccttaaaacacatctccttaaatctctaaagaatccatgagaaagataaaaccatctatcatgacatttataaaaatatatgtatgaaaaaaagaaatgttatgtaaagatacacatcaatacttttttttatattgtatatatgtatatacagagagagaaaatgaaaaagcaatgtgtcttcaagtttgattaatacctcaacagttccagactacaccaatctgaatggtaataaacagtcaaacacaaaaggattttctgtgcatcagagaatagcttcactttgtaaaatgaaaatattatcaccctccaagagtgccagcatcttgacttttatattcaatccagctataacctggactcttcataacctgattatcactcatcagatccctcacagccctagcatcatcccatcttcctaaagaagaatagatattgcctaaaagcacgtatggagtagcgttatgcgggtctaagcggaaaagctcatctgctgctttttttgctaaagttacattagtatgatacctacaagaactaagcaaaacctcccatatgactgtatcatctttatatggcatcctgtctattagtacttctacttcctcaaaccgacccgcacgagccaaagaatcaatgatgcaagtataatgatccaaaattggttccactccatgttcttgctccattgaattgaatatttcaatacctacatcagccaaacctgaatggctacaagcagttaaaacagcaataaaggttatgccatcaggtttctcacctgatgcaatcatttgcttgtaaagagaaacagcctcatctccatagccattttgtgcatatccatgtatcatttcattccaagtaacagtatttgtagtagccattgtattgaagaactgttgacccccatctacgtcaccacatttgcagtacatatcaatgagagaactccctacaaagacatcatttatgtatccatcttttgttatgagtgcatgaacttgttttccttgaaatggagaagaaagctttgcacaacaacttagtacagtagcataagaaaattgggtgggaaacatctcatattgcctcatctgcctaaaacatgtgaaagcttccttatctagagaattcaatgaaaaacctgctatcatagaattccaacaaacaatatccaatacaggcattttatagaatatgttctttgccaatcctgtcttcccacactttgcatacaaaccaataagtccacttgcaacatatatgtcagtattatatgcagctttaagtgaagcgacatggatttgctttccggcttccagatatcccattcctgcacacgagcttaaagtaatggctaaagttgttcg

SEQ ID NO: 1833 - DNA, 865 bp, Cannabis sativa
tcataaacaaaatttttaaaaacaaaaattttactttcattttatgattaaaaaattagaaaacaaatgtgttaccaaagggcaccagttaacgaattttatggtttatatatatttttatgatatatattttttttttacattaagagagaggagattcaaatttagaacctgctttttgtgaggagaaatgtagaattattaagcgtctatgactatatttctataatattacttaataataattttttgcttgattattgtttgaacttgtttatattagcttaatatttaatgacacattataatttacattttgataaactttttttgttttagatttatatattgcgtattgaattttaaattaaataattataatatttatgagtttcattttaataagttaatgattttttatataaaaaagaaaattataattttacatatttctttaattaaatatctccaataagagatatttgtaaattataatattattaaatataattatatatatttataataaattttcaaaataaataaagtgcgcttaaaaattgtatataaaaatctaaaataattactttgagctttaataaacccaaaaagtaaaaagttgatatgaaattacatgaatatatcatatgaattttctaaaagacaacaaaatataatatcaatgtgaataagtagaatgattagagcattttatgtcaactaataaataatttagttaaaaaatactcttttgtactgtttagtagtccatacataataacatcaaatatttttagtaattttttttattttgtagttggtatatcatatatagtgtgctatttaatttacatttgaataatta

SEQ ID NO: 1834 - DNA, 3531 bp, Cannabis sativa
ccccccataattaggtgctactctagaatgatctgatggttcgattaggtaactaaaatttgttacatggtggatcactcaaatgagtgtagttcactaagacactacgctatcaagctcactcaatcgttctggatcaagatcttttagtgcaatgtatagtaaatcttatacatctgtcccatttaggtggtattctagaataatcctagtgttcgattaggtagatgaaacttgctacatgttggatcactcaaataattgtagtttgttacgacactatgcagtcaaacttattcgatcgttatggatcaagaactgtcactgtaatgtgcaagaaaaaaattgtacatcactcctaattaaggggtatttcaaaacgatcgtatggtccgattagataattgaaacttgttacatggtgatcactcaaataaccgtagttcgctaagacactatgcagttacacttaatcattcttaatgaagcctatcggcgcaatgtgcagtaaatcttgtacgcttctcctaattaggtgttattctagaatgatcctatggttcatttgagtaactgaaacttgctacatggtagtttgctccaataattatagttcactaagatactgtgtcgtcaaacttacttgatcgttatggattaagacctattagtgtaatgtatagtaaatcttgtacacctctcccaatcaagtagtattttacaacgattctaggatttgattaggcaactaaaacttgcttaatgttggatcactcaaataactgtaatttgctgcatcactatccaaaaaaaaaacttactcgatcattatggatcaagacctatggatgcaatgtgcagtaaatctagtacacctcttctaactagaggttattccagaatgatcttacggtctaattaggtaaaaacatgcaagattttattaaggacgcataatcttcatgatatctgcataatttatatagattttatctattatatcatatataaacaataagagatacaatatatatatatgaattcaataataaacatataaaaatatatacatgtatatataatatacagatatatagataaaaaaaaaagaaaaaaaggttcttaaaattgtttcagtcaaataagtatatatatataaatatatatttagtgtatcgtgactttgaaacaacttaagaacttcaacaaaatatttaccttgaatcttggatagagactcgttaaaataatataaaatatataagaaaagaagaagaagaagaagatgaagagagaaaaagaaactgaatgagaatttctcaattgtgaaccccaaaactgaagagagaaaaagaaactgaatgaacaaaaatatgactaaaataatgaaaaactaaatcaatgtaataaaaagaaaatacaatcaagtattaatggtgataattaatttggtgatttagatatttttaaataatatttcataacaaataatacgcttttcactggaaggtttataaggattagtaataataattaaaaaaagaaaaataacatatctcaattaaattaaattaaaaataagagaaaataagattaatatttataaagtaataaaaataaaaactaaaaaaattaagaaaaagaaaaaaaataatattagaataattttaaaatcagatgtaacccttacatatatatgtataacttattattaataactaattttctaatatttatgtgtttgacgattcactaaatgaaggatggggtccgtttttaagggtgcgagtcaagattgatatcaccaaatcactaaaaagaggccaaatgataacactttcacaaattcgggatcaattttgggttgaatttcgctacgaacgattacccgaatactatatggaatgtggaagaattggtcatccatacaacaaatgtacaacttttcttgagaagattgacaatggtgaagaaccggaatttgaatacaggcctaccataaaaagttcatcactctcaacttcaggctatgatcggtatcgcacagactttgcgaaaggaaacgcttggcctctactcacacgtttagcacgaaacactttgacatctacagtttcgcttctcaatggtcgaactcaaccacaaccgagacaattatttcaaggagaatcttctcagcatgagactaatgtgacaataaacacccaaaacaatgttgctataacaaactagaggcttcagcaacttgcctctcatcaaccaagggatgctcaagggaatcaagtgatgctacacacccaaagtactgctgcaacttcataccagatgcagcaacaaatccctttaaaccaaaccagtgttgctcaaggaaatcgtgggactttcaccacccagaacactgctgctatatcaaatctggtgcagcagggactcatttcaaactaaatcagtgatgttcaaggtaatcatgtggcttctactactagtaaactgggtatctcgactgataatcttgcaccagttaatgctaaatttgcgtatcaatcaagcctggatactcataacacaccagcaaatggagacaagataaatattactggccataactctcacatttattccacaccagatatgtttactgatctctcatgcatttatatgccacttacatggcttggaatcaactctaacacatttgccacttacccacctttagaccaaaacactgtgagcaaaaataaaggtaccttgactgcatcattcaccaactttgcaacatcttcatcggttgttgtttcaactcgggcagggggagataacaaggagaatttctctccaaacggtagtgtcaagagacagccagagggaggatcacttcgagacactcttaagaggtgtagaggtaatcaaccaagtgtgttcactccaaccttgtcagttgaagatgaacaaaaccagaatgtttctactgttgacatggattctactggttatcccgacaatgttgtggaggctatgatccagcctcgcaaacaaccatgaaactccttcgttagaaggcgcgtggtttggggaatcctagcgcactttgtcatctccgtttgcttgtaaaagagcaatccccacatgtacttttttttaatagaaactaagttaggtcctaatgttgtttctcgttttcgtaatgtattacatttcaataacggactagaagtccctaaagtatgcttggggggtgggttaatgttgctttggaaaaatgatgtagatgtatcacttttgaattttaatacaaatgtatttgactgttacattggcttcactaatcaacctcgattgcattttactgtattttatggatctccttcagttcagctacgtccacaaacttggactctcttggatagactaaaacaagttgcacctttaacaccatggctagtaattgatgatttcaacgagatcttatcttatgaaaacaaactaggaggggctttacgcaatgaggtgcaaatggatgatttcagacga

SEQ ID NO: 1835 - DNA, 2032 bp, Cannabis sativa
tagaaaagtcattagtcaacagcatatatggcaataatattcctctctacctttcacttacaatacaggttaaactacagttttttttcttccaatatattaatataattttttaatttttacatttaacttaatcaaataaatttatttgaaaatctttcaaaaaaaaaaaaaaaagctaacatttacttcatatacaatacaactaagtcatatacatacacagacccttctcttctcttctctctcccctctctcctctcttccatttcaccttccttttcacatccatttaagagattcctttaatggtcttttctcttccattggattgtacagatagccacctacaaaaaaactcatcacaatctttcatttcttcttgattttttttaggctgtttttctcagattttttttgttctttttcatttttatttttctgggactattattaagacatagaactcttctgggtctcttggcttttgcttgattctgcaaactctttatatgggtttgctatagaaaaagctttcttacccagttgtatatgccataaaagggttcatgagaataattatatttgcttaaattttgattttttttccctcactacttttttttttggggtcaataaatttatttattttttccttctttatataatatatacacaaatatatatatttgactctcccttcgttttttataaaaaatttctttgaatttcttctcttaatttgtggagaaaatagaggatgggtaagcaaggaccttgccatcactgtggagttacaagtgagttcttgttcctccatttttatttgtttttttttttttcaacattaaaatggaaaataaactattgggttcttcaattttatttttgaagaaatattctagaaatggttttatatgcttacataaataatttgataactgggagataattactatgtgcaaaaaggaataaattaatcagctgggcaggaagtaaaaatacaaaatcttgaatatatattgttgtttgtaatgttctgttttgtatatatgaatttctgaactacaagtgtcttagtttcgttgaatgttttcactctattgagtttgaatctgttcataaattttaattttccatgctcccatttagtattcaaactttatcttttcttgtcttgatgagtgtttggctcacttttcactctcattcaagccttaacaagtgtctcccaatgcttaattgagctctggagtctagttgggtactgagaaactaaagattaatatacaaatttatgtttactcaaatgtacaatttgagtacaaatactaagccaaaccccatcgtttatgtttgctatgtgagtgtatatagcacaattgcaagcaaaatgtaacaattttagtgccctttttctgtgccttagctcaagtagcttggtgacagtgttgtattgtatcccttattcatttccaaccatttgttccattttgtcatttggggagtgtggttcttcttactattagcttgtgagttttggtccaaatggcaagaaaattgttcaattcatacccttttgatgtggaattgtattcgaaacaacttttcctatgtgatggagcacaattcattttgtagctttaagtagagagcaattctaatgttttgaatctctactcggttggtttttgggttattagtttgaaaatttagtgtggcagtggaaaatgtggctatggcttttgtattcaaggagatttctcatatctgtttatgacaaatcaaagcacattgaatcataattctcataatttgagtcaaaattgaatggaaggacatgatattctcccagttgcacttggatcttaacttctatcatgtattgtcaataatttgagcttaaaatgagacaagaatttatgagtttcgatatgtgacttgagcatacattgttgaaaactttgttaggggaacacacagacattgtcccaattcaagattagtttgagttgaaaataatgacaatgca

SEQ ID NO: 1836 - DNA, 2036 bp, Cannabis sativa
acatagtagcatagtacctaagtagatgcacaaaaaaccaaagaccaaaatagcttcttctaaagaagaactaggtgagttgaagacaaaaatcaataaaattaaacattgtaagagtaagaaactgctagtgctaggtttcttaagaaatggctaaatttccaagtaaaattttcagggcaaattccaatcgaaaaagacaaacataaaaatatatgagtggtataagtgaagttacaatcattaagtcaaggagttaaacctttcatgaaaaaacccaaaaatatcataacaaactggtagaaattactgccaagtcagcaagttggctaattaagggggagggatttgagtggagtaaggtgtatgctatgtgatacaccagcagggaattagaatagagggagagaaatatttgcaagtgtgaagaaattggtaagggttataacccaaagtgggagaaattgatgattttagctatttgataagaaattcctatcaagtggtttcctatcagaaaccaatttcaaatttcagaagtagaacttttccaaaaaaaaaaaaatagcatagttcaaaagtagaacaaaatggcacagcagtagatcaaagttaagtatatgttcaaactatgaattaagacagaccttggctggtaattcgggagatgcttctccatctgcagcactaggactttttccaggtgtggccttcttctttcgcttttgacctttctgaaactcagataaagaatgaatattagcaaaacttaaaatgcaagtaaaacaagtcatccctattacaaaagtataaaaaagcaagacacctggtccttatcagaaagcaaaacatctgttgtagcatgtggagattccaaaaactccagcaatttggcagagacctcttcctggaagagtgagaagttgtaagataactggaatttgaataaatatgtgcagaaacatttttatgccacactaaccttttttgtcgaggccttactaattggaatatttagcagatcacagaaatccatcaatttctccttgacacatttgtcaagcttctccctaatttttgccctatgtttttcctgctgagaacataacaaaccagcaaaagaagcaaacaaaaatattagctcatattcttttatacagcagaaaaaatataagtaacattaaataaatacaaatagggagaggcaacaatgatacctcagtctcaacccaaacataaccagagaactggcttatattcctctttaaagtgtgcacctttacatgataaacaccaattcaaacacaatgaacattaataaagtgaatttataaaggacacaagaaagaagcagaaaaaaagcacccaaaaagcaatacccaaaaaagtgatcacctttgctcttttcccgaatagtattgtgtgaagtaattgaaggttgtcatcaccttttctctttcccagcttgaaagccactaaaacattttacaatatcagaaaaaatagctagtctattgtaacaatgaatttgaatagagtaaataacactttccagacacatattgcaacaggggtcagaaacctgcctccctgaaattacagtaagaactaagaacacgttaaatggaaaagatggtttacactttacacatatgaatcccttgctaaatcatcagaccatggtctttgaaaagtgtatcagacacacaccaagggcagggcagtctgcagtcagttaatgggaatatagaaaagtctaaactaaaatgacaagattgaggtcaaattttctaaaatagtttaaattaattttactagcagtagcctacacattgggatacacaacaagttataaatccaataccatgtaaaatatatgaaaatcctcaacgttttctatttacttagaaatgccctcatggcatatcatatttaacaccctccttaattttatacagaccacaagtctctttgtctacaagggaataatatgtgaccataacttgacctctggatagggtgagcttgtgcattgt

SEQ ID NO: 1837 - DNA, 1276 bp, Cannabis sativa
atttttggtaattgttttgaatttcgatatgcatgctgacgtggcacaacggtatttgcaaataatgtttttaaaggtatttttataaataaaattaattttaggtatattattgaaaaaactccttattaaaaagagtgtaaaaatcaaataaatgtgaaaaaattaagaaaacaaagaacataaaaaagagcttttagaaatcaacatgacacctatttcactttggatagtatttcactttggtgatgactcatattgaaattgaaaagcacaaaaaattacaacctctgaaaaaggattcttgaatattggtgaatactaataaaattaaacataatatgaagataattatcaaaaaaaagaaaaacataatatgaagatgatagagagcaatcatataagaacgagagagattataaatatgataacaagttgtacaaatacacgtagatgtattatgagataatatcatgaaattaattagaacctacccataatatgaagataattatcaaaaaaaaacataatatgaagatgatagagagcaataatataagaacgattgctcttatatgattgctctgtggttgtcgaaaagatcacaaaaccaaatacgaactgttgcattccagagattgaagacactacacaaacgaatcctactgcgctagcttgctctcaaaatgtggattttcaatttgggactatggagacttgcccggacaagtctccacagtcgccatgaaaatcctcacttggaactgtcgtgggctcgggaataccacgacagttcgacaattggcagctttagtccgtcagcatcagcccgaaatggttcttctttcggaagtcacattaactgtggaaatatttacaagaatcaccagctggttgcattttgaagggactcactatatccctcccattggtcaatcgggtggtctaggattatgttgggtgaaaggtgttgcttgcagtgtcatctcgtcgaacaaatttgttattgttggagagatttcttcgcacccccctggaattccttggttgctttttggagtttacggccccccaagatatgaagataaggaagctttctggctatctttaggtgatgcggctctcactactattgatccaatactgctaattggggacttaaatggcacacttaaatgcctaaactacgccaattctggtaattcttctcggtatgctttatatctaaggcgcatggtgaatagggtgggtcttgtttgttggatatattttacca

SEQ ID NO: 1838 - DNA, 1318 bp, Cannabis sativa
cctatcaaagactgaatcgatgaaaaagaagaggatttctttcttgatttgtattcaacgattctgaattaccagaaaatgaattagggctttagccgtttaattcctttggtttcattatcttcccctaatttttagcataattggttattgagatgttaacggaatgtgtgtttttttgaataaatttttttgttaaaaaaataatataaattaattgggaatattctgttaaagttaacggagaaaacaaaacaacatcgttaaatcaagaattgtcgttaggtagacacttttaatatataaaaattttataggacaaataatgattttatgtgtatgattgttattatgtttaaaaaaaaaaaacaagggtctttttcgtttttacattttaaaacagtttttttttatttttgtatttttacgaaattctatatgaaaaaccctattacaactagcgctgcaacctaaattgcaacaaaaaattgtatagaaacccctattacaacttgtcctgcaaccactttagaaactcaaaccgtaaattttaaaaaaaaaaaattaaaataatatataaggtaattccaaaaaaaaaaattgtatgatttcatttattatttttttaaaaacaaaacaaaacaagaaaggaaaaagaacaacaaaacgagaatttttatcaggcacatatgttttataataataaaaaaaaaattagctcttcaaataaaacttaccagaattttctcaagtccgtgcaagattatcctattcctacattcttttcacatcgataatgatgtctaataatgatgataattaatcaacttagcaatagggaatgagtagtcaacaataacataaaggaatcccatgcatgattccagtatatcgaattcccaataaaaactttctaccattgcttttacacgtacctttttctttcatatgccatatcatatggtaagtaataatatatataggtctgatcataatgagaatacgaaaggtaaactcgataattagtgctaataattacatatcaaagtaatcaacaaccccacaaactattagtactcataataaaataaaacaacttaattatgatatatattaattagcagcaaaaaagagctatcaatttcctttgttgggttcgagttttgacgaagttgaagatctctttctgggtatgcactttccactcattaattttggctttggtttcttcttctcttctacatcctccatattttcctctaacccagctttggagcttctgatccataattatagatcgcaaggcattattattatt

SEQ ID NO: 1839 - DNA, 3227 bp, Cannabis sativa
ttccgaatggaaaagaatgatgtgtcaataatatggatcttgtaaaagctgacctcacatgatttaaacttgcaagaagatgcgattgggacatggtctagtcggatattatttcaagcattattagcgatgaaaaattaatagtggtcatgcatatatcgattatatatgatgagcaagtatgtcatctctcctgcgatgagcaaagaccacttctttacataggtttggtctaaatgactaagtacatgttgagactcacatgttctaagttatcaacccagaggatgtccaaatatgcaattcaggatgatcacaaatatttattaattacaggcccaaaggcccgttatgcagtataacaccacaaagcctgtgagctcacgtgttaggaatatgaataggtgatctacaaatcaataagttgcagacgttaagcaattaatcagtaatagataaaactgttcttgcatttattctttgcatatttgtattaattaagatataattaaatgtaataagggtccttttttgactggttatgtaagatcaatggacacttactctctatatgaatgagtaattcaaatcaaataaactaagctaaaactattgcaaaagtagactaataagtagatcaagctctgactaagccaatatacttctctgtcttcttcactttcctgttcttgtttttgtatatttcatagcctaaactttgagtactcgttattctaggtaagtactcgtataactgcaagtgggtgttcttgcttcgcttgaatactcactttttggtgttatctaaattcctttgataacatttggtgtcgtctgtgggaataattttctgatatttctaagattttagaggagaatcgcaatggctacagatcagacatacatgaataacaacaatgaaaccattaacctaggcataaccaatgtccctatcactaacagtggagccactcctgtcgacaccactgttggaggaaggggacatactaccacgactcccctaaacatttttccacaagttttaggtctggttggtgagacctcgacactggtaaccactttgggctactttccgccaatcacacctatccctgccactgagggtatagtgctattgataagcacccagtacacgacagtccaagaacaaatgcaagccttggaggctgaaattacagggagaaatcaaacccataccagatgtccacagcgaattcccaatcagtgtcgcatggataaccaagtaactaatagcactaggcgtcataatgaacatgctaatctccttaataatcacaatccatatgggcttgacttaaagttgcctatctgtgaccttgcatgtggaaagggccgcagttcctaattcaaaccatcgacatagccaaagggaggataggccggataatgaacgaacaattctgcatagtcgtgcacaatcgtgttttgaggtaaatgaccatgaatctcattctccttcctcgaggtctaatagtctttctcccatcatttataccaggtcaagcccagtctacaccaggctaggaggaagataccatgtacataggggagttttataagactgtctaaatgaagcattccttgcacgatccccgacgagtaatcacaaagttgaggaggaaccccatgatccccacatggccaatcaagatatccccttgctggacaaccccctgcgaatgtcaacaatgtgattaatgtccttaacccgctagtcgcacccacatcactagataatgtggtgatacctgcaaacataggagcgctagctaccccacctggaaatcaagttgtaccttccaacaatcctatctggcaaggaggaatcgatgatcaggagagtcttttgtgagcgaataacagaagaagtcaatttacaaattgcatggaacgttgtcgtttacggaggaagtgtgacaagcccgacttccaaaaggcttccgtctctctgagtcactaaaatttaaaggttcaactaatcttatcaattacttagataaatttcatactattatggaggttaaccacaactggtgaagtgtcgaatccttgttgcaactttggaggacaacgtgcacgattggtgatcattcaattatcagaagcgtcaatctcgatgtggaagacgttcgtagatttattctcgacacacttgttagtttttatagtctatatcagagttaaaaaagtagaagcgaatttgaattaaaattagtttaatcaaatatgaaccaagtacaaggatctcaacataatgcatatatagattaaatttagactaataaaaagagagacaataccttttgtagcctatcaagggactctcactatctttttgtattattattaaacatatctaatccaagaactttgctgaagagttcacactacaatgttctaagccaaccttaatactcaaaaatagagttgattattaaattttataggatgagtataattatacaatcacaacatatttttaatttatgagatgctgtgatgagatataaataatcataaaactcacaatattatattttttatttaatatataaataatataacactatgcaattattatttcacatttcaatacattttgtcagtattgttgaaaaagtgagacataatcttgtaataaatgcattaatacatacatttactccttatctatataaatatctatatctattatattaagaatatcttttgttgagaaataaaaatataaaaaataagaataaaattaaacaaaatttaaaacatataaaaagaatttattaaatattttatcatcttgtaatattggaatggtccaattttatttcatttcaaaataaaatagttattgtaatagtgtattgcgtcaactgtactgtcaaaaataatatttttaacaattctaaaaaataatttttgaatttgttttaatttagaataaattatattaaaaacaatttttcatataaaaaataattagtttaaattattatcaattatttactcatatgacatattttgtttatataaaaatagaataatatattggtggaggcaatttgtactaatttgttagatctttcactttttcaataaatgcatgtgatatatttattattaaaaagattgtttttaaaaatctatatcatttcaaatatttatataattctcactatatatatttg

SEQ ID NO: 1840 - DNA, 1248 bp, Cannabis sativa
ttgtatgtaattgttagggagacttagtaagagtgtgctattataagccacaaacgcaccataatgttctgaaatttaatagttagtgcggtggtctcagaaattctgacacgactactaattaagtagtgtgttcaataccacgcattaggaatattactaatacataaaaggtgaaaattgagtcttgcaccaaatatatatatacataatcatatacttggttttcataatgaaagaattagtattgatatattagggtgactatatataagttttcaactcataataataaactgatgattggtaaattaaaccaatcaatttaactgatgtgagatttactagaaatattcaataaaggtaatatgagtatataacattgcattttaagtttatacaactccatatacaatagaataactttaatatctttgtttaatatcataaataaaattattatacaaatggacatgatgagcagtgaatattggagaaataaatataataaattataaaaagaaattaaccatacgagagagatgcatacgtacctgatgagggtggtagcagaagaccaatattggttgtggggtgatctggtagaaggggccaccgtggagtagactcggctgggtacgagttaggttgacaaagatgatcatgacgtttgcgctggctcacagccaacaagtgaaagtctgagtctaaattattggacccatcgtcgggcgagcctagtcttatatcctcagacatatccaattgcattaactcactaggctcagccgctgctacaactgcctctactgaactattcttgggtccaccaatgcggcctatttcggcctcagagtctgattcaccgacctcctcatcctcttcttcatccatctcatcctcttgatcttcatctccctcgtcttctttgttggtttcctcgatagcagggccagctgcccccgccggccccgagtaaatggcggcggtcattggttgagaatgaaatcttgggttgtctgatgaagtggccggatttgaagtggattgctctgaaagtgctggtttgggcgggagagggtggtggtctatgaaaaaagtcttaacatgttggataaacccaaggtcttctttaacctacagtaataataaattattaattttaataaagtgatacatcatgtttaaatagtgaaattagattggattaaaaaatttaaagtattttgcggctaaaccctcttaact

SEQ ID NO: 1841 - DNA, 2897 bp, Cannabis sativa
aaaaaaaaaaaaaaaagggaaagatggatttttaggaacaaataaaagtcaataatgtgtttagtacacgagggggccgagggtgactgctaattattaaataattaagttactgaaaagagaggctgctaatgatgatttgtgtaagcttcattatcctcatacgtctttttttcttttttgtgaaacctagttctccaagaagtttgtctcactactttctaatcttaatttaataatcactcatcattcttacccatatggcccctcacatcatttctatcttctcattcattattcaataaatctttgtttgccctctatgaatgaccacttgtttctaaatggtcccactaaactttaacttctgaatagtgacctttttctcttttctccttttttttttcttcgttaaaacggctcctttagccagatcatgtacgtatatatatatgcatacattgttgtacatgtatacgaatacgaatataaagtaataaatgattaccctttgagctttcgattgtaaagaagtatttttatgattattattaaaattaaaacgtagtatttatgtgaaccaacatggcagaaatcttcttttattcatgaatttactacaaaggtgaagcccgatatcgattgttgcattaagtgattatttatatacaagacataaacatttaataaactgttctcacattccagcaaccaagccttactgatcatttaaaaccaacttgaactactacaactaatgatctcccatttttatatatatccagaagaaatatattcaagattcgaacctttaataccatactccagccctgtctgccttcttaaaggaaatatctcctacgaactcgtttcttggtcaaaggtgaaggagtttctccattaccggggaattcccatttgacgacatcaccgtcccaagaagagcttaccagcatagggtaataagggtgccaactacaatctcggacgggagatttgtgatgcttgagcgtcgcaactagtgctccacttacctgtaagaaaataagaaagtaagtaatccgtgaggacagatcactatggatgtagaggcaaggcatcaacattcatcacataataaaactttaggttggcacaagctatacttggccattattgtgcattgaaatcaggctaccaggttagttgggaacatttactaacactgacacatgtgaattgaaattttcttccaataaaagattggttactcacttgacatattttaggtaacaatattatttacctattgactgtcaagagtataatattgtagcaaatctttaaataagctagaagcaaatgaaccttcatgagccaatttctatgagaagtacaggaataataaagaaaaaaatatggcatccccagacttttccctctcatcatcattactgtttggcagtaaaacaagaaaaatacttcagaataatgagaaaacagtgtaaactgtaactacgtaccaaatcgtatatataaacgcaggaattgtgagatcctgtgtagatgtacttctgaccagtgctgcaatttttaaagaatcagaaatatttcaatcaaaataataaatattcatcaccaatagcaaattgtgacagtgttagtttaaatgtatccaacctattgagaattcagcattttcttttctatttgaaacaaaataaacaataataacaatattaattattatgattattgcttacctgtatgctggtgagaagtagcagcggataagtgtacgcaggactgaatgacccctatatgtaaagattgattgatcacacggatgttttaaatcctttgcttgggttggatagtccatccatctgtagtcccattcatagtttctatacgctggagtgctgaaaatacaaaaatgggaaggaaaaataggttggactttaaaggattctgatcaaatggaaaaaaaattgtgaaatgtgagttatatattatcaagataatgttttccgagctatatgatatgtcataaatcattgcataacaatataagaggacagagttgagttcagtgaaacggattaacaacgctcaaattattatatcattgcatagcaatatcttctcacaattctctgttcctatatccccagctagtttgtgctataactccctttgcagatggtaacatatggctatgagacttgcatccaaattctattaattcctttatgaagtaacaaattatacaatcaagatcaaagatagtatctatcagaagtttcttaaaccaaatgaagatttcagaagataagcatacctaatagtagtattagaggatattcccctgatatcccaaagtttaatagcctgatctttaccatttgaaatgagataacgaccatctcccctagtgtcgatgaaggtaataccttccaggtgtccagtcaagacccctgctggtttcccgttagcattgaagcaacgcctgtcccagacctacacaaagctataacattatcctcaatattacaccgcctctgctcattgtgggcctgacatgtacccagcatgcaaacccagtactacacttgggtataggaacgaattgcagaaatagacattgatataagtgatgctgattctcataagttaacaatatccattcaatacaagtaaaatgtaaaacaatattaattccttcaaaaaaaaataactacagtttaagtggtattagaattggtaatggccttctctaccaggccaaaccacaacatagatcggatgccacatttcttggtgcagcatgcattttcttttttcaagggaaaactaataaataaacatattgtatgaaaagaaaaacaaagaaggatacacttttgctatatttacct

SEQ ID NO: 1842 - DNA, 2830 bp, Cannabis sativa
  modified_base (2448)..(2448): a, c, t, g, unknown or other
  modified_base (2558)..(2564): a, c, t, g, unknown or other
tttttttttttttttttagagattttgagtttattgttttctatattttgcgttgctacgggcattaaggtgtttactattattataaagtgatatcctattattagttagcttttttataatatttattaaaataaaataagtaagattgctctaataatataggattaaatattattggaacaaacaaaacataccttagcaacaaaaacattaaatattatacagtaattagctggctctaataataaaagccatacatatattataaccattaattaatttatgcattaatgcattactacaaacaagtacgatatcgaactccaattattgattaattaattaatcattcgaatataccagatgaccaagagactgtgaccttgacccgattcccctgttgtccattgatgtagttggaggatgtacccgaggtttgagctgcgaagtttatggtgccatcggcaatgacaagatcttggggtcgcccatggcatctcaaatcttcacaggatgagtcataatcatacaatgttgccttaatattgagagagttttccatcggcactgctaccacagatctcatcaatttcatgtcctgccaaggcaactcatacacatactcatcttttgatttgctaaacaacaaactctcagcaacattacttaacatgtcccaattttggccaccataaaaagcagaaactcgcccatgaagtaacactttacctgatgcttgtttttcttcaagattaattgtgattctagcagccactgcatttctcaacacagcataattcacagttgccccaccgtattttccacctactttttcagatatgagcttgtcatacttattagtattagtataataatcccatgagatttcaccattaactatttcatcatccggagaaataatgtccttgtccgtgagaagcagcttgatattaacactcccagtggctaaaatggcttcacctggtccggtaagcgcagcattcccgtaaggcctaactgtttcgggtctgcttctggtgcggttgtagatgtgctgcgtgtttagcccatcgtccgctatgattgtgccgtaaagctcgcctggatcctctccatcaatgttatctatacgcactgagaacacttccaatagtggtactccttctacaaagcacttgccaccatctcgggggccggggccgctttgcttatcaatacaaaacctcaacaagatccccattatttcaataatgtgggcaatcatccttatttcactgttattgggtggaattcttatctcgttagtccgaagtacgggcagtggggtctcgggattgttgtcgctttgaaacacggcttcagataaggaaccccagttgcgaataagactcaaaagccattcttcaactactccttctcggtctgcatttcctcctctgatgtaatcaacaggaggaattcgaggacggttctcgaaattctgatcggacacgtagtcctgtaccggcagcagtctgatggactcggagatcatgatgatcacgactaccagacatgctgcccgtacttcacccaccgtactcgtagcgagtcggtttgtggcaattccaatgttgtaaaagccaaccctggtttctctggtattccttttagatgcctttgctaaacttctgtaactgccattgaaattaaggaaggtggaatttggaatgaaatgagtaaggggattggaatcgttttgaaactcgagccattctccagtttccatctggtacccaatcaagtagagattatcaatgcgaaacctgaacctgacggagtgatcagaagtttgaagaaccaaatcgaagaatcttgtgggtggctctgcttgaagcggcagtgtgggacgaccgtgtgtaattctctctgacaatcgccgacgcagatcggcaatcaaattcctgtaaagtgtcctggtcgccgtgtcaaggttgaacaccacttcaaattccacccccataataatctataattatttatttttaccaccttattattaattggaagtgatcttcctcatcttccccttcattatatatatacaaatatattattattaggatttggtgcttaacgtcctgtgattagttaaaagttataaggcaccttatgtgttgctttactattggttaacaacattcaataaaagctattattttaatgagaaatactaaaagacatgttagtacattcctatgcattaatatttttaaaaaattctttaatgcacttcatattgatgcaccctatctgttttagcatccgaattaattttttagttaaattttttctcatgctcatgtaaattatatttatttaagacatcctgtaaaattttaagaaatttggaaaagtttaatatgccgaaaactatgttcaaacagtgtattgcacgcgtgactnttttattttatacgcgtgtaaaatcgactgtttgaacattgttttttaaattgtaaattattctgaatttctcaaatttttttaaaatatcttaaatagctataacgtannnnnnnatgaaaaaaaattagactaattttttttctttctgaatgccgaaataagtgaagggtgtattaatacattccttttaaggggtgcattggtctaactaaatatcaagttatttagaagaaaatgacagactaacagctataagtgagatattagtaattatagtgatgataattatagtttaaaagggtgtatatacatttagtaagttttggtatcctgatactctatgttttaaaatcatccatgacctccaacactcacacac

SEQ ID NO: 1843 - DNA, 2571 bp, Cannabis sativa
atcaattaatcgctcacaaaccattcaggctttttattaaacaactaataatcatggtgtcagatctcttctacttcataatactaaagccaaaataaagccatgcacttcacgtgaaaagttggtaaattaaattgatttgtaatcttaaaaaacaaatgtaatcagcagcttcagtaacagtaacctaaaataataatgtagtatatatgatataaaatgagcattcttatttgcaatagaggtgcccactatcttctataatattttttaaaagttatttttaagttatataagctaattaattaaaaaaacttcctagtagagaagttgaagcgagtagtgcttaagtaaacaattctttctaaaacaatacaattttgggccacaagtataccttttaataaagtgtaagagtcttggaagcatcatatatttgttatcactacataaaaattgttactcaaacttaatactacaaaaaaaatgttactaaaagtttataatgctatcactaaaaaaaaccttttaacgaaatttgttgctaaaggtaaaaataacaataataaaaaagcttgttataagaaatagtattaaatccttgtaaaattctatagctagaagtatttattcacaaaaataataagtttttattactcaatgtgttattagtgacaactaaagttaaattagtaacaatttatctaaataatatttttctttagtaacaagtcatttttcattgtgattaaaggtaatatttacttaattaaaaaaaataaaaaaacattattatgttattatgactaaaaagtggtcataatctaaatcccaacttctataactcattatcattttttcctacaagaaagttaccatttaccggtgaccacagcaatatttgattagaaagataatcaattatttaaacttttttagatttaaggtaaaatgatacatagttagatctatagcctggtacacgtgatgaacagagataagaaaaaaagaatcatatcactttggtaaaagaaaaggagatttaaacagcctaatacactcataaagttagtaccacaaacaatgctgttatgctacagaaacttagctattaagtatccaacgatgatgaagaggtagtgctattattattggtgattttaatttggaacatcttcatgcaaagtgatgaagacttttttttttcttttttctaatttttcttcctaacaaaatatattatctttcatggaaaaagagaaaggaccctccttttgattatcaagacaggtatagtgggataaagcaactagagcagctagtattgtctataaagtcatcaccaatcaaagaaaaatatatattacaatcagagagaatgataagcaaaaatcaatcatagaaatattgtcccatttttagagttttctattcagtcacggattgaaatcagtttagtttaggctgtaaagtgtgcagttatattaaattctaattaacacaactagctagctactacgaagtttaatactaaagaatttcaattagttgacaaacccctcaagtcaatttagttctagtaaaaagtaatatttaaattatatataagatttaaatgcgtgttttttttaacaaagatttaaatgcatgttaattgatttatttttatctaatataatatttaaattaaatgtaatttatataaaaaaatcatatgtatttaatataaaattgataaagttaaattatagagatttttaatataattcttctttttatttttaacaagatttttttgataatatatattttttgggggcaatttttaggaattaaaggatattatcatatttcaaataggcagttttttgtagagtaaaagggaaggattttaatttagattataatatgcaagccgaattaaaatatgttttttaaagttaaagattaaaatgataattatcttttttcttataatgtgaagtgtatacgagtaaaaagccaaaaataattaggaaataccgaaaatttaaaaatatctcactgcagaataataatgataataactaagtaaaaaatcccggttaattaggagaatttttcttaaatactattcaaaacatatttctagttttttccaaaaaaagaaaaaaaaaaaaaaagaaaaaacatacttctagttgaagaaggatatatagtaaatatataaatcgtctgagttgagaaactcatgcagtttagttttggaacttcttaacttttccaaagcaaagaatcgaatcatacaccaaagcccccaaaacccccaaagcgaatcccaattcacttacattcaaacgtttcatattttctttttcaagcatcaccaagaatctggtgaaaaagttatgaactttaagcccccattattgtatttcactattccagattaaagggtgttttgagtttgtttcaaaggaggagaatcaacaatggagtttcaagaaggtttggtgaggttgattattcatgacacagaagaaaaccgaagcaaatcaagaagagaaaagaagaaagagaagagtgtggaac

SEQ ID NO: 1844 - DNA, 1358 bp, Cannabis sativa
atttgccaccatccttttcatcattataccttcttgtgtacgtgaagacacagaataaacccatgtctgctttgaaacttttcttacttttccccttatagaatatgttttctctccattcaaagtcctccatcttctgccagatccgaaactctcagaggttcttccccatttatttgttcgcctcatttttctgatctgagaaagacccacctctcaaaaatgcatattctgaattgggttccagctcttttgttcgtctccgcattctttggtttgtttgtggagtctttgggtgaagcaaccccagtttcgtcagggtcggatagagctgcacttcttggattcaaggccaaaatcgtaaaggacacaactgatagtctctctacttggatcagcaaggactgctgcgatggaggttgggaaggtgttgagtgcaatgaagctgggagagtcactgtactccagttacagagaccagagaaagacagtacactttacatgaaaggcactctgtcctcttctctgagcaatttgcctttcttggaagtgttggtgataagtggtttgaagcaaatcactggtccaattcctcaaggcttctcaaatttaattcatctcactcagctatccctcgaggacaactctctcacaggtagtatccctcctggtttaggtcgtttgctcttacttcaggggctttcattgagtggcaaccatttgactggggagattccttcgagtctaggaaatctcagaaatcttcgacagttgaatttggcaagaaactctcttagaggttcagtcccacccactttgcaaaatattcacggtttgcagtaccttgatctcagtcacaatcaactgtgtgggttactcccagagtttttaggtcatttccaaaacatcacctttcttgacctttcctataaccgattgtcagggcagatgcccatttcattgttcagtttggccaagcttcaggacttgtccttgagccataaccagctcacaggtaaaataccagctcaaattgaaggcttgaaatcccttactagtctctctctgagtgcaaataggttcagtggtaatattcctgcatctgtttcaaaattgcagaatctttggtaccttaacttgtccagaaatgcactctccaatcctctaccaaatactttagccaggggaatcccttctcttttatcaatagacctctcctacaataatctcagcttggggattgttccggattggatcaaaagtagacagctttctgatgtccacttagcaggttgccaactcaaaggaatcctcccaagcttcaccagcccagattctttgacctccattgacttgtc

SEQ ID NO: 1845 - DNA, 2997 bp, Cannabis sativa
agttaacaaagagattataataggagtttgacggtagcactcatgtttacagaatttgtattttgaaaatatttttacttttttaattaaaaaataaaaaattaattgaaaagtgttaccaaatattttaattatttaattgaggtgtgacgggtgcatattatacttgtagttattttttctttctccatttttagtttggaaaaagaccctttcttttctgacaaatggaaaaagaccttgagtatggtaggaaaaggtccacaaatcacgatttctttgttgcaaaatgtgtatggtatacaaaataacgtgtagatgtagtctattatatagagaaatacgaccgacgttacaatggttctatctaatctatcggtggcataattgatgcctatgctaatgctatggtccttaattcttattttatttttaaacggattctgattttttttttgaagaaattattttattctattttattttatttttgggaaagaaatatttatttgcttaatattattatttggttaggattgaccaataataaataacacaaaatttgactcctttctcaaataagggtgtcattatacgatactagcactttgtcctagagtcactcacctttttctgtgtacaaaaatgataaggaagtaggaaccaaagaaagaaaaattatgtgggctacttggatccactcaatctcaactccaacatgtgttctatgttaaaagcgaagcttctaagccaatgaactgatttatgaaagttcaattttttttctcaacttctcttcattacccatttgtctttttctgactcctttcttgttggtgtttggtgttgagcagaatttacatttgggtttttgatttcagagtgttttttgaagatttcggtttctgggtcttgcttacagcaatgatgtctacttaccataatcttgatttgggaaggactgttttggatttggttgcttgtggctgttcttctagctcttcattcgaaaggtcttcagttagaaattactccaaggtaatttctaagggaaatagtagagtttatggagttcggagattggttaccactcgtcgggaccggactctttgtcgagtctcttccatgaaaacagttgagcctctgcttgatggtaataacgcattatagcttttcgtttatatgtaactttatgagatgtaatttgtaacttaaatacttgtacttgaacctatacaggtgctactcaaggtcctccacgagttttgaatttggaggagccaaaaaagtccatttccttaacaaatttgtttgaagtggttgctgatgacctcctgactttgaaccgtaatcttcagtcggtgagtactttttgttggagttattctgggatgtttttgtattcatgtatgatctatgtcgtgttgccattcacttctttcacagctattttttatgcctgctaagcttggcacagctccaacttatacttttggagttagttatacttttgtggtagatttgtagatagaaaatgatatcaacggttgtgtgattgtctattcataaagtctttaagcaaaatcactaggcagttccaatcttttctcatgaatcaaaattcagaaattggttcctatgctcctgacaataccctgtataagagacagaacatatcttgttttatgagtgtaatttgagctggtgtgtagaaatattagagagcttatttgaggtactacataagttactcactttcttctgtgctggtcggaattcttacatgaatacctaaatatatcaatggctgcctacataatttggacttagttacatctagtatgtcactggcaccctcttcttattatcccaacagaaatcgttcatcatttgtccttccttaagcctaaaaaaaagaaggaatcagatacaatttacaaatttaataacatattgtttgttgctgcatagtgtattggggcataatgagctataaagtgtgattctttctttaatcttttgacatataactttaatgagagatagacagtaagttcatctggaatttgaagtgtattatcgcatcagttgattgtccaatgtgatttgcaatagaatatatagattttaacagaatatgttgatgtatagatcctcaaaaaaatatactgtactgcattgtaagaataagctcagttacaccctcgataatttatttgatgaaaatgcttgtgtaggttgttggagcagaaaacccagttctgatgtctgctgctgagcaaatatttggtgctggtgggaagagaatgagacctgctttggtgtttttagtttcaagagcaacagcagaattagctgggctgaagtgagtattttcaaggtatcttctaatatttcgatgtcatatgtctaactgtacagaatataagcttcatttaaaactgcttgcttcagggaacttaccacagagcacaggcgtttggcagagattattgagatgatacatacagctagcttgatacatgatgatgtgttggatgatagtgatatgcgtcgaggtatgtatttgcatccttacaggaaaattcatacttgagtttcacttcagtcaaaacgctcatgagtactgcataacctagtgaatatgagtctttagagagaactccaagatcttgtacttctttctttcaacttgaaaaacttgttagtttgatgataatatcaactgaactgcctagatccaattacatcctctgaacttctaccctttattttgcttatacactctgctcgcagattttcccttatcacattattttagtttttctgaaagtcagtatgatctgaactgtacagggaaggaaactgttcatcaattgtatggtacaagagtggcagtacttgcaggagatttcatgtttgcacagtcatcatggtatcttgcaaatcttgaaaaccttgaagtcattaaactcattagccaggtaaataaattgc

SEQ ID NO: 1846 - DNA, 2617 bp, Cannabis sativa
ataggtttgtagatccggttgtttatggccatggatatatattagcttaatggagttattggtcttccatgaagagagcacttgaaatgagatgaagcaccaatataggaaggattgaattgaattagtctttggattttttttaaattagaaaaaaataaataaagttaaacaatttattttttcatttatttatgtctagaatagaaccaagataagccaatttacaaagagatcctaatgtttaaactaattaagacatataataataataataataataaaaataataataataatgcatggtaagccaagcactcatattagttccttcaaaataaactttcctttaaagtagagaagatattggttaaaaataacatacatcaagtaaattacatatttttttaaagcaatgaataatacttctccacgtatagagaaacactgtttattattttatatattttaatgatgtaaaaaaaatagaaaaattgacgtatgatataatgtaaaaatttaaggtaaaataaaaaaaaatattaatatattttaaaaaataaaataaagaagctaatgtgagcgctactaacttttataatctttcaatctttttttagtttgcccactactaagagcttaaattctttaacctccagttaaaaaaccatgaactactttaaaaaaattaaggtttcgttcctaaatttagttatatgaggttgtcttttttcttcggtcaggcttgccaaccttctatagacataggtgcggcttgatcggggttgtgttttggtattgtaattcaatttttgctactacgattagtcttgtctctgtgacatagttttgagatcaccaaattttcaaactttattaatttggatttagaggaccgcataaccaattattaatttggattttgagatcaccaaattttcaaactttagttggtgggttcttcatgtacaatctgattagcaacataaaatacaaatgcgattaaatcaacatgtccgtacctatctggagcctttacttctctcagtgttttgtctctagccaatttataactttttagattatcactttcagaattatcttctgaatcatcacttctgtgatcaatgagagttttagactccactcttgttggaggctccacctcaagctcagttttcgaagcttcgattttatttcggttagtattggcttaacttccagcaggtttgtcaataaatcccataatagattcattaaaagtcacatccctactaattatatattttctcattctaggctccaaactccactatctatatcctttgactcctttcggatacccccaagaaactacactttatgtttaaggccctcgcctcaattttgtcttgcctaatgtgtgcataatagacacatctgaataccttcaagtgttcacaacttgttggctttcctgaccacacctcatctgacgtcttgaaatctagttttgttgacggatatatatttatcaaataaactgcactgggcacaacttttgtccaaaacactttggacaatttagcactcaataggatgcacatgactctttctagaatggttttgttgaacctctccacgagtctattttgctaaggagtcttcctcatgatctcgtgcctagttattcattctttattacagagcacataaaactcttcagaacaatattccagaccattatttattctaagtcgtttcactttccttttggtttgattctcaatcattattatctagtgcttaaatctttcaagaacttctgtcttattctgaagaaaataattaataagaaaaaaaaacgaaaaatgagatgttaaagatgttttatagaaaaaaaaatatggaacagaaaagaaaagtttaaagaaaaattttaaatgagtttcacaatgttttctaaaacaaataggtattttatcctccctgttcactaataaaattagcgcaaggacctcatcaaaccaagatagttacttgtttagtttaagacatacttcgtcaaatcaagaatcgtagtaaaatttagataataaaacttatacaacaactagcgtacccaactcatcaacctaccaaaaaaatctataaaatgcctatagacaaataaaattaagagcattactatgagacgccaaagtacttagtacttctatgacatgtataatatttattaaattaaaataaataaaatctaatattaaatgacaccaataggaatattgaattacaccatttagcatttctctaaaattaatgagtattcatatttcttgccaattctttcgcagggaacggtttttatgtgttctgccaaatacaattttttattgtctttgattttaaagtgctgaaactttgcccactaatgatagtgtcaaggagtcttaagaggaattgcccttaggaaaacttaatgaccaaagttttccatatcttaaaaacacaaatgttcttttttaaaaattcaaatttatgttcaaagacaactttttacaatcaagtagacaaatttgttctactatatttggaaccattgaatcaactatacaatcctcaaaaaaaaaaaaaaaaa

SEQ ID NO: 1847 - DNA, 1526 bp, Cannabis sativa
gggggggtggggggagagagattttaaaggcatgacaagttctatttactaattatatcattcgcaaatgcttgaatttcaagacattcttcgaaccaattatatattttaatgagataggtaagccaaagaaactccccgtctaagaactgtatatgaaattttcagctcgtacgtctcaaacaaaaggatcaaaatacaagttttattggatatgtcttcaaaacttgtaattgtattatttactcttttctaggaatatccataaagtatttgatccgattcaatctgcacgatccaatttaattcaatctgcaaaatgtggatatctgcacttacgcggattgaaatggattgaaaaatctaaaatccgtacttgtgcggattgaatattatttgaccttaaaaagtaactgattcaatccattctacttaattatatatatattttaaaaaattataatatatataatattatattaattttttagtaatattaaaaaaaaaaaaatctgatttcaaaagaaatagcagtagtaattgaagcttttaagtttcaactctcttagtaatgtttggaaatcagtttgttttgctggaacttaagttgagttcagttaaatatatagaagaaaacatagttgattaacagggtttaatcccttccaaattcaccttaaactggtgtgcctcaactagcttgattagtacattgattttgtgttaatcatatatttatatatatatatatatacatatcattatgacatgacttatgggagtgtactatgttttttttaatgtttgttaaattttggttttgtaactttttttttttttttactcatttaattaaatataaataacttaaaattaaattagatttaaaataatatccgaattagattggatccaaaatatgtaatctgtacttagggcatattggattggataaacatccctattcttttctaaacataacatttatccaattactaaatataatatttatacaataaagtagttaaaaatgtttttttttttgataaatcacaccaaacataacatttatccaattactaaaactctagttaaaaatgttattcaattaaataaactataatagttaaaagatttaacacgaatatgtagataactctattctttgtttaaaagtaacataattaaattgaacaaataagaataacattacaaaacataacatcattaactaaataaaaatatatggtaataaacaaaaagtgcattccaccttctcttattttcgtcacataaatactcataattctaaagaagaaattcactccggtatacatttaaacaaaaaagcactttctcccaatttagcttattgtgaaagaaagactaaatttgaatagtgccgagagtccaaaacaaaaacaataagaaatgtaacatatgaagcttcacatttcaaaatcacataattttggtccagaagttaacgataatatgctcctttagctcagtattgtaatttttac

SEQ ID NO: 1848 - DNA, 1639 bp, Cannabis sativa
tcacaaatcagcaagagaccaaaacgaacagagtacatgaaaggactaagcttagaaagaagaaaatttcagtttttacttcaaattcattgctagaaaaataaaacattcaccataacaaggttaaaataacaaaaatggctgaatatttgatattttttataaaaaattgcattttaaaaattgatacaattagtcaaatgtactcatagcataacctagtagtttcacaatgtcaacaaaataaatgaccagataaacacatcttcttctgcaatgactaatgttattatcttcatctctgaaacaaataaggcattctcttagaaaccaaataaagctttaatttgagagtcagaaaattcaactcctcctccatggacccatattcacctagaattatattaaattccatattctaactctaaaaacgaatacttaaagctccagcacaaagaaaatcctctataccttaaaagatattgatacaagtacgccaccattgaccaaaaccatatcccatatacaatttcaacaggttcaaagttataagctttttaatcaaaacaaaacatctaattttcatttcactttcccgggaaacaaacagcaaaacaaataagaaataatcaataaaacccaaaaaaaaacaagcacgttcaaaagatgaaaagtaagttagtgtgacctttccgttgagccacatccgatcgtggtcaaaggtgggactgacagcgacagtggtcgtggtacagaggtgatcgggatcaagagttacactgatactgtcattaacaggtaagatcaatttttcgtctctctttccccagtacttgatgacagcgatgttggtgggtgtacgggcagtgacgaggagcacccttttctgcgactcatccgccattgttgagagcttggaaagctccgaattcttctctgagagagagagagagagagatctgagggagaagagaagagtgagagaattggcgtttgttgaagaatattatatagagaaagagatgggaaagaagaggaagaaagagacaaatggaatggtggcacatgacattacttacatgaatgagtgaatacgttgttgttgatggttgaatattcttaattgtttcatttggttgaatgagtgaaatctaaaaaaagagggcaacattccactttctaactccaaatctccactcaaacattcaacaacatacatattaatattattatttgtttttttttctattattatttgtttttattgatcaattttctactccaaccaaactacaaaaaaatatatattattagagaaatttaggagaagtataatatcttattataatttttttaattaatattagggtcggctttaagcataaataggctaggcatgtgcttagagtccatactttttggaggctcaaaataaaaaataaaaaatttcatcgtgtttttatttaagtaaaattaaatgtattataaacaataaatatacatagcttagttggttgatgtgtataatatgttatccaatgttatgggttcgaaatttgaacttcaaatcccatgacactcaatttttaatgttttttatatatatttttaagagtgagggcccaaaaatttaattcgt

SEQ ID NO: 1849 - DNA, 1438 bp, Cannabis sativa
aagaaattcagtggttgttaccggctggtcatgagatattgaagccttgggtgtactggcaagagcatttccgctccgcattatctcccaacatctcacctacaattttaagggcataatggaagtttcaaacatagccaaagtttctattttcatcttcttctttcatttatactatttttctccttccaaatcaaagggtatgcgtgaattatgttcaagaacacagaaatagacaaaaattagtagaacaaacctgattgtcccatgaagtggcgaccaagtgattagccttgggactgaaacaaaggcttgaaatagaatcactaggaggttgagcaacctaaacccaaaaataaataaataaataaatactaacacttaattgaccaagagagtaaaaaacaataaatatacacatagacgaagcacagagagttcgaattcagaaaaataaaaattaggaggagggaaataaagcaaagggatttattggaagctttcagctgggattacaaatacacaagaagaaaatgatagtgaaaataagtacctcgaaggaattattaggattgggattggtattcccagccgaagcggccccgaaggtcgacattgttggtggctcccgaaaatgttcaaatgtatggagtgaataatcagagaaaagtgaaaggaagaggagagaagagagatacagaaggtttgggtttgggtttgggagttgaaagagagggaaaacgatatacgctgcaataaaaagccaatgctcaaaagtggggtaaataatatacaaaactttttgcttaatatttaagctgctgcttaagacggtgtccatatatatacggtaagtgaatcagttttaaatttgtactaaaaaaaataactagttatttttagtcatttaacgtttttattacataaaatatttctacaaacaaattattacaaaggattaggtaaattctaaattcatacaaggaggattaacccaaatccacgtagcactaattttgtcagccaaagggcataagcaaaagaaattacagccacattatcaaataataataagtatcgaatgtgttctaaaatactatcaacatctcggcgaccatcctcctttctttgaattattggacggcttcaagacaatcagattcaatacaaaatcgaggtaaacgttgcagaattccagcttacaacctagcttgaatggtgagtaactcagcttatagtggctggaaattctattgtaagaaagatgcaagagcaaaaatcacatgacctccgctatcacgaaccacacattccaaaccagatccttctcttccctttcgaacaccaacatctacatttattttcagcagccctgttataggaggaattcatcgcattgcctctattttagctcattgactttgcaccccacaagtgt

SEQ ID NO: 1850 - DNA, 2587 bp, Cannabis sativa
tatgacattaacacatataatttgaatgagaaatgcttaaaggcattatcggtgcctagtatctttcttggtgtcaagtcccatataacttaaaacaataactttttaggaatatcgttaaccaattataggacgacacttatagatgatgctaggcaccactagtacctaatagcaatgctaaatttgaattcttccaaccatcataaatacaaatagagtagatgttcatccaatcaaatccgtactattttgctcatagtgcattcaatccaatatgaatcagggatcacggattgacctatcgccacctatatgagaactaaaagacctaaaaggactaaaatagaaatcactcaggtaaacaacccaaagtgtcaggtaatacagtaaagaaaagaaagaacgatgtgcacttacaaggttgagacaaggcagttgtgctgagacgacgcaacaatgacagtagaattgtgcctgggatcattggagaaaaagaagcaagaaatctggtttattgaaaaagcccctacgtataaagggcattgaggaatttttgaagtgtaaaagtgtgaattagataagatataaggcttaggggcacaatctgatcccttttcatccatggtctctttcaaatttcaagaaacacacttgatctagcgactcaaatataatgaagagaaacatatttaagaggggacgtttgatgtacctgagtatcctcctaccaccttgcattaaatggtacctcccgagattccatatcagaatacaaatcattctcatctggaacgaggcagaggcacgtagacggaagtaccatttattgagcgagacacgtcgtacttgcaaaggcagttgtaacccaattaaatgcataattatgatcagtttcgctcccaaaggaaacccaaaaggcactttatagcaagtcctcacttcaaaaatgaaagttgagacttgggaaacaaatgttctctcagtttttgcttagcatatgtggctctctaatagacgaccatgtgtctagtaggtcccaattgttggaggtttagagaatagtgttcttgagcccaaggatacatagctctaggaggaagagggactcgtgaaagatcttcaaaatttcataaggtactgagatataaatcaaggatatttgagtctccaagaaggatcagaaccacctggatacctctattacgtgtcatcccggcgtgtgcactgctttctgaggaaaagtactgttacttgtcctccatacaagcgacaaaacgagcttacctctagaagtagatattcttggggatttccccacttttctgacactcgcttttcctaatcagagtcatgcggctcacgccctcaacgatcccatcagtcgcagacaaacagggtcttgtctcaccaaactcctattttggatctactcgacaagcccacaaaggaaggaaatgtgttcttattgagaaaaatagcctcactaatgacagctagaagaaggaacgggcctaagtcccttccacaagcccacttacttctttataagtagggattgaaacccactgtaaagaggatagggagagcttagggaagactataccaaattctccctgcaaaaattctaccattattgtaaccttgttcaatatcaaatacaagtgattcgtagattaagactcattaatgctccaaccacgtagaaataacctctttgaaacattattactattattattattcattatattaaatagttgtcgaaaatcttaatcaacagagagcttgaagaaaaaacttagtattcacatttttcatattgacacaaaaatatcaattaccaacaaaatacacataaaattccccgataacaaggagaagagcatgagaaaaatgatgatagtgattcctcacatacccatcaccaccgccgacatcggaacagaggctagatctggcgaccgaccaaaaagtatagatgacaataacaaaacgcaaagccaaaatatgtctcacatatatgatccatcctcaagcaagaatcatccttggtggcagatacatcctcatgtaggaatcatccttgaccattcttggtggaagaaccatccttgaccctctttggtggaggatcgatcctctcatccttggtggagaatctatcctcatgtaaaaatcctccttgaccatctttggtggaggatccatccttgtgcaagtaccatccctgttagaagatacttctttatgcaaagaccttggttaatgacttatcaataagcaaggatgcaccctttgagattttgtgctcatggaggcatccttcaggatcctatgctcaaggaggcacctttgagattctatgctcaagaatgctcactctaggatccatgctcaaggatgcactttctgagacccatgctcaaggatgcacccttcgagaccctatgctaaagaaatcaccctctgggacccatgctcaaagatgaactctctggaccctatgcttaaggagtcaccctctgggagcttatgctcaaggaggcatcctccaataccccattgctcaaggatgaaccctctg

SEQ ID NO: 1851 - DNA, 931 bp, Cannabis sativa
ttcataatattttaaagctatattataattaaaaaaaaatctatacatatatgtatatgtttataaaattaacatgaaatcattcaaaaaaaaaataattttaaaaaaatatatatcctacgtttaaacttattgaataaaaggatgaaataatttaagtttttttttgtaaggataaaataaagtgagcattgtgtgcccttaaaaagctctgtggcagttggttttgtatttttctttttaactgttccaacagtttttccttttctctttccttcttttcattcagtcccttttgaatcttcttgggttcctcttcagttttcaaaaaatatttcatccacaaccgttcccgcctccatgcaccttctaatttctacttcaatttctaattgactccttaattcctgctactctgctttattcctttgataatggacaacctgctatactatttgaatcaaaccatgacactaacagaacgtgaaagagatgttcaaacacttcctgtgtcaccgacttttgggattgctgctacccagcatttcagcctttacgcacgagtggttacatctcgtgagtttaatcgcaaaaccttcaaaatcaaaatgagtgggcattggaaaggtcagtaccctgtcactatcactgttcatcactcgggcctctttttagtttcctttggttgtttgggtgatctaaagaaagtattattcatggagccatggcactttcagaaccaccatattgtcttatgtcctcctactacacttcaaattgcttctgctgaatcgttacatttatctctattctgggtccaacttcattgataaccattcttaagcaaatcaaaaattatggctgaatgggctggcaatatggttggaacctatatttatgttcatgaggactctctaaatgaagggttgga

SEQ ID NO: 1852 - DNA, 2916 bp, Cannabis sativa
  modified_base (2605)..(2605): a, c, t, g, unknown or other
agagagagagagagagagagcaactgagattggaagaagaagaagagggacaacgatgatgataaaaatagtgaggcaaaaaagatgtggaggcatataatgaaagagaaatgttaaaaggcaccactggtgcctagcaccctccttagtgtcatatcgctattggtgcaagtatcaagtcccatatcacttaagataataacttttagggagtatcgttaaccaagaacgccacctcaaggtgatgctaggcaccacttgtgcctaatatcaatgctcataatgaaatgccatggaattgtttacaaaattgagtttttccatcacagggcaaaggaaaactatcatttgagaaatccacaaagcatggaaaagggaaaaaaatagtaagaccaattttacagattatattgttacttacgaatcatagatcaactacagtttgacataaaatatggtgagtgttttgtaattagtataagaacgaagaccaaagacaggtatagagtactgacccagagtatgatttacatttgcaatcaaccactgatatgatttacatttgcaatcaaccactgatgaaacgaagacacagtacagaagtaagaaaagtaacccatcaaaatgtattattattagaaagccctcagatctcatagctatattggatcattaacaatattaaccacagatttttcatcagtccatttacatcttcaaaaacctcagagagagagagagagagagagagagagagagagaggtaatggtaatggtaatggtggaggtggtaataataagggattatttcataaatacacaaaaagataacaaagatgtaaaggacagagatgaaaaccaaggagaatttgtttacaaaattgagtttttccatcacagggcaacaccattatcatagaaggctataaaatagtaagaactcaactaaaagatcagtaaacaataaaacgaagaaaacgacctgaaaatgaacagaagctccacactaactttaacattaagagtgtggattcaaatgaagcttactaggctgcatgtccatcaatcaactgctcagagtccagtgtattcatcatatcgtcattcttaaagaacccatctacacagcaaaatcaacagacacactaatggttttgcttgaggtcacacataagatgatgtttaaatttgaaaacttcttgattcatatattatagaatttcactgaattttatcccctcaaatacgtatgtaacaccacaatttagtactcgtatttttcatgtaaaaatcagttgatgaatttttgttgttatctatgctagattgagggccaacttgcatgcataaaaagaaacaatgaaagtaatactgttttccttttatggtttcattatttttgttaaatgcaattaaaacgattttacagtgaatgaccactcttatccccctagaaaataattactagtggaagctgaatgttaatttcttgagaaatagattccgtatccaattcgtttgaatgaaatttagatgcctatgatactgcagttagtttctgttacgtttgcagtggtgaaacatttttattttcttaacaagaacattaaaataaatttgaccttctaaggtaatgagcaatatttgatatgagttctttgttaccttagcttctcgtggatctggaaagcatccttagctgatgccatcaactccaaagtgggcagtagccaatggtgttggtgttaaattaattgtatgtgaccaggaagttgctcgatatgaaactgctactttggcagcagttgctgtccctgcacttttgcttcctccacgtacaacagctttggatgaacatctagttgctgggcttccagctcttgagccatatgcgtgtttatttcataggtattggatggctcctttcctttttcaattaacattgcagaagatcatttctaagtgaccaacttggctttgttgactacaactattaaattttgtattaggtattatgccattgctactccaagtgccaccaaaagacttcttcttggacttctagaagaaccaccgtcatgggctctaaatgcacttgatgctgctgctcaactagtggaactcctccgggctgctgaagattatgcttctggaataggggtgagctggatactgcacattgccggtgtttagctatgttcttatgatatgaaatgtataaaaatattgggtagggtgccatagtgctcgcaatattttggtagcaataaaaattgggtttttaaagacacatcaaggatggtgggagcagaaaagatgaagacttaaacaagaaatcaatgcactataaataaaataaataaaagttctcatcaactgacagaaactgagatggatcacattaggtaaagacattaaaaaataaaacaaaacagacctaacatattagtcattttcagatatagccctcagatcttttagaaaaaacagctgttcagagtcaaatcaaaatcatagattttttatgcacactcaagcatataaccatgataatcattcaaaccagtttgcatcttcatcaacctagagagagagagagagaganagagacagagagagagagagagaacatgaaatgaaatgaaaaggaaaaaagatcatcttgttagccaagtaaagatggaaaggtttgtgattaaaattcatgttttcatcattgggctaatgaaattacaatcctccaattgaaactagaaaagtcaggtagaatcaattcaattattgaaatggataactcattgtaaaacaaaacaaaacaatcagacacaaaacacgaaagaagaaaggcaatgacttttctctacaacagtaaataaaaaaaacataagagtaattagaaagccctcagatctcata

SEQ ID NO: 1853 - DNA, 1762 bp, Cannabis sativa
tgaatgttggttactagatttgcctgactaatacacttagtgttctgttaagtttcttgtagaccagatgatccttccttactcaagtgaatatatttcaatattcatgtctaacatttcttactctttctcaacctgtagatgagtactttcacaatggtacatcatacagctcctcatataccatttaaatctccagacgaatggaatgcagctcaagctcaactaaacggaacagtacattgcgattaccctcgttggtactctttctgcatcccttatttccattgtttgagttgatatcttctccacaatgggattgttagctgacccttttccttttgtgcaggattgagatcctttgccatgatataaatgtccacatccctcaccatatatcttcaaggattccgagttataacttgcgggcagctcacaagtccatccaagataattggggaaaggtaattatggatttctcactccattgtgaaaacagaaactagtatcgaaaatctaacatttcaagatgatttgatgtcatttgtttgaatcgtgcagtatttgaacgaggctacatggagctggcgtttaatgaagacgataatgacattgtgtcatgtatatgataaggagaaaaattatgttccctttgatgaacttgcacctgaagactctcaacctattggatttctcaaaaaggtgatgcctgattatgcttgagtctcttgtgttacctagtggggtcacatacttttcggcttaattcttatctcttatcctaatctttcttagtcaagatagagcaagcatgctttgaatcaccattttttgtttccttcatgatttctaccattacatttcagtgtactttcaaaaagggttattgattaagtagatgaaatgttacattgaaggaaccttcttggaaattaaggaatagtttaattgaatgttattttttttttttggttttatataggaataaccttcttgttaaaaaaaagttcaaagatgccttatctattaatacaaaaagtactgggtgattctttttttgagtgatgagaacctcctcattttcactatgtatatttatatatatatttaaatagtgtttttagtttataaaggaagaagaacactcttgtttaaaggatgcttctttattaaataaaagtatcctagactagaaggatcctcattgggtgttcagaccctcctcattttcaccatattttaattcacaacactctggaattaactgatcttttaagttaaactacaaccattatcatagtaagcaatgttggatttttaaactcattattgcgaacagcacagcatcttctgactttagttactttttaatataaagattgtagcttttgttacccaatggctcttaataatattttccgtacaaacacaaaacagagaacagagaacttattgatattaaattcccttatgctgcagtgcaggtggtctttgtttaaattggttttcttcacttatctccatttgttaccttaatacattgaataaacataattataatagtgtacttgaagagttttgtggcttttttgtactattatttatgattatgagatgagatcataataaggagagctcatctgaaattaaaggctgcaaagtaccaacaactaataactttatgcaaactcatcttcaattcataccatataatatctgtcaaagcagttgcaactgctcacatgctctctctctctctctc

SEQ ID NO: 1854 - DNA, 4585 bp, Cannabis sativa
  modified_base (503)..(531): a, c, t, g, unknown or other
ttaattattctaagtgaactcgtagttttattcccaaaaactcaattaagaatggtcttcaattaaacaattatatatttgtccattcattagttaaagcgtcttctttctgttgacaaaacactactttactttgctgttgagagtgtgtgtaaagaatgggaaatgcactgagattcctgtaccggaactgctgcaaacccacaaccgcagatgatgactccttccctccccatggtgtttcggccggcggcctctctgccctcgccagcgatcttttccactttgatattacctctcaggtctatctatctacaagcagatgatcagtgtttatattattttatttagtcaaatgccataacattcatgttatatataatttttctattttttttttctctttatttccgtgtttcttcttttatcataaatgtgtcttcttattctttttttttttagaaaaacataattgtttgttggaataataataataataatannnnnnnnnnnnnnnnnnnnnnnnnnnnnaataataataataataatatcgaagaagaaaaatagaaaccaaaaaattatgttattgtttttactttttctttcgagattaattctgacaataccttatgatatgtacctaatgaagtaaattatgaagttactaagttgagtatagttgaacttttggggtatgattccctttccttatatgcaaacagtacaaggaacaaaaaaaaatgaagaaacaaatgatctgggttgatttttgttgtcttgtttgaaaatgtcatttgagtaatcgtcattgttgataagtgtaaagtttatttgtcaccagcagttcttaaataaataatttatttttgtatataaatttgtggtctaagagtgacattcaaccatttttttccttttgttcttacattttgtgcactgttttcatgattcaggtcccagaaggactcagtaagcatgttcattcatccaaaaatgctcaagctaaatggttattagtctactaatacattcattttcgtaaataatcaatctctcttatcattaaggtaaaaatgtcaaaatatatgtgtacatatatgtatttgtatacatgtgaaggtatagaagactactagaggcatggagagaagccaaaccacctccaaaaacagctaaagaagcagctctgcttataatcaaaaccttgaataaagtccagaagtcagatatagaggtgagctgatactaaattggcactaatcgttgtaatgaacttgactagaagaaactaaagtaatagcaatcattgttatttttttttattttttttattttgttataatgttatatccttatgtatagggactattgagattctatggtctctcaattcctgatgacacagttgtggaattttctgctgagctcccaactacattgcctgagggagtgcaatttgcgatgcagaccttaccagtaagtggaaatgtacactgcgaattgccacttatgaaattccacatatatgaaaaaattatagcctttatttggttacattttaaagtatcagaatgtcattccaatggaatgacatttttcactattttggtagaatgactattctattttgaaatggaaagaaaaaccattcaaatgcaattttgttatcaatatttctattctcattcttatttttatattttcatttcttccaattaaactcacatgaaaaacttagttcccacctgacattcacttgatgttatgtcatatgaacttggaatcccaactaactgaggtaggttgttgtgacaaatttatttatatctatctaaatgatcgaaggatggtacttcctggttaactgttgtggggtgatatgattgtccatttatattaagctttcaattgaaagtctaaaatggtacatgattagttcaagattatgtttataagaaaagaaacaaaagttacatgtttataaaacatgtatgttgttatgactatgaaacgtatgaatatcttcttcactcatgcacaagagtactattaataataaactgagagtcctccctctaacactcacaatggtgttatggcactatttaaagattttctatgtaatgtttattgtgctaagcacaaatggaaaattcataagctaatgaacgttgctgttttaaaatgtgagtttaaaatggtataatgtttactgcttactttctgatgtggtttggataacaaattgaaggttgatccaagagctgttcaagatggggattcagtaactgtatatgtaagcacagaagatcctcgtgagtcggtgagcattcccccacaggtgaacttatttgcagggaaacgattgaaagcacgtagcaggaatgacaatggaaaagcaaaggaactccatgataaaattattaattctggttacaggtttgatgtatttctgaattactctcactgaactttgaactttgcctcaatgtaatggttactttggttcactgttatacaccaaacagagagcatctatagattaaacttttggatttttcatcagggtactcaagatagatgacaaggagattcttgctagaaaatatcgaattcgactaaggtctgttgttgttaaaattcacaatgtatttctgtttgattgactcgattcaatgtgaataaacagaaataatgctaatgaaatgtaggggaatagatgcaccagaacataaaatgccatatggagatgaagccaaagatgagctgactaaactcgtacaaggaaagtgccttagtatttttgtctatgaagaagatcaatacggccgtactgttggtgatatatattgcaatggcatttttgtacaagtactacactttaaatcatgtagtatatttttcttttttaattattttctgcaggcatattaatatatggaaatcagttgttctttctgataaaattttcaaagttaaacaggaagtaatgctcaagaaaggttgggcatggcactatgtaacttatgataaacgcccccaactagctagggtgagtattttattttactgcaatcatgctttttgcaacgtttcaatgcatatatgttattaattacatgagtgtatatatgtagtgggagaaagaggctcgggccaagaaagtgggattgtgggcttcaccaaatccagagaagccatggatatggagaaggaataatccgagaacagatgtatgaaattgcttcttgcaatgatatattcgaacattgatctgagagttgtgtttattgtgttatcgaacgtgtatatattttaattcatcttggacactattatttactctatgatcatcggaggaccaatgcttaaacccgagaatgctccaaaatcttttggattgcttgtttgtaaatatactcaaagctttttagggcttgtttgacataacttatacttttattttaagataatagaagaaaagacctaaaagtttgagctttttatttaggtggcgtttgattgggaggaatgaaaacatagaaatgaaaatcggaattagaataggaatggaatggaataaaatttgaattacataaaattaaattttttttcatcatgcaatggaacggtctttccttctattttaaaatggaattgtcattctaccaaaatagtggaaaggctattccattggaatgacattccaatactctaatatgcaaccaaacaaaggaatggaatgaagattgtttcctttccattttattttattacctccaaccaaacgccaccttagtgtttggattttgattttaaaagaacttcttcatttgaagaacttttataaatgtttggtagtaaaatataaaaactcttataaataatatatatcaaatttgttaataataatataattccttttcttgttttaaaaaattaatcttgaaaaataaaataaaaatatataaataaaataaatcttttatttattacataattattgtttataatgattatgacataattaaaaacaacacttatattcatgtttatcccagcatgagttcggttgcaattttatcacggacaactctcatttcactcttatctattgctaagttaatgttttgttcatcatcgtctacaaaatcattatttgcttcatcataagatggaaagttcatatcattaatagtctccctcctaataaaattatgtaaagccattaaagcagtaacaatagctacttgtttatcatattcataaattggcattcgatgcaaaatttgccaacgtgctttccatacaccaaaacaacactcaataacactacgtagtgattgatgaatgtgcatggttaaatacttctttatagccactaggttgacgaccttgttgaaattaaggaagatgatatctttgccctttatatggagcttttgaatagcttgcatcaactaaataatacttacctacaataaaataaaataaaaaatcgttaaagtttcagatcatattctcataattgatatttataagtgacaaggacataccattaggtggtttaggaaaatttagattt

SEQ ID NO: 1855 - DNA, 2636 bp, Cannabis sativa
atctaaaactaaatgaataacacacttgactcactgtgtttgtgtatagtcttaaattcctaggagaaaatctagtagctccttccttttctcttacatcatttttaatatcaattaggttttatatatttctcttcatgtttttaagtttatataaaataattagtagtaatttgatattcaatcacaaaaatgatccaagtaaattaattattagattagataagattttaaagtttaattggagataataatttttttaaatttaaatactaattagattgaatagataaaaaaataaaaataaaaataaaaatcaatatcggataaatcctaattatcaacatcatccgaagtactaaaattgaatattctttaatctatgatctacctttcatacaaatatattttttagagtagtactagtggtacgtgcactacacatacctatattatgttttttagagtagtactagtacgtgcactacacatgctctctaggagcgttttccatgaaggaaattaagagtactagccttcgcgagtagctctttcgtattccactcagtaaaatcgtgaggtttttgctttcttgcctgtgcgaacgttctcattgatccaaatggctgacagcagtttaagccatctcttcaaggatacaatacaagtttctattaatgatttgactcataggctagacccaggcgagattgatgcccaagaaccgccagggaaaattctactggggaaagtaataagcaatggtaagttgggtcgcaatactatcgccagtgccttgaaaagagcatgggcgtctttcaaagggtggagctggaaggaagatgacgagggcatcctccacttctcctttgccactaaagaagatgcttggaatgtacttaaccggcgaccatggatcatctgtggtgccctgctagtagttatgccatggcctccgtggctagccccgtccgaggttcagtttgatcgttcccctttctgggtcagactaagtggcatccctcctttctattggaacaaaccaatatagaggaacttgctgcaaaagtctcgccaatctttaaactgcccaaatatattgactttgaaagaggctcttttggaatgggaacagttagattacgagccactattgacatagataaagcattgttctcaggttttttcatgaagaggaagcctctaaaggacctctggatccaatacaaatacgagaaattacctaaactttgcctcaaatgtggcataatctctcatgatcaaaagttttgcttcaagcctcctacagttattaaagatcctaatggcgctttcttccccatgtatggtgtctggatgaaatatgaggaagaagccaaatggccgttctctcctactctcccaaaatggtttgaagagtggattatccagcagcgattaatgatggacgagaccttcaaacaacaatggagaatcaaaaattccattaaaacaacagatgagtgggaggctcgcgaaaatcgtcgtgagctgcctggaaaacggaggatggtagaacaagtggtggaggacctaccggagacgggagaggaaagagtctgcagatacccgacggtgaccttacctgggatcggggaagtttgcccattcgaagacaccgacaatctggtgatcaagaaagtccctgatcatcttaccctttctgtaaactcggacgtacagagtgacagcgacccatccaatggcgtgctcatgttaacagaggctacaacggcaaacctcaactctgaaatcaaccctcctgtcaacctgaaagccgtagtggcgcaggctcagagtacctccctgccacagagccatgtcgttgcctctttgaaggataaagttcaaagcgactcagcaattgaaacagagcaaaccattttgggagataaggtccactctccaatggtttcgggccaccctcccttgggccctaggaaaaaagatgattactcaagtctcttaggcagccaagcccacaccatcccatggccatccaatgacctttggaatatgggctttaagacccttactgggctgggcacagtagacaaattcatgagagagctttccatctttaatcctctaatgcaaattgaagatttcagatccataagctcagatagtgggcccaaaaaaagaaaggccctagatggaattttaattgggcctaagtcttctgaacagtacccagtggggactatgtgtcaagagtcgactaatactctccagtcttctcccactccatatatcgcccctccttctgaagtggactcccctcatctcaccctggaatcgcatagcttctccccttggtctggaagctctggatcgactaagaggaaaaggggcaggcttcccattgcaaagccagcacccataagccaaagctccaataactctccttcagcgactaaacctcaatcccgaagaagaggaaggccaacgaaagtaactgcaagctcaagcttcagtgtccaaccaacatcattcaaacgcaataccaggaaaaaagctcaaaaacaacaacgcattagtgcgcactgggataacaaaatctttgatctcactgtcgacttggataatcactttgt

SEQ ID NO: 1856 - DNA, 2670 bp, Cannabis sativa
ggatgatgacataataaagaagaagaagagaaaaggtgtaatggttgcggcggagcatggtagtcttttttaagtcttttcaatttctttttggggtggatgataatagtattaggtaaaacaagatcaaacttgattttttagaatcgaacaacaaatctttttttgaagaaaatgttttgtgattgaggtcgattcttttttatattggtggggtgatgttgaaatttgttgacttttctttaaggaagaagggagttgtgttgtgcttgtttgacacatttatgtggactcacatagaagcgagatgggatagtcgtcttcttaaaaaaattgaaaaaaataattatatacattttacttacttacaatatatatttataaaaaaaatgatattcacaaatataataataactttggtgtaataattaagttaaattgcatggtaacaacgaacacttttttttttcttttcgagtttacttttgctccctcttttacaaaaaacaagaaaaaaaggaaaaaaaaaaagaaaaaaaattgctcatcccttattttaaattttgggtctgtcaccgcatttatgataggggtgttctcaaatcgcattacattgcccacatcgcataaatattgcggttttaaattatttacggtgtggttgtggtttgtatttttgccaaattataccgtgcgatgtggtttgctgttttggttggggaccaggtcaagggttcggatctggggctagggtttagagttcgtcttgggttggagtctaggtgcgggtttgagatcagattcgggtcgggatttgcgttagaatttaagatatgaaagtgagtgtatgataaggtatatgttatttcatcttaaaaccaattggcaataagatgagtactcaatcattttatatatgattttaaattatttgcggtgcagttgtggtttggatttttgtcaagttgtgcgctgtggtttgcgattttggtcgggaaccaagtcaagggttcgaatttggggctagggtttgggcctcgggttcgtgtcttaggttagagtcttggtacgggttagagaccgaatctgggtcggggtttgtgttagaattttggatatgaaagtgcgtatatgataagatgtctgaggttctattttattcattttatatatagtaaaatttttacagattagcaatatgagactatttttaatatactatcctcacgtttgggtttggaaagtgagtataacgataacctttaagatactacagggccgaacttgacatgtgaaaaaaatcctataagaacaaatcgagaaatttataattgtaaatattgggaaattcgtgaattttttttttaaaataaagactatataacattaaaaattgacatatattggtccaaactccaaatctcccaaatgaaacaaggaaaaaaattttggttgtactaatcttttaaatagtacattggtcaagtgtgagtccaacccctaatctccaaattcggattctttctaaatattataatacaaattaatacgaattacttgttatgtattaaatattatgagttgtattatattaaaatttatgatagtaataattaatacaatgtaaaattttattcaaatatagtgttatttgttattactataatacaatacgatatgtaaatgtattatatactcagcttttaaaagtaagttttaaaacatgcagcttaactattctttctacctactataaatgagtaagtgtaaaagagattttagaattttcagctatattattatcgtttagttattttacccagagttgttcattggatcacatctaatagatttagatccaaccgatctaattcaattatttattggatgttaaattttatcatccgatctaatccaattaaattaagtcgatccgatccaattatattgtattatttttattttattgttaattttttattatttgtatatttttttttttacctattttaattttgtttggatgtatttttctttttaccttcatatatttttgcctcgtgaatggaatgaattgatttgagacacttactaaaggatctaccatttgggcttggactgcttaacgaacttttattctaacccaagtttcttcatcttcactctcttcaacacaatcatttttatgagattattttaaaaatacacaaaaacagcaaaaaattacaacaatacagtttcacagaattttaattgtttttatggagtaatttgttagtttatatacacaatactcagtaatagtattgttttacttaattgtaacatatggttacaaacttgtaaacttcagttacaaaagaataatgttgttacgaatttataaattttacttaatagaaaaataatttctatatttttacgattatgtccctttatatttttgtaggtttttaaactccctacttttagtattttatttttttaaaaaaaatgtcggtattttttaaaatttcccaaattattactcctatcctttgcttaagctttaaattgcaaattaaaaattgtaattgtatttgtgatttcattaccaccaaagaacccattaatcttcacataagcctatgtatggtaactattaagaggtattggatttgggctgcctag

SEQ ID NO: 1857 - DNA, 1225 bp, Cannabis sativa
tctcttatatttattactggtttggagcttgacaattctatggtttggttttggaattcaggagctgcaagacatgatggcaaaagctaagcctcacagtgatgagatgctgaagatacgcaaggagattgtggacttccatggagagatggttttgttggagaattacagtgctcttaactatactggtatgagcttcttccatttgttttactttttgctctctaaatatggcatttagatgtcactttggtcattttcttttgtttactgaacagtttttaagaaaataatcattacataatataggattttatgaagttgttataatagttttggtactatttgatgcatgtttaactcaaaagtgtaagatcaagtaaaagggtattgttatctagcgtttttatatatgaatatgatcattgtattgtaatgagcaataaatgacaatggagcatatggagactaaatgagaaatttttcttgtgtgtttcccgagtctgagttgaagttctccccgctcacaatctctgaccattatgatctataataatgctaattgtttttatagcaatggttatgaatgtgtgcaatcaataggagttttgaaagcgtccaattagattgtttaacaacttttctatgagcttacctcttttttattccttaacaggactggtgaagatcctcaaaaagtatgacaagagaactggcgctctaatgcgtttgccctttattcaaaaggtcctacatcagcctttcttcaccacagacttgctctacaagctggtgaaggagtgcgagacgatgctggatgggctattcccaacaattggacagccaccctctgctgaggcatctacttctgcttctgccaatgcctctaccactgctgctgcagacgatgaaatgtgtgatcctacaacttctgccactgcaaaggatgaagaatcccttagatttcccaaggaactggcagagatcgagtatatggagagcttatacatgaagagtactgtatctgctttaaaggttttgaaggaaattaggagtggaagctcgaccgtgagcgttttctcgttgccgcctctgcaagttagtgggttggaggaggatgcatggaaagctgtccctgttctggaacaagcagctaagtagaaagtgaagtaaagaattaggacaaagtatatatatgtccttttgcatttcgttatatttatat

SEQ ID NO: 1858 - DNA, 3731 bp, Cannabis sativa
aagacgacgacgatgatgatgagggtcttgcagagtcgtcttcatttgccgggggcagtcttgacgatagctttagcgatgcgcgtaatggcagggatgcagatgccaagagcgacacctacttgggcgacagacgctcctcgatgctgttcagacgtagagatgcgaatctggggtctctggggtccccatccatcaaaagaacgggtggaataaagaaaagaaataagaaaatcgatacccatttggatgttttgtcgaaatatcgacataaggaaatgatactagctagaaactcagtgaattcgagaaggctgctcgatagtcatccccaaatggctttgggattgggccgtgatgactctgttgaccaatctgatgacaccgaggattactgcaattcagaagatattagacaaatttcaggagcttccccattgcttttaaaacttaaaaacaagaattggtctcacccctcctctaagttcttacggagtagtagaagagaggactcgtcttacacttacagcactcctgcattgtcaactagttcttataataggtatgtcaatcgcaaccccagtactgttggatcttgggatggtaccacaacttccatgaatgatggggatgacgaggtggaggaccctttggatttgcctggtcgtcagggatgcggcattccttgttggtccaagaggacgccaaaacatagaagcatgtgtcgtggttgttactctccttcgttttctgatactttgaggaggacaggtagtagcatactgtgtggaagtcagaatatctatcctaggcgccgtcgggcatcagtaggcgccaacaaacgaaggatggcattgagaagtgcccaaggtgtactcccattgcttgctagtagtgccgatggcaggggagggtcatctctaggaactggaaggagtgatgatgaactatccacaaatttcggggagcttgatttggagggtctgagcagattggacggacgaaggtggtcatctagttgtagaagtcaggatggcttagagattgttgcccttaatggggaaggagaagaggaagggacaccagaaagtaataaaagttttagccaaaggcacaagccaatgttcttcggtgagttgattgggcagagtattgtggttcagtcactcacaaatgccatttcaaaaggtcgtattgcccctgtttatcttttccagggtccccgaggcactgggaagacatcagcagctaggatattttcttctgccttgaactgcttggctccaggcgaatcaaagccgtgtggctactgcagagaatgtgctgatttcatctccggtaagagcaatgatctgttggaagttgatgggacgaataagaagggaattgatagaattagacatgtattgaaacatttatctgcggggccttcatcaggctcctcacggttcaaagttattgtgattgatgagtgtcatttgctaccctccaaaatgtggttggcattgcttaaatttcttgaagaaccacctcaacgagttgtgttcatattcataacaactgatcttgacaatgtgcctcgcactatacagtctcgatgtcagaggtatctcttcaacaaaattaaagatactgacatcctggcaaggttgaagaatatttctgctgaagaaaaccttgatgttgaaccggaagcattggatttaattgctttgaatgcagatggttcacttagggatgctgaaacaatgttagaacaattgagtttactggggaaaagaatttccaaatctctagtgaatgaacttgtaagttctctctgaatggtttcgtctcgatgtatattattgcaacgatgtgattgaaacatttgagtataaatgaaattttactggtaaatcctttcttttttgaatgtcaatatatgcttattaaatgactctgctgtcttccttaggtgggagttgtttctgatgagaagctgttggaacttttggagttagcaatgtcgtcagacactgcagaaactgtgaaaagagcccgacaattgatggactctggtgttgatccaatggttttaatgtctcaactagccagcctaataatggatataattgctggaacttacaacgtgattgatagcaaaggcaattctttgtttggtggaaggaattgtgagtcttactccctccattctttattctattaaagctgttatttttatcatagaatatatagcgaattgtaattgcaacatcatgattacctagactagatacattgttattggtttctttttttttttcttcttataagaatatttattgactgttagttggacattaatcagttatataaattattttctgcgtttgatgatttaatttgttgatgttatttggtagttggggcatttattttgagtattgaatggcatctatatagtgcacccatcttctaccgatacctttactaagtaaagcatcattctaggttggctattgttgttaacttctgtccttttcactttttatatttcctagaaggatatttaccgttggttttggaatgaaccttatatataatataatagctcctcagagctcaggcacacttgtactttttatcattgactgaaaagtgatattccttttgtaagccttgtcggaaacatccaaattccagatctcccaaacaatgtaccaaattgtagccgttatgacagtatagcacacatggtcaaacactcatacaccaatatatgtttactggccatgcagactaattcttgttccttttcttttcgttctttccttttttgtttgagacattgtgacttgactggttgcttactatgtggttggtggtgatactttagtgactgaagcagaactggagagattaaagcatgctttgaagcttctatctgaggctgagaaacagctcaggatatcaagtgaacgctcaacgtggttcactgctactctattacaacttggttcagtgccttctcctgaccctaatcattcaggtagcagtagaagacagagctataaaacaactgatgatgatccatcaagtgcttccagagaagctaatctgtacagacacaagtcagatgttcaatatctgcctcataaatcaacttctcctgttcgtcataaaaaagcaaatggtaattccaattccaattgaaatttctcttcacaaaatgatgatttaagtttcaattcaaaattctcacatatggatgttggtatctcaacagcttcatgtgatgatgccacagttggaaatatgatcattcgatgcataaactccgaaaaattggacagtgtgtgggcccgatgtattgaaaaatgtcactcaaacacactgagacaactactgcatggtcatggaaggcttgtttctatctctgaaatcgaaggtaagttccattgacctttagtctttaatttatcaagtgtgaaaatcaaattatgagattgaccttacattattcagaagtaaatggatttgtagccgttttccttgatttagaggttttcactgtccataggttccgtacttatttaagtgatttaggtttgttatgattgagtgttttagtgggattgtgatggcattgtcagatttggaatactagtggcctcttttcattccagtttctcttttggtttctgtagtgtggtttgccataatacagaatcatgaacttgtcttttttt

SEQ ID NO: 1859 - DNA, 545 bp, Cannabis sativa
ttttagcctgttttgcctgatttcttaggattcttcttcttcattttttctttttccaatagagtttcaccgactatgacagtgactataattttatttatacaatttattgtataatatatatagttttgaaggaaaagcaggtcggcatgttatgttatgtagtgcatgttttattgaactacttgcacttgtatcaatttataccaatttatatatacacgctcttaaacaaataaaaaaaaaatacacccaaaagatagtcatactatctcaaaaaaacaaaacaatagaaaatgatgagtcatacgacacatcacacatttgtattactttatattgaattaatattatgtataaaagatgatttaagatttaaccactcctccacacacacatctcactctcacatactccaaacttgaaagtagcatatacataactactttcggtatacttaattagaatttagatgcaagttactttatatatgttgttgattgaagaagaaaaaaatccaaagtagacttgattggatactttct

SEQ ID NO: 1860 - DNA, 1725 bp, Cannabis sativa
tttggaaagattccttttactgtgggatttatgtgctaagaaaaggataatgctctctttctttcttctaattaataattgttgttttgacaagaaacaaagcacaatttattagctgggtagcaataagtaatagttatgcataatctctaactttgtttataattattgttgttttgtttctctgagaaatagtatatgtcttttttgtcaccaaggtggaaatgtgttgagttctttggacctggtacttagaacacctaattgggctctgtgtttcaatatcaagggtatctatcagctatggcgtctggggattctttgaatgcagaattgtcaaagaagacatcacttttcggtttgaaattatgggttttgattggcatttgtgttggagcatttattgttttgatcctttgtttcctttccatatgggttacatttcggagaaaatctaggagatcactggacaagttttcactcagccaaattccaaatatctccaaagatatcaaggttgataggattggggccgagagtacgaatgatcgacaggatagtttgtttgtgacagttcatgataaaccaagtgataagaattcagagaagatgttagttcacttagggatgagcaaaacaagtgatactgataacatgagtcaatgtagctcggtttatcatcatgatagagcatgtagctcgcaatcaggggaagaaggaagctctggaggtgtccgcaagcagcagcactcatcaacttatggaggcattgttacagcttctcctttaattggcttgccagaagtttcacacctcgggtggggccattggtttacccttagggacctggaatttgcaacaaatcgcttctctgcagacaatgtgctcggtgagggtggatatggggttgtttacaagggcaaacttataaacggaactgaagtagctgtgaaaaagcttcttaacaatctgtaagctcaataagatacacttcaaagcaccatgttttgagtctaaaaattaagagtaataactcatacgacttttaatggtttacgcaggggacaggcagagaaagaatttagagttgaagtggaagcgatagggcatgtacgacataagaatctagtgcgtctccttggctattgcatagaaggagttcacaggtgttcatttacttttcaatttcatccttttttttatttattagaatctttagcattcatactagaagactatatttcttgacctttggcttaaggttataaagttttttttttctttgagtatactgacttttattgcattgcataggatgctggtttatgaatatgtgaacaatggaaaccttgaacaatggctacatggcgccatgcgcaatcatggtacccttacttgggaagctcgcataaaagtgattcttggtactgcaaaggcgtaagttctttaatctttattttttctttagtaattagtgtgtgaaaatttcaagagttgaactgacttcaaataccatatttgcttgcagattggcttatttacatgaagcaatagaacccaaagttattcacagagacattaaatcaagcaacattttgattgatgatgagttcaatgcaaaggtttctgattttggattagcaaaactcttggattcgggagagagtcacatcacaactagagtaatgggaacattcgggtatgcaatgcataagatgctaaatg

SEQ ID NO: 1861 - DNA, 2521 bp, Cannabis sativa
catactcgataattttgttaattatgatgcaattataattcttcgctcctaatttttgggcgccaatgttatctctaaatattaaatggagcgaagacaaaaatgatacaaaaaaaaaagggaatcgtgacgacggttcatcttttcattttattagtattatttttattttaatctttttattatacttatcttttctttttttagaatgttagcacaatattttttaaaaacacttaagttttatttggaaccaataatttgtaagtattttaaataattttcttttttatattttaattttaatacatatttacccttcaaaaattcataaatattttctttatataaatcacttctttagggaattttctttttcctattttttttttttaattttttgaaggagaaaaaaatcctaaatttccgtttttaggaaaaaacagacaattcttccgtttgtaagaaaaaaaataaaacagacaattctaaatttctaactgtcagtgagccgttttattgtagttgcttcttacactggagaccactactgcgttacaataaacgatcgttttgtttttttttttccattttcatttttaaaaacgtatgaaaatccaaaatgtgccgcgtcaaaagtcaaaatccgaaacgccccaccattccccccaaaagaaaaaaacgccccaacatcgaattgacgaaattacccttggtatgttgttaccgtttggccgttacaaagggcaattgtggaattaaaactgaagtagaaaagcttggcttgcatggaaacatatcacagtgacagagagacagagagacagaacacctttcatttttgagagagaagaagaagaagaaagagaaacccttacctaaacacaatcacaaaccaaactcacctgaaacaacaacaatgtcgagcctcccaggagatgcaatccaaaacatcctctgccgattagaggtgaaagatctgctgcgttacaggtgtgtttcgaagccctggtgttccctaatcgacgatccacatttcatcaagattcatctccaacactccaaagaaaccgattcccacctcagcctcattcgcaacgatccagagctcaacgctatcgatgtggacactctgaactcatccatacgactcaatcctttcgacgagcgtgatggagtcgagattgtggcttgtgtcgatggtttgctgattctggcaaattttatcggagatatggctatctggaatccatccactaagaagtacaagaagcttctcgcttctgatcttaacgtgaatccatttcctgactgtatagtcgaatatggaatcacaggattcgggtacgactctgtaaacgacgactataagttgtttagaatgatatattattttgggatggatgttctctctttccacaaagagattaggctgtatagcctaaaaaacaacagttggaagaagattggtgattttccttacgaaagttataaaactcgtgagaatggcatcttcgttaacggtactttgaattggatggtgtctggagaatccacatcctatgagtcaatcataattgtgggtttcgatcttgctacagaggagtaccgcaaaatctcaatgcctgagaagaaagatatttatgggaaagagacttttcatacgaacatgactcacttaggggggtggctttgtgtggtatgcgtttacagtgtgaatgatacagctagccgtgttgggatctgggtaatgaaagaatatggggttaaggagtcttggactaagctggcaatggtgatgccttccagtgtgactggtcctttcgactatctctctccacttgtccacttcaagaatgctaatcagcttctttttgatcagagtggtgacaagtttatgttgtatgatctgaaaaggaattctgctaagagtgtgacaaccatttctgcccttaataaatgttttgactcgtttctttgtgttagaagtcttgtgaaagtttgtggtggtgaaaggggcggcaatgggaagaagacagaggacaatgggaataaaagaaagaagcaggggcagcaacttggtggaaggaagaggtaataatgcccattcactctctttttctttagtgttgtatatacataaaattgattattagtctaccaccatacatgaaatcattaattaggaggatttaaacattgttgttaaaccaaccaaacaactcatatacacatgatttttctaattcatattttggagagttcatgatctagttagtaaccaaaaaccaattagatttttttacttgacatcgttttggttagggatacttttctgtccactggattcaaattggtgttgtgaatggaaaacgtgaactgaaaagccagagccatagcccacaggtatcttttgctaaacaattatgttacattgtccttgtattgtgacttttttgtatcactagctcattataaactgatgaattgtaacacacatatatatattatatatgtatat

SEQ ID NO: 1862 - DNA, 502 bp, Cannabis sativa
aacattaactccaccagccgcatagaggttcttgaaaaacccattcaaaatagttcctttggctttctcactctccctctgcctaccattttcatcaagcaatactagaatttggtttcttctcttcctgaccaccgtagcagcatgaaaaaaagacgtattacgatcacctttggccaaccacagctccctagaacggtgtttccaaaggatttctcaacgacgcaaaatatccaaaatctcattctctactcttctttcctcatcaaaggcatgatcatcaacgtcactagactgaatagccataagctgagtctccaacaatttcaatttgacatcacactccccaaaaacttcctttttccacttttgtaactctcctctcgtgcactgcatttttgccaacagcgaacgattacaaaacccattaccagaccccttccaagcagcattgatgatatcgaaacttgaaatgtcgttgaaccaagcttcgtagaacctg

SEQ ID NO: 1863 - DNA, 1591 bp, Cannabis sativa
cttccacaagattgatggctttgaggtgtctttaaaagtgatgttaatagagctttcgttatctatgaaaattctagaaaattttttattcacaatctgtgcttctatcatcaaagggttattatgaggaaaatgcacatgtatagcatcatcttcgataaaaatcattggaaaattcatcatacaaggacaatgaacgggtgattgcactaagttgcaagtttcatcttgatcaaattcattcaagtaccatttttgtgcatttcaggtgcttctagcaatgtgtggtctactagaatttgtttttacgtgaccatctagtgcttgctgggctacccaggaggaaatggatttttaggactagaagctacagtaggtcttgttaccagggcattttgtaccccttcatggggcctatatttcaagaaccagtggatggcctgctccttgaggatgactgatgttctccaagaaagaaaagttaaccatgagctaccccctgttgaggatatatgactggtatccttaccgaattggatagatgtccattttttactaatccttcaatttcatcctttaagtagtcacactcattggtgttgtgccctatatcacaatgatatttacaactcttatttggatctcctttttgtcttttgcccttatacattggcggaggcttcttgtaatggaccatgttacaagtttccttataaacgttctctttagtatagacaaggcgtgtgtactcagagtatcttgattcttaagtcttccctttctttgtagaattattttgacttaaacccttggaactccttttgctctgtgatttggttatattggactctagagcttttgctttattagctcatttgtctaggagctgcactgtatccgatttgtaccactcaaaaaatttagcatgtgtaactgtctgcacggaagcacttactccataaatttcagttgtaaaggtggctaccggagggaaaatttatggagttgtcatctgcaaagtctgggtagttgatgtgtcagtggaagctgctggaatcactccataagcttgagcgtatgaatcctccaaattaatgaatccttgggctcttgacaaaaagttagtcaatgtttttgctctcttatggttgagttctccccatagcaaagatcttgtggttaatccttatgtcaaagccactatcttcatatcatcagtcaccttcatttttatagcaacatccatcatacattgtttgtcaaaggacttcgctgctataaattactttttgaacattccttataggtccctccgattgtggatcaatctaggagataaccttttctactagtcctccttgtatttggttcgagtcaatgaaaagcaaagacactttgcatcatcagtagcctatgcaacttacatcattcaatttattttgataagtagtccataaggtttgtccttccaccataaaattccatctgaggcattcttaagctctatggttgtggtgcatctatgatccttttcacgcaagggtttgtgtcttcttcttcagaattagacatagttccatttatctttcta

SEQ ID NO: 1864 - DNA, 1963 bp, Cannabis sativa
tttttttttttttttggtgttaagtgttaattaaatcagttaagtggtgttgagaatgatggggtttgataagtagaggagtagatgttcttatatatatgtttcaagtctaataatatgtcgtgattatatatgtgtaataaattataaatgttataggttttgtcgtaaatatttctttaatgatacaaaatagacagtgtaagcttagtaatttttcgtaaaaaaataaataactgaaaatttaaaaaaatataccaacagtaaaataattgagattaaatattaaattatacactaatataataatttttagatgttggatactactattttttactatcatcttaactagaaattattatatgatatagtttaatataggaaaccattaactatacttatagtgtgacacgttgttatgataaaattcgcacttgttatactaatataccctatcggcttcattattattgcgaattaacaattaaatatatatatatttatgttattttatagttaaaataatcagttatatatatatattattgtttatagtatttgagagtaagaaaaaaaaaatgtgatgaaataagataacgtagtatggggttttggttattttgtaattgttttacattgaatacgtgtcggttctagagctcagactcagactcttctattaaaaaaaacataatatgtaagttcaaagacaaacttgtttggctttatatgggtgtatttttacaccataaataatattatatatagaaatgtatttttatatatattattttgataaatattatattgcagcctgatttgccggacgagaggcagagagttgaggctgccggagggagaatcatcaactggaatggctaccgtgtcctcggagtactcgacacttcaagatcaattggtatgtatatatatataatatcatatcatacataataattttagatattatagaatctatatgtattaattattggatgtttgatttcaggggaccattatttgaagccatttgtgatatcagaacctgaggtgtgtatatacgaaaggagtgaatcagattcattcctaataatagcaagtgatggtttatgggatgtaatgacaaacgagtttgcttgtgaaattgttcgaagttgtttcgatggtaatttcacaacaatgtttcccgataatactaattttgtcccccaaactattaccactactccgaccacagctacctctgcttcagaggcagctgctttgttggccgagctcgccatggctcgtggtagcaaagataatatcactgtcatagtcgtcgatctcaacaaaccatcaatatctaataattaattaaattaattattattattatgtttttaagtagaaatagtgccacgttaattaggatggttgtttgtaaaatattcaagtttgtgcatggctctacgtgttttttttttctcttttatatgtacaaagagtttttgttagaagagatataatatatataacaatggggcatgcagtttaattaattagttgattttaaatatttgttctaaattatgatgttcttaattattcttgtctcaaaaactcattattcacatctaacacctgagttaatccaaaaaaacagcatgaataattaaatggtaataatattttagttgttaatccaatagataatttaataatttttattataattaaagtactacgttgacatatattttttttgtttaccaaatgaatttgaaggaaaaaagattagataataatgattctacaatacaaaagtatcaaccgttcactatattatatttcttcttaaaatatacaaaattaataataaaatcaatataaactgcaaaaagaaaaacattatttgtgtttttgttacttttggatggaataggaattttaacactttaatataaatttgttattttta

SEQ ID NO: 1865 - DNA, 959 bp, Cannabis sativa
ctccaccgccgccaccacctccaatgcgcggggctccaccgccgccaccacctccaatgcgcggggctccaccaccaccaccacctccatttagtggaggcccacctcctccgccacctccaatgcgtggagcaccacctccacctcctccaccaggaggtcgggctccagggcctccacctccaccgagacctccaggtggggcacctcctccacctcctcctggcaccaaaggagcaattcctgatgcaagaggcctatctttagggagggggcgtgggcttccacgtcctatggggatgggggctactgccactgcacctcgaagatcttcattaaagccactgcactggagcaaggtgacaagagcattgcaaggaagcttgtgggaagagttgcaaagatatggggatcctcaaatgtatatcaactcctgttgctgtcctatcgttctattattatgaattagtaatatatttctattttttttttcctttgagaagtatcaatgtatccaccggccttaccttgtttgtttaaattctacccttcttaatcagtaatattgcttccttttgttttagtgctccagaatttgatgtatcagagatagagactcttttctctgcaacagtccccaaacctgctgattcagggggaaaagctggagggcgtcgtaagtctacaggatccaaaactgacaaagtgcacctggtaatcgatagaaattgaatattttgtctagcatttattatatttatatttattttataaaagttcgcaagtattattgagacaactcttgtttgtcaaatgtgattctttttgttgtcctaccacgtatgtaatgttcgtgctttttctgggttggttacactgtttaagtatctgaattcgcttctactttttctctccccgtcagtcttgacatttaaaatgtatgatatatatatatatat

SEQ ID NO: 1866 - DNA, 1388 bp, Cannabis sativa
ttttttaaaaactaatctaatagaatgaatgacacaggagtgttttattctgtttatgacagatatacatacttgccatatgatgttttctatttatgttttgaactgtttctttaatttaccgtaaatggtttgccaaataagaggcttaactctttacaatgacaagtgctattcgttttagtttactttgaacgaaacattgcctatccattttactttccttccatatatagaagttgggcattacataaaaatacacacttgggctctgtatgtatggttttctacaaaaacactcaaaacaagggaatcagcctcgaatatgggcctgagatctgtcctgttgctctagatttcaacagagtcttcaaaagcctgccaatttgatgacttgattcaattatgactccgtagtagggccacgaatttgaattatggaggtcagattggcagaattattgaaggaaaacctgattggaattcccatccatgtcagagtaactgtggctaaacatgaaaaatgctaactatatcaagtcttaacattggccactaagttggctaaaacagacaacaaagggaaactcaataaatttcaagccacatttcttagataagcatatcctaatttggctgtcttaagtcttgtcatgccaattaagacttattaatgatcatatcactttatagagataaaattcaagatgagatttatttacattgttgtgaaataagtccattttttttattagtgttaaacaaatgtgaaagattgtaaaatatatcaaatcctcaaacagagaaccaataattcagcctgccaacttgcttatacttcctttctgaaactaaaaaaaaaaagtttgaagacttggtatatcatattctagctaaataagcatgcatttgcagaatataggaggattctagaagcataaaaaaaaaaggattacagcataattttgtacaataacaaaatatacctatagacatggaggacaagagcatttgcatttgcatttgcatctgcaagaggggcaatcagggcatgaacaacaagaagtagggaataggcagcaacaacttctgttgcatgacttctttttacagcaatttggtcggggacacgaacatgaacaacgagggcaacgccattttggtaacgagcaactgaaacacgacgggcatttacaacaacaacaatcacaaggactgcatttacacttgcagcattgtggcatttcaaggtttatggagcagcatttagaataacagcaacagcaaatccatgagaggttaaaacaggggaagccactgcataaacagcaatactatgtgttaaaaaatggaagtttctatgtttcattctgcttctacaatactaa

SEQ ID NO: 1867 - DNA, 899 bp, Cannabis sativa
tacctttcttcaacctacctatgaataatatgcctcaactaccggctgacggttggaacggaaactcaaactctggtcggcagccttattgagggaaacggcatcgtttaccggattaggtctattactactacaaactgcagatttgaggtcagggaaattatatatataaatatccttctttcttttctagttttctctctgttagactaaatatataatatcccaaatctttgtaaaattagttcctatctctcttctcttctttaacttttctctcatccaattatattttgtttgtttttgtaacttttaaattgtttctgatgagaaatgctttagtgtttttgttgatgatgatcttgatggaagtcccttagtatccaagttaattaatcagatttttatttctgtttctttttcatgatgatttatttataggctttttcttaaagtattatatatatatatatatattaataaattttaatactaatcttttatacatatacagagatagatttccataaataaattttgtatgttccgacaatctatccaatgtgtgtgattcctttaaattaggggagcgacttggaactttgtttactatatatataaaatgtgtctgctaataataattaatcattattcaaagagacataatataaatatacatgtaattagctgcatatatgattttattatgtaatttaaagtatgtataaattttttaaaaaaaaatgtgaaggacaactaagctgacccaacttcaggaattcttctccaaaaataagttttttaaactttctcaaacaacataaaatattggtactctgctttagccgcctccctcttacattacaaaattaaagcatactatttatatatatatatat

SEQ ID NO: 1868 - DNA, 1789 bp, Cannabis sativa
aaaagccttgctcatatccaatttcagagctgcataacccattcggcctctctttttatttttaaggcagtgtaccaactaaaaagcaaggagtacattatctgtaataagccggtttggaaggaatgcactttgattttgggaaatcacagatggaagagtttctttaaaccttgcagctatggctttagagacaagcttatataacactgagcacaagctaatgggtcgaaaatctcttacaaattgaggttgatcgatcttcggaatgagggtgatcaaagctgagttgataagatccatatcttgaccatcatttaaaataacaagaagactttgagtaaccaaaggacccacgatatcccaatgccgttggaagaacatggcagacatgccatccatcccgggagaattatcaggagccatggaagcaagggcattttcaatatcctgggcagtaaaaggttggagtagaaatgagttttgttcaggggtaatggctgtgtcaatcgtggaaagaacatggtgtaaggcatcgtcatcaattccattagaagtgaacaggttggagaagtaatggactactttagcagctatttcttcttcagtttgcacaatcccaccgttgcttgaatgaagtttcttaattttattacaagcatgccgagatttagcccttgagtgaaaaaatttagtattagaatcaccgctttgaagccaatcgacccttgcacgttgatgccaatagagttcttctttgtcaagcaaatcatctaaaattttatctgcatcttccattctttgtaagtgatccgaggagttatccctactgttatgaagatgagccgaagctttgtgagccacagcaatgacacggctcatactaccatatttagaagagtgccaactttgaagagcattagaacaagctgcaatattttgcagcaaaaccgtagcagatagactgtttggaatgtcagaccaatgggcttgaataatgtttctgcaatccggatctttcaaccagaactgttcaaatcaaaaatgagttttcctcttgtgattagtctcagtcatgctatgtgtagagacatgatattcaatggctctgtgatccgaatggtagaaatcaagatgattcactctgccttccatgaaaaaatcaatccaactgtcatttataaaacctctatccaatctttctctaatgatgttcccatgatgatttttatttgtccaaggaaaggaatcaccattaaaaggaatcggatgaagagcaccataatcaacagttgctctaaaattccccattaaaagatcattacgagggggacccccatctttgtcatcattgcataaaagctcattaaaatccccaaggaccaaccaaggaagggctgaatcagtagaaacaaagctacataaaagattggcagtattgattcttaaatgagattccagagcaccataaaaccagttaaatgaaattggtgacaattatccgacgagaccagaacatcaaaatgattcattgaaaaggagttaagagctacattcacatgaaccttccataacaacatcaaaccaccctttaaccccatcctagggacttctagttcattactgaattttaaagaacaacgaaaacgatcaacggaattacatttcaacttagtttccataataaaaatcataccaggttgctgctctttaataagcagcttcagatgcctgaatgccgaagggttacccaaacccctggcattccaacttatgatcttcatggctg

SEQ ID NO: 1869 - DNA, 2036 bp, Cannabis sativa
attaatatttgctggttgtagtcttacctatcaagttctcaacattgtttgaaattgtagaattaattggacatgctacttaaacttgtagaaggagaaaataggaactactctctatacatgtaaactaattgtaaatgttatgcaaatttaaatctatgtataaatatacttcttaaactaaacattcaacaaagaaaaaaaaacaaattcaacatggaattcaacattgtctcaagagagttaatcacaccatcttcccaaactcaccatcttgaaccttacaaactttgtcttattgaccaaatttctccaaaatattatttccctgtcattctcttctattccaatagtgatgccaaactctttgacctctcaaaaaccctaacccaaatgaaaatatcattgtcagaaacactcaacttgtattatcctttgtccggaagagcaaaagatgatcaatacatagatgattttcaagctggtgttcctttctttgaagccaaaatcaattggcaaatgtcagaattcttccaaagagaaattgagtttcataaccaattactcccttttcaaccatttggaaaaacacccaataataatattcctccaattgccttccaagtgaacatatttggttgtggtggaattgcacttggtattgtcttctaccatatgattatggatgctgcaacaatgagcaactttctcaaatcttgggctgctttttcttcgggttcaactcacaaggtaataaaccctaatctcgttgaaggaactattctttttcctccaaaagaaattgattttctcaacgactacacatcagtagtgaatcgcttctttttcaatgagggagagtatacggccaagagatttgttttcgccattgaatcaatacaaaccctaatagagatggcgaaaagtaaacacgtaccaaaccctactcgtaacttggctgtcacttgtttcatatggaaacatattatggcagcatattgggctgattccgagcccaatgatcttattacagcttgccaagtgatgaacattcgtccgcgaatgaagtctcgccataatggtgattcattagatggtgttgtgggaaacttagttgggcatgtaggctcagtttttgatcctaataacgaccatcaaaatgttaagaatagttctgacattaagttgagtgatttggtgagacgactaaaggaagccatggaaggatttgaggactattttctatgccaagtgaaaaaaggtggtgaggaggcttcatctgagatgttggaacaagtagggaatctgagtttattggataagttaggaaagcctaatcacttcatttcgttcaccaattggaaagggtttttcaaagaggttgattttggttttgggaagtcatttaaggtagagccaatcttaggaaagatcatgagtaaccaatgtggaaatatggtgatattggttgatgctgatcgatggggtaaaggttctatggaagtctttattatattagaacacaaacaagtgtcactattagaaagagatgaaaattttttagcctttacttctaaaagctcctaactaatttaatatcttctagtaataaatgttgcctctatatatatctaaataatttgtactgtttagtactcatgtcatgattagtattttactattcctataattaagaaaaaggttgtgtgtgttattttattacaagctagtatgaattattatcttctagctagaatctagtcttccctaagtttatttcaaaagaaatggtaaagatactcttttttctactttctctttctttagatgacaagtgttatatagtttgagtactaaggttaaattttggttaataattagtaataatactctaatattattacaactaatggcgttctaacttaaaacgtattataataaatgcatttattataatcggatcattacttctgatcctttttctcttttaagaaaatcactatacttcaaattcagtctactcattcgaccaacat

SEQ ID NO: 1870 - DNA, 1651 bp, Cannabis sativa
cttgcaaagcaagcttggcgtattctcataaatcctcaatccttggtttcaagacttctaaaagccaagtatttcaagaacaacgatttcctttctgcttccaaaggtcactctccttcctatacttggaccagtcttttatggggtcggcaccttctatctaaagggctaatttggaaaattggcaatggtgtttcgactgacacactccatcactactgggttcctggctttaaatctcttacttacaaaacccccgtttctccccctatctcaactgtatccttttttatcaaggattcagggagttgggaccttcaaaagctccacacttacttcccctatgacattgtgatggccatcctcactatcccaattgacctctctcaaccagacaccctgatttggagttctcacccttcaggaaatctcacagttaacacagcctatcacctagctttatcctctgcctctttcaatacttctgctccctcaacctccaatcgggatcgatctaaaaaatggtggaaaactctttggcatcttcccatccctcccaaaatcaaacattttgcttggcgtgcttatcaccatattcttcccacttcttctaaccttttctacagaaaaattattccttcccctgactgctccttctgttctcatggtctagatacagttactcattccctcctaggatgttccagagctagaaaaacttggaggaaaacaagtctcgttgatttttttaatgctcatcaatttaaggagattaaagactttattcattcaggttatgagtccttgtcaaaggatcagtcgtctctttgttttactttgttgtggaccatttggaacagacgcaactagactcttttccaatccaaaacctttccaccggatgatgtcgaaggatatgctgtcaacttcttgaaggaatacacaaattgctagcaacaacttaccacttcaactccaacttcatcagccgcaggctctcaaccgccatcacccccaactggcaggcactccttatattctgatgcagctatttcaaaatcaagttccagaatgggcttcagtgccgctgttcaagactggaatggccataccattgctgctttttgtactccgaaaacaggtgctctctctcctattttggcgagggtcatgcacttctccaagcaattcagtggtgtatcatagttgaccttcccttgcactacattcattctgactgtttggaattggtcaacaaaattaacaagcgttccaaggatagatcacctacatctgacctcatttggaaaatcattgattctttatcttcttttcctagtgctaagatctcacatgtttctcgcaactacaatgtaaccgcacacactttagcacaaaaagcactaggaacagatagagatttaatttggaattgtaattccttcaattccggtttcatctgatcttgtaaccaaaatctttgatctcatcttttaatgttacaaatcactttctcaaaaaaaaaaaaaaagaaaaaagaattattactcttgtaataataaataaggccttgtagaatcaatttcttcaatcttcttacatttgaaacagaccaccagtctactagtggtagaatccgcaggcaggtagg

SEQ ID NO: 1871 - DNA, 1502 bp, Cannabis sativa
ctctctctctctctctcaatagaattgaaaccttttgactcatcagttgaagagattccccagatctacagtgaaacttttaaccattttcccactttcaatttcttcttcttcttcttctttggactttagaacaaatcttcagtttcctaattgtgtgttaaaaaggttagctttttttgtttgtatgactttattgaatctctattttgatcttaaatttcattactttaaggtttcccttttaatgatccaaattcaggtttggtttttctaacatgttttctcatcttagtttcaatcaaatgcaacataatgtgttataatatatctatatatctttgttcttcaggtaccaatcttgttccccaaattgcagaagaattgaatgaagatcagagattattgtcattgaatgaataagaacactatagttttggttaaaccagagaaaattatagccaaaatttggtgttattgttgttattttgagctgtttttaggacagtacatttgaatgataccatcagttaaactttcatggtttgcaagatggaggagaccgataatcgaatcgaagaaatggacattgaaatcctcccttctatgtggcctgaagatattggatttgatgctggaaaacagttcaatgtagaaagaccaggacaagatcaagacatgttagaagaagttacaataatggaagaaccaactatagttgatttccaaagacttatagagttaacaaactatagcgaaaagggttcatctcagttaacttatcttgttaaacattgggagtacaaacaagccaatgctgtaagattactaagagaagagcttgacatattaagtaaacaaagagaagaagttgagttaaagaagttagagattttagaagagcatagatttgaagaagatagttatggtgataagcgtcctatttcgattttagatggtgtttatgacatatggccacctattcctcgtgttaaaaatgatgttgttgttcataataagagtgttgagattgatgctgagtatgatactgttgtgtattggaaacaaagagctttgcatttagagaagcttttacaagctagtgttgaaagagagaatggtcttgttgagaaattagaggaaagtattaaagatcttgagagacaatcttcacctgttgaagaattatctcagattttaaaaagagctgataatttcttgcactttgttcttcaaaatgctcctgttgttattggtcatcaggtaagaaaaaaaagtgtttaaattatgttcttgaagcaaaaaaatcatgttttggattatacccttttgactcttttgttgaaattttctgttataggacaatgaattgaggtacaggtttatatataatcatttcccaagtttgcaagaacaggtaatttcagttgaaagtttggtaaagaacaagattcttggatagtgtttttggtattgattttttatgagtttttttttttttt

SEQ ID NO: 1872 - DNA, 772 bp, Cannabis sativa
gaacgactgtccactctcgctacaatgtggtccgccgctgtgtatgtgtgaacatgatgttacattaaacaaatttagtggcaacttggaagaaaatggtttttataaaatagtgtagtcatgtggcgagactcatttaactcaaggccacgaattcgagagataatactaaaatcagactgtgtgagatgtgacctgctgggagatgaaccaagtatatataaatatagtctatatagaaaatagaagctttaaacattttattagttgaaaaagaaaaagaaaattaaaaggatgataattactctccaacagctctgtcaccctaaaattctattattcgttactactagtgggcccttagattaaacattattaatttattatatgctcctcagctgggaagttgaaaataaattaattatgcttttcccataccagcaagctttttttgagccataaagagagtgtgtcacgtataatgaagcagggcatgaatatcaataactggggttgtgatttttaaagctcttgatgatcttttagtggttggtaggaggacactacattatgtgtagatcaaaagagtatgtaaaagatttcttttaaatagtatatctaccctcataaaaatacatacatttatttatatttctcttgtactaaacactaaatacagtaatgttcattgttccgaaaaaaaaacactacatacaatagcatatacaactttcatgctaaagggttatttatttatttttaaaaaggattc

SEQ ID NO: 1873 - DNA, 875 bp, Cannabis sativa
  modified_base (236)..(253): a, c, t, g, unknown or other
aaaaaaaaaaaaaaaaaatttgacctgatgtcaaaataaacaaatagttttgccaaaaaaagtaaagaaattaattgtaaaaattaaaacataaaaaggcaaatataattttagaaaattcagtcaaacattcataaaagtcaaaaccaactttctgaaattaatagcacacaaacaaacataatcaaaatataaaagaaaaaaacaaagagagaagacgaagaagaagaagaagnnnnnnnnnnnnnnnnnnaagaagaagaagaagaaggaaatacctcttgaatgtaagcctcgatttcaggtttggatagatcggaatgaagagctttgaggatttgaggttcgtgagagcttatgatattgataatagcttttaactgtgaaattctccattcgtagcttctagtcttaccagagccgaagctcactctcagttcttccgccatattcaatgcatctttgccttcgaacaccgtcatttctacactctcagccatccaacggtccagatcaattctctccgatcagagaggtgatgatttgatggtgattttaatttgatcttttttctttcagtgagagagaaacagagagttgttcttttcttgtgtatatgtgtggatatataaatatatttattataatacggttggagaaaatgatgccatattgtctcactctcacatatatatgtttgttttcgtactaaattcttttctttattattcattattggtattaatttattggtttgaaaatgatttatatagatatggataatacaaaatattttgctaattttgtttttgtttcctatgtatattcataactattatgttattttaattttggatcaaaactattttaactat

SEQ ID NO: 1874 - DNA, 1093 bp, Cannabis sativa
tcccgaatacaaattgagcatatcattgcaagaaccagcatcagggtgtccggtcttcgaaagagcctgaaatgctacttcagcagaagttaaatctttcttcataacataacactgcaacaaaacaatataagcaaatcttgataaccaaatgtttctagacttcattagttcaataacttctaaagctttcccgaaatcccctgaaccaagatgaacttgcgccattgctaaatatgttttctcatcactaagtaaaccgagctgtttagtctcttcaaacgctctacgagcatcttcatacaaacgaagctttccatatatcctaatgagtaaaccataaataacttcatccgctgcaattttatttcgttccatctccgagaagagagacaaggctttagaataatcttcattcttgtaatacagtgttaatagagaagcacatgtatagcgactcggtactaatctctgatccttcatgtcatcgtatattctaagcgcttcatcccacttaccacgtttagtacacaaacttattagctggctatacgaaacctcttcgggaacaagcccaacactcctcatctcatgaaaattcgtaagagcttcctctaaacaaccctctttaacaagtgaaccgataactacagtatgactaaaactattaggaaccactccttgttccatcatttgctcccaaacttcaatgacatttcgatgtagtgacttcttctgcaacgaggacaacatgaaattgtaaactgcaacagacattacaattccccgttcgcgaatagcagagtaaaacgaaagcatagccttatgacgaccccatctagcatatgtacataacatggtaccacaagcaacttcatctggctcacatctagcttcaagcatctccaagaaagtatcttcagccatctttatcttaccaacttgcccatatatcctcaaaacaatggtgtacacaataacacttggccggtagcttaactgttcaagcacaaatctatcactaaacagcattaatctccattgatttggaaaatcaccaaaagcataataaacaaaaccaaccactcaagat

SEQ ID NO: 1875 - DNA, 2212 bp, Cannabis sativa
aaaaagctcacccgaaatctgagaaggtcctaacacgtcaaccagtttgttgttttctaaattttcaaaccttttgactccctctggctgtctctatcaacctttataaattagatttatgtaaactagaaaatgaacctcgttatttgtgtcgtaacgttcttctcagggaggatgtggggagaacgaagaagctggatacaggggagagtttctttttgaaaaacagaatgaagaatttgatggaaaagatctcacctttcgaaaagggtttctgggttttcgagtttaatccttaagctttaatgggaaattgcttggaaggtcgttctaaagtggataactctctcagttctcgaacaagtacttctggtaaaattattgaacccagttcttctttcctttctttgctatatatattgcatgcaataaaagtggttttcttttattgttattatttatttcattgggggcttgaaaatggccaactttatgtgaagaatccttattcatatctctatacattttgtattgggtttattaatgaaatgagtttttgacattttgttatttaagtatcaccagtaagtagtagccatttgttttctattcatgtagtttgtattggttgttttagagaataaacaaaaattcatttctcttttcgctcaagagttgtgcttttcagttacagaaagttgcccagatgtctttcgtattctgtcttcattcatgtggtgtgctaacataaatttttttttttttgtctaagaattatcttgctaaaatgaaaataatgatacatactgtgctgtgcgagtaaaggtaaggttcaattgtgtcaaagtttacaggtttatactgtttggataatgaagtgacactatacttattggaatttgataattttttcctattattttagtagctacctttataaattaatttttgcatttaatgattgtttatttgatttgaatgcctttctttctttttttttctttttcataacaatcaatttgaatgcctaatttgaaactttgtttttagtactatatataataacagttatggtttaactattggaagagagaggctcaggcttctctggttaaatgtcgttttggagttattcacactattatgtcatcaaaagcaaagaccccgcctagagtgtcctgtttctccatttttttttttaaagttctggtgaaattaatttgttataattgggtggttggtcaaggtacaactgacaacttaattgcaaaaaacaaattgtgataactcataattaagttcacagttgtgcttgcagaaaccttcaattgcaaaacatttgattttatggtgtggtggttgtaatggaggtttagtaggatggtcgtcctcgatgcttgtaataaatgtaattcgcgacatacacaaagacattttattttctgcatatatttggctgacatggtgtatatactagcatcttggaatgattttgattgggaaatataattcttgtggccaagatagtttggcaagaattgtaggaatagtaatgcagtagaaatggaagattggattactttcttgaattctatgatgatgtccttactttcatagctcacatcttagatgcaaattagtaggctctaaaatctttgattttcttgtattgacttttcagaacttgaccaaacacaaggttttgtttttttcttaacattaattcttccactggattgtggcaaaatgtaaacatctttgatgttcgttgacctctgtaagtcttaatgtaaagtgtgggttttgttctctctttatgtgtttttagtatatttatcttaaaagacataaacattcatcgagatgaagccaaaggaaaggaatggggagaaaacttagataagaaagaacatctgaagaatataggttaaaattaatagcatggtaagtgatttgtgaaatcttaaacttcattatcatttcataaaggagataagcagtcttagtaggtgtgcgccttttaaccttgcatgtttcatagcagttagaactaacaattgacagatcactaaagatagtttggaaagctatgggcctggaaaaacattggccaatatgacacaaattagaaaacgatcattggaaattttcctctataggaccattactgtagactgtagagtgcatataacagcctagtattggacctatt

SEQ ID NO: 1876 - DNA, 1517 bp, Cannabis sativa
tatattagttttgtattccataaccccttattacaaacttaagaaaaacaaaatggcaactcctacaaagcgaatggatctctcacagcatcactcttgtagggaactaacaaaacgacacgattccaactaacgacaatatgctaaaattaaaaaaaaattcaacaatattcagtttccctctgtgcaaagatgatctcatattctcatgatgccaacaaacagaatatatttataaggggaagactacattgagagtttaccaaaaaaaactcaaatggaatatatctttaacatttagatgaactgattctatatctactcgccaaaagctgtcagcaattagtatggaggttcttccttaaaggaatgcaccctctctatctttgtggaatcaaaaatggaattcaaagccgcctccgccgccaccaaatccaccaccaccaccaggaaagccgccatcaaatgtaaatgtgtattgctgtcctccaccaccaaatggattaaagccaccacctcctcccccgcccatgcccatatcttcaaggtcttctcctctatcgtatcttgttcgtttctcttcatccccaagaacctgtgaaggatgatacaacatttaagataaacattttgatgaagattgcatttcagagtgaaattgtaggtattcaaacctcatatgcagcagcgatttctctgaatttcgcctctgcttcttctctgttttccacatttttgtctggatgccattgcagagcaagcctcttgtaagcacgcttgatctcagaaacagcggctgtctttgaaactcccaagatcttataccagtctttgcgtttgctcatctttaacgctttctcagctctcatgtaagcttctcgaatattcatgtcctgcaagaatggaaactaattaaccttcatgcaaaattaactagagctaaagaaatgctgacctctgattctgaacaaatttgcccatgaaagaaatggcaaaagagctaacctgagatgattgttgagctgctgatttcagatcttcaacagcaccctcccaatcctctgtcagaagcttagcttcacccctctgagaaatagaacagccaggtatacacaagattagctatatcaaacaatatcgaacataagcaatggtttcattcatgcgatccttatgataagttgttaaaaccaacttacctgaactaaggcttcgaggagttccccatcaatattaagagcttcgttgcaactgcttagagcatcctttccccttccaagcttgaccaataccttacacaaacccagatgaagatgtacattatgagcaagatggttagggtccaaagcaagagctgctttgaaatcctcaactgcaaccctcaactttcccttatttgcattatcttctgcctgcacaatatcaataccaagaatttataaaaaaataaaaactgataaattatccgtgcagacatatgctgtaaaggtccgctatataccaaaggaaaagagaaa

SEQ ID NO: 1877 - DNA, 4260 bp, Cannabis sativa
aaaccaaaataagtcaatgtaactagggagaaatttcttacaggatttgagagctgctcacgaatataggccattgatctcagcatggcgcctaatgtatccttggatacctggaatttaacctctgactcccctgaggttgtttcagtgtcttgaagctgagcaagcagaaatttcattaaagaatgaacaaccagtacagatatgcacaatagttcaaagatcataagaaacctcttatcgataaagagacagccatcagttattttataatgaaaaatatagaaaacaagctaagaacatctaccatgtaatctgtcacttaggaagggaccactacacataaatgtatcgagctatctcattataatccttaaagacagtcacttttttttttttgatataataaacctggtaaaaaaaatcttttcttgaaggaaaatgaacatggacaatataagatttcagaaaatagcccatagacaataggcatgatgggaaataccatttaccttcaaatttatgacagcaaccttattagctggtgttgatagctgttcacttatgtaggccatagacctcagcatgggttctaatgatactcttgaaagttgaaacttaacctctgactctgctgatggagttctactataatcttgtaactgtagcagtaaacaattgaaataaataagtaaataaatgaataatgttctagacctgttgatacataaattgtagatacaatattaaataaagtgagataaaataatatattattttagcaccctgttttgcttaaatccctacttacatccctatagtttcaataataccaaattataccattatatttgacaaaatactcattgagcttagtttttgtcaaaataaatttttatacaacaataataccatccatttatttacttcatatatataaacattttataaaaatatatatatatatttgatttaaaattaaacaaaattgtttttatagaatattattcattttttaaaataaatattattttaaataaaaaaattgaatagattacaaaatattttaagaaattgtttttcataaataaaacaacactacagcgttattcaaaagtaaaataatatacagaatatttcaaaatataaaaggtatttgatgtatgcaaagagaggatatcatcttattataattaattctgaccaaaaatttgttcaaaggattttatactatttggtaaatcccaagtgtaatttggtaatagtaaaatttcagagatgtaagtagatacttaagcaaaacacaaagaggaaaattggtttatataattataaatgaactgatatctgggcactcaaccctggacaagggaagggaccaatcaaattaatgtgattaagttgatacaaatattccctgtttcaaggttttacttcatcacatgtgcaatacctttaggttaatgacagcaactctattcccgggtgttgaattcttattttccatcacccaagtcattgactttaaacaaggaagtacaacctacataaaaatgagcaaaagcatacatttctaatcagatcagatatgttaaaaataagaaacaatagagcaaataatttatttccataccatattttcaggagtaccatcatctctgtgaagagaaactgggcccatacgtggcaaattcaaatcagcaacagtttgcagaggagcactagcatcattaagattaaaacgtcttaacacttcatcatggcgtggccataacaatggagttgaatctgaagttaaagtagaatttcttctatcatcgtaactttccgtgcaaggaggtgcaactttagcagcatttttcttagcaataacaattttcttcccgccatctctaagggcattcattgcagcattgtaagtttctgtagcaatggcaccttcttcagcatacctaatggcttcccgacataaattattgtatcgtaatgtaagagactcgtgagcatgtgaatcgccactgtgttcgtctatgccagctccactctttgcatttctcgtccaacgttttaaaatgtaagccgaaggcaatgtaagtacatttgagacagtgaaaacagtcaaaacatgtctacaaagaatgcctgaatactcaaacatttgacaactacagttagctttcatctcagaatagttcagagtgacatgataagctttattgtcatcctcaaatttagcaaccctgaaagtgctaatagctccatcaccctcaattttatttgcagtgtacacaaaagtttcaactagctcttcttggaattttgtgaaaattttccgtgtatacagattcgctgcctgtttttccataggagatggtgtcctcaacaccggtgtgttgcaaattgtatcaaaatcagcttctgtttccttctcaaaacagctttctaaagctctttcatactgcctaaagaacgttggtaaagttgtctgttgattcacataaccttcaaaaaaggaaccatcatatcctagattggaagatattgcagcaaaaaacgaatctcgaaaatagacaggaacccatttatcacgggcgttatacaatgtcaacagccaatcatttctcctgagatcatatttatcaatgataaaattccaagatgattcaaactcctctatagtttcagttaaattgatacagttataaagttctgattgaaaattaggatgagcatgacaaacatgagccaacttctcctgaccttctcttaaaacatgccacttgctaatacgatgtcgagattccggaaaaacactagcaactgcagtctgtattgctctgtcttgatcagtggtaatagaggtaggtgggcaatcattcattgctgtaagaaatgtcttgaaaagccatgtaaaagtagcttctgactcatcaagaagtaatgcacaaccaaacaaaattgtctggccatgatggtttacccctgtaaatggagcaaacggcaccctagactgatttactctataagttgtatccagagttactgcatcaccaaaatgactgtaagcagttcttgaccttgcatctgcccagaatacattagtcatgcgattctcttcatcaagttgaattgcatagaaaaaaccagggttctcagcctgcattttcttgaaatattccagcaaattctgagcatccctccctagggtcctttttcgattgaaaggattaacagcatagttcatggttgcagaattctttactgatcggttgaactcagttggactatgcctaactccactatttttctctgcagaagaacggtttccatccattgatacaaacataaccccactaggaacagcccctgtcccttggtaagcttcagacacggtctttgcagtacccacaaaatgcctacgcggcctaatataatgaagtttgttgggattaaccaatgaatggctgtgctccttcacaaattttgttacaacccacttatcttgaccttttaattctaccttaagcattgcttcacaactatcagcctgccttcttaccccatctctgccacatataaattcccgagaaatgatcgacccatcagatttagaacgactagatggaccagctttagagtgaaaaccaacacgtattgcatactcatcataaaaaaatttggcagcatcctcagaatcaaattccattcccaaataaggctcaccaatcccatcatcatcatcatgaactgtgatagtttcagctgtacttgagtctctactcgcattgggttcggcatctccatcatttgccattgcacgatgactcatcccttcaacgtcaatcacatcaacatccataacaaatgcaatgtaagaatcttgttcttactttttcattcaactaggaggcagagcaccccatgttttttactctatttaagtaaatgtagattcaatctgcaacagaaacccaactaccaaactcatcaacaattctctttaaaaggttcaactaccaccaaaacggtttaacagctaaaaaatgaggcaatgcctataaaaatctgtagagggttatattacaaaacaagagaaaatgcaaaaccgatcaagtgtaaagtggttgctctcaaaaataaataaataaataaaatagagaaaataataatgaacattgaaaagcaataataagcttcacataaaactattgccttttaaaccaactatacatacgtctttatcaacccaaaaaaaaaaaa

SEQ ID NO: 1878 - DNA, 683 bp, Cannabis sativa
ctctccctacttcccccacagctcagccaccacccacatctaaccttcctatgattactgctattaattctattgtttctagtgaaaactgtgacaggtctacaaccaacactcacaacatgcaaactcgagatgaaagtggcattaggaaattaatcaaaggttctaatggcatccctatatcctaattctgttaagtctgcaatgcatgatcctaagtggttcaatgccatggatactgagcatcatgctttgactagaaacaacacatggaaggttgttcctctacctcccaacagaactcctattggttgcaaatgcaactgtaaaatcaaggaatatgttgagggaaatgtgatcagatataaggctaggttggttgccaaaggatttcatcaggaggctagttttgactacaatgagacattcagtctagttgtgaaacatgtcaccattcaaattattctcaccattgccataactcacaattggaccttgaggcaactagatattgacagtgctttcttaaatggggacttacaggaggacatatatatgatacaaccacttggctttgaagacaaacaaaacgccactcatgtatgaaatctcacaaaggccctatatggactcaaaaaagctcctagagtctggtttgaaaagttatctgttgtgcttttaag

SEQ ID NO: 1879 - DNA, 2836 bp, Cannabis sativa
atttttcaacttatccctaaaatgtgctccaaatagacaatgtgtttttccaaactcacatttcttcaaattggcatacaacttatgttgttgtagtacttcacaaatagtagctaaatggttttagtgacttcccacatattggttgtaaatgagaatatcattcaagagaatagaagacgtcattcacaatgtctgttatgagttcgaaaagtcatcaatggcgaaggccagttttatggtaaagactcatcaagaagttcgttaatcatgaatattttgttcaatttccccttcctgaaatctgtttttttttttaatttaaatttacattctgtttgtagttaaagctattatgatacttgtaacttactggtaatttctacaatatataatagtaacttattattgaggtcactgtttggtacaaattctgcaaaaaaacgttctcttcctaaattcttatataatcagttttctagatcaacacatgttttttcacatctattataaaataactgaaaagaaagagaaaagtgactcaagataatggttttgtgatcatcactagtaacaagagcgattcacatgtgttctatccatattatttagtagaacatgttctgtgttatatgaatggttacaattgtttgtatcataaaacaagacaatcttccattgaacaaaaagagggggcaaatctaaaataacattattacatgataaaaatgaataaaatcttgagaaaaaaatctcaattatggactccccttaagaatctgactgcattttaaaatcagaaaaggaaaaatatagtaaacctctaaagggatgttctgtttcagaattaggataagcaaaaattatttgaatattattttcggtattgtaaactatttaaattagactaaaaactttactggatactgaaaaaataaggatgtgtaccaaaatacctggtctactaaataaatttccaaaaataaattaatataaatgctacagctacccttgaaaaaaagtaggagaaaaaagaagcattaaagtgaaaaattaaggcattaaaaaaatctaagcaagatggcaaagaaaaaaaagaaaaagaagaagaaaaaactcagttaccaatcacaaaaaatgtggaacagagttgaatttagctgcttctttatggaattccatgtagtgttgtcttagcaattttttaagtggattccaaactcaagaaaccagttaccatggagtgatgcttggaatcatgaaactcttttgctcttgtagccaaagctcttctaataactgaagctttgagctcaatcgaagtgtccacaaaactagtgtcaccatgagagtgagaacaactttggtcaatgaaagagtgaccttcaaagtcaccaaccaaagctgaataatcttctctcattaacaaagcattatgaagaattgaacaagcaccaatataagcaacagcagtcttagcttcttcctctattggttgactcaaaacaccccaattcttcaaactagcaatggtttgaagtgcagagactcgaattctatggtgggatttgttgaaatgttcctcactggagccaggaatggcatcttcgaaaggaaccattaaccagggaagtaaaggataccctttatctccaatcaagaactgttctatggcgaccccattaaggtaaactggaggtgaattcaagagattgccttcttcaatatctttatgcaaagttgagagctttaatacctttgaatcactcttgttgcctcgaaatccagctacgatgctgagaattcttgaagaggagtcaaccaggatttgggcagcgattgtttcttcgctggaattgtcattctgttctttgattccattacctctgacgattttgaacctcgcgcaatcgatgacaccacaacaatttgggaaaccagtcttttcatttaaggcggaagagactgattcaagctcattggggtttaggaagttgacccagaaacggaaatcagtgcagagaaccctacataattgtttggcgcagaatctcgcgacccattcggaaaccccgaattgagtagagattgtctggtaatcggagccggtggctagtcggaatagaccaattgcgagacgaagctcggcggagaggttgaggggcgaaccgaccgggtcacgacaatcgagtaacggttcgagagaaccagggagccactcgaaggtctcggaggtcatcttaaaagaattcctgaacgaatctgggctccgaaggggactatgtcgaacacttcctggtgaaatttcatctccagggtcggaattcaggtctaagaaatgggttctctttcgtttgcgggaaacggcaaaatgggagaagacggcggcaatttcttgggaagaaaggaaacgatggatgagagaggaaaaagtgtgatcagaattggaagaatcgagggagagaggagttgaggaagagaagaggaggagaagaagaagaaggagctgtgagattaaggaagaaagtaaggctgggagctgctgctttcttcttgtggagtccattaaaattggattttccgggaaaaagagttaggattttctcgggaaatggaaggagagagtttttgtttttggtgtgcgtggaaaccgaatacaatagccacacctggcttcggctgcctgctcagccgggtgcggctggaaatttcacttggagtcacgtgctctcattttaattttttttttttaaaaaaaataaaagtagaaacttcattaaatagctaaatcggctattacaatagagtgaagagcagaaagtatattgctctcaga

SEQ ID NO: 1880 - DNA, 3459 bp, Cannabis sativa
tctccaataaatacattatggaaataagtcaaaatatataccgctgatatatctgcatcacagccataatcatcctccagtagttgcccaaagtagaacctaccctgcatgtgtatggagtacataagtactaaaataataaacaaaggagagaaagacaggaaaaaggggactccatttttgaatagttttcttttgggcctcttccttgtactcgagcatacaacacagaaggcataacaactaattacacaaaataaatgtaaaataagcttctgaagtacatgcacatacaaagacagtgcgctcattgatttcatatacaccacatccatgcattctgctgtgtttccactgaccagcatatcgatacctacctttctccctgagaaaaatataaagcagttacaaacgatgattacatcagcttataaacaaacacttcaatttaatcaaatcacatcaatagacataataaattacaaacaaacttactatgccagcattcagtctgttttcaactgaattgaacaataactatagcaagaataacatcagcaaaaatatataacttacggcttctgcccaaacacattgatccactcgtccctctcatagaaaggtatctcgtagctatctcccgccaaagcaacactgtcttctatatccatctccaaccattctctatcttcttgggacatataatctcttgctattattttcccttcagcacgcatttgtgcttcaagcctgaaaagggtgtaccaaaatctcaataaatttatatctctaacaaagattgcccaaaatataactactgagatatagtgtcaccttttcagtgcacatataggttattaggaactaaatacgtacttggaacctggcataggttctatgtcagggatatcaacttccacaacgccatgaccctccatgttattttgaagccattcaccttcatatctatgaaaataaaatgtgtcagaaaatcaacgaatagatattcaaaatacgaagaaagataacataagtaacacatttgaagtgttattactgagggaaaagggcagtaggatgtggttgtacaaattagaggcagtaagtgacatgttttattattaattataaggatacattaactgatcaaataacatggattttatttttgtcaatgaacttaacgcaaaggatattagtctatacaaatcattactttgctatgtagaatcactattgacattttggttttatttttataagtcgagtcacgaggaaagactacagtacagacagtcattttcagatatgcctgtgttatattgcgattggcccctgtttgatgctctttactcttaagttaatttgaagacataacagagacaatcccactcttcatcagcatataatgtattcatgggtaggaaattaatgcatcaactttcttgattaatattcttccatagagatattagagtgaaaagttaccgagataggatattatgtgtatgaaaactgtgataatgaacaaacctgaccaatccctgttcagcaagataaacacctttgccatgagccaaatcatcccaaacagtgccctcataccttgcacaaagagaaaaaagtacaatttagcaagaacttatgaataaacctatccattttgattaaattagcattaaaaaaagttaaacctaatgtaagggcgaaaacttaaacaaaaaccataaccaatcaaacaaacaagaatcacaacttaacaaaacccattcaaactccaaacagacaaaaccactaattcaaaattcaaatagtgataccaaactactaattatggtttccttccaagttccaatcatagacttgagtcttgaccactctacttatctcacattctcttttttcttttttatggaaattgcctccctaaggaggattcattaaagccaaaattaacaagagtacaaaagttcaacccatcattggagaaaacaaagcataagcagaaaatttaagaaagcatagaaaaattacaacaaagaaaaatctcagggagtcaaaactaactgaacttcaatgctgctaatacgagcttattgagcattgctataaggcaccacttagaggtagcactttgtaaatggttgccgatatttcataatagttattaaatttaattatgtagggtcgtgctaagcaaccattggtgccttttagcatttctttgctaataaagatcaattttttttttaacatagagctatcactgaactccactcaaaccaaatatagtgataaaattcaaattcaaacaagaataacaactgaacaaaatccattcaaactccaaacagacaaaaccactaattcaaaattcaaaagatgatatcaaaaccatctcacaattctctaataaaggtcaatttttttttaacatagagctatcactacactccattgaaaaaccaaatactgataattcaaattcaaaaaagaaagacttacgagcttccatcagggaaaatgtagctaacccaagtgagaaactcctcaatcctatccaactcttcaatcacagctttaggattcttaatatcataatgattatcaggtataacaggataaggctttctataaggaacataaaaaggagcaatcggagggtctctcccagcagcaatctcctgtctaacaatctcccaatcctcttcatcagcccaatcagggtcccaaccaggcttagtcatttccaacggagcatcaccccaatactccctaacatcttcctccttccaattctccggatcctcaggaaaatcaaacaagtcttcataatactcatactgtcgatcctcctcagctctcttcctcctcaatctcctactatccaacacatctttaaacagcttcacattcgtctcaggcgaattatccaagttagtaatatcttcacctcgcctgacatactcaataaggtcttctggcttctcatccgcttcgtcttcctctccaccagcagctccttcttttggttgtcctgactcggaggaagaatcgtccgagtcagagtcgtcgtcatcggaggatagcaacaagtcttcatcttcttcagcttccttgttgtcttggtattcctcggtaggtttcgagtcggtttctggattttccggcgagtcttcggtcggcattgttgagtgggtttagctctgaagaagataagattagagctaaagctaaaggaatgaacaaaacgaggtttttttcttttctttctattgggagggtttttgtttttgttcaaatttttattttttttattatttttttttaaaaaaaaaaaagaaaaatgagtaaatgtttggttgggcccaactggtagtagcccaattgaaggttaggtgaggcctacattaaggtggcccaattaaataaaaagtaaaggatcaattagtactttgt

SEQ ID NO: 1881 - DNA, 721 bp, Cannabis sativa
taacttttaaaatatatgaaattggatggaatcagattgataagaaagaaaattaggcgaggtggagttgatttgatccgagatcttataagtatctgaatattatttcagattagaatatctgtcttattagaactcctctgacccgatccaactaaatggattgttttaacatgcctatcgcctattgcaagctaatgtttcttcttaactagccttaagggagtgtttcctaattttttatgatttatctcaaagtatggattaaggtttatgggtttgaggtttaaaaataatggcttgtaattgaagattatcaaattcaacaaggtctgtgtgttcataatctttatcaaaatgaagcattgtcttaattacaagaaaaatatctcaaaatcaagaaacgctgaacataaaaactcaggacttgtgaggcatgtaaccctaaatttgtagccttaagttgctaaaaacccatataaaaataatcccatacaagaaattgacgatacaaaaatatatagaaaacaataagaaaagaatgaagagtcaaaagaaaaatggtgaaaatacacttacttatttgttaaacgacagaaaatttcgaagaattccccactgagaagttctgatgctgagggtttggttcgtgacgatactgggattgagagaagaagtcggtagaaactcaaaggaaataagtgagagataaagagggcat

SEQ ID NO: 1882 - DNA, 788 bp, Cannabis sativa
aatagtaacagctataggtttcatatccgttttgaagtcctccgtcaaattcctgagatgggtgtgggtcatgttcttgagatccccaaagaatctcaaggaatacggctcatgggccgtggtcactggagccacagacggaataggcaaagccctggcattcgagctagcctcaaagggtcttaacttagtcttggtgggtcgaaatccatccaaactccaaaccacttcaatggagatcatatcatcatcatcatcagttgaagtgaaaacccttgtggttgatttggccaagtgtagtgggaaacaaatagttgagattatagacaaggaaataaagggcttagacgttggaatcttggtcaataatgctggtttagcttacccttatccaagattctttcttgatgtggatttggagctaatggaggatatttttaaggtgaatatggagtcagctacatggatggttctctcagttcttcctggtatgttgagaaagaagaaaggagctattctcaacattggctctgcttcctctactattgttccttcttaccctttgttcacactttatgctgctacaaaagcgtatgtcatctcatctctttctcttttgccattatataactgggtttgtatgaattgatcgattaatcttttgttttgccttatttttaataattgtggaagatggtagctcttttagaacactaattttgaaacccagatgctcttttgaactgttggggtatgtaatgtatgatagtcttatataaatactctca

SEQ ID NO: 1883 - DNA, 1617 bp, Cannabis sativa
  modified_base (1202)..(1203): a, c, t, g, unknown or other
aagaagctgcaattatcacaatgcccaatattcaagcttactaaattagacaagcagcgatgatctcccatccaatttggttatatattacatggttattttcattaaccacatatagtcagtcacacacatcataactcaaaactatatttggtcttgattacattacaataatattaatgcccagtaaatgctactaacagtaagcaaattaagtcaaattacagaattagttattagagtgtttattaggtaactgacttcttgcattctgtatcatccaagtttgtatgtagcacaatctgcattagagaacactcccaggttaagacagaagcccgtcgattcgaaataccaagtatgtgagaaatcatttagaaatacagtgatattaagtcatcataagtgtttatatgtgacagtaaaacctcgaagtgaattcaatagtcatccaattagaatttaacagttatatctaattggggcttcaaatttgctaagaattaacagttggtagtcacaaaccttgcagatttcggggccagagggagaaacaaatacagtacaggagatgtttcttccaatgaatctgccatataatatacgtacacataaaactgtccatcagaaaatataaaatataaattaaattgaaaaacaaaaaggaaggaaaagaagaagggaaatcaaagttacctagatttttttgcgattcatataatatttgggatgtgagcaataattggccagtcctcccctgtcttcctcttgactcgtaatgttagcagcggacaataagtgatataaagatgagaaagagaagtgggcagttcttttggcaagcattcgagtttaggacagattctaattgtcaactcctcaagggaggtgaggtgctgaaagggctcctcatctaagtgtgtcaagtttttacaattgataatactaagcttctttaaagtgatcaaagggacctgcatgagttgagctcttgggagtaataatggaattagtttctcactttcatctatttcaacatgtgtcaatgatggaaaataatctcctaacaatgtcactttgagtttatcacatcttttaaaatgaagattcttaagactagaaaaaactccatcttcgataaatgaccactcttggagattatgaaaatattcaaatctcaaggtctccaaagatctaaagannggctttgtttgtattgcaacagaagaagaggtagaataataaaactctgtatcaattctcaccacaccacaatattcaatagaaaggtctttgagagaaggcagttgtccaaacgacgacaagaagctgcaattgctgcaatacatcaacctcaaacttactaaattagacaagcagcgatgatctcccatccaattcgggaaactgttgcctttgtagccgttaatccaaagttccttcaggtttggatgaggttggagggcactgagtagctctctttctttgtgcaaatcaagttcaggttcacgattacgaccccattccaaagataggtgagtaagaaacttcttactctttaataatggtgctgcatcatctgaaacttcctcaaggctgtgaacattttctagtccc

SEQ ID NO: 1884 - DNA, 3666 bp, Cannabis sativa
agcaacagcttttgcagtacaaagggcgtcttgcaatgatagttttacagttggagtagattctaaaacaacacatagatcattcaccacagatgagaattttcacaagcattaacacttcagagagacattaaatgaacaaatggtgaaattaaaaacagagcaagagggctaaccttctctagattaagttatattctctctcagagattctggatcaggtctaggtccacgatcctaaatttttcatagaatgatcaactatcctacactgtaaaacttatggataacactcgggtaattgagataatagatccttacagttctagaggttgcactacaaggatgatctcttcccagtgatttgtctgaagaaatttctgaaccaagacagggagagtccacagatgaattgtttgatagtgacatccatgagttagttaacaacatagcagccacaataaaaaaggatagaaatccactgaccattgtggcagcattgcttgagagttatagtagatggtttttttgcattgacagagacaagggtcgtctactgctcttgtcagtacctacaagacaaattaccaacttagcatctggatagagttataaaacaaattgaacacccccacttcatacctttaacgatgttcttccccaacttttgcatagaattggtattcgttttagggtgttcaacctataaacaaaatgtaaacaagtcacacaaacaataaaccttcatgagtactttcttgcaagaaaaagatgcatgttatctatgtgactgttatatgaagtattatttgataaaccattaaggaaattcataatactaaacgtctatatacctactaccaagtcaatatatgaaaaaacataataaacaatctactacttactatatcagcaattcttgcctcggaagaacatctaacaagctttcctttggaagggagtgacctcttgggggctgacctattaaccgaaagagctggcgggtcacacttttgcatggtatctattaataaagtgtctgatctgaacctattctgcaaaactttatattttttctcaaaaatacagttcattgtctttgccattgcatgaacatcattgataggaggattatagtgcatggcattggaaaaagtcaatctgacgtcagccgcaaactctgcaacgccataatagtcattcttttccaacttagattttattgttcccaagtccatgggtttagtaatgatcgtaaggtagtcaagaatgtttggcgcaacaggatcaactggttggttgaaaatccaaccaaattcatgagatatcaaatcttccaaaactgaggaacacattgccagcacacttgtttctgtcttctgtttcttctctttctgatacccaacattccatgttgaaactcgtttattactagccacaacactagtatttgacattatgtagtcattaatcccaacaccacaagatatcccaagatcagtgtttatatccccttggaaaatttgatcttcagcctcttgggttgtacgagcatcatactgaatattagttacagttcaatgagcaccaatttgcatatttattgagccagaaaattagtcaaacatatatatacatataaaaagattctttggtagagacatgcttttggttctcggtaggtacgtttttgttttttatacttagagaaataataatccaaatatttttatatgacaatatacattgtatttatgtaggaaatcacaatttttttgtaaaattccaaataatttgcagtgcccaaaataaactttaaaataactcattttaacctgtttttgagcctttttatgcctagtaattaaataacaaagagaaacaaattcaaacgtatgcatacttgtagttactaatttgttaacaccgactctatttgaaaacaaatattatgaaggtaatataaataaagcacagttccagaaatcaaaactaacctcaaatggaatttaatctagtaatgtagacggaacttagaaattaaatttaatttaaacttaatcaatataacttataattgatatgcaattcttgtctttatgaaaggaatatacctaaatactataggtagtcaataataagggtggaatatatatgtgtgtgtgcgcgttaatttgaattgaaacatgtgccaaagttggaaactgcaatatttattttaaataaaattaccttctccactctttcaaagaaaaaaaatcttcacaaatatccttttgtataggtttatcacaacatatttaaccctatttttccatcaaaacttacaagaaaagtaaataaagtgtaatatgctaatggtaaaagaaacaagatgaagatggtatagtttattaccataataaaaaccaataaaatccataacaactaaagcatttatcactaattaaataaattaattacgtatgccagtaaaaacaaaataacaatagattggttaagttaaaaaaaaatctgtaaatacctgcttgagatgatttattggattgctaaacttccataatgtacctacaaaaatatataaatatacaataaaaaaatatcaatcaattctcacaagatatatattaattacataaaagaaagcttagaacattttgagagagagtaagatctgtgaaggttttttgggcagtgaaatgtggttagaagcagtgtatgtttcactctcataaaaaagatcagaggttatcaatgcatgcaatagaaaagtagactaactaagaagacaatatagtatttagaatacaaaagaatcaacaatagataatattaaaagaacattaaaatttacaacaaacctgatgagtctttgtcctctttcatcataaccaatgtctcttttaagctcaatcccatgaaatatctcaaacatcccagatgaaacccagctcaaactaagcataaaatgaaaaagaaaaacttcataaattacttcacttcccactaaaccaaactctcagtcttggccatgaaacaaagaaaatatgaatagttagacactgtttcaggagtcaaaattctgtttgatatcaaacacacatgttcaacaaactacacaattaactccatggttaataaggcaggacagagcaatgctagctgcaccaatgagtttaggcttgcactagaattaggctataaaaatacatatatcgcaccagagaaaatttcacaagtttaagtcttcttgcacatacatacattcaatcaaacttgagatttttaccaacagagaaatagaataatggctttgcttacctgctctaccattggagaaaacatagtcagagtgagtacagaagtgtatgactccacgtcaatcctacaaataatggctaacatcatttaaaaaatatcatcagaagcagtgtaaaaattcaccgaggaatagtatcaaacagtttatacgcatatacttacaaaattgttccatatctagctaacaaattagcatccgaacacaacttaactaaattatcactgtattacttgctaatatttatcatttttcctacactaaactcttttgtcacctaaacaaatacaccattaaagttacttcgtgatatataaggtatatagcattttcaaaaatgaatttga

SEQ ID NO: 1885 - DNA, 4649 bp, Cannabis sativa
gaaatattagttaagttaaaagcagtggtagggaacattttaaggtatattttttactcagagaataaaagtaatgtttccaatatctttcttaatttagaatgtcaacactgttgcaaaaatgaccttaggactcctaatctggtagggacatccggcgggaatgataacagcttctcctacgtgttgcatgaaagtccaaggttcaatctctggtaagaatagaaaaggattattttcagttatttcagattaccacaaatgatgacactcacaaacaacttaccaaactcctccttaagcctcagtttgtgagtagtgtcaagaaagaaactctgatcaagaattggatgatcgacctataatgcaagcaagttagtagattaaaagacattatttgacaggaaaagatggcaatattttagtctttacacttacatggttatggcaagcaaactcattagaatgccttttgagataatctataagcttgggaacatcttgtctgcgaaagacatcccactgggcaccatcagacactgctagtgatttcttcccatcatgattggagctcttattgttaaccttggaactttttctgtcttctgatgtttctgagccatgaatactctcgcgagaaggaagcaaagtttcagaatcagtatcagaatcagattcatcatcatgcgatgaattactctctttaagatttttatcccatggttcgtgagtggcatcagaggaacaggatacctgtgcaattttctttcgtaaatgcatttcttctccaatcaaatcctgcactcctgaatcttcaatcttcacctcatgcaatggtgatgattttccattgatgttgtttaccatgttttgatctgaagtgatcttggaagataaggatgagtgactttgttgagccttgtgctttttcagtaactttcttattctagaaagttgttctgaagagattgggacatttgaagtatgtgccaatatgttaacctggggtaaaacaaacaaaagatacaacaacaatcactcacattcctaaaaccatatataatggcacagtgcatctgatataggaaggataagaaataacaaatattgattaatatgtttgcggtcatattgtgtgtcagtgaaaggttagtaaaagttcaaagctcacagtaaatgtaacgattgcaaccttcattaacaaaatacaagttttaaaactctaggttgtcaactaaaataagacgagagctgatccaaggcctagattaacatgatattgcaaattgacttgaaacagaggtatcaatgcgagtactttcaacttaactataaaagaaaaacatgcacacatgtaattgttattcgtttccaatcaatactgaattttccttgactgaaataaatgggaagctacatttataaatcaagagttcaagagattagtattttgaactagagaaaagaaatgggcataccatgtcatatgaattataacagagttttaggacagaattagcatgttcaagttgctcagcgtagccatatgagatataaacacatggaccaagatcaggcttctggatatcctttggcaatcttgcagtaagatttagacgaccagatgaaggattcatgtattcttgaagtggtagagtatggattacttgagcataatgggatggaaactgttgttgaaacaactgagaagaaagccagccccttaatttcagagtctcattccatgtattcttatgtgtctggcccttgaacgaacccatgaagtactgcctgataccaatttctacctgtcacgtgacccaaaaaaagaagtgtcatactaatcttcctatgccataaaaggatgagaagatcgtggagttcagcaatactgaagaaaatcacaaaacattacaatcataaggttaaactaccatctgatgccatgccataaaatttaccaacatggaaattttgatctagggtaaatccactaacctcacaccaatccaagcaattgctaatttcacatagatccctgttactttcatatctggatatgctcctttcaagatatgtgcaaaacattagaactggatcccaactcacatgtgaagtagcctgaagaacattacgaactataacaggatgacccttgagccagtgtttctgaaaatgttcaagcttatcactatgaacatctagaagagtaggataatataaaaagttatcactggactcttctcttacagctgcttctcgcaactgctttcttcctccagttttttgattcgtcccattacaaagagtgcagcacgaagatatgtctgaagtttctggaacatcatagctacagactatttgttctgcacttacctccagctctttggtccaatttaaaggcaaaagagatctcaactcaaggagattctcaccacaaccaccaaactccttgggtgggcaagatgtatcgccattaccattatgaactttccagtcaggtagtgacactgaacactcaaggtacttactactggggttctgcttggttcttattgggttctctatctgtcgcacataagggtacgcaggagttttagttttgttagaggacagtgtgatagagaagtcagtacatccaagaaagctttcttgacgtaaatcttgacaacaacttaaacaaaggatataggaacaatttgggcagcttctatggagattgagtataagacttttgcatctattactgctctcaaagtaaaaaatcatgcagcaaattgtcagcaacacaaaaatgtaaatacattggtaaaaaaaacacaggtttcaagacatgcgatacgtaccagcaatgcttctcattgcattcaatatcagcctgttttatattaatatcagatgggttttgtcctgttacaataaaaaacacgagcacttcatgtactaatctaaaaaaattgatgcacagaacatcagcaaagtatttaccataactgacactacctcttattcttgcttctatttctagttcatcattttggtcttggtttatttctttcagcacaggaagaagcatacaaatcaaataatggaaacacaatatcacttcaacttcgtgtttatcctgcaagtactcctgaaaaaacaaggtatttgtgcaaagtttaccatcacaatttaattaataatacaggtaatcaagatcacaaaccaggcaacaatgttgtcagactcagaccttactttcactgtctttagatggattttccaagcagtccttacaagtacaagctttgcgacatactgggcatgtatctttgacttcttcttctgtgttgaagtatctaagatttcaaatatcataattaataattatcagtgtttcgtatcaagtgaagtgaccaaatagctcaaaccaatgagctatggaagtatttaggcaaaatcaaacatactgactattggagtaagactataatatgtgactagctaacacagagtcagtaactaaagtcatgggcctttgaaagaaccagcttgtacagctttgaatccctcattttctttctccagtttattttaaatgggcacatgtaaatatgtatatatgtcactgttcactcaacaaagatagaatgatatccataagtagtactctcttaacaatgttgacagagaagggaattcaatatttctctcccttcttcataatttcacacattgtactttctctctctttttagtttttgctttgtgtgtatttttaagaaacacaggatgctttcagtaaagtatgataagatatcatccaaattacagactagtaagctattcaagatcaacattttacttctactcatttgaagctcttgaataattatgctctaaacgatgttgcctaaaccctgttagactaaatctaataagatgacttgctttataaaattttataagaaaatacagaacaatcatctaaaatgtattgagctgtttaccacagaaatttcactataaagtatgttttgtaccaaggccgatatagaatagaagcataaggaaatggaaaaagctctcatcattataattatgaaaacacaaaaaatacattatacgtttcaatgctttagagttttgtagttgttaagtactatacggaactatgtcatccaattctcatgaactaatggttgcctgatatctaataataataactaaaaagattgataatttatcgaaagaactgctttttaatatgaattgaaagaaaacgaaccgttctttaatgcaatccaaacaaaagaagtgtttttggcaactcgaacattttattagaatccgggagccggttctctgacaccaatggcacctctttttcctcttatccctacccaaattggcaacacttcgagcacagggcaataccttgacaattaaaatcacaaaaccaaatcgatcaaaataaaatcgttaaacacaaaatttggagtaaatggaaaacaactaacggaaaagctaatcataggtcacctgcaatttaccataaggcaatgcctcactgttcttagaccgaaactgtcgttgtggaaccggcaggaaatcaattccaaccttcacacgagcaggcgaatcagaacccacattgccggaac

SEQ ID NO: 1886 - DNA, 1735 bp, Cannabis sativa
ataaatgtaaatatcaaacttagaagggttgaactgtaattttcaaaacaaaagggccacagtcacactctgagtctcacacaggtaaacaagggtttatgctttatgatgttgcagagggtttagtattagcttcattctcctcaaaaatggcgtctctgcaatctatcagccgttccagatgttccaagttctcttacctattcaaggtacgaccttttcatccctctcattttacttccattaatagctttcacaacaaccttaaaaccctagccaaaaccctaagcacctccaccgtcccgtatgaattccaaaggtcacctcctcagcaacctccaccgtccgattctaggcctttccctgatcagtggggatcacagccacagggaaacacaaaccctaaccagtggaactcataccagggtcagaacccgagctatggtggtgggtatcctaatcagggtcagaatcgcggaattcctaaccagggaaatgctgggtatggaaacaatcaatggaattctcagactcagtatcataacccggattatcagcaatccagagggttgaatcagtggaacaaccagaatccaagttaccctcaacgcccaaacccaagtcagtggagtggacaagttcaaaactctaatcagatgagcaacaatcaagttttaaatcgaggccaaggtcaggcttttgagaatcagattcccaatgttatccaaccttctgtttcagatttaggccgactgtgtcaagaggggaaggtgaaagaagctattgagttgatggacaaggaaggggtgaaagcggatccaaattgttttcatgctttgtttgagttgtgtgggcaatcgaaattgctggacaatgcgaaaaaggttcatgatttctttttgcaatctacctggaggagtgaacgtcagttgatcaataaggttattgaaatgtatgtgaaatgtgggagcatgactgatgcacggagagtgtttgattatatgactgaccgaactcttgattcttggaatttgatgataaatggatatgcagataacggattaggagatgatggattgcaattatttgagcagatgagggaaaagggattccaacctaattccgagacttttcttgcagtgttttcggcttgtggtagtgcagatgctgtggaagaagcgtttatacatttcgaatcaatgaaaaccgagtatggaattgctccagagatggagcattatctggggatacttggtgtttatggtaagtgtggacatctaaatgaagcagaagattacattgcgaaactccctttcgagcccactgtggaagtttgggaggctttgagagattatgctcagattcatggggatgttgatcttctagaccgtactgaggagatcattgctgctcttgaccagtctaaggctgttacaaataagatccctactccaccacccaaaaagcttaatgccattaacatgttagatggaaagaacaagattgttgagttcaaaaatccaactctatacaaggatgatgagaagttgaaagccctgagtggaatgagggaagctggttatgtccccgacacgagatatgtgcttcatgacattgatcaggaagccaaggagcaggccttgctctatcacagcgagcggctggcaattgcgtatggcctgattagtactccggcgaggacacctcttaggatcattaagaatctgcgagtctg

SEQ ID NO: 1887 - DNA, 2466 bp, Cannabis sativa
  modified_base (214)..(218): a, c, t, g, unknown or other
ttctgaagtaattctagaatgggaacataaacgggtacgggtgtagtttgtttgagaagattaataaatgaggtggaaaaaataaaaataggtggcaattattgattggagggacagggttgggataggaaaatttgtgacagaagatttttttccctaacggagcagtttgtttgaaaagattaataaatgaggtggaaaaaatagaaatagnnnnnaattattgattggagggacagggttgggataggaaaatttgggacagaagattttttcccaaaacgagcccctaatgcattgggacgttgataccgcgtggacttcattgagtgtgaagggaagagataggtatagccacattgggatatatattacaaaattaaatttccaatggaatctatatatatatgataagattatataaataaataaattaaaaaaatttattaatccaccaatttataatgatgatcatgcatgatataaattatatgataagattattgctattttcagtaaatatatatatgatcgatcctcactaatgagagttgaattttctatttgattttgacccattgcgaatatatatatatttatatatatatatatattgcagtttgattggttattaatttttcattgatcattaaaagttgaaatcccccaaagatggagcatgcatggatcagctgaggtgcttgtcttgtaagcatgatgatgcacatgtgaaatatatataaatatatttatgtggcaagtgagaggatgagttattttctaagtaagccacatgggtttgggacaggaacagactcatacacataaaatatgagttgaatttatagcaacttggtagatgtgaatagaaaggagaaccttttttgcaactggtccaagttgagaatttttttagataatggtattaatgtagagtgtgtgtcctataactcctcctggcactttggtgacgcatatagtactgatcatcttgggccatttgagaaggttagttatatactccatcgagtgtaaagttgaagttttattaaatccttagtatatatatagagagagatatacaacttataagttatataaagggtccataattaataaaagggggtcctatatatatttgcagcttttgcatgtgaaatatctgtgttgcataaacaatattgctatccagatatgagacacattaattaagagaacttcactttttgaacgtgcctatatatataaatatattatgtttagctgctaattaaacaagtcataatagatttttaacataaattcaatctcttagtccccatcttaggagccatttaagaatctagatctctagtcatcatgacccaggactgggtagtgggtaacccgtaactccttctatttatctgcaaatattacattatatattatataattataccatgtattgtgtacctttatgttgggttgtattgtatttactatcctttttctatgctaatgaaatttttcttgttatgagttgtttgatattcctgttttctttttagaggtcgatgtgtgtcaaagaatgatagaacgaatcattattcggttagaggattaccattacgagactatataaatgttgaaaaatttgtagtaaacgttttggtaaaccccatctgtttaggagaagaattttttaatttttcttattattgcatactttatagttatttaagattatttatacatttttaaaaaaatttaaaataatttacatagacaaaattaaattaaagttaaatcaattacttgtcatgcgtacaacaaaaaagtagtcatacgtggaataaaatatttgaatcttatttttaatacttgtaattacaatgtacatgatcatgaaaaaaaaattaaaaaattctcgaagtgctaaactaaataagcgatctaccaaaaagggtgttactatattacaacatgttctgtagcaatcatctctaaaaatttacactaatatttatttataggaaaatatgctgaaagaaaaatgagccaaaaacaaatataaaccaaaactatgcaaaggactatttttttttcatatatattttttaatatatagatattggttctatatatcctattggtatacttcccatcaatccaaaagaagtcaaacaaaaaggaaaaataatggagaagtagaatcaaacaaaaatgaaagaagaaacaagagaataattttgccttgggtatatacataacataacctgatcaattattgaaagaggctcttgtggttctccttcgtaacatatccctttttcaacaatcatcgatcgacccaatatgaaaaatgttaaaaggggatcttaaagtgctctagctattgtaacttaatatctattctcatatattttgaaagcattactattagatatgtgttacattaccaatagttaaatatttaataaaatt

SEQ ID NO: 1888 - DNA, 1679 bp, Cannabis sativa
agtagcatggtacttgtgaagaagagagtgtatccaatcaaattgcgctttctagtgtcgattttggcttcattgtatgcaagtagtatcattgttccaacagcaaacggttgataaaccagggtaagtacccttgaaggatggtaattcttccatagtaaacaacaaaatattttagttgctatttacattctcaataccatttagggagtggatttattccttctccattacggttgttaattatgagaagtcaaagtacatcaattacttagcagagtatatactatactagaaagtagggtttaagtccgtcggtttggtgaggttatgatgtaaagatggaattacaaaaatttaaatactactcggctaattaaaaaaaataaaaatagtaatccaacttagtctgattaacccgtccaaaccattcactaatattttttttatttttagattcaatggctaacccgtccaaacagtccatttagatctgattgttcatttttaattgaaaggagaaaaaatccattctcaatatatacacaaatgtaaaagaatctaagatttgtataatcccaaaaaagaatggggtgagagaggctcgaactctcgacctcaggatcactctatatagctatgagacctacgcgctagccaactgcgccaccaccccaatatattcaacgacagtactattatgtttaacaatggcagtaaaataatttgataatgttcattaagaattaatcaccgggaataatgaatagtagtaatctccaatggtcagcatactgttccacgccacaagagaacccaatcccagaaaccaacatactactattgctgcattccttccctgcttagagaaatattattggtccccaaatcaaaaaaataattaaatgatggaattataaaatatgaaataaaaagtaattgagaaaaataaaagtaagatcaataataattgacctcatgcctgaacacatccccggtttcatccgcagtcgacgtcatgttttgaagctatagtctttgggccaaggttaggactctgcttcactataatattgtgacatttaattagattgattctctatactagttaattccgattcaaatagcaagagatcattaattaataataaattacaatttaaatatctataatatctataatatcgcacaaatttatcaaaaagtacctaaaaaagtattatttactttcggatattttgtagtttacagtttttttaaaaaacaaattggtttgataaattggtttacaagtaatttacttgatttaaataaactccaaaattataacaaatttagaattgttttggcaatttaaaaagggaatttacacgaaattatttttttcaaaaaaataaaataaaatagcaacgtatgttttgtacagctgaaaaggaataggggttaattgggtgggtgtgtgggggctttgggacccaatatcaattgggaaatttcactattaatgtataataaaatacgtcatatcaaatttgactttccttactaattattattaaataatttctttaatcacatgaacttcccattttatctttttttaaaattaaaaaaaaatgtaaaaaactgaaaccaccacccctctcgtgtctttctctctctctactttgagggctctc

SEQ ID NO: 1889 - DNA, 3078 bp, Cannabis sativa
gcaccaaaaactttttcaacctgtcgaaaaacacaagtcaagtagctaactcggaaaaagtgttttaaaataaagaaatgaagggattagctttgtttgtgttatacctccttaatcaaagtgtctgtatgaagtatttcaatatcacccatactcttcttcccaatgccattctgttgtaatgggaaatctttctttggttgaccctttggagttcctctacccctacctatgccaggaactgcaccgccacgagtcatggacttcttactacctcggccaggtccagggcgaccacctttacgagtaacaccaggatcatcaccttcccatcgaatatcttcgggagaaatctatcattggaagaagacaaaatcattatcgagaaatttcctgaccattcgaaccatttcaatatagtttatctctaaatatacaatcaaatcgcagtgtttagaaactatgaagggcggctaaaaagccagagatgtacatacatgaggacaatgaatccagacaggaatggtatgatggttttaagagacaagaagaagaaaacacttagcatgctgatccgggaagttgcaggaagaaatgcccgaaacatttaacccggtgacagtgacgtaaaaccatgcaatcaaatataacttttcacatagaaaagaagtaaataaagagtaacagatactgtgccgaccggcgtcaaaaccagtgagcaccaatgagaagcaagtcataatttctctattattaaatacctcagaaacatattaattgctcaataaatcaatatggatgacagatatggagcaaaaatatttaattgaacacacttaattcacaactatacaagttccattcattaaattaattgttgattaataaagatatggtggtccagaataataaatgttcaaagctcaataataatttactaccagtcaattgacattttgcctaataaataaattcctaaaaactcaatcaattaaggaatgtcattgcatgaatgtccttaagattcccatgaaacatcaaatgccaaagtcactaggaattttttactaaaactccaaaagataaccagttttacctctttgagattaacccattcccatgtctcgttagtggtactaatatcataaaccaaagcatgtcggccctgtgaagacaacgagaaatagcaacaataaaggctcaatatttattactatataactcctaaaccaaaagagttagcattaaatagttcattttattatataaatatcaagttatataatgtataaactacagaaattacctcaagagcattgtagtcagttataacagcctcgtagaagtggttgtcttcaggccaccttgtccaaacttttcttcctatcaatggatcgtatgcagctgctccttcggcagcttcactagttggaaagccacctgagggacctcggttagtggcttgagctcttccggtaagacctgcagaagggtactgcatggaattggatgcagcgaagaaaatactccatcaagtgaaatggggaaaaagaaaatcataacagctttttactttcaacattttgtttatatatttgaaaaccgtacttgaacagtagaacttacagattttggttttttggtccgagcacctggaggaggcccttgtctcatagctgacgaggaaggctgcatagatggaggcagcgctggcgagggagcaccaatagacatcgaagctacagattgtgatggtttctgttttttacgagatgctgagacagtaggactaggtaacgggtcatgaacaggttgaggagtactgagcatgcccggttgaagcccactaacctttctccattccctaaaaagcatttcttttgttacagtttcagcgaaaatatggaattgaacagaccaaaagaaatctcctcaatacaacatgttattgtgacagtagtcaaaccttatcctccggatgatgtcatcggcattgacccttgatagaagctctctgtgttcctcgtcagatactctcaactcctttcttaattcagtaattaaactttccttatcctgaagatacaaaaagacaaagtactaaacattcatacctattgtcaagaaaacatcataaataagaaaatgaaaagtcaaacaactacccaagtgatggcatctgattgagctttaaaggcacgaagaactgaacaatacgcttcttgctcaatgaggtggatctgagtttccatgtcattatggatcctattaggtaatggagcggaaccaacttgtgcagatcgtccattgccagaagcacgacctgctcgttgaaatctattttgatgagaaggaggaagatcatcatctgtacctgcatttgtttttcatacagctgcgggttttaaaagtaattttttccaatttcacagcatatcaagtagcttccattccattccattcaaagagaaaaaaatgtgaacaatatgccaacttcaatattctgagtctagaacttgaataccttctaatatctccacactaaactgtgaacttaaaacctatactaacattctaaactctgaaaacaagtggcatgaacagaactattaaagtcaacagatctatgctaacaaaaccattcatgtcaaactaatatacaatggtcacactaaaagtcaacagaaagaagcaaaacaacataaatcacagcaaattaccaaactttctttgcaacatctctaatatcagcaaatttccaaactacagagctgagttgagtaaaattgattagcaaattgcactaaaatggaaaaacaggatattttacataccaagtcaatctaatataaatttcaaggcttgtaaaaacataaactcagaacttttccaaacttaatctaacactcaacacaaacacaatcttaaatccatcaaactatcacagtcactgaaaaacggtacaaaacaaaaccttggcctcaaaaattcacacttttgatctaaagtcaatcaacaatacaatgagatcaatcaagttacaaaatttgaagcattcccatcaaaattaactactac

SEQ ID NO: 1890 - DNA, 4981 bp, Cannabis sativa
tgaaccaccaccattaccacctcaaccgccgcagccccaccgtccttccacctcctgtgaccgtcatccggaggagtccttcactggcttctgcccttcatgcctttgcgaacgactcgccgtactcgatcattcctcagctactactgcttcgtcttcttctcgaaaacccccaacttcttccactgccgccgctgcacttaaggccattttcaagcccagtgcttcgtcttcttcctcttctgcagcctttgtagccgccgccggtggtggtgccggaccttcttcggggaatcgtaacagacccacttcgttttttccagagttgaggcgaaccaagtccttctctgcttctaagaacgagggattctccggtgtctttgagccacagaggaagtcttgtgacgttagggttaggaacactctctggaatcttttcactcaagacgacgagaggttccctggtggtaagaaagagtcgtcgaaaccaggtactggagctgttgagattgaggttgagactaggaatattggagtaggaggggcttcgtcgagtgttcaaggtcctgtgtttgagtccaaggaggaagagatagaagaagaggaagaggtagacgaggagtgtttggtggaagaagaagaaggggaaattagggttttcgaagaagccattgttggggggaatgtaattgaagacagagtggaggaaattgttgaggaggaagaaaaagaatcagttgaggaaatagaagaagaagaaccggagcaaataccagagcttgagttaaagcccatgaaggaccacatagatctcgatgcacaaaccaaaaagagggatttaaaggagattgcaggtagtttttggtctgcagcttcagttttcagcaaaaaattgcagaaatggagacagaagcagaagatgaagaagcgtcaaaacggtggcagttcagccacattgccggttgaaaaaccaatcggaagacagttcagagaaacccagtctgagatcgccgactacggcttcggtcgccgttcctgcgatactgatcctcggttctcgctcgacgccggtcgaatgtcgttggacgcgggtcgtatgtcgtttgacgacccaagatactccttcgacgagcctcgagcttcttgggatggttacttgattggccgcacattccccaaaatgcccaccatggtttccgtggtggaggaccctcttcctcctcctgtccacgttatcaggtccgacaaccaaatcccagtcgaagaacccatcaatgaggacgagtcagttcctggtgggtcagcacagactcgagactattactctgattcatcctctcgtcggcggcgaagtctcgatcgatcaaactcgataaggaagacggccgctgctgtggtggccgagatggacgagataaagtcaacttctaattcaaaggtatctccggccaccgttgattacttccctgggccgaagcttggagttcccgatagagattctagagattccaactctaattctttgagggacgactgctccgaaacttttgatatggggttccgggattctgcctcggttatcggtaatggggatagaaaaggtcccaagaagtcccgccggtggagcaaggcgtggaacatttgggggtttattcacaggcgaggtggtaacaaagatgaagatgaagaccggtacagcagagccaatggggtggagcgttcttactcagaatcatggccggagctcagaggagaccgaaatggcgatgttcgtggcggtttcaatccgaagatgcttaggagcaatagcagcgttagctggagaaactctcagggctttggcggaggaggatcgttcggtagcatgaggaagagcaacccctcctccgtggcctctgccacggccgccgcaaccgccgaaactaatgggaatggtaggaagaagaaagatgaagttgttttggagcgaaaccgtagtgcaaggtattccccgaacaacattgataatggactattaaggttttatttaactccgatgaggagtagtcggaggagtgctaatgggaaaagtaggtacaatcaagcacattccatagccagaagtgtacttcgattgtactaaaagaagattttccaaaacaaattattagtacttgaaaatgaattaaggtccataagctgttcttttgggttattaatttattattgtctttaattttgctgcttttgttgtgtaaaactacacatgcctttgtattcttcttaatggttggttggttggttggttgttattgaaaaaaaaaaaaaaaattcctaaaatttgtttctttcttgtgattagcatggttatcttatactataataacaaaaatttcagtgtttttttttcctttctgttttgtctctaatcgtacttttgttaaattggcctatatatatattttttaaattttattttcatgtcatttcagtcactacccagataaaaaagtaactagggagagataaaaatctgaactttatgaggaaacttcacacagaatagcagagtttatgttttgtgggctcattgttctctaatcttctcttatctcacctgagtttttgctacttaaagtctcaaattgattcatacaaaagacagagaagagtaagggtttttgtttttttgatacctcgtccttgttttaaaaacaattttttttttggtccatatacgacactatagtacagtaggaagtagtttttcattcattcccttgtatcacttgaaaaaagataataataataataataataataactgtttgtgcatcatgtcaaagcagctactattattcttagttgccatggaatatgtcaagaccaggctattgttgcagaaataagagtcagtttatatttataattcttatataccccacttgaagagtatcagaacagaaagaaacacccttaatcatattttgaactattggaactttgtatgtatttttcttttctttcttctgcttgacttgttttggctctgactgttttttttttctctagttttctttgagtttcaatataggtatggagagctttattgggtcaaaacttgataggtctgtttcctaatctattactaagaatagtaaagctgatactgatagttagatcttcttctgtgctttttgtcttatgtgtattcttatttagttgctaaattggttatggattaatggttattctttaccaataaatttactgcattaatcttgttattcacttatttattacctttttctttagtccattatcctttttttactaaatcaattagaggtgtattttaatctctagtgttttgaattcaattttaatgaaatcatatatgttgttttttctgagctttctttagtcgatgaagaaatattttatgtcaacaggaaaaagggagtaggctgtttgtttgtttgtttgtcttatactcattaagcattacttgttttaaaatgatcattgattgacttgatgaaatagcttaatgacattatcttcattaggtggatatagctattatcaatcaaaatatggaatgtaaattctctctatatatttgatcaaaattgtaaagtgaaaattaggaagaaaagaggagagaaaaggaaaagttttctttaaatcattcaaaaagggtagaaaaagaaaagaaaaatggataaaaggtatgaaatctttgtcacaatttatattgaattaagatagagatgaaattgagaattcacaatgaagtaagtttcatgaacaaaaaaaaaaaaaaatacaaagaaaaaagaaaaagagaaagtaatgattacatctgaaaaaacaaagattcttatatccccaccaagatgttgaaggaatcaaactaatcaaacatttttcactcactaagtttaagactatttgctttcatccttttctctgcatatgcataaagcttagtgatcaacaaggttttgcctccaaagtcaaaaaagtcaggaggaaaaacaccataacatgttccttcatggagtgtatcaaaggaaagaaagagaaaaaaaaaagaagaaagattaaaaaagctcataaatcaatggcatgctcattcaatttactaatccactactcctttaatctatcaaatatttcaagtgggtgcataatcatttgtttatgcttactagtgaacttaattgtcaacggttgtaatctcatgtctgtattgggtgttgtttttttttttgatttgtttatttattcaaatttacataaatatatattaaataatcttgtgtgtaccatttgactaatgatataaagtataagacaagtgataagtgtttaggccattaagtagtagtactatcatacatatattgtaagttgtgttatcactatttgaatttcattgatagggatgtactttcatgtgtatagtaatattgatctttggatattattaatttcatgtatatatcacaatatgaggttggtgatattaattttcttactctattgttattgcaatttggtgtatttaatgtttttcacaaaaagaatgaaatgtgtacgattttttttgtgcatttacaccttgaggtttggctcctaaatatgcacaattaatgtgtatatatatatatatttttttctggaatgaattaatgtgtatatattaattagagaagataaaaatagcaaactcaaagtgcatttacaccaaagatttggtaggtttctggatttttgttataacctaaaaataagaaagaaaaaaatgttgattgatggaagaaaagaagtaaaaattggttaagtcaagactactagactgatgtgtagtttttttttttttttgttattcctattcgagtctatttttattgggatttttacaccacatactaaaattttaaactttaattcttttttatagtagggggaatttttttcaaattatattgtgtac

SEQ ID NO: 1891 - DNA, 3310 bp, Cannabis sativa
atatgggaactgtcaagcttggcacataagctggtcagtatacacgacctcctagcaattgaactgaataattgccgaaattatataggtgagtcctttaaaaattcaattttagaagtgaaagtacaaaacagatttgtctaagggagttaaagatcatctcatctgatctttctataaatagtttgtggtaaaagatgaaaactcagaaaatttaaaagcattgagcaccacaaaatatgataaacttgttacaactctttgaaactcaactaattttttaaggaggtttacagcacacctctctgatctttattattcttcgaagttgcatatgcacctgagtcttgacaagtaaattttcactgaatccagtcaaggtgcaacatgaagaaaactacagaaatctcatacgccttattgagggcaccacccatctggacaacatgaagatcctcaaggcattacttgcccctggtgatgagccaaccctgatgcatggttactccaaaacaaaggtaatttgttttaaaactctctgcaatagcctgaattggtattcctatcaatagtacacaaagctgaatcattaattgaaattgacaaacacaggtttctgttgaagtattaagacgaaagcatgtgttgctgctaatatctgactttgatatcaccaatgaagagcttacagttctcaacattatttatgagatgaggatgaagcaagatcatcgatatgatacgaactcaaaagatgctccatatgaggtggtgtggatcccaatggtggacaggatggcaaattggcctcaacaaggcgatcacaaacttttggagttacaatcaatgatgccatggtactatgtagacgaccctgaagtaattcaacctccggtgattaagtacatcagagagaagtggaatttcgaaaagaaaatgatcttagtagcattagatccatcagggaaggtcacatccaaaaatgccactcatatgatgtggatctgggggaattcagccttgccattcagtcaagacagagaggatacactttggagtactgagcaatggtcactcaagctactcatcgatagcattgaagcagaaatactacaatgggtacagtttttttcttttttgatgcattatagaataaacaaatgcatacaacatattatctcctatctgtaaaacacatcattactcaatcagattatggcccaattgacattatgtgacaactaaaagaataatctctaacacaaaacagttaacccaattcaactccttcagattattgcccaattgacattaatacatatcatctcatgtaaagggaagaaaaagaaaattgcttcccaattcatttcattcaatcaaatgcaaattactgtaaattacatattatctgattaaatatgttgttatccaaaaatttcagatgaatagtaataaatacatatgcttgtacggaggagacaatattgaatggatcagacaattcaccacccaagcaaaactggtagcacgggctctcggcatcgagttagagatggtctacgtggggaaaagcaacgtaccgaaagagcggattaacaagatcaatgcaacgatcctagctgagaatctcagccacatctggccagattccacgaccatctggttcttctggtctaggctcgagagcatgcgctgttccaaggtccggtacggcaagaccatagaagacgaccccatattgaaagaggtcatggttctgctcagttacgatggctctgaccagggctgggcgtcactctggcatggctcgaacgagatggtccgagccaatgggcaactggctctgttaaccatgaatgagttccaagcctgggaacctgaggctcgagagataactttgatcccagctttagatgcagaactacaaaggcgccacacgccacagcactgcacgcgtctcattcttccagggatcggtcaggacattcctccaaaggtggtttgcacagagtgtggccgcgacatggagaagttcttcatgttccgatgttgcacagattgaggtgttggtttacgaaggagagttttattacagttagttgtactacgttggtctgttgttgcatgtactgtattttaagttttaactatgtttattttggtttggtttgttaatgttttaatgtgtggtactctttcgactgagttaattaaggtttgactttgtataatgtcattgggactcttagcctactgggtctctcttaatctataacactagttcttttttatatagctttctctactatagtttaagtttactgtttaagatgttactaccctctctctttttctactcatcagctactctcactcagttaagcaaaaagtagtaatgcttttctaattattttttcttttaggctaaaaatattaattttaaataaacaaaataaaaatgagaaaattgtattgtatactttatcaattttaatttttactttcattttatactacacttaagtggagggcgagatatattaagcagtcacgaaagagtattatttggatacacatatttctcaatttatccctatacctctcaattcattttgaaagaaatgggctgggctgaaatctaatatcaagcccaataaagagttgactgtatccaagtatgattgtttcggttttactgttgacattactcatgcaaacaaaaagagaacccatccaaaagaaacaggaataaaggaagctagcatggttaaataagtaatcactgctggaaaatccccataaggcttcttatttaaggttgcttttgttcataaaggacatagaattaaggagatgcatctttttctttctttttgactaaaagggtaatgcaactgagtaatttcagttctaacttctaatcaacatgtcaggcgttgatatgttggaccacatataccttcaaccagcataataaggcctaggaaaacagagtcaagcaattgatctaaacatacaaattcgaaagcaggtttgaatcacaccactactactcaagtaaaattataactctcaatattttagattttaatataaatgggaaaatatgtttcttttatatactaaatctcaagatgaataccctctctgtcgtttttcgttggggacaatttaaatcttaaagaaaaaagagtgtgaaactaaagtagaaatttattcaaccacagctgcaatttctgctccttttcacattttacttgttgatcgacttgagtaaacttgcttattcataaaataaacttagaagtaa

SEQ ID NO: 1892 - DNA, 3243 bp, Cannabis sativa
tgtgctcataaattttgtttactaaatttacagatcaacccttagagctagcagacgatatttggggatcggctatctcatcgccgttcgatgatgatgaagccgaggactgtgatctggtctatatttcagaggttttacgagtttcgaactacatacaggaagactcagatattttcctattggtggagaagaatctgtatccgaacacctctaaaatctcaagactccaacgacgacttatcttcgataccataagtgagattctgaaccgaaatcggcagttgcctccgtggaagatcgtaactcctgtaaattctcagtcggatcaagtgtcactgagggacatttggtctgaatttaggaaaattcgagagagagaggagtcggaggatttgttcgaggtgatctgtagagttatgaagaaggatttggcgggcgacaccgttcatgggtggggtgattcccctattgaagtctcggaagctgttttggacattgaaagactgatattcaaggatctaatcggtgaaaccatcagagatctagcttcattttctgccatgagctattatcaatcttcaccctcgtgtaggaagttggtattttaaaaatagggtcagaatttaagaaaaaaaaatgaagagagtaattttggagcgtttttttacttcacttcttttctactttgttagattagataattgcaaatcgcgtacgcttgtgaaattagtccaattttagctatgacatttgaaatttgtaaaaagagaacaaaaaaaataattttagtgtttaattatatgtttggtgatggtccacaccgttacaacgaatggaagaagtaaaaggtccacgtgttcgtttgtggtttcagctttggagtccctaattagtttaaagagaaacccaaaagtttttgggtacttgcttgttagagtaaacaacaaattaggaaataattttttttttagaagaaattaggaaagaagtggcctgaaaagaaagacactattttgatactaaccactaaattgtaaatagttttagagtttgaaaaatgagcacaatgtaactaaaaacatgttttcaatgattgctaaaagtttccaagtgctacacatggtggaaaatgtgaacaaatatatttttgtcaacttgaatgctttcaccgtaataatccttaattttaaagtggttagttgtaacaatgagtttcgaaaagatggtatagaaatcacctatatattgtcactttcgtttcttttttcactttattctcagttataatgaattgtaccctcagtgggctcatatgttcactgcatgctttgtatttataagacaatttttcaataatgctatggtgaactttcacccatgtgtgtctgaagggttcaaactatggttggtgataagagaacttctacaccataaaagaaaatacgggctgtgcagtatgcaattatatgtgagcctgaggagtgccttttggttgtagctttctgggcctacaggtccattctgatcttcacttttccaatgtaagacagtgtggacttttaacccggtagaatggccatttttttttagtttatgagcccatctacatctctaaacacagctaccaatgtaggttttgcctgttttactagcaaagatttatgctgccatcgatgcatcgtaagtaattaaaaatatgaaaatgagtctacacccacgaacttgtcattagagttaaaaaaattgaggtctctcatattgtcccctcttaaggacacaagctttttttatttagtgtttgagatgtagattgatgatgctctagctagggcacatgccaatttcctttctttttcaattcaatggtgggggcattgtttaatgagggctagtaacttgtttcttacctgctcaagtgaacaaaaagatacaaataaaaaaccaaaaaaaaaaacacaaaacaaatgaaagaaaatgtagttcataaattttgtccaatggtttggttgtgtcatgatcagtactgatgagtctttgtctccttcattggggtccccttagtcagatgtaaattttgactaggcaatgggagttcattattgggtgagtattagtagtgggtgtactaccccaatcaaagtaaagtaacccaggaaaatgtcatattatggtccttaggccaattgcattcataccatgtgaactggctctcctgcttctttatttcattacccttttccttcattttcaatagtgatttagtaatgtttaattttctttagctacaaactcagtaatttttctgtttattaattatgaatatttatataataataataatatagtgaaaagaattttttctattatttttatttttaagagtttcacggcaactaaaacatcacacgtacggctagataacagtcctaaagcaaatttaatttaattagttttttttaaaaaaaaattaaaaaattgatccctaacttcaataaataataataagtttggttacaagatgagaagatacaaatttaaattaaaaccattccaaacattctctttatccgctcctaatgctttttttcaagactatgagcgaaagtattgtttcccttgagaagataacaagctttacattagaaaaagatgataaataggatacaacatattgaattaagttagaaagagaagatctatctctccacttatgcttgattttaataacaagaacttcacaacctgatcaaattgaagttagagataacttaactgcaacacaccattaaagagtcctgagaagtgcatgagattcagcatgaatgagagatagagcattgtgcatagatgagtaacaaccagcaacaacatcacccctgccattttgaatgattgcaccaaaaccaagcttcattgaatccttgttgacacatgcatcaatacttagagcatattttccaggtggaggcaaaggagacaactctaaagctgaagcagagatgttatgagtatcaatattagagcttctttgagcatttaaataatcctgcagtaaagagacttctttacttaaactgtcaaaacctgctaaaaggaagtctttaatatcacaatgtatattattattgtaaaaatgagagaatctggcgtgattccaaatattaatcactctagaacactctagcagtgcatgagtgacgatatcaatgtgatttgagcaaagagagcagtacgggttgt

SEQ ID NO: 1893 - DNA, 1882 bp, Cannabis sativa
tgatttcctacacaaccaaaagaaaaattactcaaagtagttttggaagacccatatatgtaactgaggacaagtatgagaaagacacagctatccaatgaaaaaatgaactttctctgtccaatcgaataagcataccaaatcttcagctattatattaatctttccaactgctccagaaatcgcatcaaacagagatttaccaggtcctgcctactgacaaaaataatcagaattagataatgggaaaatttagtagaaaccatgactagctctgagaaagaagctgaccttccatcgtccaaccattgcaatttttgcctctgcgagcatataaatattagtgaaagaacaacataaatacaacaaacaaaaggccagaccaaatatattgagagcctaaccagaaggaacggcccagaaaccagcaaatcccctgaagtggtctatcctgaattcatcatatagatcctgagcacggcgtaagcgacgtatccaccatgaaaatccatctttctccatcgctttccaattataaagagggctttgagttaaaattatttaattagcaatctgtatagcaagccgacagcaacaatatcaagtatttttctttaattatttaataatcccgagttggttctggataattcacacacgtataactcatatataaaagctagatggaatttaaatcaatgcctttcttaagattactttacaatctcgaagtgaagtatatgtccatagtaaaacttaggacatgcacacaaaggttagaatagacaacaatctaaattacatacacttcagatgagtatgcacattgaaatttggctttccaattttaaagaatttaaccacaaaccatttctaagaattcatgtatattcttggtaagtgtctagaataatatacctgtcccacagctgaccagtttcactgaaggcatcaggaggaacaccactaactagaagaggaaacccctttctgttctgcaagacagatatgtggtacctatttgacttagtatatgatactttaccatgattttgattatgacactgcatgctacacaccatcatcatcaacttacaaactacttacaagcaaaaattgtttcctattggcccaaacgtcagcactatgataaccaacataaatgggcatatctcccataatgctaattcccttactctgagcatacttccgaactttctgccattgtctttggaataagaattgttgagcaatgaatacatcaatctgtaaaagtcagatgcttgagctagtagcaaacaaatttcaagcatcaataaagtaaagaaatataaacctgtgaaaaaaaatcaagagtcatcctaatcttacaaaattcttttcattctggtagatgtcctccaaggctgtaagatggcggttttttaaaggttcaggccacagataccaactaaaagtattttggatgttgtcaattgcagcaaagtaagctgcatcttcaagccagcctgcaatattaacaaacaaaggtcaatgtcgacgtaagaatagtagataacttaaaagatgagcgaataagattctacatctatgcaagtgcattcttggagttagaaggtaaaacgagataaaggatactaaaatgtaaaaatcttacttgatatatcaggatcattacgaaaatcttcaagctgatttttaagatcgccttcgctctgaataagtctctcagcagcctaagaaaacacagtatacagtgaatttcgtaatctaataaccagttactaaactaacagggtgtggtgcaaacaaataagctcccaaacaagaaatgaaatactaaaactcctatactcttagttgatgtgcgattatgatagac

SEQ ID NO: 1894 - DNA, 1841 bp, Cannabis sativa
ttattattagtattattatttttaggattagggaaatgtggaagccaaaaagtgacacgtgagtgggtctctataaggtgtcaaggtccggcactgattataacaacactttatggtcacatgcttcgttcacggactcaaaactcttttttttttttttttttttaatttatttttctaatttttttgtcatctttgattcccttggctacaaattcaccacccttcttctcccaaaatgtaaggcatttttcttctaaaatttccccaataggtcccactttataacaaatgaaaaaactatgtctattatataaacttggttatgattagtataaattaattaaataaatatgtaggtatatatatattaatgttattattattattataattatggagagttgatttaaagaaacataaaccagtatcatcatcgcccatagtttcttatgccatccatggtttttattcatgtgtatatatttttgaagtaatgacaaagtagtacacaaatatagtactgttacaaattgtacagcttaaaacaataataatgtatgtcataaaacattttaagtaatttaaattgtttttttgggttatgttcagagagctcagatcacatgtcttaattgaattttaacggttttaagttaacaaaaataaaaataaaatgcttacatctttaagtaatatttaactaaaaatgacttattaaattagtactgtgatcaaggtcctttttccttataaatcactttctttcatttttatactaaaaatttccctacaaaatcacagcttaataaacaaaaaaaaatagtttattattgtatgtgataatgatgttagcacaaagcttaataataatttttgttaagaaaaaatagttatgagaatgtaacaaacaagaatgccctctaaaaattcttagaaaatgatatggaaagtgatgtaaagggggggatttatttggacaggaatgtttatgacagaaatatcagtatttttatttatttatttatttattatttttggagaggatttgaaatttaattggttgatgatgagagtagtgagatgaggtagttaaagtaatatatatatgataaggtgagacagagaggaatgagatgaatttgtatcaaagtattttctgtggctataagaagttatatatatatttatatagaatttgtatctaataagtagatgagaagaattatatgaaatgatcaaaacctcattttcattatccccaaagagacactgactgtacaactctttgacctcacctgtcttaactctcaagagtccctttccacattcccattaatttttcatactatattttgttacacttctcttctcatctcttccaatttcatatgtcacttttaatttgctactatggaaaatcatacttatctacacacccactttcctttttcttaaacccctaaattgacattatctcttattcattaataatagtataatagtacaaattatgaatgttatatcaacaaaattaacatgtatgagagtgttttgtttttttattaggtgcaaataggatttatatatataaacgttttctctttcaaatctcctactgacccaaaaagtggaatctaataataataataacaataatgtatgtgtgtatatataaataccttaatattaatcatgtacttgggtggagacatatatagtcagaaaagatatcttgtgttttggtatttaatagtcttctaattagaaccccactttggcctcgtatttgtatgtcttttattgcttttaatttgaaaataaatataaagaaagaaatt

SEQ ID NO: 1895 - DNA, 4610 bp, Cannabis sativa
  modified_base (3557)..(3566): a, c, t, g, unknown or other
  modified_base (4429)..(4434): a, c, t, g, unknown or other
tgattaatttatgtaactttgatgcaggatgggtaggttcagtcatttgcttatgcaataatgcttttgctccatcaaaaattgggtttgattctatttgctttgttttaatgaaattgagtttggtattaccatgctagtctagtatgattatgattgatgttgtttgaactatctgacacatggtattcaaatttcaataatcagttttttttttggtacgtttaacatgattcacggataagaattatgaatttgtgggttgtatattagatcattagagttgcttatattgcttatggagatttaattttggcatcttgtattaagctacttttactacttatgattggtttgttcataactttgtgcaacttctatattcctttattctaattaggcattttgtaccaaatctaacaattggagctccagtcattgagagtttgcgaaaacactcaaagtaagatcttcttatttctttactaaaagacttaatgatgttgatagagtatgtgtttctttaattggaataatcatgaaattgcattcttcccacttacagagcatatttggattgtcaccttatggtcacaaatcctcttgattatgttgaacctatggggaaagctggtgcttctggttttacttttcatgttgaggtttccaaaggtgggacattaatgtttgacatatgttttttataatataaatctttggcttgcatttttcttcttgtcaaagattggcttattttgtttcgcatgttacatttttatttgactagaaaactggcaagaactcattcaaataataaaatcaaagggcatgaagcctggtgtggctttaaagcctggaacgccaattgaagaagtttatcctctggtaggcatcttttcttgtttgtttttttactttgtctcactatttcggacttttgtaactaaatttatcccaatttactgatataatgtaaatctaggttcattactaataattcatgatttagtacgcttaatgttacaccagaaatgtttcaacttgcaattaatcagacacttgtattgtattactccacagattgaggcggagaatcctgtcgaaatggtccttgttatgactgttgaacctggatttggtgggcagaaattcatgccagaaatgatggataaggtgccatccatttgttctattttctttcatttgctgcatagcattgcactgtaatttctacaccaagcttttcttttcacagttgagcttactgtttgtttacccctcatttctttatgtaggtgcgcacactgagaaagaagtaccctgcacttgatatagaagtaagtccttccttccatgaccgtattgccatatttaatcttatatagctttctttagtctctcctctcttgaacaaacacagctcgcattgggcattcagctcctgatagtttttgaaaggcattttgggtttttcgaaaattttaaacattactattttgtgtactaccatctctcctctttatggtttgtatttaaacaagttttaactgtatattttgcaggtagatgggggcctggggccttcaaccatcgaaatggctgcttcagcaggggcaaactgtatcgttgcagggagttcagtgtttggagctgcagaaccagccaaagtaatatcccttttgagaaacagtgttcagcaagcccaatgaaagtaacacagttgattttggtaaattttgatgaagattgatatgttttctcagctctttaattgtaataaagcctatgaaataaattcaactttaaattgatatatctaaatgtttgggatacagaacttttcactacaaatgcattataatgtaactctaggttcattacttttctactggatatagtaggccatatagtgagaactcatacatgaaattctttaatttggtctttgagatttttttttggttgcaattaagtccttgtatatatatatattttaaaaccagattctaagtttttctatggataaaactagtattttcttatatattgcacttcccattttttttttaacatttcactatacaaaaaatgtaaaaaattcattcaaaatcaaaagatttgtgaaaaaaaaaatgaaaatgaacatcaaggatttaagtattagtattacttatctccaaaaaaaaaaaggttttaagtattactctgtttataggagttgaggattgtatttttgtttttctcaagattgaattatcaagcaaataagttaacttgattttgaatctatgtagtatgtgtatacacacatgtgttaataatctttatgagagccaaagatttttttttttgataagtatgagagccaaagattgatttgtcaaattctaaaagaccctaaaaatctacttggttaaaacactataaaaagattccatatttgtgcatatactacatactactttacctattgaaaagatttttcattgtctgtaagcgcagcagaaattccatgcaaagaaaagcttgtcacttaattagttattctattctattcattcctgaaactgtattgatcattgtaatatttagctgatgaatgctgccatcagatcagattcgtttggcatttatttccatgcatacatgttacatatgctattgcatccaatagtgttggacaccatggtgtctatatcaatacttaacaaaatgttagtttgaaaacaaaaatcatctttaatacacaaaattgctgcaaatttatttgcaattcttttgggaatattatcttaatagtttgtttttttatttaatttcaaatactttgtacaatatcaaataaattcattaggtaccatatcatgtggtatagattgaacacaaaattatgtggtattaagcacaactttttattttattgtaatatattttaatgttatcactggtaccatatcatggggttccatcttaaaactaattggtgatgagtggagtagtcaatgttcttatatatggctcaattctctaccatttattccatgtgagacaatatccacaatactattaatagaggtagtaatctccaaagccccacaattataatcttaattaatttaagaataattagcttttaaacttttcacactacttgattttgtcccttaaaatatatggtttgttaaaaattctctctgaaatataacagttacataattatgtctcttttgttaggttccatttattttaccgttaaaagttattatttttacttcttgaactttaaccgatacaaaaatttaccccttttattaaaataaattaattttaaatattacaatattctattaattttgagaaaattaataaaaattattaaaaaaacttaagtttacttaaaaaacttaaagtatttctaaaaaaatattttcaaactttattttatttataaacaggttttttaaaaaaatcaaactaaaattattgaaaattcaataaataatttaaacaaactaagattttttaagaaaaaattaaacttatttatatttataaannnnnnnnnnaaaaaataaaaaaaaaataaaatgtcaataaaaacataaaattattctgaaaaaagttagaaattaaactaaaaaaagttatgtttacttaaacaaatttagattttagaaaaaaaatagacctaactttgttcccgtaaaatttaatttttataaaaattaaatttgttaatatttatatatctaaatgtattttttaataaaaattaaagggatatttgtagcaaaatcccttaacatttataattgttacacatacaattctaataacaaaagtagcaccaaaagtatattaacttataattttattgcaatcctacttttttttggtcattaagtgttaacacagaaatacgtgacgacatattattagactgcatattaaataagctaaagaaatatgtcgccatgtatttatgagtttgcacttaacgagtttaattgacacttaatgtctaaaaaagggtatgactacaacaaaatcgtaagataaaatacttttgccgtcactttttttattaggatcatacgtgtaacaattgcaaatgttaaggggattttactgtaattatccaaaaaaaaaaatttaaatcgcttaattcgttttaaaaaaattggaccattttcatttgtactacccttcaaaacagtttttttttttttacatttttacagaattctacatagaaacccctattacaactaacatagcaacctaaatcacaataaaaaattatatagcaacccacatagaaaccaccgcaaaaatcactttagaaacccaaaccgtaaatttgaaaaaaagtaaaaaaaaaaatagtatatggggtaattctcctttaaattttttttatttttttttnnnnnnttcttaatcatttaaaatgattttctttcttttaagatctaaattaattttttaagatttactaaaaaatgttaaatgtttctcatttttattttgaggagtgcgatttgatagttatcaaaatataagagataaaattaattaacaaagatatatcaatatttaaacgaaataat

SEQ ID NO: 1896 - DNA, 623 bp, Cannabis sativa
aaatcaaaatcggtgcatacaagggctcaacattgcagcacaactgtttaacaatcacttgaagtctttggtagataccatgaagccacaaatgccaggctctgctcttctttatgttaattcttacaaaattatcagagacatcatcagaaatccttttcagaaaggtaactagttactctttttcattttaatttataatgaatttgttggacaggataatatggtgtagtttattatatagggacatttacactatgttatttttcgtaaaaatgtaaataaaaataaatcagtaaaaaaatgtcattttttcagtaaatatataagaataacacaattttaagtataatatgtaatcaataatctcaaccgttgatttgttgatatctaaagatattctctatcactatataaaagctacattttgttagtaacaagtaaccttttagtaagaataaagtaacaagtaactaatatctgaatattatttttttagtaacaaagtagttttattatttggttgttgttttctttcttttattttttatttgtcggaagaaaggagatcacatggtgtagatcctgcccactcctttggtagcttagacaatcttagggac

SEQ ID NO: 1897 - DNA, 1569 bp, Cannabis sativa
aggatattccttagaacgatcgacagttggttttgaaatggatgaattgctggactgcccaatatcttgagagagtgatgcattggtagtgcccaaatgaagatcaccattaacaatctgtttacccttgagatcaatggtgttatttgcactaggcacatctaagttaactcttggggtttcagaggagagagttttggcatgtgttgaatcagaagtagtaaccccagcattgaaatttgacagtcgtgagtgtggaattggagtaccagttgctggtagagtagaagttgtatagcttttccccagtcaagatataaaatgatttcctacaccatgatcatcgacaaccacacttttacccttaggatcacttgtaaaattggtacaaggcttcttaaaattcactccttcaggtaatgcagcagaaggtgagtagtcttgtgaaaaaccagtagcaacaagtggagaatttgaatttggcatatgctgacttgaagatgtgggagaaccaattgagggaatgcatttttctttatcagtaggtgatcgtggtaatgcagggaatggggtagggtgagttataataggattgatagtgttacagactaatcgagtgataaaaggccgcggaccagatttagaaaaatcctgacgatacctatcataacttgatcttggtaatgccgatccttccatccaaggaccatattcaagagtaggatcaatgccgtcatcaagtttttctaaaaataaagagcacttgtcgaaaacatggccaattataccacattcatagcaaaaatctgggagtcgttcataccgatagtcaatccaaagttcatcagcaaccaaggaagagatatcatttgaccacggagaagaggtttggacacatcaataccaacccgaatcctcaaaaaaggaccccatccttcattaagagagtcatcatgaacttcaagaaattcacctatgagatttccaataatcttggcaagcgcctcagatttactgaggaaaggtaacctgtaaacttggacccaaaaaggagtgatcgtatataaagaaattgagtcagataaaagcacacttggggggcataaaataagatgctgattatgaaaatgccaaggctccttggacaacacccttctcatatccccttcacaaccaaaagtgatcatgaaggattcagaatcatagtcagacacagtaacagcaaacctgcccaaccattgtttaagaataaaattcttaaattgattgggattgaaacctctcttagaatatatacgacagagtacacgaacagaagtaacaccaataggaggagtcgagataccctggatattgacaacaaccctttctcgctctgtaagggcctttgaaacatcattcgagaaggaatccatgaagattagatgacagggaaggcaaaggtagatggaaaaaccagaaaagaagatgaaaaaccagagcagttttttgattttttttaaaaaaatacgaaggcgggaacggttaggtgaaggaaaaaaggaattgtaactgaagatatatggttaa

SEQ ID NO: 1898 - DNA, 1159 bp, Cannabis sativa
agagctttgttatgttttgcagttctactggagaaaggtcctgaagatgttaaatacacttcggccatggcgttgatggagatcacagcagtggcagagaaggatccagagttgagaagatcagcattcaagccaagttctcccgcttgcaaagctgtagttgatcagttactaaacatcattgagaaggaagaatcagaactcctgattccttgtatcaaagctattgggaatctagctaggacatttcgagcaacggagacaagaatgattggcccactggtgactttgcttgatgaaagagaagctgaagtttcaagggaagcttcaattgctctaacaaaatttgcagcaaccataaactacctccaccttgatcattgcaaagccataattaatgctggagggacaaagcacttgattcagcttgtgtattttggtgaacaaattgttcaaacatctgcattggttttactatgctacattgcactacatgtaccggatagcgaagaacttgctcaggctgaggtgctcactgttcttgaatgggcaacaaaacaatcttatgtgacccaagatgaagcaattgaaacattgttacaagaggccaagagtaggttggagctttatcagtccagaggctcaaggggattccattgattcaaagccaaaaaaaaaggcttagtagtttcttgtaattggtaaaaagaaatttcatttatcttatgtttttttcattatcatggagtgtaaatacattaatttgccttctgtaagtgtttagaagattttctgcattttgagaagctatttctttctgtgttctatttctcccccaacacattattagcctctcagtttatccaaaactaggtataatactgaaaatttcatatgcaaagtacaccacagattactgataacaaatttcaggcttccggttcttgatttttttttctttctaaaatgcttaatttggcttctgttaataattgacaagggacaacataactggaaaaagagatgaggtggggaaactatgtcggcaagaattatactataatgaaggacatagtagagtgtgtggaacaagtacatgaactttgtcccattactaataactgtaatgagttgttaacataaaaacataatcaactta

SEQ ID NO: 1899 - DNA, 4205 bp, Cannabis sativa
  modified_base (109)..(123): a, c, t, g, unknown or other
tatttaggctaattagcatttttctccccaaattttaacatgtacaaaattgtgccattgaacttttttggttgttaaaaattccctcctgaactattaagattgttannnnnnnnnnnnnnngtctaattttagtaaaaaaattcttacatggatgaaagttcggtggcatttttagtacatatcaaagtttgaggggtatgatttggtggatatcaaagtgtggggagcatggtaaaatacataaataatcactgaaatagtaaaagaagcaattgaagtgaagaaagctctctcttggatgatatactctgattgacattatatggtcattgaaactgatagcttagtactattcaaactattcataacaatactcaaatgttctcagcatttagtcttttgattaaagattgtcaagttttactttctattttatgtaatgttcagttactgtttagcaaacaatttgataatcaaatagctcactacgtgactagaagttctcgattcttttcaaatcgtagcatttacgtttatgttgctctagttgagcttcaaacactattgtactccaaatgccttcattaatgaatattttaattatttaaaaaaaatgaatattttcattcaaaaaaaaaaaacataatggcattttattggtgtgaagatattgttaaaatgaatttgtgataaatgaaaatataataatttgaaagaagaatgaacaaaacaatgaagtattccatttttttaaaaaaaataaaaaataaaaaactaaaatgaactatatattgtggtcccggcggggctcgaacccgcgaccttcggctcataagaccaacgctctaaccaactgagctacgggacctgagtgcttagaaaattagcaataatatacaaataagacaaagcaagatacttttccacgtggcaagcaagaacactagcaatatagaatttagcagagtttcctgacaagcacacagaaacatccaccaaaccaagtgcttcaaatacagacaccactaccattttattatttaattactaacacttcatcatcagaccttttttagcaaaattccaaacttgctcaatacgtggttttctctcattggttattataaaagtgattagcactaaattaaataaattaatactcagagacgaaacctcgccaggctcaaacccaagccccgtgaagagagagagagagagatgacgctgggtctgatcaatgcgaacccagttgttcacgccaagaaggaaagagtagctcgaactgaagatccccatgccgatgatgatgcagttgatcccctcgaaatctatgatatccttttttacttaaaagttcttttaaatttcgagttttgatcattgtttttctttagtttctattgtgtgattgtgtagtgagaaccacactgtaccaattgtgtgcctttgacttgtgattgataatacatttcgtgagagatattagagatccggagcatccatattcgttggaacagcttagtgtgctttcagaggaatcgattaccgttgatgataaactcggtcgaattctgtgagttatgttgattgaacaagtctccgtttcaatttctttctttttagtttaaatttcttcaaaataaataataaattcataatttttgtttttcattaattacaggataacttttacgccaaccattcaacattgtagtatggcaacagtgattggtttgtgccttcgagttaaactaaagcattattttccaccacattataaggtacacttaaattttgctttaagatgtagtttcatactcctttttatttttaggctaatttagattttttttcctagttttcacagtattaaatcgtgtcttctaaacttttgatgctgttaaaactttattctaaactattgagattgtttgagcaaaggactttcattctattccgtttaatattactaatgagcagctagcatgaacggaagttcgagggctcaatttggtacaagtaaatgtttggcgcatgataggtatatggacaattgtcacaatagacgtttaaaattaaacgaaattgaacgaaaatccttaatctaacgatctcaatgattcagaagaagttttaacatcctgaaaagtttaggaagtacgatttaatatctatgaaagtttgggaaaaaaaatcataattaaatttatttttatgatatcttagaaagacccaaaaaatcgttgcttcaatacaagtatttattagtgatgaaagtttttgtatgtaactgctgagttgataattcagtacccttttaagcctttggttcagtgaaggcctaatctttcagtttacatgaattgggcattataatcttaacccttaatattgaaagtgaatttgggttaggaataaggctaattctgtcatcaccaatgttagcttagcttaaaacaaccttatcaataataagaatttgtgattatgggaattgcagcataaatatttgttagtgatgatgaatttgttagacctgaaaaattaattatagtaatagtaacaaataatcttcataatcaccaacttcattattgccattgaaacctggataaattgcttattaatgaattcaacaggttgacattaaggtgtctccaggatctcatgcaaatgaagactcaggtaagaaatttttttcaagtcatgtagaaaactaacattgatttcttcataagattaacttttgaatgtcttggaaactaatgttgatatattattacaaattgatattttgtagtaaataagcagttaaatgataaagaaagagtagctgcagctctggagaatcctaatatttgccaacttgtggatgagtgcctttattccaatgaactctgatcaagtaaccatctgttactcctgtacatgagaacattagtggccatcaataagaaaccacctttgttatcttataattatataattttggctttttgttccttagatatatttgactttttttttttcctttttttatgagtagccttactgaatattgctccacataaattttctcaatatatacacaacaatttgctgaaaggttctttaattaaatagtaaggtatgacttagtaatctctatgtttatgtattttattgaatgtattagaattccccaagtgaatacttggtgaagtgtctttatctttttacaattaatgattctgttaacttgaacaaatttgaagccaaaatcaacactaatagcattaataagaagcacaaagcattacagtaaatgaaagagtaaagtcgtgagatttagtcaagtctcttagctcatattatttagtaatgagaatagaagacaaatgttttatcaacctctataaatgtgaatagcctcaacagtaaaagaactaaacaagacaaatgttcatgttcccatcaccaaaatataaagctaaagagatttatcaactgggttaagatttttgggaagagtcatttctcttgagtctcagctagcaggtggagccaagggaatgggattcggtgccaccacctctggcccaaactgaccatttgtctttagagatggcttgtcatcaaaaccccagaatttggcagttttgatatcgtccagggccatcatccttgaaaattcttcatggtcgtattttaaagtggctgtggctttaccaccaaactcaataggaagattatcaatgtcaaaatatgacttcattagctctacactgtctttgcttttcgggtaagcgaatttcaccttctgagctgtcttttgatcaaggaagtatttcacagcctatacagattaacaaaaggggtaattagtaaaaatacataaatacattttgttaagcatgaatgatctaatatcaaatcaaaccttataaaaagcttggaaaatccttggtgggttataaagaaaaacaacagctagcctctcagggtagtgattttgaagaatgttgataatatcacgagttgtcttaacagaaatgcttgtgttcattgtaaatccagtgaaatcaaccaaccatgacatttgctcttgatcctctggcaagttgaggataccattttcaatgagatagactaagtggcgaatattgccttctggtgaatttgtgttctgtagtaataaaaatagattacaaaatattcaaaag

SEQ ID NO: 1900 - DNA, 2580 bp, Cannabis sativa
atattggataagaataatatagtaggtagttatacacaaattttctaccaaatatgtaaaattatattcatataaaatattatccatgtacatttaatacatcattttatatttttgatacacaactactaaatatcttccacctacatatatattaataacacttcttatatggtaaaggtcatccaaccgttaataagatttaaaagcaaattcatattataaaattaattaattatatgtgtacattgataaatgttttgtatatttgatagaatcactatatccctaattaactagtaattaattatatgtgtacattaatttcttaattcgaacttaaatatataacattcttcacatacttttgtaggtcttaataagtttgaattccttttcctcaaagtaaaaaataataataataataaaattaatttatatattaatttgataacaataactatatattatgtattatgtggttaaccaactaatattataaatatatatttggatttataatcaacataattcaataattttttcgtggcagaaccaaatatcagtaaaattataatttttggctcgttttattagtataaaatttattaatgttttaaataaaatatatgtaaggttcagattttatatcattaagtatagacagaaacatgtggtattaattactttgaaattttcttttatcaaattcaaaactaagtctgattacaatttaagactctaacagagtctatactgacaaaattggatgaaaaaatacagttttactagcattgattaaatatttgtgctgttaaaaaaattattaaatctacatcgcttacaaacttaaaattttgaatatttatgttgtaaatatttttatataataatatcatttcttatatggcaaaggtcattagtgttttaacataaaaatcatcattagttgtaaatatttctaacaagaattttttgcttttattcttttgtagagagataccataccaacctaatttgaagttagaacttataaatgccatatccaccaaccactctaaaaaaaatgatgaaagagacttttagaaaggacattgggacatacctatgtattaagtgttttaatttattttagtgcaaaagaaaacttcaaagaactaaagactaattagaagtagtaggagtaaatcttagcaatatttataatagaaataattttgactagtataaaacactagaaatttcatttaaaataataatagccctttccaaggaaattatgacaatcacttttgttatatttttttatttgtttttgttctcattcaaatgaaagtgacttaaccattaccattttaaaaggtttatgttttatgtttcacttaaattgataaattttattgttaaaaatagtgacaaattttgacataaatatacataacaagattgtatagcaagtgtgttacaatacttttgtttgcattggtagagattcatttttgatatgtgaagaaattatatatttttttatacgacagtgtacattatagttataattatagcatgtatcttactaatttaaaagaattttaaataattcaaattaataaaattagattcaaattttgcacgcgatgcaatgacttattttgaataatatttgaaatacttgtaaattattcaaaattccataaaaaaaaatttagtgaaatatgtgttacaattgttagagtttttatttagacttacattaacttttattggttttattaaaatttaagttaattcgatagttttttgatgtgttaatccatattgttattgatcaatagttaatggacttaatatacgtgtgtgtaaagtcaagcagaaatatacttttctagttaactgaagcttttgatgattgcagactcaatccaattagtattatgtagctaagtcctctctctaactttttaaatattacaattgtataccttttaataatcagataaataaaacagctcataatttaaagatctaaggagaaaaacttaattaatagtattacactatcaaattacgataattgatattaattaattaatcaagtatatatatctaattcttatattctaaattatatacaaatttatatattagttatttaattttctaacaactactacaattacaatatcattaaaaaaagttataatttatttatatactaaaaataaaaaatatatattaataacaatattggcaaaaattacatcccactataaaattttcaaacataaacacacactcatttatattataatattctttgaatctttagaaatcaaaattggtgtaaaggtttgtacatatcttaatataataaatatatttatttaattttttttttatccaaattaagatagtgaaagttgttgatgaagataaaggcattacaagtagaccatgtacttttcctctttgtcttattatgtatagtgccctaattagcacggatcacacgcaccttctcaaataaattctcttttccacaaatatatatgcaatgtttatcatattctatcaaattttgga

SEQ ID NO: 1901 - DNA, 4462 bp, Cannabis sativa
ttgttactagttgtagtagcagtaggttctttctcaggtttagatttccatccctttggaactttttgaaagccatcggcatcaactttgttgctgtcatccttttcttttatcacaccctactgctgcccagtgaatttctttacccactgctgctgttttttgggttctttccttctacattctgccgtcaagtgccccaaaccttcataatgtgcacatattacaggtttccattcatacgaaatggtgactgaagtattgcagccattctcatcctcaaattctatcatctcgggcaagtcttgcttaatagaaacctcaatcaagactcttggaaaactcagtttttctctattttttgtggcctcatcaaccataaccggcttcccaatttgtccaataatcttgaacaaagacctctctccccaatacttgagttctaggtcatctagatgaacccaaataggtaccatcctaatatcttcttttttcacattgatagagggctccaattctttcatgacaattggtcttcagttgaaaaagatataacctcccctgagcacatcatctctagattcaactgaataaaaccgaatgatatagatgccatatgacagtaagccaactctctcaactttatcagtccacattctcctcacaaaaccctcaaacacagctaacgggggattcgctcctaaaacgtaacaaactattgatggtttccagaaatccacttcctcttgaatatcatcattagtaatcttcaccttattacaccctgaatttgaaaataaattcctaacaacaattacagatctcagtataggaggattcgtagccataccttgcgaaagctttgcagaacattgctcagaggcttccatgaagtgggcgaaatccttcctgatgtcttcctgctgcataatcgatcgaagagaggacttcggtgataaagcctctggttccagcaatcctggtggaattccaatagatccatcaatcgagtcttcatcttcagcatccgagaactcaataggggcaactccaagaaccgcatccattgatttagtcttcctgacatctgaaacagaattcggacccttcttcttcaccagcttcgtcgaattccctttcccacgccctcttcctcttgtcttcaccatagctccagcacccgctgccaggagtcgagagggagaataaagttatggtttcagtttatatattctaaaacattatttaaacattattattatattttatgtttttttaatttctttttaggttgttgttgtcctatttgtaagtttttttttcttttctgttcacttaatatgttgatgtcgaattaatttgtattttgaaagttaggttgttatccagttatttttgttgttatttagttgtttttgtgttattattgtgttgcgaaaaaaagcctaacaggacaaagcccactacgtccaaacttgccacgtggggccactgacgatttgatgctgtaatcttatgcgcgtcagtcaactttgatgcttttaccccactcgcgtgtgagtctcacttgctcacatatccacatgtacggctcactttcttatccgcatctgggctttatttctaccgtaaaaaatttaaaagatagtatttttgaaataagtaaaaagtataaatgtttatttttccttgtcaataaatgtttatttttagtagtattaatgccaaatagaaaaaatccctagttaaccctatttgcaataatatatctacgctactttttttgaataaactctactgtagtttttaaattgagtactttctcttaattatgtgttattgaacatagttatgttgcagtgtaaaaggatgtgagtgtgaccgtaagttttatgtaacctgatggtagagttttttccttttgtttttccactacattatatacagatatatatatttgctgaattatatatatatatatatgttacatgcatagatagatacattgtcactgtctctcacccaacatcttattaaaagttgaagcctgagacacaaagcagctgcaaagcaacttcaaactacatattttttttttttttggtacaataatctaaacaaaacatatatataatttatatatacggtcaaatttgcataaccttttaaggtactctgtatttctaaaaagttattattgcttccaagctttcttaaagtctcatgcagcctttgctttacctaatgatcaaaatattatatttccacagctctctttcaacaacaaccctctctcagaaaacgtaaccttccatctgaccctgctagctagctacttattatttgcataaatattcaaatgttttgtcatccatattggcatctgtaatcaatttctcaatagcacattaacatggcaataatgtaccaagcaccctcatcactaattctttctctctttctctttattgggtttctatcttccacatctgaatctgctctagtaaagtaccagtttgatgtaagtgtacagataactatattatttgagtacttatcaaagtaatgcgtatagttattaattgttaattaatgaataatacaggtccaagtgaagaatgtgagccggttatgccactcaaaaccaatagtcacagtaaatggaatgtttccagggcctactatttatgtccgagagggagatagacttctcatcaatgtcactaaccacgctcagtataatgtatccattcattggtacaaattaattaatatagtgtataatttatttcatcttgttatattatatatatatatatataattaataacaaaatgtcctatataaaaatatatatttatacaggcatggtttgaagcaatttcgcaatgggtgggcagatggaccagcatacataacacaatgtccaatcaagacaggtcacagctacacctatgatatcaatgttacagatcaacgtggtacattatggtggcatgcacatattttgtggcttagagctaccgtttatggtgccattgttgtaatgcctaaacaaggagcttcatttccttttcctcaacccaaccaagaagctaatattatcttaggttggtaattaactaacatattacatactttaactaaacatcatcattaactaaactagctcataatatatgcaggagagtggtggaacacagatgttgaaacaagtgtgaaccaagcaaacaaattggggttgccaccaccccaatctgatgctcataccattaatggaaaaccagggccactcttcccttgttcagaaaaacgtaaactccatctcattgttttaattgatcatcctattttgctcaaaaattaaagacgaagacttattcatttttattcttgattttgatttcatcagatacttatgccatggaagttgagaggggaaaaacatacctcctgaggataatcaatgctgcacttaatgacgaactattcttcgccatagcaggacacaacatgaccgtggttgaaatagatgcagtctacacaaagcccttcacaacaaaatcaatactaattgcaccaggccaaacgacaaacgtacttgttaaggctgaccaacctccaaacaggtatttcatggcagccaggccattcatggacgcaccagtaccagtagacaacaagacagtcacagccattttacaatacaaaggtgtaccaaacacagtcttaccaatcttaccacaactcccacgtccaaacgatactaatgtagcattcaactacaacaaccagctcaagagtttgaacacaccacagttccctgctaaagtccctaccaaagtggaccgtcacttattttacaccattggtttgggccaaaactcatgtccgacttgtctaaatgggactcagtttgcagcatctttgaacaacattacctttgttatgcctcaagtggggctgttgcaggctcattacttcaacatttcaggtgttttcagggctaacttccctgacaaacctccagttccattcaactatactggtgccccactgaccgccaatctcggttcttctttagggacaaggctaagtaaggtggcctacaattcaagtgttgagctggttttgcaagataccaatcttctgactgttgagtcccacccttttcatcttcatggatataatttctttgtgattgggagtggggttgggaattttgaccctgctaaagatcctgcaaaatataaccttgttgaccctcctgagagaaacactgttggtgtccctactggtggttggactgcaataaggttcagagctgataatcctggtaggtttatatgttacatttattactatatccatgtttagcaatttaatttaatcttcaagagttcttttagtttgtttatttccattaagtgtttttagtgttcagagtatgatagtaattaac

SEQ ID NO: 1902 - DNA, 998 bp, Cannabis sativa
ctcctttgaagaccatggccaggtggccaatttgaatttcagagggccccacaggagtgtccaacgtttctccactatcaattatcgtactcttcgtaccgtccttctgcatggccagggtgtccaccacctctacgtccccttccttagctgtcacagtgaccgcctcgtcacggtggtcggccggaatatcgctttgagttatcattccatcattccccgtggcctccctccgctctcgaatcgcttcctggtggatttcagaaccaaacagccctggttcaaaggtcaccacatctctctgttcatcttggtccggtgggaggcagttatccccaagattcccgccgcccaagttcaatccttccaactctctcgccgccttagccgccagaatgctttcaaagcaatgtttcattcgggatccaaaccgcacccatggctcgtacatcgagacggtgtggttaaagtcatccataattactcgtcgtcttcttttgcattccatctcttcatgacccaccatcccacacttaaaacagattcgtgggaggttctcgtatttgaagtagcaccataggcaaacgccttcctccatagggatatgtaggccaaccaaaatgggttttttcgtattcagagacacccttagacgaatgtattctgccgtcggaaatccattgcgccacactctgtcaatgctaataacccctcccatcttattagctatagccgtagcattcctctttgtaaagaatctagggggaacatcgtaaacccgcacccagatagggatcgtgccgagtttgaagactgccatcttccatcttcagccaaaggttgcagtgaaagatgtcccccacaaaccgcccaggggctcttcagcaaaaccaactccgcttcactctttttttggaatttcagcatgtaaacattggtatccacctccatcaagctccagcccttaacaaacctccatttttgagtgagtacatttc

SEQ ID NO: 1903 - DNA, 1243 bp, Cannabis sativa
atattagtactgttcactatgattatgcattgaaatgacacaattttaataataataataataatatggcccgaaaaaatgggtcccttattccgagtattttatttgacaactgtggtgaacaaagtaaaaggtagctattagctaagaagcttttgttatttgttgtgtcttaaagaaaaagaaaagaaaaagagagaaaaactatgcagctttttcaacaagtttgacaaactagccccatcttttaaaggtcttggttgatctaattcactagtagttttttaatattcttttcacttttctgctgtgaaagcagttcgaaagtaaatcatgcattcaatctgaaaaaataattaaaattaaaaaccttactcttttttctctttgcatattatgtgataaataaatgttaactaactaattggtttcaatcactctgtttccctaattaattattataaattcttcaatgccattattttcccatgagtagtccctcaacatatcaaatcaaagtacacaattttcttagtttttcatatttgcatcataaatgccttgatgaaaattagcaaaaaaggatacatataattaaattaattgatctactgcacctataaccaagacacttgagaatctatatatatatatatatatatatatatgaagaaaaaacgggccataataataataaaagaataatatacagtaataataccttcttgactggttgaaacatgatcatcaggatcatcctgataaaaatcagatttccaaggtctgaattcaaggcggtgaagcaaggaagtgaaatcgaagatcttgggaaaatgaatattaggatgatgatgatgagtagtagtagaagtagtcttcttgttctgttgtttactattgttgttattattatagtaattggtagtactactggttgaaccgcctctaaccgatgaatatgagcgtcgactactactacggcggccttgatttgaagccaagattagaagcttctcattcaaacaaagtggacaaatccctactacaacttctcttgggtggaaatagcagtacgatgagctttcttcattcatgattaaaagaaaaaaaaaagaataagaagaagaagaagaagaggaagaatgtatattattattattatagaattgatcagagaagtgagtatcgaaatgtgtgtgtatttatatggtgtggaaaatattggagcattgctattaggcac

SEQ ID NO: 1904 - DNA, 1294 bp, Cannabis sativa
tatttttcttcgtctattttaattcactttatcttttctctctcttaatttcaattgataaaaaatatttaaagaaattatattttattgatgtgaaaataaatatgggaaacttaggtttgttgtaatgtaaaagataatgattaaattaaatttcaaaaacaaaaaagataacgattattttaaaaaatcaaagcaaaagcgatattttttttttaacaacaaaatcgatattaattggaataagtaaaataagtttctttttttaaaaaaaaattaattctcattcggtattcccttttctattcctaatcaaaatatacaataatactatataaacatatctaagtcccaacaaagaaaatattctatcaaatcaaaactttcatttattatcatcacccataaaactagaatttccccaaagaaaaaaacaacaaacattctttttttcgtttttctattgttcttggtagagtttcacagcgttgtttatggttgattttgaattcatctgaagttcaaagattattaataatggaaggcaattcccaaagtccccaaaatctgcacttttacaagataattacagaagacaacctacaacagaataaaattgtaagtttgttcaatctatgaagtttcttaattaatagttatacctcaaatattcaaatattagtatattagttatagggtttatttgttaataagaaccaactaatttgtgtagagtagaaaattttgttgaaacattatttgttttattgaaaattttagttttgccaatcttgtatagaggagactttattgtagtttgggatggatttttttttcgaatggaataattaactttattaattacaaacttcggctaccaaccaaggtagcaattcagttagaataatgtagcagccttaacgatattatgaactactatattaatagatcatttaataaaagaaaaataaatactttttaaacttgctagcaaactttttacaatctttaatgacaagaccaaacaaagactagtttgggatgatttagcattaaacttctatatttagagtgtcttttgaaagactcaaaattactggtttagtgtgactgcctaatagtatgagttaaggctaatagctatgaatctaatttaaatattaggaatcattaagttagggcttagtagattaattcttttctttttttttatataagctttaagtataagcaaaaactatgtcaagtaggctaataataagttattgtcatttattagtatgttgaatttgat

SEQ ID NO: 1905 - DNA, 2323 bp, Cannabis sativa
cctagaagcacaatactaaccaaatatgatcaagcctaacatggtactaatcaagcaaacaaaacatttactaaacaaagagaaagattcaatttttaatggttagatagctaagacaataatcatagtggtatactcaatttcatttcaactaagtttcagcttacatattcaacacaaagagaaagatttgagaaatctcctcattgatgagaccaatatagtcatgtatattttcactattccctaatgtctgagtgtcaattcttcttcttcttccaaaaagttcagagattcaccatagaattttttagcatccagcctcaaaatatttgaagagccagtctctcccattgattctaaaccatttatcagtattctaaaagttattctatctggatcacaaccaacctgtttcatcaaattataacactccattgctagctctgccatgttcaaacttaccaaagttttcaacagagcattgaaaccctcaatttcaggctgtaaatcatcttctcttttcaaataagaatgaacaagttcaacttcattaatgaatccattgttacccaatactccaatcacatcaccatacaaggaaacccgaggtttgtaccagatttctcttcgaacatcctcaaaaacctaacccaacaacaatggcacaaaatcagtctcaatttctaaacaataagaaagaaaagaaattgttttttttttttctctaaccttgagagccaagaggcattcattctggcgaagaagttcgcggagtacggccaccatatcgagcttcaacaatcgtctgaatttgaaatcgaatgcttgttccaaactgtgatggtctttttgagctctcttaagagcttggacagtctgaatcgcttcgatgctgaggtttctacctttctgtaatggacgggggttgttgctccggtctctcatcgtcaccattaatcttcttttcctgggaatttggaatttggtgaaggagtgaggtagagagttgatgagtgtaagtgcttcagttgcagagtacgacaatgaactcatggtagctcaagtttcagacttggtttccacgagaagaagaagaaccatgttcggagatgttaaagtgtagaaaacgacatatttgttaaggtcgtttgttttgtgggggttcactaacgacatgtcgtttagctaacgcaatagatagattctgtttttatctgatgaattgaatttctgattctatctttctcgtttctcagctttgagagaaatccaaacatggcggcattaacaggagcgccgtggatgaggattagggtttttccggaggttgcacctccatttctacgccattcttcattgtacttcacgaaccggagagtttcaaatttctgcaggataaggaatttttcagtctcggcatcttcgattcccgataatggaaatattgctgctgaaggggttgtacgcgttcgttttgctccttcacctactggaaatctacatgttggtggtgcaagaactgctcttttcaattaccttttcgccaggttctctctctttctctctccccaacttcaaattatgattttatcagagttttgttcgagtttcaaggttgttttgatgtaatttcaggtccaaaggagggaaatttgttctaagaattgaagacactgacttagaaagatctactaaagagtctgaggaagctgtgctacgagacctttcttggcttggtcttgattgggatgaaggttcttcttcttctgataattatcttttgcttgaaaatcatttctcaattttccttctgtttcttaagaaaatcattatgagccaaattgcttttatgaacaagtactaagtaatagtgcaaggaacaagaccaaaacttggccatttctgttttggaggaactgatttaggcttagccccaaatgatttagtaaagtttaggttaggatttaggaagcattcaaatgatgtcagttgaattgaagatggagttggcttaatgagtcagtattgatctttcccacaatttttcgattgctatgaatttttagtaatattataaggtgaaaatttcaggacctggtattggtggagattatggtccatataggcaatcagaaagaaatttgttgtacaagcaatatgcagagaagttaatggaaactggtgatgtttatcgctgcttttgttccagtgaggtaattctcttgtaattttgcaatttcatatatgtgcattgtttttgttgatgttaattttaatactttacttccaggaactagaaaaaatgaaggagattgcaaaa

SEQ ID NO: 1906 - DNA, 1729 bp, Cannabis sativa
ccaaatgtcttggctcatcaaaactctccgatcagacgatccacaagatgccacgtcatctccatcggaggagaatcctttaacgggtgagttatcggtgatcggccataccattggccggcaactccgcggcgtggcggcgtttcttgctcctcctcctgcttcacaaccaaccaccggtgcccagagtttgccagaatcagagaatgagtcgctggatttggtcggaatacggaacgatctggcggagatcggcgggagcttcaagagtggccttaatcttctgtctagtaatagtaacagagcggtcagtgggatctctaagtttgcttcgaacttgttgcagtttcaggataaagcagaatcagaagatgaagatgatgatgatgatgaacatggtggtggtgtgcctgggattactgacgaagttcttcaattcgtgactgagatatcgaagcgacccgaatgttggaacgattttcctctaagactcgatcatggtaataattacaacaatataaatataatcaatgcttaactgcaatgctggttgatttttgtagctgtggaagtcaaacattcaaagaattttctttgactctttgttctgtctttcttttttttctaaaaaaaaaaatttaataactgcatatttttaggcataattgggttatcagtggacaaaatggagtatatgaatttgggaattgggcataattgggttatcagtgagcagaatggagtatatgaatttgggaattgggagctgtgatggaagaatatttagttatgtggcctggtcaagtggtacactgataataatgcataattctttgagcgtttattattattgtacttgccatatacacatttatgtactcagagagagagagagttgctaacttatgatgtgttgggtgtcttttttattttattttttatagttcattcattctatgagatttcttatctcttttgtgggtttggatctgtcagttttctgcattcagtttgagtttatctcattcactgaatcatctattggttttattgttgttggttcttgctcactgacatttcaggagcaaaaacctatagcaaatgatagcatgcaaagaagaaaaaaagggaagaaggtaatgcataatcgtagaagtaattattcctctgagttacccagtataaaaaccaagagcgttttgctattgttttctatggggtttgtatgttaaatcaatggaaggatttgttcaaagggtattaagacctgagcataaatattagatttatcatggactattgaggagctttgttcaggaaatataataatgtagcatttctgcatttgaatctaaatgctctttgttatcttaaaattttctgttacagctgccgcgttatttcatgtatcctctcttgctttgccttaaagaaagttgggctagagtttaaaacacaagatgatgaaagatatttatatttgtgtagctgacttttcgtgcagatttatcttttcactgaagaaattggcacttgtacaaatagtacaactgtggtctttaggttttttatttctgtttttttttaatgcagaattcggcatgtctgatgcacagagagaacatgcctcaacaattgaacagtatattcctgagtttgctgcacttaggttaaggctttgccgttcaatgagccaagaaattttttggatggtctattttatattgct

SEQ ID NO: 1907 - DNA, 2426 bp, Cannabis sativa
ttcaataatagacttgacatccatcagttcaataaaagacatggttgcagttgtagatacccctttgcctccttgacaaatcatgacaactgtcaaatcaaatactacaacattttcaagcttttttaaactatccaagagtgaagacttgaaggaaaaaaaacacttcctcgaatcctcataaagctactaggcctaggcaggtaaattttcaacagtctggcacatgacattaacacaaggattgttgaacatgataataagagatgatgaacaatgatgacaatattaaaagagttgatctgttgtttacattaatcgttaatttaaaattcacagaaggctctaaaaacagctttgtacaaatggcaattactgatcgcaagaaaattagaaacgttcgtactaaccacaacccagttcccattcagaaacatggaatttgtatggttttacttttttatataaagaaacaattagtaaattacccacttttaaattagacaaacacacccaacaccttgagctagactcgagtggcacagctaggaatttccaattattatacgtatctaaaccttgaggaatcagatccaaggtccatgtgatagcaaggcacagggccaagtggctaacaaatcaactaattcctgacaacattatgttactaactttatattttctacaacagcatatcaacaaatctatctataactctcattaaaaaaaattattgtctacaaggagtacacaataatctagaaaataaacacatccaaaaagatccacagttaatcaagtttttattatttgtattagcactcccatcagctactctactatatgctacaaaatagctcaccataaccccacttcctttattttacctcaaactattacatctacgctataaactgcattctctattttttccctatatcatttaaatattatatgttttttaatattattttctttaaaaattgaggtaatagcaaatataggtcatctgatgtgcggatgttttgtccattttttcacattgatctctattttaaagaaaatagcactatagctcatctaaagtaagtgcctcagtatataaaaacataaacaaaaaatgaaatagttacccaggaccacgattaaccataggagggccaccagctcgaccaggtcctgacctgcatggtaagcaagtgtaaacagtaaaaaaaactattcaagcaaacaacatcttgggatgtatacgcaaaaatagattctgaattgcaatatacatgcacaagatatgagcttgcagataataaaaataataaaaaggagagaagcataaatggcagagaaaacatgggaaaagaacgaaacctaaggacttaattattgcttcagctgcaattttcaaaaaaatataattttcaagataaagatcaatgtgttacggtgacaactcagcaaaaccaactcattctaaccgtaaagaagttggttagaattataatttacagttgtattaactagttttacaacagtttgcaactcacagcgacagcccattattttgaatctattgtgagaaattagaatcatctagactgttttattctctaaacatatgtataagctctctaagctttagaagctcgctactgaaagcttcttaaatcttctctcaacttctatctgatattttttgttcttccaaaaaagtgtttaatctgcctacatgacaatgcgtaaataaatgtataaatacacaactctatatatacacagtatactatattgataaaaaaaatcataaaaaaaagagaaggaaacataaaatgttaggaaattaaacttaaaaaaaagacagtacaagttttatcatattgcaactgcaaaaagaaaaaccctattgtcatcaagttctccctcttcattctccaaaacacttctattttgacccaactaaaaccaaaactacttagtttcaaatattttctatcacttaccttacagtagaagcaagcatgcatgcataaatgctcacaccttcaccttctcacccaaaacaatttaactcagataacattctagaccaaaattcccaaagaaaaaaacgatgaagaaataaattacgatacaatcttttatcattctgcaaaaagtaaatcaataaaaaataccatctaaaatataaagatatatatggtcttctcttccgcatcacatcacaagtaatgtgcttataaaacactaataaccatacactacctgaacttccacagaaacatgggccttctagatgaaaggtcagaaaaatataagtattgttcatcagcaaaagtacctaaactctacaacacactccttcagaaactccctatagttagaattttcttaacaatatgaaattcacaagagccaccataagccaagct

SEQ ID NO: 1908 - DNA, 1100 bp, Cannabis sativa
aaaataaatgtgacacttataccatcataatattttgccgatataagaaaacttgtagattatttttgcaggaagctttttgccaacgaaaattagcgtcgacaaatctattctcgccaaaataaaaacaccgataaaaactttcaccgaaaaaaatattttggccaaatttagccgaaaaatcatattagtgtccaaaattctgcctgcagaataatgcgttggtgtaaagttattttgcctgcacattccggtcttgtgccaacaaaagttgtatcaccaactacatattaggggcttaaatttctagagaaaaaatgcacttgtaaaacattctcggcacaaataatgtaactttattgatgtaaagttgctctaacaaaaatcattttttcttgtagtgtaataggatttctaaacaacttttgtattctaacttagtatattgtattaactctattgatgtaaacataatcatgtaattttaaatggggatccccgcaaccaaattttgtatagtcaaggtttttaataaatgttggtttaaattttatttaattagcctgtttcaatttaaccacaatttaatagtctaaaattatacttattattataagatagtttaaaaaaacacatagttagcgtacgttcctagataattagagtgttacaagagagtttgatgaagtaatgcatgaataaaatgtcaaaaatgaatataaaactgtatgaagttttagaggacgcgctgaggcttcgagttcaattttgaaagaaatctagtcatgatggaccattgtgtggaaattgagagtgcatgcctcctaaaataaacactttgccactctttttactaatatttttttttttttgtagggatataaatattaatattatttgtccacagtgaatgggttacattctctttggttgtgctctagtgttactaacatttggaaactgaatgggttttggaagctgaaaaaaaacttctttgattatgagccattcttacttttacttgggataaaaaaaagagctttctgaagatgactttgaaacttttgctgtagctactattggtgtggtcgtacctcatg

SEQ ID NO: 1909 - DNA, 3729 bp, Cannabis sativa
  modified_base (1079)..(1083): a, c, t, g, unknown or other
agaggttcaatttcatttttcttttctttattttttaaaacaattaagccttattctctaattaatcaaatatttaggttaaagctgaaaataggatttagagactagccatctcatccaaatcaaccacctaacccattaataaaaaaaagaccaaaatgcacttttatcccaaaagtttaaccataaccatcctaggggtaaaatggtcaaaagccataaccctgctcacacccggtacgctatttatctcaaatatcaattccactaagaaaaaggttctagacttacccatttgactctaacggccatccatcgcatgttccatcctcgccgagcaaaaatcataaaaatttgtataattgatatatagtacaaataatacctctagagtttaataaaatcttcagaattgagaaattataactctaatgcctgtttctaaaaataggacccacaacatgatatattcatgcataaatataaaaatattaataattaacgctaattatatgctaatttccaggttaaagttaagcggtctttacacttataatatggatggctaggaacatgatctacaattatagaatcttgactttacctaatgtatcaaattttggttccctttaagtgttaattctagaactggaaagctgggcttaaagttagatgagatctaaattatacttctactggtgaattaatggtactaaaggataaaaaagtaattggaagggtaaaattgtaattttataaaaaataattacgaaccaatacatggatagttaatcactagaattgattatatcaatggacactgccgtaaacctcagtaaaatatttctataattactaagagtttgattttataattgtagttcagtgattatggaattattgaacaagattatttggttgattaaattcaataaatattctagtttattagagcttatttttacaggctcatgttccccagatcattatcttgaaacactgacaatggtagagataaaagttatatatggaactttaaaaaaatttattttgatttgtcaaaatagtaattatttatnnnnnaataaataatttatttttcaaatttattagataaattatggaaaagacaaaagttttcttgataaaagataccaccaatgtcttgttaagacataagtggcacaactatcactttgtcctagcacagtaaaaggtccttattatatagggtggtctccactggatttatttttaggttaattaatttaaagataaataattatgtaaatttgaatttaaaaagtagttatagaaatttttgattgttgagagattccctcaatctattataggaaataaatatatcaaatagaatttggttatattatttattgaaataattaaatatgatttatgaaataattaattaaataaaacatttattgggtttatttaatatactgtataaacaaacttcagtaatctaataacaaatgaattttattgtaactttttcaaaagcctaaaacggatttaatcttttatctcaaacactatagaattgctcttgctcatgagttgagaatcccacaagatcttcatatactttttattctagtagtccacactagtccttgtgtgtggttgatgatctggaagatcaatgtgtgtgagtttgacgtcatcgttttaaggatacaacatacaaaaagactagaggataccctaataggcttcgacaggtaaattttcttttcatctatttaattttaaatttaatatatatatatatacgttcatcttggagatatggtacgatgataatcagaaacattaattctgatatgtactaaccaacacttcgggtctgttgtcctgtcatattgtgagaaaattgcgggggggaggggggggtggggtgggaacagttcagattagatctctctcacaaatgttgattcttcatcaaactcttcaccatcacaattacattcttcatatgtgactgaagcaagtttcttacgtaggtcttccatttatttgtctagctttttcctgtttttagtttaatttgtctcgaaggtcttacagtgtgaaccttggtctttctcaactttcctaaggtgttataggattatttgtctttatagagctcatttttcattgagtacaagggttttaccttccttagccacccgttgtcgcaccacttcaaggttttgtgctatgttacttaggaaggatttagaggttcacctaaccctaattttttttttattcttgaccctttttggccttgtgcttgtataagggacatcaaaatgtccttgtaacaagtcatttagaacatcctacataccaattggcaattgttcctttaacatctagtttgtcaatcataggtcattcatttcttctacatgaaggtaggtgcgtgagctaaaactattttagtggacacatttttcttttttaggttggtaacaccaagtactagggtcatgtgggatccattgcagagtgtaccttatattgaaatccttgacaggcataggttgttcccaacaagttttgtcactgaaatggtaactctatctttcttgcttacatcttcttccatggcgtgggatgggttatcgtctctggtgggaagagataagagcatcattcttggaggcaaatttactcgaccttggttgtggctgtcaaattcgtttcaatctctattgtttccaccttggtgcctcttattatgcccttcatttggattgatttttgcttggttttccctaatggattgagccactagagtactccttgtaacgactagtcggttatgatcaaggtgaactagtacttcaatatcttggagacgcattgaatgcccttgcatgttggagtgttaatggatgatttttagagaaaagcctagctagagctttgtatttcctaaggacagtgccaaattattgatggtaagagctcgtcaacaaagttaaggctagaacatcaatttaagtatgagaatagaagatggatatctattatgttcttaagaatactcaaacaaagatgaagatatgctactgttttattgaattctaagtatgaggtacaaagtttgcttttccaacccccttccaattgagggaagttctatttatagtggctctattggccatagtgtacaagttgtcccaaaataaaaaatacaccatgacttgtacctacaaaactagccttccagaagtagtggtggtggggtgttaagtcgtactaacacctataaattttgtctcaagtacttgcccatagtttttagaatgttgtatatagtatctttgcaccttggggctttttatgaactataggatgtgcaggtctccatataagtgatccatttcttcaggcttgtgatacgtagacaaggtaagggttttccatgcatgacttagaggagagagggacagaataactatgtggcccatgcatgagacgatagggtcacatcttaatgctttcacgttgtgcatagacgatgaaatgtggtaagcgaggtagctgaggtcctcatgggctatgtccatgcatggaaaggtggcctcactcatctcgggctacatgtgcgaggggatgggcctcacttttctcaggccattcacaagagggggtggcctcgtcaccttgggccaccacacgagggggtggctcatctcaggccaccac

SEQ ID NO: 1910 - DNA, 1111 bp, Cannabis sativa
ttactttttctttttataatttatttttaacaacaatttttttcagtaaaaaaaaaaacagattatacttcagacatgatcatatattggttttcatatttttaaacatggtaggtccatacattttaatttattaaagtatataaacaacggctaaccaataataatgaaatgtcccatcagtagtactctgagcccaattacctctctcaacgtttacttcaatttatttatcaaaaaaaaaaaacgtttacttcaatttttgtttatttaattgttttttcatctctccatttatttattttccacgttactttctccttattgttatttgtttgctattttatatacattttacaaatattttcctcaatatcatcatttccttttagatgggtcctaattttcgtttaattgcttatcatctttcttttttttatttcttcattcttcaaatttttattctctcaatttatttttaattatgtttgcactcatatatatatatatatatctgttttattcaccacaaaaatatttccatttaattaattatttgaataattaatgtgcgttttgtaacaattatttaaataatatttgttaattataaaagtaacaatattctcaaaaaacaaatttgataaaaagttattttcattttttattattttttgaaataatatcaatcaaaatattaaaaccaaaaataagttactttcagaataatcctaactttttttatttttttttttggaaaaatatgttttcctttatcaatagttttcttacttttctgaatttgggtattgtgatcaagattacaataaaccgatttcttctttgcatatgttgatcatgttttgttaagcaatttgttaatcatctaactcttcatttgactataaaacttcaggattaaatatatatatatatatatatgtcttgtaatttaaccatataagaaaacttaagtaattgcctaaggtctcacaaaatttaaaccctacatattcttcaatcaataaattaaaatatcaattgtcaacattatattaattaatttaaaattgaaaaattatctaatatgccatttttaactttttttttt

SEQ ID NO: 1911 - DNA, 871 bp, Cannabis sativa
tccaaattatacaaggtcgggaccattttgagaatgaaattagtacttcattttcttaatacacattaatactagtagtacatgcatgatcataatcataatatacttatatacatatattatttaaatttaataattaataatttattgtaaataaggtacaattatactcttgctcataaagtaaaaagttaacttatagggctgaccctccaattaatgtgtgacaataaccagtcgtagtcgcagagagagactatgaaatgatcgatcatatattgcttttgcattttctaagttctttaccacccgcaaccgatcgatattattggactcatatatgtgttacttttaaaatgataatgaagcaagtacggatgactttccctgaagatgtaattcaggccctcggaaattgattgaaagtactaattataattaacaccttaagctataaaattaaattaaattagttaagaatatcaatgaccatgatgatagatattggagaattatcatcactatctcaaaaattaagattcaaatcgtttgaaacatatcctaatattgtgatgatgtaaattattagttaattgaaaactatggaataagattaattgttcttcttcttctttgttaaaataaattgatgtttatcttgcagtttaataataagttagaactcatttggtttgacaaaagattatacttgatttaatttggaaattaagatgatattgattgatcatgtgcaaaaggaatgctctataattagaaaatgatttatctatattaatttaatttgttatccatttgaagtatgtacgacgagataatgaaactaaacgttagctcctattattgtcattat

SEQ ID NO: 1912 - DNA, 2682 bp, Cannabis sativa
tttatgtacctaaaatttggccaacttccaaccatagtagtctcttcacaagaattttccaaagaggtgatgagaaatcatgatgctagttttgcctcaaggccacaaaatttgtactcagagattatgatgtatggtagtactgacatagcctttgctccctatggtgagtattggagacaacttagaaaattatgcatgcaagagcttttgagcaacactagagttcaatcttttagacacataagagaagaggtgatgaataatttgattgaatggattgcttcaaatgttggaaagcctataaatcttagtgaaaagatcaaatcctcgacgtatggcatcacttcgcgggctgcattcggaaacaaaagtgaaggccatgaagagttcatatcaattgtggagcaaactgtgccattaacagcagggtttgagttttctgagctttttccttctcttaaattttttgctttgattagtccttcaaggtataaattggagagattgaagcaaagatctgagaagattgttgaaaggattatccaagaacataaagatcagaagaagaagaagaacaatgaaagtgcaacacatgaagattttgttgatgttcttttgaagtttcaggacagaagtgaccttggtttttccttcacaattgacaatgtcaaagcagtcatttgggtaagcttaattcccaatttttctattattgcttaattgatttgtttctacaactttaattatatatatatatattttaaggaaattagcatttatatataaaaagcatcactcattaaaatatctatttttaaacaatattttacctcaattttttttttcttttcaatataataaaatttgacttttttttttttaaatatatattaagtgtggtcataggaataacttaatacttttgatccgaggtctcaaattcgaattctcctccctaattttcaaatatatgtaaatatataaatcattatagacgcctatgttattactaaaaaaatatgtgattaaaattatattagtctcaaaaaattacaatttattataattgaagtttatatatttttaatcacaacacttatcaacatttaaaaaagtgattttaaaatttgtgatttgttaaaaggtaaataccattttggatcctgtgttttacaaatgttaccaattggagcatctattttgttaaatgacaaaatagatcctgtatttttcagaattatacaaataggaccctaaactaattttttttttgtcaaaataaagcttaagaataatctaatctagagatgttatgacaaaactaataacattttttgtatctgttcgtattagaaactgtcttaaagttgggtatattaaaaaataaaattgttaaaaattgagcccaatatcctaattttaccattttggaaaatatagggtatattttgtcatttaataaaacaaaaagtctaattggtaacttttgcaaaacacaaagtccaaaaaagtatttaccctttgtttaattgcgatagtatttaagaagaatattattgtatggaatattagtagtattaatactacttaagctacacatttagtaacatttaatcccacaaacttaatttttaatggtaaaattctctaaaccccgggttctgttatgctctccaatattctaaatgccacattatacggctgatgtgtacaataacatacacatggcatattttcatgcacacatcatatatattatttaaaactataaaatatttcaaaaataaaaattaaaataaatgaatgtttaaaatataaccttcttttatttcttttttatttccttcttcttcatatgatgcttcactcttttagaaaaccctagccaccacccatccacctgaattgttgtccatccatcgcccaacaggccttcctccctccatcttgttgtcttcaatggcggatagtgaacacagaccttcctccttcctctatccctctcatttttgctctctcatcttcaatggcggattttagatctaagcttcgtggcgttgagaattggaatggttgacgacacttcgggctctccttggagtgcaattggatgactttgttttaagtggtcttgggtgatgcaattgcaaaaatggagtctcgtacgtggggcggaggtttgtgtttcgcgaagcagatttggacgtggtatttcctgtcgtcagggtattggagtcttcaatggcggggttcttgaggctcttgacactttttctttttccaattattactaggaaaattctatttctaccttaataagtacaccataatatttaaaataattttaaaaatcattgttaatatttttttgaaaaaaaatctcatattattttgtgttaatttcaatacttattttaattttacagtcatgtatttttttaaaatcatacatatttttttttcaataaaatttcacacaattttgtttttgttataatatttttaatataatttatttttatttaatatgtatatttttttaagaaaatgaattaattggaagaatagaatttttttttttaaaaaaaactaatataattaaatatatcttttatataaaataaaaattataaaattgaagtgtactaataaatttttgcaatagtttttttttttttt

SEQ ID NO: 1913 - DNA, 1462 bp, Cannabis sativa
aaagcaaaggaaaattaaataaagaaaagaaagtagaaacagctccaaggaaaccggtgggtcaaaactccaagtaagtggtccaacactttgacggttttgtacacgtggcagaagcccactatggacgagtcagtagaccaaggaatgtcggccacgtggagagagctaattcactgtggagctgtaacggtgacggctgaacacggcggcttgggggtggaaattacgagtggcttggagagtgttcgagcacacggtggaggtccgtcgtgttcgttgagttagtgggtggtggccctcatttaggattttgggcgagtcctttaggtagggcccatcggcccactcaaaaactcaagtgggtcccactttgggagtttgggggcatttggtgtctcgtccgttagtgtccgcctccaactataaatggaccattccacctctgtctctctcacacccatacatacatacactctcttaagaaacctctctttctctcttcttcttctccaaatctctgtgacttttgtttgttccttttgattatatcttcaatattctaaaccatcttcacctaagttcactctctctagatataaatacagagttctctgtatcgtcccctgtctccagaaacaattagtccattattgtaacttctgatatatcatttaaggtattacttcaatacaataattcttcgcatggattctattgtattgtctaaaatacaatagcgttaaaggagagaattgaaacaatatatatatatagtgccaaaatttgacaactgaaaaaatgggttaaaagttttcgtttcataattttttgcctttggtttattttttgcagagtatttttttaggaaagaaaaaacgaatatgacgaaccaaaatgtggtagttcaggacacacaagctgctatcaatatggctatcaacgttgccgtttcgaactcagggattttcacgactgcaactcagaagccaccctctgctccgggaggttacatctctatttcccagaagaagtttttgaaaaacatcgagattaatggaggaacaagaatcaatacctgggtcgacacaatgagaggttcttctcctacccatatcaaggccagtgctcctttttccgatgaccaaagctcttggatggtgtgtattttatacattaagtacttaaaaaccatgacttactctgtttcatgaaccgttttccgaaaacgatgaatctgattttcctttcttttgtcttttattgattttaaacagaatcaccacccatcagccttggacatgttcgagcaaatcattgaagcttcaaaaggaaaacagatagttatgtttttggattacgatggcaccctttctcccatagtagcagacccggatcgagcttacatgtctgattcggtaagctttacttgtacttttcctttctagtttataaatcaata

SEQ ID NO: 1914 - DNA, 1537 bp, Cannabis sativa
acagaatgtattacctccaatgagagaccttgaaatctcacgctctgccgcaatttgaagtgggattagaaatttgaaagtgggatcctcaaactttcctctcttaggtaaaagagttgaattagtctgaattccatagctaatcacagaagagtttctctccatgaaatgcaaagctccataacagtacattggatttctataaagccattcatctacttcagcttctgttttgaatgacttcacctacaaatttaaacataaatagaagtattgaaaattggaatagtactaaaacaatagagtacagttgttccttctcttaatgtcatcaaacaacctttattgagggaataggcctccctggattgttagccatgatggcagccacaatgctgcgaattctttcgctttcatttccgctccagatgaagtcatagcaaggaagcttgacatagaagttatcttcacagagcggtattggaggagagatcagaggcgtggggtcagccatgtttttgaaaaaggtggagtttgatatgcgaatattgatagagatttggatacagaacatgaggaagatgaagaagaaggaagcaaatagctgaataaaagtagctctcttgtttcgccatgaaagcaaaacattctttttgaaaagagctttaaattgttggagcaacaatggtaaaccactctccaatttcatggcttcagaacagaaacaaattggattggagacttagaaattacatgtaacacatgcttctactcagtgttgagacttagcaaatgtttaaaagttagttggtgtccatgaaccgttgaagtcgttgggaaatgcttccctgcattaaggactatggtttgcctttgtatgccatttatgtactaaaacggcaactctatgattaggcgattccattgaataatactgatgtgcgtaccattatcatttttttaattgaacaaatcaactaaaatcaaatttaattttaagtggatgagcaaactattcaagcatacaaaacaggtgtgatatgaattattaaactattatactaattaacaacggtaataatagttggtagcattaaaggtttgatgtgtgggatggatcatgtttatctactgtactaactgtggtatcatgtaattccatacttaaataaaagggtaaggctcataagtgaccactaatgagtgaaagaacaaaaatgcatcaattttggatataagttttagtttttttgaaataaaaagaaacatatggatcataattaagttacaagtcgctaatcattataatatatataatgattaggaaacataataaatattgggtgtaatcataaaaaaataagatgaatatacagctcagaattaaatgaaaatatataaaaagaacagtcttgatatgattccttttttttgaaagaattgatatgattccttaattctttattaacccgtgcattttggctcaaccaataaccgaagtcgtacccatttaactaaatcagaattatatgaaaat

SEQ ID NO: 1915 - DNA, 1568 bp, Cannabis sativa
tatcaacattgttttcattgttttcgttcaattgttctggtctttttgccattactccactgctgcaatcgcaccactgctgtttgtagacatttcttctgatccatggacccccttaaagacaaaatgaaatcaccacttaaccttacagaagaagaacaatttgtgtttcagtttgattttggtgaaccattctctaccagcccaattgatcacaatgtcctctatgcccgaattataacaaccaagaaagtgtggttgtttactcttcaacggcagatggcagagcattgggatggccgcttccctgttaagatttctgaagatgatgacttgttcatgctaacttttggttgtgaaggtgacaaacaaagagttttggacaaagagccattcgactttcaaaatcaccatattgttttattttcaccaaacattggtgagaatgtatccttgttgaaccttactcacacacccttttgggtgcaagtctaccgattaccctttatgagtaagactaaaggactggttgtggcacttggtaacttaattggggaatatattgaagtgtttgaggactcaccttttgaaggttggggcccttttcttcgtataagagttaaaattgatgtcactaaaccattacttcgggggcgtatgattgcattgtcgcaagttagagacaaattctgggttgagttctgttatgagaggttgcctgaatattgtatggaatgtgggagaattggacatccttacaacaagtgcattactttccttgaaaagcttgacagaggagaagaacctgaacttgaatatcggcctactatcaaaggttctcctctacctacttcgggttatgatagatacagaacaaattttgcaaaagggaacgcttggcctttgcttactcgtctagcgagaacttccctcactgatgctgtcccctctctcattaagcattctcagccccaaccaactgttctatatcatggtgaatcttctcatcaagtggcggctgagtcacaagctttgcaatctaatgttgcattctccacaccttcattaactgtaggacatttggccaatgcatctatgaactttgcatcagcaacatccccaacaacacttgtttctggacatatgccaacgacactgcagcaaactttgttcagccatgtcaatactgcaaagaatcaaaatgaccggtcctctgctgtgattattgctccttattcaactacagctgctgtcactacccctccaactatgtctgtgtctctctctcgctcgctgactttccaaccaacagactcaacaacaacttctaagggtaaatccattctctatccacataatgacacaaaagccactcatatgctttctaaaccagcatcctatgatgatctctctaacatttatatcccccctacgggcccttctaattgtcaaaatgttgtggctacttatccacccaatcccctccttggaacacataagtacactacaaatttaactgctcctctcaccaactcctcggtctcctcatctgtcattgtatcaactac

SEQ ID NO: 1916 - DNA, 3750 bp, Cannabis sativa
tttttctcacctcttttttcactgtagccatttgtaaattgctgaaaaatttccctgatgggactacctgcaatttgtttgtttttatttttggtatttgatttgctgatttgattggtctaatgatgttgagagagtgtgtgacttctgatgtccaatatctcattgttttgctggcggtggctctaacttggagatatttatgtccttggaaagatggttgcatacttgaatcctaaatctacctctgttattgcttaggctaagaaactaaagtaatcagttgtccatgtaaacaatttcttttctaattaaaataaaagaagatccggtaaataaaggttattgtggctatgttggcttgccagggctcagttagaaaaatgatctagtttgattataaattaagtagggcagtgcccaagcacttttatctaaccacagatgcagttttgttcggcaattgatccttttcttcctggtatttgtgcttcgtcttcttagtggatgaccgcaatctgcgggtagctgattttgctcagttttgggcaactgcaaaggtataaattcaattcttccttctccccaacaactgccatgcgttctggagtgccaacttaaatctctttgaaatgcacattctttttttgtgtaaaatgtagccaccatgtcttctcacatgcgatatgttatatgaatatgattgtgcttgtcaaagctaaaaacatttttttagagtttctgatggatgctgtaagaaacccttatgagagcagtcttcaaaggcaaaatgtacagtgtggtttaagttcaatcggttatgagactgaatgtggtgctaggttataattcaattagctgccatggctcatgagctgtcttgtattataattgctgtcaaaatttgagagagttgcttattaattttatgtttttcagtatgaaagatcttccttatttagctgtttttttggtagctattgagtaacttgatgactgagctggatatttcttaatgttgtttaatattgtttttcttgcattgcatacttaaagcttctctttgtaatcattttgattttttatggagaatgatatggattgtttttattgctaagtaatgagtgaagacattgtatataatcactggttacattgtggtatttgttactctggttcaccatttctacaagactattattattagtttttaaatctgattgcttataggtgtttcctttcgctaatcaaacacatatcttacttgctgcatttcaatatcttaactttgtaatacttagtttactatctgttgctctttagatctatttcattcaagtattctcatatacaaagtagatttttatatcttgctggggtaggtgtttggtttaatcatgagattggtggaggaagttggagatgcagagatttctgtcttcgggggaaattaatattgcagatacaatctgcatttcgataaatgttttctttactttaatacaattgtatattgttcagttcttttttaatgcggatacacgtgtcttttcttttaatgatggttattcatcagactagttaaatctggttttactatcttttagttgctttgctgattggtgtgacttgctttttatcagagtacgggttatgaagtatatgtattagaagcttcatataaggatcctgcggtgagtttattctctatgactaagtatgaatagtgctggattttttctttcaatgttatttgcgctctggtgaatgatgaaagacttgtggctcttttttttttttgtcgggggaacgggggtggtggtggggatgaatatgtaaaaggtgtgctggagtaatataggattagcttttcaagtgtctgagatgtcttttaatttttgaaatcagatgtcttctaaattttagtacaatgacattgaatataaccagctaatgaaagttaccacaactgaagagtaatattgatattatttatttcagggctgcgcagctagaaatgtgcatggttttactctagatgacatacaaaaaatgtctcaacaatgggaagaagctccatcatttcacttgcgactagatgtcaaggtaaagaagacattaatattaggagtgtgaacgcaatatacaaagaaattttagcttttcttctgatgtatttatatgcgtgcttgggttttaacgtgttatttttgctgttacagtcacttgttaatggagatgatctgaaaaagagtggaattcaagaggtaattaacaagtgttcatttttcttatgcttgagcttctaaatcttggatgatcatgttctatatcgtgttaggatgtaatattatgtttgacgcaagctaaaaatagaaatggcacattttgatgttatagtagatacaaatgcttctatcatacaatctcattatgcacaacttcgagtaattcattgttactcttattcatatcaaaacaagtaagtaaaataataaaaatttagtgcttagcatatttaagataaagtaaaataataaaaatttagtgcttaacatatttaagatgaaaaaaaaaatagtgcctaacatttcttccatttctacaagtcatagaacactgggagttgtattttttttacttgttgataatttgatttagttatgggtgtcatatctgccaggtggacatggccatggatgatgaagatactgatgatatcccatctggattgcaaggacaaaatactgactccatcgtagcatcttctattggagataatgcatttgatggtatgcttgggtttgtcttttacatatgaacatttacattgttcgattatggaagcatgatgtgtgatcatattatctttttggctacacaaataattggcatatcacaactttaaaagttcaatcagttgtattttaatacatttttaattaattttcataattttctggtaatttctttcgggatggaggaaaacagtttgattatctagttttaaactttttgaagtatcttttccgtgcttttttagtgcattttgtgatctgagtgttctttatatatgtaccttcaattttaaaagctgtatctcacttttttgatcgttagattcttcaaaagatgggaagagctgccatgttgaagtagagaatgcgactgaagtgaaagacctaggtaggagtaaatggtctaatgaattagatgaagatgatactgaacaaactgaaaccaataagggtaaattaaatgctctatctggtctaattcaagcttatggtaaggaagcaaaatctgtacgctggggtgaccaggtacgtatacaacactttgccaatgttcgaggatactggtatccctctctcacttctaaagcatttagtgataacaggaattatgactattcaccctaaacatgatttttgagatgcttagaattgttcctgaaatgtcttttcggtatctaaatgaatattgatcatcgtagatatttctttttcaagctgtcatggtctttttcctctttctcaacacacaaaacataaatgtaaccacagacatcaagttctgttttgtgatcacatctgttaaccttgcgctcttcattcttgcagagtggctactctgggttttcattaagtgcaacaaagaaatcaaataccttgtccttaataattggacctggagctggatacaatttggttagttgctttaccatctaaacacttattattatttgta

SEQ ID NO: 1917 - DNA, 948 bp, Cannabis sativa
gaaggttggtgccgaccacgtctccgagtagcccctgatgaccctgtaaaattaatcaacaggttgttaggcgagcttgacgagcaagattatgagatcaaccaacttgcattcgaaagaagccaaagggatgctgaaatagagcgtcttcgcaagcgtaaccaagactgtgagaaagtcataagagagcttcaggatataagggaagttttcgttcgtaaattaaaagagaaagaggaggaatgtcaaactttgtttgaacgtttccaacacgggttaggagtgatgaaggaggagtgtatcaacagctacagcaactacattgacctccgtattgcacaacttctcccctctgctcccaaggattctgagttcacactaggcagtgtctgaagtacttgttgttcatctactcataactggtgatttaccaatatggctaaatatttagtgttaacaatctaaaccttcctaagtatgtttcctatgtaatcagctaaaaagagtatgttctctttattcagactgatttctaattttgagccccatgttattatcaagacagtataaattatcttcattttgctttcagccataataatttacatttacacttataatgcgatatatgagttagtctatactgcttttcatatttttctgtaataaatattgttaaatttatcagtacatgaaaaagagttaagagcaaacgccaaccagcttttccgaagcagtagacaaaaacactacagcagtaatttacaacatggcaagaaagcaagaatagcaccaacaaagatttgaacaaaaaacataaatgagcttagttttccaatcgatatagtctaaaaggactccttattcaactatttcaatgaggcaacaaaacgattttacataagtttcacaccactttgccaaatttataaactaaatagaagcctc

SEQ ID NO: 1918 - DNA, 1671 bp, Cannabis sativa
ttaaaaattataattttttttatattttctctaaatttcttttaaaattatattttggcccctactaattttttcttttgcattttggcctcccttagtttgagaccctgcctctatccctactcttaagtgactttaaacttataagatcaacatgaatagagcactaaatgtgtatttttttagcacatttttataaaattgaatgactgtgtataatgcgagtcaaattttgtacatgctaaatactattttaaatttgactgaaaatataacatatgtgaaattcgcaatgaataaatatcatattttttatgtactctttttcatacaaatattttaagttaattttacatgtaacgcattgaaactaaattgtgaaatttgatcaaattatagtattaacttaattgttaaggttttttttttttttttttgaataaaatgaataattccattgagaaggtacatagccaagaatgacaaacaatacatcataattagaattggattccaaggggtaaaccaagcaaccaaattcgagaggcagataaaagaatacgaactagagaatgagctataacataaaattagcatgaattttacaccatcagtctaatatgaaattattaaatgaaaattttactcaaaatactatttacaataataataaataattttcctttaaatatagacgaacctccaacgctatttacatttttgctacttgaaaaaaaaaaatatataatctaatttttatatgaaaaattttgggttttttagggtaccaaaaatcatgattcaaataatatgtttcaattacaaattaaataaaaagcataataatatgttaactgtataaataatataattttatggttgcatttggtcgaataattctagttataaatatttaattgggagtgatactagtatttgggggactcttgaatctctcgtagtaaagacttcttcacgaagtctaatggctccttcgacactagtttgagaaaagttgttgatctcctgttaaatagtagttattgggatatccataagttaaacagcctatttaatgaagaaattgtttttgcaatcctaaaaggggggtagtccctttagccatggcaaagataggtgggtttagacgcttgaaagtaatggtcggttctcgtgcaaatttgcccacctcgtccaagctttggaaagggctcctcactgtgaggtagctccttcgctcacgaataagctgtggaatagtaaaatattagagcgtcataagatttttcggtggtgtatcttgtccaatgcgctccctgttcgatctgtgatcaaaaaaagatttcatattgaagatgtgtgctgccctttgtgtgggactgaggaggaatctttggagcacctatttatttcttgcagcttggcttatcatttgtggaggtcttctctttggggtatttatcctgtttgtggaactggtattcgcatgtgggactgggttaaattcatttgggaccttaaacacaaaggcatcctttctcaggatattttcctttatgcgccgattgttgttgactccatttggcagatccgcaatgacaaggtacacaataatagtccaattgatgtagaaaagagtattgactttattcgtacttcttttgcagatta

SEQ ID NO: 1919 - DNA, 2588 bp, Cannabis sativa
aacccgccaacccgtgccctatatattcgggttcttcttcatttttttgaacccaaaacctgtaaaccagaaatccggtaaacttgcccgatgtttagccctacttctctcagtcctatctttttctcattcgttgattctcaatcaaagaaatgtcgaagatgaggtcagtccataaaccttcgcttgcgaaatcgcccaccaagattcgaacccgtctaattctccaatagaataccaccaccaaaacacctcttggttcgttccacttataaaaaaatataccgaaaagatcattttgaaagaagaattatatattttttcattaatttataattataacaatccacccttatgaaataaagaaataattatatatcaaacactattttttattaaaaaaaaattatttttatgtttaatttttatatatatatattttttataaaaataactcgaaaattacataaaaataatagaaaaataatatcaaaacaacaataaaaaataatatatagataacaaaaaattaataaaagtacatcttaaaaaaattatattttttataaaaaaaattcataaaaattataaaaatatttaaaatttcctctaattgtatttttattttttttatttttatgtatttgtgaaataatctccaaataaataaataaataatttataataatctacaatatatggaattggacaaagcggtatgggcttttaggttagagaagcccaaatcttgaagcggtccaagtccaataaagagtcaaaagtcaacccttggattttgccgacccctctcctttctcacatcgaaattagagaagggttgcattgcacgcattttgacacaccagacaaactgggcaccatacgctctcctccaccccacctaccaaactcccaccaatcagaatcggaatggacccagcgtgtgagacacgcgcaaagcaacttaccgagctaaatggccacagatatgaaatgacacggtagtaacggtgggagtgttgtacactgtataaatcgaagcacacttccccatgcaaacataatgaggggacgtggcttgttctacaactccatctactgctcactgccaatttttccattctctctcatttttccaatgtaacttttattttattttattttttttacttttctttttaagacaaatgttttcttttttcttttaaataaaataaaaataacagattctgtttgtttctgctttcggttaagaaaaataaaaaaacttataacgtgtttggatattggtataagattaattaggatgtttgatgactaaattattaaattatgttatgtgaattaactatattcataaatcatacttttaaatttttattaatggtagattttattattaaaattagacaaaagtctttaaattcaataatttcaatagttcaagagaaatttataacagtcttcaaaattcaaaaagtatgatttagtacatattaaagtttaagagataaaattcttaattaatcttggtataataataataataataataataataataataaagtttatttttgtgaaaattgttgaaataacttatagaaaacatgtactttttgttgaaatatagtaaacatgtacttaaaaaataaaacataaaaaaatgtttcaataaacttttaccttttaaaaaaaaattaagtaattttttttgtatatgttgtagctatttatgattatttgtaaatttatcaaaaaataagtagtttacattgttcactcaaaaaaaaaaaaaagtagtttacattgtcaaaagtaaaatttacatattttgttgcacgactatttttttttatacttgataagtaactttttaaaacttatttttggtactttaaaatattcagaattttttgaaaatttacaagtaattttaaataattacaatgtatgtgaccatgaaatttttttaactaaaatattttcttagataccgaaaaagataaagagtctactagatggaccctttaggggttctactacaaaaatttctaataaaattttagtctattttttaaaaataattatttacattatacttatttaatattacttgaaaattttcaaaaaaattcttacaaaaattaccaaaaataagattaattttttataaaaaaaaattattatgtacgtcatacttatttaaaaacactaaaaataatttaccaaaaataaaattaaaaaagactctcaaatatacaagaataaatagagaatataccaaaatatctaacttattcaaaactatttacttcaatattttagtaaattcgttaatttttttattgtttctttcaattaaattaaaaatacatattttattaaaaacaaagaattaaaatttataggaaatttaaactttaaaatatataaaaattgtttttatataatttgtactaacaacaataaaaataaataaataaaagtaacggatacaaacatggccttaatttcactaccttaccttccttcagtctttctctttctttgtctcctcgactcagttactctctctctctctctct

SEQ ID NO: 1920 - DNA, 1044 bp, Cannabis sativa
atctttctgtcaatggatccaaccgtggccgtggataccgaggttcttatcgtggaggcagaggacaaccctcaaaccgtggtggtcgaggcaacaggccaatttgtcagctctgtggccgtgctggacacacggcacaaaaatgttatcaccgctttgacatcaccttcacaggaacacaaaatactggtgcctctacctctaacaccacaccagaaaatccccaagctcatgttactgagtcaagcatcactgaagaatctcctggcacttggtttcttgacactggtgcgacaaatcaccttactgcagatgcacaacaactcaacaatacagttgactacaaaggaaaggcaaaagtgattgtaggtaatggccaaactatttcaatttctcatgttggttctaacagttttcccactaatattcccaccaaatctttactgcttaaagatattcttcatgtccctcgcatcacaaagaatttgttaagtatttcccaattcacaaaagataataatgttgttctccaatttgactctgtgtgttgtcttattaaggacaagaccacgaaccaagttcttctcacgggtaccctcagtaatggcctatatcaacttcaaattcctgttaaaactgccccaagttcatcaagaactcagcatactgacactgatgttcaatgtaatattcctgttttcaattgtagtacagcaagtaacactgtttttgataaatcaaaattgacttctgtatggcattgtcggcttggtcatccagccaagcccatattatctcaagtgttatctcaagtctgtcctacatctaaacataaagatgttccattttgtgatgcttgccaaataggcaaaatgcaccaattcactttcaaaagcacaatgaataaaaccagttctccctttgaaataattcacaccgatgtttggggtccctcattttatacttctcgagatggctataaatactatcttagttgtattgatgattacactagatttgtttggatttatccgatgcaatcaa

SEQ ID NO: 1921 - DNA, 1393 bp, Cannabis sativa
taaaaattaagaacacatatctaatccatttcacttttgtaaatcaaagtcaatccaaacaatcatatgactaaacttgttataaaattagatgtaatattcttatcatcacctacttttgttggtataaaaaatgatcaaataacatcagcccgagtagtcaaatattatgcataaatatacatatgatctgttatataacatgtcttgaaaacaataactatacgattatgtatgaacagttgaacaagtataactataatattctcatactatttatgtatatacctcttatgtcgttttgatcctctgtttaactataacaaagaaagcaagtgtcgttttaggacaatccctttgagggtgagagaattgaaaggcttgttattaatcttccaattttggctatacttctccatttttcatcttcttcttattctcaattctcttctccttatttgcctttcctcaagtttatagctaagcaacatacacttaaggacaacaacaatagtctctgtaatttagttgcctttgtgatattactatattgcccatctacttgcttaaaaagtcaaaattgttaaggggggtatttaggtattttcatatgctgactattgtgttacaaacattacatcatgtgcctcacccactttacttatgcgttttgtttaagatttgaaaaagtatcacattgtatacaaaatttagaagcattataaggatttatcataagcttgatcgatatacttttatatacagggagatattatagaaaaagaaaagtcggttttaaattactatatgctattgggggtgaattggctgtgattaaatatggtatttttgtggatgagaatagagagggattaatgatataatatcttgaaggtttttttttcaataaataaatgagtgtttaatataaagcttcattgagaaagttaagatagaaattagaaataaggtgagtgggaacacatttcagcaaatgacgattaagattttggaaagacattattaaactaatcattatcaaatacaaggacaacaataagccagttgttttttgtgggaccatatggatcaaaaaccacatcacatgattatgaatacgactaattttgcagtcaactaactttatagaaagtatttaacatattaggaaggtggttaatgtttagaaaatatcatattggaatgataacttaggataaatttattcactcttacacaaataattattaccattattatgttcattacaatcaaaatatcagcttctagctttaagtgaaaatttcacaacacttttgcatgttttgaggattatttctatgtagcatgatcagttagaagaatctctttttaacatgaaatttgagatttt

SEQ ID NO: 1922 - DNA, 2237 bp, Cannabis sativa
tcccactgaaacctcactcgcgtttacagcgcgtatggatattctcagtgtccttcaccacttgcttggctttctctctagacttcgtcgaaggtgccatcgccgagaaaactagagagagaaaaaagaggtttgattggctttggaaaatctaatccatacaactaccaaggacgaaccctctctattttgggacacgttaacgtcatacgcaccacagacgcatcctgattcgttactttattatcagtcgtcgttttcttgccggacaatggctgagttgactcaggccgaggtggtttacttgcccagaactgttcaagtctggagagctcttctcaactggttagggttcttctttcagatctttcttcggatccttagagctctcggtcacctccctcttatctcttcctcttctacctctgcttcttctccttctttcaaacccttaccggtaatcgaattaccggaacatgacctcccgcctgactccactgttcaaatcgccacagtccacgattctaactccgactccgaccaccgtacccagaaactcacggtactcttttttttttgcatatgttatttgagcttgggaaactccgtgagtcgtttcaattatggtgctgaatattgaatttttattcgtttcataaaaacatacttcgttcttacatagtgttgatgggaaaatatgttgtatttttgaattatttgcgtatttatttgttgggcagttacaattagttttatccaacacggaaatttaactaaatcttttgtaataaatttgaaaaatggtttatttattatactgagaatataagagctccactccacaggttgtgcttgacttggacgagactctagtgtgtgcatatgagacatcaagcttacctgttggtatcaggaaccaagctactgaagctgggttgaagtggtttgagcttgaatgtttctcttctgataaggtgattttgcttattatgataagaattatttgtagtgtgttcattttgattggtattagttcaaatgatcaaacttgtacttacttgagcgtattgggattttaaggaatgtgaaggaaggcctaaagtcaattatgtaacagtttttgagcgtcctggattgcatgaattcttgaaacaactaggcacatttgctgatcttgtgctgtttactgctggtcttgaaggtctgcttattatcactattaatgttttgggcgtttaaggggtgcatccttctcttaatttgatcccccattttgtttttttttaaacatgaacacaggttatgccagacctcttgttgatagaatagatgaggagaatctattctgtcgtagactttatcgaccttctactataagcacgtaagtactgtttggtatattctttatagctgttgatactgaaatggggaaccatttttgttgagtggtgtactcgtgtttgtgtgtctttgttgtgcatgtcaaccaagtagtacattagtgcaagggtctcatctaatgatgcttggtttatgggaggccacagcttatgacgttttcttctaattgtgggataatcactgagaatatacagggtatgtgattggattagttgtttcaaatccaatcatctgctctcaaatcgaggagtgttgtcattttattgttctagcaatagctagtgggtcatgctagaatctcagattggctgtgaagagtgtttcaacttggataagattcttgttgacctcggcaccagcgtgctatgctgatttacatttgcaaatttattcgtgtaacccaagagggtatctcaaatggtcaaacatgtggttgctcccacaaggtctcaggatcgagtcccttttagcacactaattacaacacattaaacactgtacaatttacttaatatttatttagattacaagtcaatgcaatgtaatatcttgttagctatttttcgtttttgagataaatcaagttagctgattggttcgagtacttttgttggaataatgaattttatatttggtcatgcatctgccattagttttatgttctgtaaataacctttgatgcttgagatatacagggagtatcgggagcatgttaaggatctcactggtttagcaaaggatatgtgtcgaatagtaatcgttgacaacaaccccttcagcttcttgttacaacctgtgaatgggattccatgtattccatttacagcgggacaacc

SEQ ID NO: 1923 - DNA, 2186 bp, Cannabis sativa
aattcaaatttgaacggctagtttggataaagtcaaaggaagtggttataataacatgaaaaatattaaaacaaagtcagtcaatcctaaacataacattaaaatacatgaaaaagttaaaagtaataacactataaaaccaacacagagaagccatagtagaagaaaacagagagttaaagagaaagaacagagtgaagatcatgaccatgaccatgaacactcccaaagttaaccaaatatctgagtgttttgttaaaccaaagtgtgccccagaagaatcaaatcatcccctctatatgacaccatgggatttagtaatgctctctgtccactacatccaaaagggtctcctgttttccaaaccatctcatcaagatgagaatttcatggaagatctattgggcaacctcaaaaactctctttctctaactctgaatcacttttatccactttcaggtcgtttgaagacaatcaaatctgaaaacccaaattcatgtttggtttatgttgattgcagtaatgacagccctggagccaaatttatctatgcaactctagatatgactgtctctgatattctaacaccaactgatgtaccttccattgttcaatctttctttgaccatgatagagcagtcaattacgatggccacacaactagtttggtttctatccaagtaactgagcttgtggatggtgtcttcataggatgttccatgaaccatgccatagctgatggaacctcttattggaacttcttcaacatgtggtctgaagtgtttaataacacaaactctatctctcgtccacctattttcaaacgctggtttcctgaaggccacggcccgaaaatcagcctcccatactcgggccccgaagagtttgttgggcgatttgaagccccggaactcagggagagagtgttccatttctcggtggaatcgctagcgaaattgaaaaccaaggctaatacagaatgtaacaccaacaaaatctctaccttccaatctttatctgcacttatttggaggtgtataactagagcccgaaatctagcaccagaacaggtaacaagttgtagattggcagctaataatagagggagattagatccaccaatatcagaaaattactttgggaatgtaatttatccaataaggggatttacaactgttggtgatttgcttgagcatgatcttggatgggcggcgtggaagttgcatgaggctgtggctaaccataatgacaagacaattcgagggttgctggatgattggcttgagagtaggcgcgtttttcaactcggtcagctttttgatcctttcagcattatgatggggagttcgcctagattcaacaagtatggaattgaattcgggatgggaaaagcagtggcgcttcgcagcggttatgcgaacaagtttagcgggaaagtgtcgtgttatccgggacatgaaggcggcggaagtattgatttggagatgtgtcttccgccggctgctatgtctgctcttgagtctgacaatgagttcatccaagccattcagtgtaacaatattatgcatacttgaaacagttcatgttaagccaatttgtattgactaatcatttttatgtacgaaggcattttgcagatttttcttactattttaattttaaacaaagtacaaattataattttaggagatatttgacgtaaaattctcttaatatttttaagaagcagaggaaattttttttttcattcaaaacatctgattaacaatacacgatgaatttccatcttaaaataattaataataggaagagtagctcatttattttatatattttcatacattagtactagctctaaatatggtaaaccaacaaatcaaaaattaaaaatcaaagctattacattattctctgttttagtaagctttgaataattacaaaagaaaattccagtgttaataaaggagacccttagatatcttggaagccaaattaatccaatccaggaggttcttagaccaaacaacaaacccgaaccaattttgcacctctgagagaactgtcttcgtgaaacaacaatcaagaaaaattaggaagggtttcatcattcgaagggaaggaaagttgactatacattaatgacaagtttactaataaataataagaataaggtgatcattctttta

SEQ ID NO: 1924 - DNA, 1200 bp, Cannabis sativa
caatgccaataatgagtaatgagaattgaaaaagaaataccaatggctaagagtagagtagttagtagagtccaaaagtagtactttgtctttgtttgaagctcttttttatcaagttgtgatccaattatttaacggattagagagtttagctattccacacaaaattaagagctcaagtttttgagagataagtacttaaggatgatgatgccacttggcaaggagagtgatcactcattactctatccgaggatgataacccttgttgggctaatcttttgacacgtgtacatgcatggtatgactttgatcctgatggtatattccatatgacagtggttatctatatagtttgatggttgtgtgtgtttgttttttgccatttggtccttcttctaaactactcattgtgtttgtatagttgtataatatataaaaattcattgtggcaaaacacaaacacaacaaccatgtcggcctttattggaaagtatgctggtataatttcaatcccaatctcaatctctcaaatcaaacattatatgtatatgagagtttgattaatttgctctattatcactactactcctatctatgctcttacactcaatctgtttttgcattcatatttgatttttgattacagttcacaagtacaaatatttggttggtagaatcaaaattaccatgtaaattaagtaaaaagtgtatatataaatgatttttttcacattacattaccttttttgataaaaagtagtgagtgagttctttcatatcactagtcattttgattagtgaatattatatatgatttaatcactcatcttttgtacaaatagaaattcataatttaatatttgtgggaaactagttcaaaacctttacaattgattacaaacaatataataaatagaaaatgagactcttcccttctaagctaattttcttcctaaattaagtggaatggctaggtgtttttgtgtatttggccataatcttttctttgatattttgtataatatttggacatattaatattagtataatttacaatttactagattttgatattaactttttttttttttttttggatttaagtgtttatatattacaatcatgttttatttggtactcgaacccaggacctccaaaacacacacacacccgcttatagccacttgagctagcctc

SEQ ID NO: 1925 - DNA, 3430 bp, Cannabis sativa
  modified_base (1746)..(1754): a, c, t, g, unknown or other
agttcattacctaatggatttttaggttctaatactctatttatcaaagttgttgcaatctaacagaacgctattaaatcaaatgacaaagacattgttgagaaaaagatggattttcccggatgaaatggttgaaactttgagttctctaatttttatcccattctatttcggtagttcgatcctgaaatttcttagtttctatattttcgaaacatgagtatgtgacttgttagtattgatcttataaatattacaaagagcctacttctgcagctgcaggtttgcacttttacacaagcaagcaaaaattctcaccattatgatcgttttgtgaccataaatttacacttgaatggttgcatagtctaaattcaatgtagttatttcgctaattcaacaaatttccctaacccgactccaaaaagcctcaaaaattacactatgccaccataaaacagtaaattcaatgtgattattttgctattttaacattttcatgttgtccattgggcaaatttcccgaacactatgaaaattttcattagtaaaacagttttctaaaaaagttattagcaaaataaccatggacgcaagatcaacaaccataaatttaaattcaatgtgattatgtattactaatttaacattttcatatgattaatttcttaaatttccctaacctgattccaaaagctgcaatggtggcgatcctcgattcccaacatctctggagacagtaggccgagcctcataaaccaaagccggaagctcctcatctcggctcgaagctaactcaaccaacagcttaagaggaccaccgggagccaaaaccgccaccaaatcatacaaagccaaagccacaagaagagtccaagtagtccattccggcaatttagtaaaccaagtagccacaaaaatccccaaagaaaccatataagcttgtctcaacacaatcggaaacccagcggaaaacaacgacaaaaccccaacgacggagaagttgaatagaaacagaaaacaagtgacggaatcgatcggtacagagaaatgctgaacgatttcgaagaagattgagcctccgatcgtggcgaggacgaagaaggctgagaatcgcatgtagtttttgaggaaatttgtgaagttgtagtagtagagaaggacgaggaggaaggttacgactgcgacgaagatgacgaagactaatgcgttgaggagtgagccttcgagcttttgggttacggagtcggaagggttttccatgtagacgagatttgcggcggtacggaggggaggagtggagtcggaggtggttgaggagtagagtgagtagactatgaggacgacgaggaacatgcagattgagactggggacattacgccgacgatctctgttccgatcgaatctaggatgcttgactccatagctatggagctttaagctttttttggtgtttgggagatttttggtggagaaggagattttttttggggggttatatattttttaatttattattattattataatatgtgggtaaatactattgatctataaagtactatcttaaaaatgaatgtacctatatatctttttactattatttaaattataattatttaagatatattataaaattttaagaaatttgaaaaagtttaatatgtcgaaatttacgttgcattattttattttatacgtatgtaaaataaactgtttcaatattattttctatattgtaaatnnnnnnnnnttttttaaaattttgtaaaatatcttaaataacgaatataaaaaaataatagactaaaaaatctttttagataatcaaaattataatttaaatttaaatattattattacttaaaaattaaatttaaatatttatggaaactaaattatgcagagcaaattactctattaaatatgtaaacctaattgactagtagtgatacaacaccttaaaatgttgctacattagagtgataataatttttggtggatgaattttccacacctttgtttttgtttattcaaagattagttaagaacttgttacttaaaagttaaaagtttataatttatatttctttttatttgagaaacatcacaagtgttatatacttttacatattaacatgataatatgtttgtttaatcatttgtcaaaatctaactttcattaatacattagtttagagcaaatgattttctaaattgaagtaaactctattatggacttattgacaattttgaattaaaataaatttgcaacttcctagcaaaaaataaataaaataaatttgtaacaccccttaattgagatactattatttatttattaaaaaaaacacattaattaaagttgaaatttattaagtagaaaaaaaatgcttcatcataattttagtactcatgcagatttatagaacaaatttgtgtaaaacaaaacaaaaaagaagtaaaaaaaataataataattatatggtctgatacagttatacacagcaaacatttattctacaaaaaaaaaaaaaaatacagacaaaaaaccataatgttttcattctcaaggaaatgcagagaaatcaacaaatttataaaccgaaaaagaagggaagaactcgtaaaccttctaatcaactaaaaatgatgaaagaactattctttcctacaataaactctacgcgaatggatttcctccaatcgacgatgcaacaggcccttgagtcggtacattcctgtcgaataattatcgttattacattcaataaaacgtcacaccggtcatgcattttcgtaagaactccccgaaatcaattgataaaactatttggattaagagagtgctacatttcggtttgataagtttgttttaagtgattattcatatcgaaacaaaagtattgacatgatttgagagagaagtaacttactgtatttgggagcttggaacttgtggggacagatatgttacgccgccttcaaagaattgaacacaaaagtgtgttgttaaatgccttttcgtagaacatccattgaatcaacataagtacatttcaaagcctaccttgaccagcatcgggaatataaggggtcactgaattttgaggaaaccacggttcagatacaccaccaaggaaactcgaagaaagctgagcattcggtagagcaccttggaaggaggtcatgtccagaaactgaaatataaatcaaacaatgacgaaatcagagatttagatgaaaaaacatgacattgtaacagacatttctctcttatcttatctcttatttcttttccataatgatggagctgaagacaaattcctccaacgaggataatgcccgaaaggggacttgaatctgttttagctagccggttaagcatttactctatgaagaaagatatccaccagctattataaaaca

SEQ ID NO: 1926 - DNA, 2625 bp, Cannabis sativa
ccagacactcagcgcgagtcggaaggagctcgttgtacagttgcaggccgtcgaagatgaccttgccaaagctcgccttgattctaagccagtcttggctgtcaaggctgacattgaaggcgtgaaccgggagattcaaagaggaaggtagtttgtttatacagttctggctttaattcgttacatatataactaggtttgatgaattagagaattattcccaagtacgaaagtgaacttttaatacatctgtatgtgtcacaacctttgttaaatatgatcatatagacttgaatactaacttttccccatttgatactgaatgctactatttgcatgtttgttggtttatgaattcggtttgaggaaccaataagaaaagccattcttgtgtgtcttttccatcttttctaatttttagctaaataattttattcaatgttgtcaaatttaataggttgtcttagcctaactggtaaccacactccacctccagtattgaggttgcctcacccctaattggtaatcaagttcgggctgctgtgagaattttactttttctttttcgttaattgtggatggatgatacctgaaaacctttttttgcactcggttatgaatttaataataatctataactgcttagaactatgtgtttattctaggaagatatggataacatagcagcatggtggtgctttagttttttccatttatagtgaatgtggaactcccgaatatagtatcttttaagggaagaaagcaactgaaagactttccaacaattttgagatgcatgtttgaccgcgttctatcattctatgcatgtgtgtagggatgcaatcgaacaggagaagaaaacccgtgtccataactctaagcatcgtcagataatggagaaacatatggcttccatggctagtgaaatagagaaactgcaaattgagctggctaatgcagaaaggcgagcaagggcttcagttgcagccactgtagcaaacccaagtaagttaattccagataatcgtttcctcttgagctgtaatcatttgcaaaattcaactacacttgagggtctttgtttttttttccttctccttttcaaattggtcttcaattataagttttttaatttagatgcagggtatggtgcaatctctggaagcactgaaatggtctatggaggacaatcatatcccaacccttatagcatgcatcaggtatggccttagaatttcatcattctctttcaattataagatgtttagggaaatgtggtttcctaattgttagatttacaccatgggaagaaagatataagactattagcatcttcaccaagaagtacacggccacacatgtttgatattctctaataagaaaataataggtgatcaccttatatgtcattacatacttgtccttagtatcatccagatagatcctataaacagtacataacatgtttcacaaaattatatattatgagcacacagtggtgcggtggaacccctaatgattgtagggaacgcacactaatgagggtttttggttagaggaacaaaaacacatgaatatgtataagaacaaaatggaataaaatataatgtgcataaaaaaattattattttattttttatctagtattggaatggtatttcttcctattttttaagcagaatattcattccaccgaaataatagaaaaatcattctacaaatgacattctaataatttaaaatgcaactaaataaaagaataaaatgaaacatttagaatattttatatttgaatttgaaatacaattaaaaataaactaatattttagaagatattttgttactccagtactgttatagtcttctggttgcctataatttcttaaggcagcttaatgtagcaggtgacaagcaacaagtgataggtctagctcgtagttcttaggtagcacattgaagtttttattgagaatggtgaggtccttagagagtagagagcaagaagctcgttactatggagcatgtattcatgttgtcactttgtcattaccacctaatattatgagatacttgatcactttcttagacggtatatcagttttctagacagtgtttgttgtctttataagttaactgacatgtgttgtcggaacgagttcattcatatagtcgagtttttaatcagcttaacaattgtctctagcttttgagtccgttaaagtagagctacaagttctgtgcataatatacatgttgatcttatgaggtatttatcagttgtatatactttacaacctaaagctaatggaagatattgttgcagttcaggtgtacagttattaataagtggtgtaaaaatgttactgacggagtgctctcttgacataatcctccaatgatgaaatttatagaagacacaataatcatcttaaccctacaagtagttttgaatgaacaacttagatattttctacacataatgatttataatagacagaataatcatcttaaccctacaagtacgttagattgtgaattatgcgattcagaaacaccacatgagattaacaagtctactaggcacaaagttttagctttacttcatggtctttaaagctagagcaa

SEQ ID NO: 1927 - DNA, 1176 bp, Cannabis sativa
aagtgtacagttttctttcactaatagtttcctcctcaagtaggacttgttccgatttttgtaccactgagttcgaaataattcttcctctagtattgaagtcttcccataaattaatagctgcacttctaaattcttctcttctcttcggtctaactgtcttgaggataccttcaaaaattatgtttatattagtcatagcagctttcatttgacttgatgaaggcacccgaacttgcctttggtccagtaaaatagtatatggcccaaatgtttgtaattaagttggcccatgtcacttctcaccacctccaatcccattgatgggacaaactccctcaccggcccacttaagatttggcccaaactatactttggcgccaaacactccaaataattaatattgaacctctccccattatatagacggcccacctcagataaaatactttcttggcccattttattaaatttatctttttcataaagttgccacatgtactttaaattgataaaagtactaggcattaaaaaatacatcacacgtggcccttccaagtccctcatcagtcttctaaagacgttgtgaatagttattaatcccctagattcttgtatcttctttatggaaataccaaacgccgcatggaaattagattcgatattcacaaaatcatctctgcccgttgatttcttccctgaatgaacaccggtcactatacccaacggacctactgtgcactccgactccgattccactgttttctctggaaaattcgttgcagcttccttgtaattcttgtcatcgttcgtgaaccggcattcagcctcgtggtgttcaccagactcgactccaccgtgattctcatcgctgccagcctcccccgctgtttcttcttcatccctaccatctccgaccttctcgactgccactgcaccgtttactccattttttcctttcacggcagattctttaccttccccaaacatcttattgtgatcaaaatcttgatactagcaagtaccaaaatatccattaaacttataacttttaagcttgaaccgtttcaattcaaacttgccaccatcgtgttctaagaccaaagattctagtacaaatccaaaatcgtcaccccccaactggagtctcagatgcgagagcatgcttgcttcagc

SEQ ID NO: 1928 - DNA, 2875 bp, Cannabis sativa
tttttctgttattgtaaatgacttggtgtaatttataataacaatccttttctcaaaaaaaaaaaaaaaaataatgcatatacatgtaaattttcctaaattttatgctcataaatatgtaaaaaatgagaaaattacactctatactatttttatattgtcctcttttatttttatcattttttttaaagtctatcatttttacctctttttttaaacattgtactaattttgctcttgtcacttcaagatactctccatttgactctcttatgtcaggataatttgggtacaatacatataaaaagaaatatgtttcaattaaatataaaattaaaggtaaatttaattaattgattaataaaaatggtatttttcaacttacctctataaattttcccatatttttgtaaggtgtgggtatattgacttagcccaaatcagaagcccaattatgatagcagacccattacccacatctatgtccgttactaatgatcacttcttttttgataaacctccgttactcaatctctctatcgccctttctggctttcttcgctcactacctcatcgccggtaccctagaaagtttatcaacctcattcactaactgatcggagaggaggcattccgtttgcggtgctgctgagtataagccgttgggttgttgagctcggcttcattatcaccacccgcgcttcaatcacaattacttcacctcacactcacaggtacggttaagaggctgctaatgaggattggtcccctttcccttttctacatcatagtttttttttttttttttccttttacataatatttggggttctctctttcggtttctgtttttttcttcttttctatggttatatactgtaattttatttatatcagtgataaagaaattaaattaaactgtattttgttctttaaacgctcagagttgagatgaggatatcatcagtacccctgtgaaaaatagttcagaagaagagcattagttatagttagtggttttgaaatatgctaatataagggggcttttataacaattgtgaaattaatttcagattcctaccaattgacaaagagtttcttattttaactttttatctaatttattaaaaaaaaacattttcatgtaattgttgtaaactgtgtgggatgcatttgtattctttgcatttaactttccatcaaaacaatgtcgtttgcagctcttgattgacaagcaaatgttcaaatagtgtcttttgtatttttttgcttgcttcatcaattggtaaaaataaatttgattttaattcattgagtctttgatctaagaatcgttgtagggtggtttcattgacacctttttgtaggtttcgattagatttaattcttctacttgtcatgtacttaaaaagattctggtttggagacctctgttgctatctttgttgatttaagagggtgacaaaaaattaatttccttaaatataggtatataaaggaaagaatgtgaatcttgtgttttcagagttcagttataatggcttaagtttaatcctaccttcgggaaaaagaatgtggcattattgtgttagactattgttctcatcatgatttctctatgtgcatttcgaaactagaactcaccttattttaatttaatatatttatgctagtgttgttataatgttttttttgtgaggaacctacaactctcaaggttttttttataataaacgtgtcccggtgtagtcatttaatctcatcatattttcactatgtgttgccattgtacacttagcattctgcagagaagtacacttttgtattcataggaaaatgttcatttggcaacatgaataacattcttatatttcattcaaatatcagaacgttggcttctcttcccacagtttgtcattttccttaactgaacttgtcttcagcctcttcttagtctacgatagattttctgtttttttccccttaaacttgcctcagtcaaaattagcatcaaacttcttttgatacattgcttagaatataatgtagggcttgtatgcttattaaactttgaaagtgttatttggttctatgttacataccctaggaactatttttatgctctccactcttggcatcttgtgacatctttgttgcttgaatatttagatttggacttgcatttgcattagaattcaatgacttaggagctaaggttggaataaagaacaagtttataagcattctttttttttttttttaatttgatacatatggtcttgtttataagcattctgaggctctatgttcattttattgtttaggtaagaagctttttttaatataaaggcttgttttgtgataattgatataaaggtttattgaattaaaattagtttttgattcaactcccctattcgcatattctatttttgttatattttgttgttgtcaactaatcacaggttcagttttttaagactaaaaaacaattggcacagttcaatgaatcatttttacagaaatatttttttcacacaataaatttagattcttatttcagaattagacttttcttagctctaacatatagttttctaatcacgaaccaatcaaacccttgaggccttgctcgttttagaatttgaactcaattttatggtttggaaactaaatctgtcgggcccatctaaaatctaaatagctgattggttaatagtttttaaaaattattttcaaatctgatcttcaaatttaaggcaaacctcgaaaacataaatatattgttccctcaaaatccaactcctaatccaaaaatctattcacgttatcttttgtcctttcttcttccctctttagcagcctacaacagaat

SEQ ID NO: 1929 - DNA, 1278 bp, Cannabis sativa
aattttttttaaactataattttacttaagtgtcattctattttgaatttaataaaagaagatttgaaagtaactggtactacatgtttctgtttagacttaatgattttagaatcggacccttatatttgtgtgttatgtttaagacaataacaaaatctctattaacgaaattagaagaaaattactattttacaaatattgagtatttatactactaaaaaaaattattgaatttatgccgcttataaacttaaaatttaaagtaattatatagctatttaatagatcaaccaactataattatataaatgtcctttatagtctttttcatccttaattttaattatataaaaactggattttctatcacaaatacaagtatataatgggaaaatgtgaaaaattaggaaaaatcaactaattcgaaagttgtggagaatttctcatctcccacacaattcatggaaagtgacatagttacatgtaagtgaaatccatatcttttggaaagtaacatatttacatttaagtgaaagtaacatctaacgttcatctgaaaaattttcaaaatcctatttttaaaatttttaaatgtcatatttactataaaattatctatattaaaaaaaaaaaaaacaattagaagttatagagattaaaatgggctttggagaaaggctagtgggcttggacctccggctagggccctactatttgtttagtgtgtactctactttatgcccattttttttcactcatattgtattttgtcatgtataaatatgtgttaaacatctaactaggcatatttttactgtatcaaagtctttttaaattccctaaaatattatttttaattaaatctgttgcaatctatccaaaaattaaattaattaagaaaatctgttgtgtgatgcactcccatcaaataatatagtgtttccaaatttagctttcctagcaaattgttttgcatgtgtgtagcctcattttacatgtactattagtgttaatatataatatactatgtgtgtgattatacattttcaatttatacactatataattaatcataattataaatattttttaattgtttgtttgatattaatagtgtataacttttttttttttgaatgaatagtgtataacttgagtgtgcattatatataaaaaaattaaatgtgcaaattggatctcaaaaaataaaaaatggatgtatcagtcgaagctgctgggaaactaaaaaaaggcaagaattttctcttcttgtta

SEQ ID NO: 1930 - DNA, 1885 bp, Cannabis sativa
cattttaaagaaaattaaagttacatacataacaaaaagtattgtttatatttatacaggacaaaatctctacagctttgttcactctgattacactgaggttccttgacagaggaaaccacgaagagcttcctaaaggattattttgtgcttttccttgacagaggcactgaggtacaagtaaggaaattgatgagcaatcttgctactgcctactctgttttccggtatttttgttttacactttcccctttttgggttttatttggactatatgtcattctgctatgttcattgcttcaggatggttgctttatgaagttcctcttcagttaaataacaatttcagacatagtataattatatataggactcgtgcactttctgttagttcatgtgtcttagtttaagtatataaacttatttatagagtcgtataactgttctcatttttgatactcttattatacacacttatatggtcattttatcaatttttttcttcttggaatagagtcctatacacgtcctcatttttgatagtcttacttgaaaattgctccaattgaatttcctatttgagcttcaattgaggtaccaagagactccaaatctaggcttccatttccaactttatgttccttatcgctacctcttaactcagttccttcccttggacgcctaacctgaatttcaagtacatcttgcttggattcttctccttggattcttgctgaaatagctacacagttatttgttagtggttgcgtaacggtagcttcagagctcttaactgaatttacatatgctaaaatcatagaatctagttataagcagcaggggtttttatatatgcctaaatcgtagactgtgcagcttttatatttttcagctagaagactagtgacttatcgctaagtttgaagagtagtgagtttttatttcggataaaaattatcatatttatatcatgtaaacacaacacacacactcttacaaagaagtaaatgagcagcttgctgattttgttccttttgtcccctgtttttcctctgtatatgtagcaggttctattccttccttttgtgactgtttagagcatatcagtaaattatttgtcgtttcttctctttaactctgattcaagagtacattaattggggaactaaactcggtaatctgatatattatgatttatcatattttccttattagtcatggattgtgttcgaaatttaatccacggttggtaaggtactccaaccctcactctatgtatcataatagctttaatttctttttactttttatgtcactttttctcttaattaacgttaaatttttgctaattttgcattgcaataatggtaatagtgatctagaagtatctcagctcttaaggtttatctaagctttggttggacagtgaaaggtggtagtatttttgtttagttattagactaattctgcaattgaaaagagtttgttgtttgttattttctgtattcttgtttttgcctaaatctacatatggccaaatcgtatactgggcgacttttatatttttcaactacaaagcaaagtagatggctgttgtgagtgacttatcgctaactttgaagactaagtgagtttttacttttgataaaaactaccatatttatatcatgtaaacacagcacacactctcttacaaagatagcatttttattgatatatatatacacatatatacagagataagggctcacattatgttgcagcagaacctccatcagaaggtttaagatgagcaacatgatcaactattgtttaatgatgtctttcctgaccgaattcctgatcgagctataataatttttgttgtatgtccaatctctaaata

SEQ ID NO: 1931 - DNA, 918 bp, Cannabis sativa
aaagccatttcagtgaactcttgttgtgtaatctgctgccattgttctcaaaccaaaaacaaattcagtaaaattgaaaacccaaaataacttatgaagaagaagaaaatggtatataaagcaatacacataacgtacatacccttccagttccagtcgaagcatcacaacgaacaacaagccgcctcgaactccgaccaaatctttgaaacccattcgagaaagcaccatttcgcttcaattgcagcgactttaaggcccgaaacgaattgggtttcggaggaaagatcaaagaaagctgtggccgagcaaagaaagcagttttactacaacggttggaagagagatgaaaactgactccagaagcaaaggaagtggtggaagccatttttacagctctctactcctccgtccactccactcaaaatttttccagttgcaattatatatatgtagaaagtgtgattatttacagttgcctagaattttggaaaaaagaggaaaatagtaataatcaagtacaggaagagacttgtttagctttgcgtgagaatttagaaaactcacagtaaaactttgtttgagtattgtttttgtttagtgttctttgttggtgatttggttttgaaaatgaagcccaacaattacaccataaaaatacagaggtttgtgttgtgaatagagagaaaagaaacaaaagaaagaagagtggagagtgttcgtgaaacgtcgggagtctggtggtttgggttgggctgggctcacctcagctctcatcccttggttggttctcatcagtttctttatgttcgtacacgtgtcctagatttacacgataatatctctaaccgatgattttaaattaaattatatgattagaatatataataaaaataacggtaattcatattttttatt

SEQ ID NO: 1932 - DNA, 1780 bp, Cannabis sativa
tagctttctaaacgcgccctaagttagaaattaacatcatcaattggcaattaatgaaactaaatatgcaatgcatgcatattcaaagaaagatcaaagaatttgttaaaaaaaaaaatcaaagaatattgtagtgaaaatatatgtgttttcatgattggatagattggacattggtcctaccagcatgcgaagggcacgtgcatgtgattaattagcagtgtccaagtgtgtggagttggacttattcgactactttatttatttatttatttatttatttattttgctgaatgactattttatttatttatattattacaaggaaaatacagctaagctgttactatatataacataatacatgtgaacgtaataagataaattgatatctatggaggtgcatgtgccacttttagaatttggaaattgtaatactactattctactactacctactttcagagcttcagaagatacgaactttttgagtgagagaatcaacttatttaattttgctattatcactattacttttaacccatattactatttattctacttaatgtagtcatagagacctatatatagccaaatccgtactgtttatacgtagttctactacttttgatgatacctctaacaattaatgcatatgtctatattttcctcttattataagacttccaaaataatttttgagtgacatttcacatttccaatgagacccctttatttggaaagagtggaatcggtgaaattcaaatatagatcacacctatgtatttgatatattgttgcataattatttatattgttcctttttcattcatggtagtcatgtttttggtctcccttcctcatggctagtgttcgacacttttttttcatacaattaataatgcacgaaaggagatcgcaaacctcaagtagttttgtggtctctgaattatgtatatttccattggagattattcagttaattaatggagatttctaataaatttgaatgaaagtgttgggtcatagtatcatatatctacaccaaattgtaatatgtctactaatgtaatacataatgatgattggaatttcgcgtgttaaattaaaaaaactgttatgacatgccccatttatgatgattggagagatgcatgaaaaatacagatgaaatgatgatggttatcaagaaagtgagataagttggagtaataggaacaaactagtgatcatgtgtgaagggtcatatataaatatatatatatgttcatgttctatatagctttaatttgtaagagattgttggttatataaatatatataattatgtatagagtgtgcaagtccaagagaggggccgtcaatgtcatcatggccatatggccacacccccaacacccacaccaaactatttttggaaactaattaaaacatctgccctcttcgcgtgcacgtcaagggaaaaacctcttatatatattctcgaacactattgcttaattgtaagatttttaaaaaggaatcatcattattattatcatatttgtgtggctggttcgggtagtactggtcatctcggtcggtccttattatgtcttggttatagatcttgttgggggtagttgctttacaattgtaatccatttggtttattgtttagggtcatctttggagatgaatatataaagaacactttccatgtgttatatattgagatatcttcaatacaagcgaacatcatatctaatgaccatcatgtctgaatttatttcaaacaaaa

SEQ ID NO: 1933 - DNA, 1015 bp, Cannabis sativa
aaaatattgttaacatgtggcttctacttcctatagtcctgtttctaactctgttttttcttgtgaaaaacaagatcaaagccaataatgaaatcaggccaaatcttcctccggctcctccaaaacttccaatcataggtaacttacaccaacttggttcactaccccatatatctctatggaaactctcaaaaacatatggccatgttatggggcttcattttgggacagtaccagctattgttgtctcttcagctgaagctgcaaaagaggtcttgaaaaccaatgacttggcttgttgcaacagaccacctttagctggctcttcaaaactttcctacaacaatgttgacatgtctttctcaccttatggtgaacattggagacagatgaggagattatgtgctatcaagttattcagcagcaagagtgttcagtcatttgagttcatcagagatgaggaaattgattctcttaatgattttctgaaccgatcttctgtttcggctactcctgttaatctcagtgtaaagatgtctactcttatggctagcatgactttcaggacagcctttgggaagagatttagtgagtgtggattagatagtgatgtgtttgaagatatggttcgtagggcaatgggtgtgttgagaacctttgcagcctctgatctgtttccccaatttagttggagttggattattgatagagtgactggtgttcatgcaaaatttgagaagatctttcatgagatggatgactttttcagggttgtgattgatgagcatctaaataaaactccagaagatgagaaggaagatattgttgatttgttgctgagcatagagactggtcaatatgactctggtgaaattcacttcactagagattgtagcaaggcaatcctcatggtaattatacatcattttttaaaactagtgcatagaggattcgaagctttttcacatattattcatataaagttataacataataaactgtagttatgcttttt

SEQ ID NO: 1934 - DNA, 2371 bp, Cannabis sativa
ataagaacattatatgaacaaaggcattggagtggagagaaagtatttaagttgctctctgtatctatgattcaaaagtacccaactaagaagagaacgtccccaagtcttctccttgctgatttttttgataattcttgtacaactcttttgtctctcacatgactccatttatcaaaacaaaactacacacagaaaccttattatttctgagagagtaaagcttccaaggatttggggtcggtcaccggagcactgcaagtaaagttttgacagacaagagcaaccaccttgtctgcagcagaattgttcttggccatgagagccacgtcactgttgttttcttcccagaattgcatttcttcagtatcgaaaggatcaatgtgaataacctaccaaggaagtaagagtagcataaaggggtaatcgaaatagaaaatagaccatttgagggcttatgagaacttcaaataagagcgccattactcactgttttattcggatcatactgagcatggacagcgcccagcatgttttcaaactccaaagaaggcttgtggccgagcaagacaatttgcttccttgaagggacagaaaccatatctgccgcacagcacatcaaaggcactgccattgccttatctttcagccttgtctcaaaaacagcctgtaatcattaggttttgaaacaattagcaaaagagcagagcttcaaaacccagaacatttcactaaatttgaggtgaagcaacatcaaaccagaagatgttctgcgttcttcctgtagagatcagatttattgccagtaaccatggaagccaatctcacgagattgatcgcagaaacagagtttccagatggctcggccccatcatgatcttccttcacccgcaaaagtacagaaggatcttcccctggggtattaaaatatcctcctccctctctatcaagaaacaactcatcctgcaacatgttttctgtcaaactaataccaagacagtttaaaatgttggtatttaaaatcaaacaccaattcttgcctgggtatcttggagttcagttgcccaaattagccagttgaccccaccaccaaattcataaatatccagcaaccctgaaattagaaatgcataatcatctaaaaaaccaggtgctttagctggcccatttctaaagctgtgttgcagcctccgtgtttgttcattgtaaagctgttttctgataaaagatgctgcccgttctgctacttccaagtagtccttaggctgcaaaatgtggaatgttcaagaggccaaaacataagtagatggcataatcacattcttcaatataacagcccttaaagccttaacttgagtacaaagactataataattttgaatatttaattccaacatttttaacaaatgtttgacccttgcatgctcactctcctgtttagacaagcacaatagcaataaagaaaaacacattcgcaaaatatattaccaaagcattaattcttgaacaatgaatacaaggacacacacacacacatttgagctctaaactgctaaaagtatctcatttctacaagccataaacctgattaacatgatccagctgaaagcagattgttacaaataaaaaacttctttcaaacttacaaaagacagaaattaaatctttacacagataaaaacttacatcacatccattcacaggaaagttgaatttagtgccctcaggttcacccttgagaatcttagaagctcttgcaaaagatgagattacaagtccattccatgatacaattacctagaacgaaccccaaatttgtatgagtggaagtaaggtagcaaaaaagctctaactgtaaataaatgaattcaagtgtattaaaatataacaccttgtcatccaaatgtggttttggtcgccttgaccttatttcaaaaagctttcttctgcattcaccaagaatgtcaagatattcctcaacaggcaagccaaattttgatgctagttcacccgtgcttttcctctcaatcagcacattctttccctcaaattctttgtgaggatcactcattctagaaaggtcacaattgcctgaagacttgatgtaaaagtgctcattgaagagagtagcatgctctccaagaacatcttcgacctaaacagatgatgtggagaatcaaacaagttagaaaggaacggaaattagacaagagcaaacaatgataatgggtacctacatagattatattaattatgcactctactgaagaaaatataaagttcggctagcttatattttccctgttggcactttttaaacgaaatgaaacaaagaacatgaggcaaagtttccgaaacaaaggtaaaaaaa

SEQ ID NO: 1935 - DNA, 1012 bp, Cannabis sativa
caaccaagctctactcgtaaagcaagtttggcggatttttttagacccaacctccctcttaagccgtgttctcaaaccaagatactttaagaataactcttttttggatgctaaaattgacaattatccatctttaacttggcaagaaattatatgggggaaagagttgctaattcaaggtctgagatggaaggttggcgatggtcacaatatcacttgtgcatccgatccatggattcctggtttcacttactttaacctctccttttcaaaggagataacaaagcaatgacagtttcgaacttaattgcaaacaacaaacgatgggatatcctcctccttcagtctttgttcctggcatctgatgtggagaagattcaaagcattccactctccctttttcaccggactgatcatcttatttggcaccataaaaatgatggttgttctactgtcaaatcaggttacaagatggaattgttacttgaagaacaacagtcgaacaccagtaatactgctgcaattaattggtggaaaaaattctggtcactctcaattccatctaaagttcgaattttcctatgaagagcaatgcacgactgcttgccagtcttagacacactgcatacaaggcacatcagtgatactagcttttgttctttatgtaaccatgagaaaaagacaactattcatgctcttttcaggtgcaaatgtcccaagaaattctggaagtcatcccatttctcaattgatagccttctttcatgacatgtatcattgcaggagatcatgatccaggcctcaataatatggacgactttggaattggaacaatttgcttgcattttgtggagcttatggactgaaagaaacaaggaacgccatggcactaaaccccacccgattgaattacttttgtttaaatccatgtcatacctggaggattttcattctgcccgaatggccaagccttcaaactagaagactatgtcgcatcagcaagctacaacac

SEQ ID NO: 1936 - DNA, 3057 bp, Cannabis sativa
ctaaacattctccataagcagaataatgatcaagcttaatttcgataggaaacgtcaccactaactttcataattggcagcttcccaaaccaattaaataaataccttttcacttatggaatataccaataaataagtaggatatatacatacaaggcattggctaagaggttgataactaaggaccaaagtaacaaacaagacttcatggcagaaacaaaaccaagtaaatcatagacatgtgagtaacaaaaatacctctttgtgagtaagtttcaaacccaacacaggccttctattttgaacacttgggttgggtgaatggattatgaaagaaacatgaagtttgtgtaaccagctggacttctcaataaattacattatcacctggggaagtgacccaacaaattatctagttagcaagcatacagattgagtaccagactaataggttatataatagcagaaccaatacatacctctatgtgcaatcaaaaataggagttgtaagagcgaaattttgaacgaatgcttcaacggttggttaataacttagtagtgcaatttaaagtttatgcgcctcatcgtttggagtcaacagtgtaaaaattctcactgtaacgatacagaagcttaaccatttttacatgacagagcatgagaatgattggttgctccagtgttatcaagtattatggaaatgtggtcacctaaagcatcagacattcttaagatgcattaactcagttctgtcatgtttctgtggtaaaaattaagcaataggccgatagcttgggtatgctcattgctaaactgaaatcagacttaccataaatgtcttgctatcaccaataatctttgcaggaacacagtccatccttgaaatgatgaaatctattagcatcccttaaaataatttctctccctgtaactttcgctattaatttaatcgcagaatggcaatcgccacagaccctaagattcttcatcacccgaataggcattgtttctggcaccttcagcagtccatatgccactgccagcttctcactgtgatatcgaaggctatgaactttctcttcttcatccacgtcgtgcatcacaaaggtaccatctggacagtacccggcttccctcagtaatacacctagtctatccaacattctaaggatgattaaatgctctggatgtcccatgctatctcccccagtaaacatgtgaacatttttgtccacttcaatccagctacagccaggtgatttgcttacacttcttgctctcatgtcactccttagctcttcaacatcaccccatcgacccttggtggcatacatatgtgataataaaatgtaaggcccagaactcctaggctcaagctgttgaagtttctttgctgcaacttctgctaagtccatcttcatgtgagttttgcatgcacctaataaggaaccccaaacaatagcatcagcttccactggcatttttttaattaaattcatcgcctcgttcacctgccctgcacgaccaagcagatcaaccatgcaagcatagtgttctgttcttggctccacaaggtatttgcctttcattgtctcaaaaatttcaagaccttcctcaacctttccggtgtagctacatgccgaaagaactccaatgaatgtaatatcattaggctctaagcccaaagagcacatctcatgaaaaatttgtaaagcttcctctcctaaaccatgttgtgcataacctgtaataatagagttccacataacaacatccttttcaccaaatctgtcaaaaaccagtttagctttctcaagattgccacatttgacatacattatgatcaagaccgaggcaacatatacatcattatcaaagtgggatcttagcaactgacagtgaacttgtctaccatgatcaagacttgcaaggctagcacaaacagataggacactgattagtgaagggaaattcaacttaactctgtgtctctgcatcgaagcaaataaatcaagtgcttgcatttcaagaccattcctttcataaactttaatcatgccattccatgtcacttcatttttctctatcatctgatcaaaaattcttcttgatttatcaacctctccactttggccaaaagcaagtatcattgcattgcaagcaataactgacttgattggcatcacctcaaaaagttctgaagcctcttgaatccgtccacactgagtgtaacccatcaacattgccgtccacgatacctcatttttctctggcatcacttcaaacagctttctagccacatccacccgttgattttgcacatacccggatatcattgtcgtccaagaaacgacattcctacatggcatagcatcaaaaatcatcctagcctcattcaaacgaccttcctggcaatacccaccaatcatgtttgtccttgccaccatatctttctccggcatctcattaaaaaggcgatgagcatcatcaatacgcctagcttgtatcaagccacccaacataactgtccatgacacaacattcttctcaggcatttgccaaaacagtgactctgcttccaaaatcataccctcttgcacataccctctaaccatagttgtccacgaaaccacattacgctcaggcatcgaatcaaacacttgtctagcttcacctagcattccattcttgatatagccggaaaccaatgcattccaagaaatgagattcctctcaggcattttatcaaacaacttacgggcatctccgggttgattgtttaggaagtaagcagcaacaatggagttccaagacacaatatttctctgaggcatttcatcaaacacctttctggcattatgaatttggccgagacgggcatagcgtgatataagagagttaaaggaacttgcaacgtttgttgtataccctctgatttggataaataacaaccgcatcgatgagttcaccgcagaccacactgctgttggtattaacagaaagagagtttacagttcaaagaaacagaaaagtccacttggctaaaacattagcaac

SEQ ID NO: 1937 - DNA, 1932 bp, Cannabis sativa
aattatatattaatttgttggaacatttttattaataatgtccacgtgaaattcactgtactgttctgttaccaattattactatagttaaaaggcaaaattgtaataaatgagagaaaaaaaaaacattattattattcctcaaatctttaatataaaccacacaaataatagtaatcaattatctactaacaagtaataaaaacacacatttaaagtgaacatagagtctcccatctaattaaaaatgagaaatgtttaaaaaaaatataagaaaatcaccagatattatattattatgtatataattaaatatttagtttcatttatatatatatattaaatattataaaatagtgttaactatttatgagatactataatattatagcaatattatactattgatgcctaataataataatatttgaatatacttaatagagagagaaaatgtattaaagttccataatttatttaggacacatcttatgttaaaataattatacattatggtatacaaactcaaattcaaagttaattttaatctagctaaattgatttatttatgagttgtgttgatcgattcagtttttttattctgtcccgtttacatcctgtgaagagtgataataagaaattttttagaacaattcaaaccgtaaaaaataaaaataaaaatatttaaaattgatgtataaagtgattttgttactcttttccctcaatatataaatatatatataaaaaataataataaatgagattattattattattcttatctgtgcatgtatattttagaccattaaatgttgtagttcttcttacccaatataatctcctgatctcagtactcataactctctttctctctttgtgacttatgagtagtcaattctttacaaagggctttttgtcactaaaattatttaaaaattatattttgtattgtggtaccacttttactcatatttatttataataacgcattccaacaaaattgaccaaagtcaaagatgtctactactactactactactctcactactagcctttattattattattattataagaaactagggcatgtttggaagttaggataaaaactagggaatagacaaaatagtcccactaatgttttgtgagaggaattacattacattgttttaaacattgctattacatattagtgtgcactcacatcaatttttctattctattttgagtaatataccgtataaatacttaagtttaacttttaacgataatagtatctaagttataattctgaaacttcagtgggtatttagtttttaagtattaagtaaaatatcacgtgacaattcttgattgatctaggtcattaagttatttatttttttttaaaataatttaaatatataccaataaaaaataacacgtaaatatgataacttgacatttaacgactaagtatacctacgactaggtattaccgtcaaacattaaattaaggtatttatttacaactaaaaattaaatttaaatatttatgtcgtaaattactcttctattttttgaaatatattattagaaatttagtcttttagttaaatatatttttagttaaaaatatatataacatataatagatgttttatcttacaacaatgagtaatgcttctcttaggaccattttaagctacttggagcttaaatctaaatattatttttgagcctttatataaatatttttctagtcatatagtataaagtagagatttcacaaaaataataaaaaaattataaaaatacagttgtacgaaattttaatttttttttttataatttttaaaattttacatacataaaatacagttttttcatgtattttatctcataatatttacattttattaaataaaattctataacttttattaaaat

SEQ ID NO: 1938 - DNA, 2169 bp, Cannabis sativa
tcaaaaaattatgagcaaaagagagaaatttattacagcctatcacctcaaaaattggtttttttttactttactacaaatattgcatcaggaaattgtctctaatcaagccttcagaatttcatcaacactgttcatacagtatgggcctaattaaataatgaaaaaagcatcaattatatcaattatattaatgccatgcgctatgcagtactacaggatgccctatatatctattctatacatatatgcatggtgaaagtgtggttaaaacgggtgaaacgtatctcaaagttttggttgacacaacactcaaaagacaagatgagtaaaagaaggagacactcaagtagaggtcaaggaattaatatatatgcatattattttattgatcattataacatctattactattacgattcacgaacaagtaaatatatatatgacaaactctcaccccattaatatatagtttttactatcatttttcaataaaacaaatttgtgggtggatggatggagctccacattctcccacaccattacattaatatttaaaaaaagtcaaaaagatttctatcgtcattctcaagggataatcttatcatctctcatggactttaaccaatacaagattgaatccaaagttttatatctcaaactaaaaccaaaacgatcaaccttatctcttgttcccaacattttaaatgggcaacgaaacaaagtatccaagaattcccaattggccaaatcctccatcttcgtttcaacaagtccttccttctcaacaatctcttcccaaactttccctttatcaaccatggctttggaataataaaactcctcagagaacaataacacgtcatcttttggcagtactacttcagctccaaactgttcctccaaacttggccaaatctctttccatgtaaaagcaggaccatttatacaattaaaagcttgcccattagtggaatcatatacatcttcattggtggcagcccaaatatgttgctcacttacaagcctagcatccgacccatcaagaacgaactcttcccaacacttttttgtcccaccaaacaaaaagggtaatttcaaatgcctacaaatagttccataaacccctaaacaacccataacattgtaaaaactcctagtagaaatacctgttatcaagccaggcctatgaatggcccaagccactctgtttcttagcctctccttgagtaaatcctcaagatcatagtaaaaattgccgttctcagacctcatcctggggctttcctcactgtaaaatctaactccatactcctcatcctcatcatggaaaggtccttgaaaagatatataatgctttaaccctgtttgtagagaaaagtgcctcaaaaatttggccttgggaagaagagcattgagggcattgaccatcatggctttgttctgctcgcagctttctcggctgtcgtatcggtattggctagcccaagtgacccaaaaaatgtgagtcacgtcgcttagcaaggacagcctttggtgggcttcataagggttctctagatcacattggatgaagtgaaagttgggttggtttaatgtgggattgatatggcaaggattccgggcaatcccataaacctttttccattcagattttgatgctgtgagccttcttgccaattccctccccacaaccccggtgaccccaaagatggctgccacatgcccattattgttgttggacattaatggttcatattggaactctctcattgccattattacaaaaatgtagtgttgatgagattttctttcctctctggtgtgagctttcacctttcttcacaaatgggcttattaatatacacacacacaactaaatgttaaaataatgtggaaggttctggtcctggaggctctagcctttatttaatgatattatgtgtcaagatattttaatcaatttttatttgataatagtctcacttaactaaaaatgtatatcaaatttatttgtaatttatgtgcacatatcgtatcttcattcttattaaatactagtaaaattatacgtgctccgcacgtgattatacttacaaaattaaaaaaaatatatataaaaaataatatatgtatatttttttaataaattagcaaattttattatta

SEQ ID NO: 1939 - DNA, 3340 bp, Cannabis sativa
taattttaaaaattgatcactttgcatgcatatgtgatcgatgagctctttccctcgggttgaagatggaatattattacagtaaaaataaacaaactacacataatagctagagactgcatgcatgcatggtccaaaaattttgtcacatcaagaaaagaaaaaaacacagctcataatcacaacaatctttttttttttttttttgctttttatatgaattccttttctatatatggatttccataaataggaactcataaaattcacaaacaattaatttacaattgtcacaatcgcccccctaaaccttttacacaataacaaacaataagatacaaattagagaaactatatataaacttttggttagggggagttgtaattaattaataattaatataatattcaagcaaaaaaacatattaattacatcatcagtgaccaagtcatcaaacttgggtaattacagacataacttgatgattatttatattgtccaacttattattattattagtttggtcacgactactaataagatcaatattattattattatttattattaccaccatgtcatgatgacgtgtactagtctcctcagcttgataagtcctgtggaccccataaagcatataaaacaaagtaattagaatagtccaaatcccaaacctctggaaagacaacttcttgagagtggtcattagaaatgcattgaggaaaatagacaaggctggtggccaaggcatgtaagggactgaccaaccaaaagatgccacgcaaggcaccttcacgtagcactggaataggaatactatggtgaggttggacccaccaaagaggagtagaccccaccagtggtagtatttccaagagaaggaaaatccaatggctgtgattgagaggaggaagagaaagaagaggattttatatgaagagttgttgcctatgataacgtaacgccggtagatgagagcattggctactaagtagaataccactagtgtgccgatcgagatcatttgcactactatttccaagtctgtgaacagagctattgatgctgtgcaaaatcctatattatatacatataaatcattaattaagaattgcaatatatatatatttatttggagagtgctgttatagttaattatatatgagttatatcttaaaaaaaatctatttgttttaagatttaaagagagaagttgcatgggcgggtttctatatgttttaagaattatatattgtggttttttgtcttgatctatatatgcacccaaaaagcatattatatatattaattaggtcaaaaaaattaattaataattatgaggccactatatgcagggtaacacttttgtctctactaatatataacaacatctcttatgttttaaatactataagaaattataaatattcattttttaggatagtttatatattgtagttatagtacatattttatattagattttaatatattttaaaaaattattaatattgaaaatacagttaaaaaaatcaattacaagtacatgaaaaatacaagtatatgcttgtgtcaaaaatgtttaaatcttattttcactataaattatattctcaattttttaaacacgagtacatgtatatacaagaaaatttgaattgtataatttatctaagtattgagaaatggagacgtccttatcaataaagataaaaatagtgtacctatatagtgtgattattttatatatatatccatatgtaaacacttgatttatttagagaacaataagataatagtaataaggattatatgtataattaattacccaaaaagagtgtggcattcatgggggtgcctgttgaagggtgcaccttagctaaccatgatggtaccaaacgagcccttccaatcacacaaaggtacctagcttggcctaacatggccaccaatagagaagctacaatgcccaagcttgctcctgctcctacaacattgccagcccaattccaccctatgctctcaaaacccattgaaaatgatgctttttcttctatctatatacatacatattttaatttcattatgatgcacattatatatttatatatttatgagaagctttttaggtgggacattaatttcacttttattgtaagggtgttttctattatatatatttttatttttgttaaatactacaacaaatgtcacttctatcagcacactttgctacttcgctggtaaaaataacttttaccaacatattttacaaactgcattggcaaacagatcaataagttttatcagcgcacatttgcagtggctaaaatctaacttttaccaacgcatttacgtgttgggaataattatttttactagtacttttcattttgtgctggtaaaagttctaataccaacgttgatttgccaaccccttttgccaacacatcaaaagtaaatttcattttaccaacatcataccaaacttacaaaagtgacctcatttcttgtagtatatatatgatggtatagttagtagatatttggtgatcagttttcaattttttaaaaatattttaggttatcaaaataaagttaatttagtagtactgacctcattataagggaccattaaacacaaagagaagctcattaggcaataaacaagagaggtaatgacaactgaaccaacaatcccaattggaagactttttgaagggttttggatctcttctgccatggttgaagctgaatcatagcctatataaccgaagtagactattgctgccccatctacaacgcttctaattccatgaggagctaatccattaggctttaccaagttctccaaactccctttggaaaacccaccaattattatgaacccaaagaaaaccacgtgaaacacggtcatcaccaagttcaacatcgaactttcctttgtgctgcaaattaatataacaatatttatatatacatatatatattattagggtcactttcaagatccactactcatgttgatgataatcaatccatagcccaacatataagactatgtatattaattctattatacatatatatgtacgtatgtcaactacatatataagatctcaagaaatatatataaatatatactaattaattaatatacattggaaaattggggtctaaagatatttttatttttagtacttagataaattataacttattaaatttttcttttattattatgtaattttagttataatatgatatattatttcatttaaaaaaatttagattaatttatcatattataaattgagtataattaatttttttgttgca

SEQ ID NO: 1940 - DNA, 1402 bp, Cannabis sativa
aaaattcagaccaaaataaaccgtgaacacttctaagaggatgaataatttttgtgtgatataattgttgcattttgtgtggcaatggtttgtaatatttgtgtgataatttgttagtggtaagttacttaaaattgagtgctgcaaatgttgtgaatgcccttaatgcttaaataattactgtatagaatattatgaaaatcaaagtattgtatacttaaaatttgtaatcttattttttttttacccaaaaaatatatatatataaaaaataaatgatgtatttttcattttttaacacaaaaatgtggaaaataagtttgcgatgctccaaattttagtataaatcaaaacacaatattcaacttaatttttctacaggacattcccattcaaccgacaaccattgacaccttaaaacacttttacaaagtctcccaaaaaaaaccaacgatatttttttattattattataaaaaaattaaaaaaaaaagtagaatttgactaaacaaattgattattaagttaataataaccatattccaacttaactatttcctaatactgatggctaagcccaattaggtttggtctcttctccgctttacaagccaaggaaagcctcctccctaatcttctacaattggcaactgtggttgggaaacatagcatccaaagtagatatcgccacacgaaaactcgcgagaatttgaagaacgagtcacgtgtgtagtaagaaaacgtatgaggaggaggacgataagtatgtgggccccacgttttgtctataccattaaaaaagaaggaaaggaatccttgtttcccaaaattaaatagtaatttttaaataaaaaaaactcaatacgtgattatgaattatgattaggacatttcttaaattttcttttaacccaataaaaaaaataattattttcttttattgcaacttgtaatctaatttattatcctaatgttatttagacccctcttttttgttaactatgccattagccccatttggtattagctagtagtctcgttgattcactatttttgaaaaataatgataataattttgcacaaatattttgctaaataaatagaataagaatgatttgcaagcaaagaaaaagagagaagaaagtgaacatattttgcattaaccataaacgacaaaacatgaatagttttcacaataattgttttgccaacttttttttttttttttttttgagtggggggactggaatattgttttacctactttacacgtatagtctttgcttagaaaaggaaaacaagttagtgtgattttactattggtagtggtaatctttctctgttggagcctgttcactttatttttaccctcttttctttttcttattcctctttttttttt

SEQ ID NO: 1941 - DNA, 1435 bp, Cannabis sativa
gtgaatacggtcactgttagaggtacttctaccacgtggcctgaataaaattggaagaaacccagtaaacacatcagacaccaatacaaattaccagacttgtgaataaataactttagtaaaacaactaaactatgaattatatatgtgtgtatgcgatatagtcaacaacttaatcataagctgaaagaacaagaataatcttttgaaaattattccatcaaatgaaaaggaaaaatgagccacacccattttggagaagaaattaaagtaatgacatgtgtactacctacacacttttttcatttgtgggaaaaacttttaaccaatcatatacattagatagataatactaaatttaaatgatttgaggggtagttaactacctatttaaaaataatttgaatataaaattaattaaaattataaaacaaagagatacttttacatttacattacatagtaaataaaagaagaaaaaaaaaatcttcgaccattgctgccaatttttgtacataaagttgttaactgtagcaaaatctaccatcttgaagttttgccatcaatttttttacatagtaataaaactacacaaagaatttagcagcatattggataaaaactagaaaacttgaaacttgacatataaagcaataaccaataactatttaataggaatcattttgctattcacatcttcttttcaaagcaatattgctattcacatcttaacttaataaaaaatatgaaaagccaataaccacaccacctaatttgttgtttgcaaagactttttatgaatagaaaattagcttttgctaaaaattatggttaagtgaaattttaataaactaggtaccaccgttttttttaaaaaaaaaaaacgataaataaacttcacattattctgacctatactgcatatctcacctacccaagttgcagcacactgacctgcttccagagagtgtaacccctctcaacctctcacgaagccttgcccttgcaagaagcacagctccagggagtctttcgtttgcagtaacagattgcctgctgctcggactgataaaattttcggtatcaattctattactgctggaaacagattgtcctgtactctcctcgagatcaaatgtcatacggtcctgaacaataaatgcaaatgtattatcactctccgatatatcaatattgctattggcacaattaggtatggaatccaatataattgtatgtaataacttttggggaggatcgctaaccataaccaattgcaaggtgacatgtctagaaagtgctataacaatgctcagttacaaaacattgaaacaatgtcaatcaactcatacacattacataataccatataataagtttttagctgtaaaccccaccaaaaccaaaggataatccgctaacgaacgttatggct

SEQ ID NO: 1942 - DNA, 1532 bp, Cannabis sativa
ctacttgatatttgtaggagagtttacttccaggtcaaaatcctttaatgctatgaatgaacttttgaacattttcagcagatccttctagttaagaacagatccaagagataatcttttccaccaatcattagcagactttgatagagttaaggagaaacaaaggtacttagcatcgtcactttccttagctactttcataattttggtgtatttagatagatgggccttgggatccgtcctacctttatacaaatccatttgtggcattctgaagtgttccaaaagctgtgcctctattattcttttcacacatggttctgtatcctcctcttccgaatcagatataattcccttttacttcggggagatgcatcctatgagctttgtcaactcatcaattttttgttctagacgtttggtggatacatcttgagattcaagtccacaaatttgatcattaatatggtttctcaaatcatctctacaaggttttgctttctcatttatatcttttgttcttttggcattcatttgtgtctggagatcattcattgaaagacttccacttcggtcatcttatactagatgaatctcatttacatcatcactccaactagtagatttcttgggatgacttttgtcttttccaacggcaggttcttgtgtattagtattgggcctatctttctgcacaactcagcctttagaatcagtctggttaccttgccttgaagcattggtccctttgtttttcttaggaggttggctggcagttctttttttcttcctctggctagtgggagaagttttctttgaggtttctcctacttttcccttccctttatccttatgaggatcataagtttcagaatttttcagaccagacttttgtgcattgttatcccatggaatagtattattaggattattatcgttaggagccatatttcctgtcgcaagtagtgcttccatccttgcaaatttctcatgtattagtagagagaaatcttatttggctactaactttagttcagttagcctttaatttttggctatgatgaccacaggatctgacttgtcgtgctcacttcccatattagcttctcatcctcgagatctataggatcgttgtcctcagtctcatcatcttcttctccttcatcgatgggatcatcttgaagaccttgcttattatgttgatctttttccttttgatgaggtcttcactgagccctgtcttgccgttcggatcaacatcgtctatcagagtgtcttggttgtgatgacaagatttatttttggtgagtaccattattacagtatgtaatcgttgatggtatcactactttgttcatctctcaatgaaagcactaaaatatttctcgatatttttagaaactaataatttaattataagaacttaaagaataataattcacaactagaagaaataagaacactcaagatttttatgtggctggggcgttaactaaccttaagccacgagtcaatattagtaatataggcta

SEQ ID NO: 1943 - DNA, 1335 bp, Cannabis sativa
tttctaattttgcagcattaccacatcgcatcattttattaaattttgagagtaattattattatttatatcacgtgaagtacttattagtttgccatgaattatagtgctaataaaattagaccatttaaattatatatagataagttataattgcaatatatatttatgaaatgagtgtaataagagaaatttagtccttcagtaggaagcatgtccattttattacttgtaaattgtttagttaacttgccttcatcataaatctttcatatatatagtcaacctcacaataataataataacaacaattgccaagttgaacccaaacatacttattaggcagcaagtcacatatttacaagttacaactactcagataagtttcaccacaacaaacaaatccccttcatcatacgccaaaaaaaataaaaatcaataaattttttacaaagaaaaaaattataaataaagcaaataaaagatagatataaaagagaaataatgtaatattgttattacaaacaaaggcagttgatgtccccatggggtatggcagtttttgctgccttagacagcagctttcatacatattacatacatgtatatgtatatgtatttgtatatccaatggccaaatacatttcacattgtattagcgaatccaacgaataaggaacaaagatgataatcgccgcctttgattatgatacaaaatgtcggcgatacgatgtcggatgccggagcatgcggccgacatttttaattgtgatttcaattaataataatggtagttaggaaactagtcacacactcaatctaattttgttctacttattattatttttattcccaggacaaggcccaatacaaattaggagataggataccttaactacatacctgtatttgtttttattcaattaatttttctaattttgttaaggggagaataatcgaatataatcaggagtattttttattattaattatcattttttgtttaaaatactaaacatataaataagaaaaaaaaatcttaatttttttttttgtaagatgtacatattatatttatatttatgacaatagattaatgtttgatttctctattaagttaatgtaagagtttatgcaatcgtgacacgtaaggccaaagaaaggaaagtcaggagccttagagacgatcgtgatttgcacgttctcatgatattaaaacaaataaaattgcatgtttatttatttgttattttttttttcttaacgaaaattgcatgttttaggttaaattttcggatccaaagcaattggcaaggtaaatatggtatttttttt

SEQ ID NO: 1944 - DNA, 5469 bp, Cannabis sativa
tttttttttttttttttatattacaagaaaaccttgtatcttatctttagtggtctggttcttgatagtttatggtgttgtaatgtgtaaataacttgtattgagaaaatttgcttcatgcatgttttagttcttggctatgttagttgtgtagtgacaaatctatttggtagcaaggtttacaaaaatatattgggattacagttgatttcctcagttaagtcgaatgtatgttttgaattggatgggggtgaaagtggtgcaatattcaaatgggattaaaataaatcattaaattaatgtatatgtgtaattacaagttaaaacataatatttatttaggtgacggttggtaacacttttattttttaattttttaatcacaaaaatgaaattaaaatttttgtttttaaattttgtttttgaaaaacaaaaatgtgttctgtaaatttgaaacaaaaattactagaaacaaaaatgcgttcattaaaagtagaattctatgcgttcataaaaagtcacatgagaaggatgaccaagttcaaaaaactgcatagaaatttgaaaaacataaaaatttaggggctgattggttggtgattgagaagttgtgttttccaaaggagtaaatttgaaacaaaaatttgaattttgtatgtgaaaaattagttttaaaagcctgattggcagtaatgatgccatgagtttttaaaaaaaatgaattggtgattggttggtaatctcaaaacagaaaagtaaaggaatttttgaagggtttttggaatcaatgatttgaaaactcaaaaatcataaaaattatgttttcatttttaagcctaaaacttaaaaacttatttggatttgcttttaaaaaaccctagactcccacatttaaatttacaaaatgataatttttttttttcaaattctatttcaaaatgacagaaatagtgcagaatagaagttacattttatttctgtgttttttattttattttgttatattgttatttgcttttcgttttccaagatctaattgtaataaaaacgtaagcatttaaagaaagaaacaaaataattctcaaggtaaatgttaaacaactaaagcaaagttccccaattcaaacccatgtcaagtatgtttcaaaatctaacaaatcgaatgcttcaataattcgatcaatcaaggtgtagatgttgaacaattctgcaattttgattttagttttttcctgcaccgcagctcaactaaatgggtttgaaaatgcaagtgtgaaatcgtttttttttttaatcggcagttatttttgttgcttcattcttcccttcctcacagtattctattacaattagaattttcctgggatctatgtgtgaggagtaacatcttaaatttgcaggcaaaagaaaagcaaatacagcgtgttcgaagtatattccatcgtcaattgtctgtccctcatttagatatgaggtcaacacttcttgcttacaagacctgggaggtggagcagggaagtatggctgatgtccaatctggtgacttggatggggtgccttctcatgttgcctcagcataccagaaggcattggatatgtataatgctcgtgttaatcttgaagaaaagatttctacgctggataaagctgacacagaaagattccaagagtacatggtacattgatttagaattattatatataaaaattcagattttgcttttacttttctttaaggttgataattatggttattatgttatttttatagaaaagatatgtttgatactcttgcatggaaaataaaataaaataaagcaactactttgactatatcgctcatggatgtataaatgattggatttaacatttatgattttacctacattttttaggttactaaattgcatttgtgttcattagaaatggtagtcttgctaccacttggtgctcatgtggtttggtgtgagtgtgtggggaaggggggaaggggttcttgtataaataaacaaataaataaaaaaggaaatggcagtcttgttttggaagaagtttttctctcctcctgcaaggaaaaaataaagccactagtttgcttatttctttggtttcattatttattttttattttttatctgattctttgttttaaggaatattcattcatcctgcagaattacttgaaatttgagcaatctcttggagatccagcacgtgttcaagttctttacgaacgtgctattacagactttcctgtatcgagtgatctatggcttgactatactcgctatttggataagaccttcaaggtttttctcttgtacacataccatattatttgtttatttaatcatttttttatggctgtaatgcgattgtagttgcaaacttttatatctcttttgtttaggttggcaatgccataagcaaagtttattcaagggccgtaagaaattgtccctgggttggacaactttgggttcgatatttgctctacatggaacgcagccgtgcctctgaaaaggaaattgctgctgtatgtgttggatcttgtactagtacacctttacttgatgatatttctctttgaaatgaagtaaactgttcaaattttcattttcctgtttgatgtctttatcaatgaaataaattactagctggtctgtgcttatttatttaatattgattatttttgggtggggggtggggagagaagggagggattgtaaagccagcttttagttttccatacatttgcttgctagaaaatctgctctaagaattgtagtgtacaaatttcattgcactctctacgaaaaattcctgtgtttcaccttttatcttcttaagtgggtggtttttcttattcaattttaggtatttgagaaggccttgcaatgcactttttccactcttgacgaggtacaaatttaccatgctttgtaatttaccgttggctgttccttattcttaaatgcttctggatgtgagtgcttcatttttggtacctgttattgtcagtacctggatttattcctcactcgagtagatggcttgcggcgaagaatcttgctcagtagtgaagttgaggatgttttggattattctttagtaagggaaacatttcaggtttgttttatatcttatttgtgcatcgcttctatttgtttagacttagtggagttaaggataaagcttttgttgttagcttgttgtattccgagttagttattcatgtttttttaatttagtcaatgttatcttcttatttcatggttttgagtaccattattcccttgattgtctaaatcataattctataatattttaaagtgggggcatacttgatttcttgaagagtttatctatagacttagatcaacatgtggaaacttccaatcttgaagttaccatttgatatacctaagagtatctccaataagtgatagaaagctaaattatagctcacttagcaaaaaatgtgctctaatggtgtgccaaaatgtgatgcaaatttggcacatagcaaatcttgtgccgaatttggcataacatttgctgtgatggaaaatttgtttcacaataaatgcactattttatttacatttatgccagttgtattattttattagtttattttactatattattaaatttagtattcatatttttttttattgttctacacaataaaataattataaaattaatggtaaaattattattagaagttgctacatatttctacaatagtaattactctagaatgttctaggcatttgtagaaaaaattctctaagaactttagtgatttctagatgatagtctttactcttaccggtactactttaattaatgatgcatcacttgatcaatttaaagaacctgtgaattcttggcaatgtatattgatccataatggtttcaaaatatgcaactttagaaatcatgaggatattctagccctatataaccaagcttaaatcccctaaatcgtacttggttagacaaaccaaaaaaatggaagtgatcctctcaaattatcaacctactgaaaatttgaagggggaaaaagaccacttacttaaggcctttgagcaaggtggaaaaccctattaattaggatggataatgtgactgttgagatgccataggaaagctgaaatgggaggttgcaattgtgcattttcattggccttcacaatatgcaattgaaatactacaaggaacccttctggaatgtagatactcattggccataatagaattaacaaagcccaggaacagatatggcctttctgggagtgcagtgaatgctataatgggctatggttattgtaaatagtattgtatttctatggttctgctgaagtaattatactgagtttgttgtaattcagaacaattcatgactttcagcttgcatcagattacctctctccacacctgaagaacacagacgcttttcttcgactacatacttattgggcacgattagagctaaccctaggaaaagatttggttgcagctcgtggagtatgggagacttttcttaagatctggtttgatcaattaattctcatttacacaattttgtttgctcgctaaataaaccttgttcctattttttaaaatccggtacaatactttccatttactttcagtggttcaatgctggaagcctggggaggttacatagcaatggaaatagagtcgggtcatatcaaggaagctcggtccatatataagagatgctacagtaaaagatttcctgggaccggttcagaggtagtgctttttatttttatttgttatttatttcattttgaaatttgatagctagttactatttaagaaaagaaatatacacctattagataggttaggcataaagctggggaatgctacctttttgctttggttgttgtgggttgggatttaaatcggggttggtttctagctggggagtaggccgtggttgtctaatagaaatttaaaggctttataattaatgtccaatacggctttaaaaagtgttgatatttgcttaatcatatagaagggttgcttaatcatatagaaagggagtaggccgtggttgatctttgcttaatcatatagaaagggttggtttaagttctggcgatgattgttgaacccaaaatattgacaaggaataagcctttcatttgaatattaagtattttaaattagatgataccttcccttcctaaaaacagaatcattcaggacatctgccatgcttggttacgctttgaaagggagtttggcacactggaggatttggatcacgcaacacaaaaggtatgtgaagtctttctatttaaggttatgctttggaactctttctattaaaggcaaatgaatctttcagatgactatttagaataaaaagtgtggagaaatgggatacaatttccattcggacatgatttttttttttttttt

SEQ ID NO: 1945 - DNA, 2642 bp, Cannabis sativa
ataatcattctatgagccagctaatttttgcctaaatgagacttacaacaaataaatttctaaatccattacttgattcattctaatctaaaaatccctgtactcattgacccaaatctacttcatcctcctacaaaaacccttttagttccctcatagagcaacatgcacaaagcaacaaaacaaacaactcttaatctatataccccaaagaataatgccaagagttacaagattgaaaactctggttagaggtcaaaagttcgtatacaacaaaatcaagcattttgagtaattcacattgttaaacacttcaccaccatcattcatcaaccaaacttgcgagaacattagcatacataaaagctgcagaaacatgagtaccaatcgaatccaacttttggaacttaggttatatatattatatataaatccaatctcattacaatttatggtatgcaatactgcaaatctttgcaataattacaacactaaaatatttacacactatcatagaaaagacactctggtcagtgttcaacacaaccaacaaacccaaagtaagcatttttttataacataaattgttattcaaatgctgttcaacaagtgaatgaacatcaatcccaataaccaatgaacattcaagaaaagaagaccaacaaatcctccaaagagatatttggatcccaaattcaagccataacatactgtaatcttatttattacttcacatcaaattaatgtaattcttctatcaacaaaggagcatttaaaagacgcaccagagtagaatttcaacgcccaagtttgctcaagaacagcaatcaggacatcgaattagtccattctcattgcactccaaacatcttttaagcatttcttcatcttcatcaaacaccttcctactcccactgcaattcaggcacggtacaaaccttacatctccacagctatcacacctaaatcccggtgcccgaagcggaaaacctttgagaattttcgccaattcccctgtttcgaaaagctgcttgatcacctctgcacctcccacatagcttccccttatgaacacctgaggcaagcccacgttcttatcccccagaacactctgtaattcttttctgtacgccgaatccatcgatatatcacgctcatccacccaaaccctaaatcccctgaatatcatccgaaccgcgtaacagtcctcatacgttctccgaatccctcgcaagctagttagatagacgacaattcggtcctcggttccaggcaatcgaattgtggagctgttcaagggggagagtcggtgatcggaacacatcgatttcgaggatttaagcttggattgaaattgcaaattcgttggttcgtccgatgggctcggaggtgccgtcaaagcgggcttcgacgtcgtctcgaagatactgcatagcttctttaccttccctttgattgaattactcgtggaccgtacggactccatcgaattgtagaatttagagaacgagctggttcgttcgagagatgaggttttggtgtgagtaggcttcaggggagaatcaacagggtcggccatcaccgccgccgccgccggagggtacatggaaagcgaacgattgaagaaagagaacctgggtttctccgaggacacgggcttcttcccgtaatccgccattgaaccagaatcaagcttcgaaaacccacctccaaaactcaatttcttattataagctatctctttcctcctgcaaacttttctgaaggattagggttcaattctagacaatcaagaagagtaaattaatctcaaccgttgatcaattggagaaacaaactgaagagataattgatcatcagaagaaaattgtggttttagaatttgggtcggttatagggggcggtggaattggtaaaatgacaaagtaggcaggtgaggtaatgagaaaaaaaacaaacgaatatgaaaaaaaattgggattattttcaatttttgtttttagtttttcttgttttgttttttttagataaggtaatatttcgttgtatttggttttgtttctgaaaggactgagttgttttccgtttgggtttgttatgacaaaactaccaacatagctaaaactaaagacgtagacagaaagcaaagaattttcggttgtcagaagaactcacttttttaataaaatatataaaataatttaagaatagattgatcgagtgatgaagaagagtaaatagaaattagaaaaaggaaagaagcgcgttttcttcaattattatttaataatttgaaaaaagaaaaacgttttttaatttggctgtgtagagtcacatactgaaagaatttctttttaaataataataataataatttaaaaggtgggataatttatttaatataataatatatgatcttccactcataaaagacagaaggggattttggattgacaaatatatttggtaatttaaaaattaatcagtgggacattcgttttatgtttttttttttttgaggggtatcttcttaattttcaggttgagttttctattttcaaactttcctaattaatttttaaactgttaaactaaactcatttgattttgtcaaataaagtaactcaatacatatctatttt

SEQ ID NO: 1946 - DNA, 557 bp, Cannabis sativa
ttatctatttctctaactttaaagttttcatttttcattttcccttctaaattgcataggaacttattcttctacaaaatctttacaccaggtacgatttatcaatatataatttcaatccaaaaatgatgatgggcataaattttattatctaatcagcctatcctttaagttatttttatttggcctgttatgtgtttcgtttcatcttaaataaaataaatgttttgatttcattaattatttctataaaatagataggacaaaacaacacctaattagaatttttcttaattttaatagcaaatattttcataattgatttttttttttatgtaatagccatggatgctttaagatcaggacaaggaggcattcaaatgctactaacagcagagcaagaggctcaacatattatttctagcgccagaaattgtaaatacaaactttctcactctaattgtaaatatatttctatacaaataatatttgaatttttaaattgatgatagttttaaagattgttataagccatgacatatctagaaatagatctc

SEQ ID NO: 1947 - DNA, 811 bp, Cannabis sativa
atatatatattaatataaatattttcttttgtttaagattggctatcccagaccaagagaaaaaggggttaggatcccaccagctagctctaaatagaaaaccttaaaactttttagactcttttgttaaagttatgttattctttattgtgcttgtgtacaaaaaaattactaataatttaaaatcgttgctcttatgcttttgctttttgaaatttagtttatgttcttcacaatgaaagttgagagaaggtatcaaattcataacttttgcagcaaaacatgtcaacgggacgcactctgtttattatacccttttttgaccaatacttgttagtgccatgccctttactcacgtactcaacctccttttacttttctggcaactataacaaaatttaaaatattaaatatttaggacacttgtcgagtattaaatggtgtgtcttattatataaaaatactatctttttggacggttcccaatcccattaattaattaataatatttttataagttactatactttacgattgtatttgtcgagtcgaccaattaagccaattctttggaatatgacctctctttctctctcccactactcacttaattatgcaaagagaacaataataattaatcttaaaagggtcaatggaattgatgtttaagaggctatatatataatgataatggtgtttttaaagcggaaacgtcatgttaatatatacaactcttttgacttgaactaaaaacagtagttcttcatagtcatcacaacatagcttaaaacagaatgagaatcatatatgc

SEQ ID NO: 1948 - DNA, 1197 bp, Cannabis sativa
agcttgttttccttttccaggtaaatttttgagttctccattcagagtagagttggggttttcggtcctcctattagcaattctttgattggtcattgtagtcgtaccagctgtaggctctgttgactgtgtaccattctctgcagaaggtgatgagggtggcacgcctagggatgtcactatcgtcggatttgggcgtattgggatatccttttccactaccagatcagtcgtattctcaaaaggggtaatctccccgatttccagtaagttgaccgccgggaaacggttcaacaccagctcttaagttgccggtctcttctccaccagaacctccacttgtcttcttttcccaggtagttgccttttcaactctttgcattccaaggattctgcctctttccatcgtcgatctattctcagtctgtttcgagtctcagggtctttcagcgcttgttggtggaggatccactcgctaaaccatctagggagaggtaggtgaaaaggtgatctttcaatagcatcttcactcatccaggtgccatacatggggaagaaagaacccttctcatctttaatgacagtgggtgttttaaaacaaaatttcatgtcgtgagataaggcaccgcacttaaaacacatcttaggtagtttttcgtattggtactggatccaaaaatccttgattcccttccttcttaagtagaatccggagaagagaggtttgtcaatatccacagttactctgaatctcagagtacccataccaaatgatcctcgttcaaaattcttttcaatttgccgtggtagttcataaacaacagagactttaccggctagttcttgtaagtttgttttgttccaataaaaaggaggtatgctttttagacgaacccagagaggcgtttggtcgaagacaatttccacaggggtttgccacgatggccagggcacaagcaccagcaaatatccacaaaccaaccaggggcgccgaagtagcacattatcagcatcaaaactagattgaaacgtgaactgcaatagtccatcttccctttccttccaactccatccctccaacgaactccaggcattattcaaagacccttgaattgctttccgtcccagcttggaaaagcagtaaagtttcccaagcagtactctatttggggcctcactatgatcaacttcccccgg

SEQ ID NO: 1949 - DNA, 2978 bp, Cannabis sativa
aaactattattataaaggtattttagtgcctctcttattactgttcttgaatatttatcaacgacatggatcctgctacgaattcaatagtgataacaagtatttttcatattcaaatgttcacatctaagtctaacctatattatggtcatggttggttcctagaatgtattataactttaagtggctggattataacatctctctatttcgaagactagctaaagatcatatatttctctacaagcatgaaacttgctaaaattatattttagataaaacaatgcaccaaaagtagaacacaacagagttcaaaaataagaagagacatactcttgttcagttatatacactgttctttagattgacaatgaaatctaaactaaaagtaataggagtctgtatagtaataacctatacagtttccgttatacattcttagaccacaaccaaacaatggcaccaaattttgagtacttgtgctatgaatcttaacttgtattatcaggttagaaacgttactaacatgtttggaaatgccatgtaatgtagtaacgttgttaacctgttcacaagtttgaagtgtcctgagataacagagaaatttcagatggtatttcatacaaagtccttttcagattgcatatctttcatatcaacttcaagggcagtggtggagttttctttgtacttataccagtttgcacacaccaagaaacaaccaaaatttatgactcccattgcagcaaccaagtagtaaaaataatccaatcttcccttgttaaggtcttcaggtaaccaatttcccattttagaaccagaagtcaaatggtgaacaagtgacagcaaaaaaccactcaagtaactagacgctgcaaatccaataaacaagaaagaaccaccaatgcttctcatgttctctgggaactgcttgtagtagaattcaacttgaccgatgatagtaaaggcttcggagaatcctattaaagtcaactgagggaccaaccaaaaggcagaaagggaagaaattgcccctcttcttggttctatttgtattgggttagtgagagctaaagttcttctcttttcttcaactatggctgatataatcatggttattatagcaagaaccaagccaaagccaattctttggagcattgttatgccaccttcttttccagtgattcgccttaaagtagggactatgagccgatcatagatgggtatcaaggttgcaagggcaatcatggtgaaaactgagtaagaggcagctgggattttgaagttagtgttgccaagacgtctattggattgaagggcttgaaagacaacataagtttgttgttgattggtagcaatatagtaaataatgcatgaggcccatatgggaataactctcaataaacatttgacctcctcaatttgttgcatactgcataatctccaaggattagcagctgatccatctgaattgattgtatcttctggctccattattgcagctttgtctaagcatctggaaaacaacatgttgcattttggttaacacatcaagcatttaccatctcacagtacaaaagatcattattggctttatgctaagtacttaagtacgttgacttttctaagtttggcatgtttagatctttttactttcatcaaattcctcccaaaggaaattgtattaattatttaagtttctctaacctgaactgatcagtatgatgaagtttagagttgacagaagatttaggaacatgattgaaaagggacatccatggctgctcagtcaagttcaagtgcctctttcttactgcagctacaatgactctcacagcattcgtcaatggactaccatcaggcttcactttgacataaattttagaaccagcgaagaagaatacgcaagataatagcatgaggaaacaaggaatggccagaccccaaccccagctcacatcagattggacatacacaatgaatgtcaaggaaaccatcatggcaaaggtgaaagtgaagtagtaccaattgaagaaactgttagctcctctcttcccagattctgtattgggattgaattggtcagctccaaaggccaagttacatggtctaataccaccagctcctacaaccattaatccaagcccacttagtaaaaacaaaaattgccatgttgttggaccagaacatgtttcactgtcctctgagtgacattgtggaggatgaagattagttactgctgctgttagtgtgagaaccaacattccctgccattataaaagtttatgttgactgaatttgtaaaacttgtgtaataaggaatagtagtattaatattattagttagtaccagaaaggaagagactgaagcaaagcctatagtcttgtaacgaccaaagtaagtatcacataaaaaagctccgggtagagaagctaagttggttgtgccatggaaaacttggacaagagttgtagcagtgatacttttcatgttgaatacagttgtgagatacaccaagagattgtgtgaagtcccaattgtccctagcttctcaaaggcttcattccctgtgcataatatatggtttttaaattgatgtaataatattgtttcacactaattaaaaccagaagaagatgaagttaagaaaaagaaaaaggaacaaggaagaagaaggttctgtctttattacctatgattagtggcatggtttggagtcccttgtagttgtagtgaacctcagactcacctgttgtgtggatagctttctcattgttttccatggttcctttctttggttccattgagttgatcaaagaaacctatctcttctatttaaaattgcttatagtttgttatttacttatattagctcaaccccccatatgagtacaaaaaatgtgagctatctgtctctctttagctcacacgtattaacactcacatcacacattactcatctctctctctctctctc

SEQ ID NO: 1950 - DNA, 1591 bp, Cannabis sativa
ttacctttgtaatctagtttttgggaaatggaggaaccatcgttaatggcatagggtgaggtgccattgtccaagtaccaagcatgtcatgactgggtttgggagaggcaataatagcttgtttagtggagttggcgggagcttgaacactatcacgggacaagtggacatagatgatggtgtaggagcatagccttggaaggacaaattaaagtgatgatagcatttaaaatgctacatgtcctgggcgactacacaactgatattatggttgatgtgaggagtgacgacaaccgtgagatgaggtgttagaacacctagagtcagaagatccttgttgcggatacaaacgacaagcattgatagccatgtttgcaaggggttgctaagctcagaagtgggagcattaagctggtcaaggcaaagctcctggaagcattgatattcatgatcaaggtctgcatggttatacgacaataactcttcaccaaaatatactgaatgttgtgcttagccttgtttagaatgtggaagtgtggtggagaaagtagaataatgtaaggtgtatagtaaaatgtatagtgttttatcttaaaataaattggtaatgagtggagtttctaatgtgtgatattaattttttatacattatcagtgtgagattctctaatatttccttcaagatgttgacaatcaatcttgaatgactcgatcatcaatgattctttttgactcaagatccccgaatcacaagttgttcttttagctctactttttagatcggtttttggatttggatcagatactcattagatttattacgctataatacaatgttaagaacgtgaaattatggtggagaaagtagaataaggtgaggtgtatgataccatgttaagaacatgaaattttggtggagaaagtagaataaggtgaggtgtatgataagatgtatagagttctatcttaaaactaaagcccatacattttatgtatggtattaagttttcacatattatcaatgtgagactcgttaacagtgctattattttataattatgtcaagagattgaccctcaactaattttacattatatacacaatggctgaatattccaaacttatttgaatatgttattttgtcctaacaagggcattcaatgttgtacaaatcattaaacaattacaagaagacaaaacaatgtgacagtagaaacttctgacattgtgctcttgatattcaattctaactcctcataagtgagtcatattccaagtcagcctttccttcaacagtatgcaatgacaatgcttgacatggataagttatcttcattaaatattttatacaactattttataatctttacttcttccattccttgcccatttttacagtggatagattgtctagtcaagccaagtggctttttggtgttgtatccctttctatttttaattggtaatttaatcctgcattgttagtgaaaaggaccactcctcttcttatgttataggccaagacaagactggatgaaggtcaagaatcgaagatggagtggcatgttttcttaacattctcaagctttta

SEQ ID NO: 1951 - DNA, 2938 bp, Cannabis sativa
tgtattagtatggtattatgcatcatataatgcttaataagaacactttttcccaaaaactttacaaaattaccagtatataaatcatttgggcctgggtttgggcctagactcaggcctagcctaattctcagtatgtccttattctaacttcttaccaaacacgcccttagtttgaagttttaaatctcatgaccgttaactcatttgagcggaaactatgcactcaactcactcactttctctctcttcactctctctctagatttctcgagctgcaatgggaagattcagtgccaaaactgactacgaagatctcagaaacgctcgaatcttggaaaatcaggtctcttttctctttgaatcttttcttaatttctcggatcaaaacaatgaataacaatagtcttacttgatgatcggatattttaaaggctcgtttgaaaacgatcggattgcaaaaaactatatcggaacttcgatctatagtttcatcttcaaaaccagccaagagaccatggacgaagaaggtttacgacttgtcgtctttgaggcgttctcgtcgtttaaagcggtcgtcttcttctgatctaactccgattcagattcagtcctctttacgaagacgatcttctcggttgagtagcgatattatacaactcgattcaggtttcttgttttcattttgattttaactgtgttttttttttctttttagctcaaaattttatgcattagcgattctgactctgagatctgttttcattacactgtgatctttagatgagaaagtaatgaaaataatgtatgaaaataaagtataatcgtttttactgtgttcttttcagctcaggtagtaatggaaattgttaagagaaaattttacatgttagctcagatctgtttttctttatactgtgatctttagatgagaaagtcatcaatatcaatatcaaaagaacactgatttagtttaagatctgataacaacagtatgctaacaattcccatcttttcatatttggcgaagaaaataatggaaatggttatatgtaactcacatattcaccatttttgtttcagcaggagagctttttgatgatgaaagcgaggatgaaagaactgtgggaggaaagattaggcctgcaaatatgccttgggtgaaaattaaaggctcaggggcagcgcttcaactttcacctgaagcttcagctttgagatgcagtagcaggggaaggggtggtgtctataactctgtcgtcggaatttgctgccatttttgcaggtttttgtgcttcctttttgcccttttttcaatttttgagttgataggtttgtttttagaatccatttgctaaagtgaataagtaactaaaactttgaaaacaaatggtgtttttcagctttttgtatagtttttttacttacccttttggtctcttctaaatttgatgctgataatgattacattcgctgtgttaagttcatgattttgacttgcattcaatttgttgtagtgaataagtaacagaaatttagaagatgcaatcatcttttctccttgtatagttaccaagtaggcaaaatttattaattctacagtagccttctcttgttttaatcaaattttttgttctcatcttattgtctttttgttggattttctatttgcataatctattaagttaatcataccaccatgacacattgacattgcatatccttaacttgttcaatgtattgaattgaaaactcttttacatacaagtggtgccacattcatattttatattgctatgaagactgagttaaacagtgatgatattgttagttctaatctctataaactcgcaggcagaaaaaattgtgtggcgaggaagattgtaagcggtgtggcaatcttgatgtcgatgaaccatgcattggttagtgtaattctcctctgatgcaagaatctcccaagcattgtgatcattaactaatagggactctgtgatgtttactcatttttttcttgagcaggaaaaactgattgttcggtttgtcattcgagcaatggtgttctttgtcgagcttgtctgaaggttcgatatggtgaaggtaaaaatccattactatttcttctcttctcttttcttgggaacaaagtaacaattgaaattctgattaccatatatttttttatagaaatggaagaagttagagagaacaaagaatggatgtgtcctcattgcatagaagaaaaaggaataaaccaatattggatatgcaacaggtaagagaatcaacaaacccattttctattgttatatatatttttttaatatttacacctctaatgatgatgatgtagttccatatgcctgaaaagacgaaagatggctccaactgggatagcaatatatacaggttagttacaatcatctttttcttcattgattgctatgttgcctacattaatagttatttctcgagtaatcttcaatgtaaatacttaaattttatttacctaagtctaatttttgactgaattgtaagtatatttccattaattattaaatttacatgttatttttttattggtataacttggattgatcaagaactgtcatgtgttattgacttgatactaaacggccaaataactacaaaagtaataaaaatataacttaattattattattacaggcaaaaattaaatataggtatttatctacaactgataattaaacttaagtatttatgttgtaaattacattatttcttttacatatacatattgtttctgaatgatctctacttttgatttttaaagctaaggagttgggatacaaatcagtggcacatcttgtaatggataagcttaaaggaacaatcaagggctaaggaggagaaggagttagtactctagttgatataggcatagaaagtagacaaa

SEQ ID NO: 1952 - DNA, 833 bp, Cannabis sativa
  modified_base (564)..(564): a, c, t, g, unknown or other
tttttaatagcatggttagacatgtagggtcatgtaaatagagagcggagtaggggtaaagattatttttatccctgaatgataaatggagcgggaacaaggatgacaccgccgcgatgaggcttgatggagactcggttaatatattagttatttttctattaatattttataatttataatgcgtatttgtattttttttgttatattagtgaatttataatgctttaaataaataaatatctgtgaatttcgccacctgtttagttaatcgaagaaaaaaaatataatctcgttttgtatatattttatatccattaattttccttttacaaagttatcaaaaatatacttaagtggtttatctagtgagtttaaaatactcttttagataaattaatcctaaaatgtatatatttagaaaaaatacaatggatctaattaacctatattcaatactcttttttccctacctattttttttttttttttgaaattttaatgttaaaaaaaatctaaagaacccaagtgcaaaagacaatacataataataataataataanaataataataattaatattattattattgtgtgtgtccataagagacactcacatgtgggagtgctatatatataaatctgagttgtgaaaatgacttaagagaaaagtttcatacacaaagttttgcatgaaaatccttaaattggtccatgtgtatatacaagccaatatatacatatttctttttatataatattttaatcaactgcatctttttctttccaaattcctaataatcagtattttgggtttacatgcttttcataaa

SEQ ID NO: 1953 - DNA, 1329 bp, Cannabis sativa
tggacaaaccatttttgttcatctttctcaacccaagcatcattccatgagtgagtgaagtctagcaggataaggacttgaacaagtaaaaacgcacctgctccaaatattgacaaagtccctacaagtatagaaagcacaaaaggcattaaatctaatgaacaaaaatacaatgaaaatattacagaccgataggaggaaaagataaaaagattgtcagccgttagactcaatagttactgatgaaatcaacaaagacccagctacgtactcattccatcaaaaaatgtaaccatactaaaatataagttgttcaatgtataaaaaccatgcaagtaaagattgaaaaagtaacctcacacaatcatttacataaattctcacagcagagtatgaacaggctattcttcacagatatttacactggtaataaagccatttaaaattctcaatgtgagatatttctaagaataaaacccaaatgtatgtaagaaatttccattagaccaggttaaagtatcacattacaaggcaaatattgtgttgaaactaaattagttctactatgtaataaattgactaaccgtaaaatgagataacggcatttggaatgaaaaatgcaagaacgacaagaagaagccatatcaccatctttgcaatccatccaccatgatgccatgaatcacgtctgtcattttggtccttcacaccaatcattataagagcaaatattccaaaaaacaagaaattccccaagctcaaacgaagaactgcctgtatctgataccattccttcgggtgagtctcggaatggcttatccctgtatacaaacaaaatgaagaggggaatgaattctccatattcagaatccaatatatatttaatttcaactgaatatccaacaaattaaaaaagtaaccacgcaggacatcagaaccaacagattcattttacccagagcagaaagtaactaagttataaccaaacagagcataacactgaagaagccaaaaaaacatcgctgaagatgaatatatcaaaactagctcagcttaatcaacatttaagatactaacaacaacaacaacaacaacaaacagtcgtgaattaatttgaaaaaaaaaaaaaaaagatttgttcacgagaggagcctatatatcaaaattagctacaagaaacaacatattctgatacccagatgaaaaaattagctgaaaaaataatgtggcaggtaggaatatgaatgaaagctaaaaaaagttacatccacaggcgaatttctccaagaaaacacatacataaaaattaagcgaaaataataaatagat

SEQ ID NO: 1954 - DNA, 1438 bp, Cannabis sativa
ttttgtatttttatggaattctacccagaaattcctatagcaattaaaatcgcagctaaaatccatatagcaatccacataaaaattattagaacaatccaaactgtaaatttgaaaaaaaaagggttaaaaaatagtatatgttaccttaattgtttaattgtttgtaataatatgtaaatttttaacaatggcacacagtattggaagccttgggaaatggccagctgacaagggctctactggaatcgttgtacaaaacagcattataaatggcgcaacaaatggagcaagaatcaagacatgggctggtccaacctcaggtgaagccagtaacattgtcttcgaaaatatccaaatgaccaatgtgaaaaaccccattatcattgaccaaaactatggaaaatacaaagacacggtacgcacgtatactacatttatatatataattattacaatgaaactatttaattgtttcaattataaccattaatatatattgttggagcagccatcgaagtggaagttgagtgacattcattttaggaagattaaagggacatcagcatcgaaggtggctgtgtctcttggttgcagctcagcaaatccatgcgatacagttgaaatggccgacattgatttgacctttaaaggtggtgaagctcagtctgtatgtgctaacgcaaaagttaagcaaggtggaaccgtcaaaccggtaccctgtagcactaccggtaaaccggaatctggcgaatagcacacgtacaataattattgttatttattggagagcaagagagatataaatcggcactaattcaaaatacatacatgatatatatatagagagctcatacatgtctttttcaaattatttattcattatatacatataaacatattatatagccggcgggtatgtattcgatctcatgaggaaaggctagctaaaaattataacatcaatctctgttgatgagatgttgtgttttggtgaaattcatatatatgcatgttttatgtatacccaatgtataacagtattgtaagaactagctattttgtgttactaatattgttgaatactatcaattcatcgatgaactctgttggtgcttatatatagtcgtacgtattggaaaagttgaattgcttcgcgtgttacctattttttttaattaattattgtgctaacctttattaaaaagaattttaacatataaaagtgtttaataaaattttcttaaaattaattaaaattttactaacataaaacactttagtaaaataattacaatctggatcccaaaatctacaaaacatacttaatatatacatacacaaaagtgtcgtctaatgacatagccaaaaataacgttagtagtatctcgaagatcgcaaccctctaggcctagatgaccaaatatgtacaatcttc

SEQ ID NO: 1955 - DNA, 4142 bp, Cannabis sativa
gaaccacacctagtttgtccactagaaaattgaaccttgaaccagttaaactctttgtgagacaatcggctgtttgatcatgagatggaacatatcgaacttctaattgtttgttcagaaccttgtcacggacaaagtgtatgtccaactcgatatgcttggtacgagcatggtaaactggattagaagctaacgcactagctcccatgttatcacaccaagtaataggagtgcttgacagaggaaatttcagttcatgaagaagggattgaatccatgctatttctgctgaaacttgagctaaagcccggtattccgactctgtactcgatcttgatatcactgcttgcttctttgatgaccatgacacaagagtatctccgaaatagacacaatatcctgctgtggatcttcgatcatcggggcagctcgcccaatccgcatcagaaaatcctattagattcagtctatcgcagaccttgatgtgcaagccgtggaacattgttcccttcaagtatcttaagattctttttgcagcacaccaatgtgtagtagtaggtgccttaagaaactgactaagtttattaacagagaaacttagatcaggtcttgtgtttgttaagtattgcaaagctccaataaggctcctatattcagttggattcttgagcagttcaccatctgtgatggacagagtttttcccatagtcatgggagtttggcaaggctttagatgcagcatgttattcttcatcaacagatcatggatgtatttcgattggctgaggtaaataccagtgtcatcacggtatacttcgactcctagaaagtagttcaattctcccagatctttcaaggcaaaacattgattaagtcgaatggcaaactgcttgagtttcattgaattgttccctgtaattataatatcgtctacatatattagcacaaacattatgtctgtagcagtagcataccagaataatgaagaatcagcccgagagttcatgaatttccagttaatgagagtcgatttcaacttgtcaaaccaagcacgaggtgcttgcttcaatccataaagagatttggtcaaaagacacacatgatttggctttgtttgatcaacaaaaccttctggctgcctcatgaaaacttgttcttctagctgtccattcaagaaggcattgtttatgtcgagttgccgaatgtcccaacctttggatacagctatggtaaggacaattcgtatcgttgatgtcttaacaacagggctgaaggtttcaacaaagtcaatgccgggtctttggttgaaacctttagccacaagccgtgccttgagtctctgaaaacttccatcagcatttcttttctctttatacacccatttgttgtcgattacattcattccagcaagatagggaacaagtttccatgttttgtttttgatcaaggctatgatttcgtcatccatagcattcttccatttcgggtgagccaaagcttcagcaacactagttggttcaggaaaatagtgcacttgtttagcagatcccaagtacacctttggcttgaatattcctgcctttcctctagtgatcataggatgtgtaggaatagtaggattggtggtagtgtcagctgctgcttcgggtatagcaggtgcagtaggttctgcaacaacacaatctgcaacatctgtttcaagtacattttcatactgctgttcattatcaccataaaccagagagttagaggaactttcaccatgattattgctggacagaggagactgaggtgatgatggtccttccgaggttgcttcaagatggtctcgagtattgaaaagtttttcttgagaagtaggtgagaaagggagaatggtattccagctgggaatggaaacctgaactgtttgttcagattgatgagtatttagaaaaccatttttgaaaggaaattcatcttcattgaagatgacatttcttgagatatagagtctcccggtgctactcaaacacttgtatcctttgtaactctcactatatcctagattgacacattttgttgaatggtattggaacttgtggttctgatatggtctcaagcaagggtagcaactacagccgaaagctttaagaaacttatagtctggccttttatgaaacaatacttctatgggagacttatttttaagtacaggtgtaggtagtcgatttatgagataaaccgaagtttggaaggcatcccaccaatatttttgaggtatgccagcctgagcaagaagagttagacccatttccacaatgtgtctatgttttctttcagctcttccattttgagccgaagtatggggacaagagtgatggaagctaattccattttgtaaaacatggtcattaaaagcttgatactcacccccaccatctgtttgtaggtattttatttttctttccagtaggttttcagccaaggttttaaagtgagtaaaagcttggagagcatcggccttagcttttaaagggtatatccatgtatgcctactaaagtcatctatgaaatgtatgtaaaacctataattagtgttggacattactggtgcaggaccccaaatgtccgtgtgcacaagttcaagaggaaatttagcatgatagttgtttgatttaaaaggcagagaatgtgatttccctaactgacatgcttcacagaagtgttcaacatcactaattaaaggtttttcattaatttcagtaagcacaagatttaacactctattggacggatggcctaatctcctatgccatttgtccttgattgaatttaaaggggcagcagtagactgctgagttacattcggttgagacaaagttgagacaccagtaaaagggagagagtgagagttgctgtagttggattgttgagaaggaacaatgtttggagtgtggaaatgataaagaccatctctaagcttcccccgaagaaccaccttcttggtttccttgtccttcacaaaacaaaaatcaggagtaaattcaacactaacattgttatctctagttaattttgaaatgctaatcaagtttttggttataagaggaacatgaagaatttctcttaaaaccagtaaagagtcatcaaatgtgcgaatagaaatggttccaacatgagcaatttttagttttgtaccatcaccaacagtcaaagactccttacccatgtacttcattttctggttcagattgttgatgtcagccgtggtgtggttgcttgctcctgtgtcagcataccaggagtcattttccaccatttctggtgttgcaacaaaggctgtggcaggttgttggctgtttttgttggagtttgatgcaccagcaggtgctgtacccatgtatgtctcatcgtaacgattgtagcaatgagctgcagagtgaccatacttgccacaaacttggcaagtaggtttcgaattcccagatctacctcctctgcctctgctactatgtctgccacgattgttgctttgatggcctcctctgcctcgatttccaccattatatccagattcattgttgcctccagagtatccgtgatgaccaccattgtgaggtgttttgttggcatagtttgcatttggagtagtagaggtgttggtatgtttattgatacccgaaatagcacttagcctctctattttactgtcaaaactcagtaaaatatcctgcaaaatgggccatgtagtagaggttctagcctctatctgaagcacaatgggaagatagtctaggtctaaaccagataacacattagagataagtaaagactcaggatagggatcacctgcaagggctaagacatcagcccactgtcttttctgtttgaggtaatcgaccatactcaaagagccttttcgagcagtttgtattttagttctatattcatccatcttagccttggaatgagctccatatagagcttcaagggcctgccataatgctgctgaagagtcacaccccatgacctcagtagctattccttctgtcattgagccatacagccatcccattagaagttgatcgtgcacaatccactgctcgaaatctgggttcacttcaagtccgaaacccggttgtccatctacaccagtaggg

SEQ ID NO: 1956 - DNA, 1787 bp, Cannabis sativa
ttctcaattcatataatgtgttagctagtttcagtttttctttttgtataattatccatcaatatttgaaaacaactttgttatgcaatcagtctagtattgacttgatggtataagaaaatgttgagaaaatataagaaaatgtatttatcaaacactggatgtgcaatgcaaagagagttaataaattcatcatcacaaaggaagtgaaattcataccttaatgtggtcctttttcaagatgtgaactccatggaattagatgatcattctgaagccatggaaacttgtgttactatcaaaaaaagacaatttctatgtgaacacttttgcatgtctacatttacaactttttgtatttaattgatttgaggaatataaacgaaaagatccaataaagagttgacatctttcatgataatgattatgaagtaactttgcataaaaatattcagtttttaataatataaccattgaaaaaacagcaaaagaaagaaagatgcatagtaactttgcgtaaaaatattcaaatttattacatgatcagatgcactagtaattttcaaattgaagaagatatctttgcatagatatattcaaatatttgctatgaatgaatacattgtgcagattgagagcaaatcacatcaacatttaggtggcgtttgcttagaggtaatgaaatggaatggaaaggaaaggaaacaatctctattccattcttttgtttggttgcatattaaaatgttggaatgtcattccaatggaatggcctttccaccattttggtagaatgataattccattttgaaatggatgaaaaaaccgttccaatgcatgatgagaaaaaatttaataatttttttatcattttttttttatatatattttaaattttattctattcctattcctatgttttcattcctcccaaccaaacgtatgtgttttcaactgtgagtgtttgttgaataattaatatttggtttgtgttgttgtgtttcttaaatcatcttccaaaccatctatggcctctaaacgagggttaagtcttgtcattatgacttttttcaatgcaattgtttgtgattatcaacttgcaaattagaagataaggaaacaaaaaaatatgagaatcattgactttctctatatagtttaatttagatttattattaaatgaaaagaaaaaatagatttataaatcattttctgtgttttgaactataaaaattatatacaaagcagctgaatatgcatgctgatctagctactactactccatcaaagaacaaccaccaatcaaattaaaattatgataataatttgttagaacttaccaaaaacaaatgaccacttgcttaaaattgattaaagtcaactagttttgatgtaatttacaatacaaccaattatccagtgggattgacattagaagaggaaatatataaacatatatatgtgtgtgtggttaaatgatccattttgttgttagatcatagaatccaaatttgctgagcaatattgaagaattaagaagatgggagatgctgttatttcatttgtgattagaaggattggagagttggtactttctgaaactaaattcttgtatggagttgaaggccaagtcggaaatgctcaaatcaagcttcaatgtatgagtgctttcttagaagatgcagatgcttatataagaaatagtgatgagaaaattcttatgcattggaagatgttattgaaacctacgtcttcaatgtggcttctaataatcatggaactatcag

SEQ ID NO: 1957 - DNA, 1813 bp, Cannabis sativa
tgaagcatgttcaaagaagtatccaaaatatcctatttctactaaataatcatatttcaatcacaggcctaagttctactcttcgaataactaataaagcagatgtagtcccaaaacaggatactaatttcaagtacttataaagattcaagaagttaaagaaaagaaattcacttggcgatgaattgattgacgattgtagagttgaaaaaaatacagccttggggaacaaacactaatgctgaatgacggcgttaagctaaactctgataaagatagacgctcaagaagatcagacctttcttaaagagcatagacatgatcaatcaaagaatcaatttttgagtttaaatccttcattaacaactgtctcggggatgcacaaatgatcaaagggggtgtagcgtctgggtactctcttgttctgatttggaaaaggattttgatggcttcctcaaagagtttgttcattcactgaagaaactttcactggttttcgctttctaaaacatcgatttattttggtatatttaaaaaattgagaaaaaatggtaaatggtggtgttactacgtatttatactttggagaagtgatccgcatgatacccaaatcaatggcttagatttattttcaagaaacaaaatacagatccaacagtctgaaatgccatcagtcaagcattaaatgttatatttgggatcgagggaaactgcatgatgatattcccctcaagaatcgcaataatcagctgccaatttaataactctattccacacacatcctcgataagcgttaatcccacaaactacttaagcaatgccacatatcgccttaattcaaaaaaaattagaagatatcaaccacctctaaagctaatatggaattcctaaagatttcacaccctccacatgtccatctgtgcagtttggaacaagcctccacaacccttagagttttagaagcttggggataaatgttatttgtgtttctggataaggacgcgtagaatttccatattaaatgcagctcaagtatataaggcataattgagataactgggttggatccataaatcaccagtccttctagatgaataaggaataactcgtccaagcaagatcccatccgacatggtcagtatctgaaagacataaaatcgtgttaccagacaaagctttcaacatgtatctagaagcccaatatagttgcccatttattaccagattgcacataattagggattgtcttccaataatctcaaagaaaagattatatctttctaaataagggaagatggtaattggcaatcaagtaatttatgtgtcattaatttccacaaagataggacacagttttgacaaccagcatcatgatgtgacattcacataaatatatacaaggaaccccatgggctggacttcaccaaataagctcaaagttaatattttatttgtaaactccccattaaagggaaaagggtaactagtatggtctctatactctataagtattacacaaactctacatgtacaggattggaatttcttggctcatttgttttggaaaaaaatatagtgttcataccttttgtaatcccgaaggcttttttagtctctcttattaatattgacttgtggactaaggctagttaacgctccaatcacgtaaaaatcttgagtgtttttatttcttttaattctaaatttttattctttggctcttacatttaaattatttgaaacgccctcaatatttaggcacgctacccaaaatatttatgcaaacccaaatcccctaagcgggattactaat

SEQ ID NO: 1958 - DNA, 1034 bp, Cannabis sativa
aatacttataattattatttgtgcactcaaaaatcaactaaacaaaacaccattaaaaagagttacagacatctagctaagcacttaaatttttttaagttataataagataatctatcatatgtgttttttgacatatttttaacttttagctattatgtatttagctaattctttagttactgcaagtactatataattacatgtttgattgaaggattcgtaaaagattcaagcgtagacatgcattgcagagaattgaagacagtgcttaatttacactacatcacacaccctattataagttaaagtacattaatcttcattcttttgttcgaattgtaaatgattttgactcaaattaagataaagacgcagacaattgataataatatatctaatctttctttctttcactataatgacagcctcacaagcgttagtaaaagcttctccaaccaaccaccaacatgctgctgaaatctccttcaatgtcacggaaaattaggcagcatgtgtttataagtttagtaattattatcgtattatatattcttgggtataatacaataataaacaaaaaatagattgttctattgttgttggaatgaaaaaaaaaaaaaaagattatgatagtatatggttggagatgatgaggatgctaataaagagcatggaaattaatcacattaaaccagtaaaacaataataaagtgcattttcatgcactggtgtccgtgatgaccaaagtcacaatcgtatatcttaaatggattactgtagctaggtaaatgatcgagagtaacgataaaccaacaaaattaaggaaggacattaattaattagtaagttattagtgttacatacattttttttttccttgacgatgagaatagtcccggcctgggaatagagaagaagagttttggaagaaaagaggtccagcatgagagataagagcctgtcttggtagccaaggagactgcccgaataccacacaaggattcacttctctgttatatacatagtaatat

SEQ ID NO: 1959 - DNA, 1222 bp, Cannabis sativa
ctaccgtaagcactgtatgcaccgccatatgcagcagcctattacagaaagatttaaactataagcaccgccataagcactgtatgagagccagagtaaatagtgatcttacctgttgggtatagccggggttccattgctgtccctgagcttgtgaagctggtggccaagcttgaggctgggcagcataaccagcagcccattgattctgtgcattcggatatgctcccatcacggactgagctgatggtgaaggagcaccagagtaggctttcgctaattttattttatctgatgctagaaaatcctcagcgtgacgttttttcaactctgttgtgcttctatgaggtaagaagagcttcgcgtgatgatcctcggccttcttgatagattgagcatctccaaaaagattcaaaaactgcaaaatcattttgtggacttatcagacagaatatatcaatttttgagaaactaaacttccacaacagcagagagagtaagaacaagaatccccaaattacggtagagataccattaatagttctataagaagaagcatgcaacggtgtgtgctataacaggatcaagaatacaaagcaagcgccagactgatcctgaaattctttccacatttgagggaggtctagtgacccgaaatgagaatatcagatttcacaacccaagagaagatgaagattttttttaaaaaaaaaaccgatatatggaatcaaagataatgatgattacagtgaaaaagaaaatgactgaaatgtagtgtctcttctaatctaacagcacactaaatgcaaagggatgcaaggctgagccaactattaagccattcaagatacattcatcttacagtattttctagttttcaacacatacctccaaaaaaatgctagacagctcttctctttcggcaacacttgcaacgttggttgtctcagagttgggctctatgaacttcagaaccaatgattctaggtaatcaatttgctttggttgggactgtatcgactcaaaatgtattagggcctgcacaccacagaaggaaaatataacacattatagcacttctagtgtctgattattactaaaacataaaaagaagggggcagagagagcacctcgagaagaggttttgacaattggacatgttcaagtgcttcaacaagaatttccctagcttttacagcattcccagatacctagaacaaaa

SEQ ID NO: 1960 - DNA, 3155 bp, Cannabis sativa
aaataggggttaaactgatatgggctttacctccctccctgaattgatatattaatttgatgcagaaatcgattggccaaaggtttgcagttgacacacaatcatttggggaaccttcaacttgttgcacaatatttgacaattcttggaagtttggcactagccctgcacgataatgtacaggctagagagatcttgagatcatccctaacattggccaagaagctttatgacatacctactcaggtttgggtgctttctgttttgacaggtatatttttcccccatccattcagttctacttatagctattctagtttgactgtatttttgttatatatcatcttctgagttcagacatggtggaggtttggagtaagtactccaggcttctgtccagcaataatccactggactcaatttctacattgacataattttgttataattattacttattagtttaaattttctacaattgcagcattatatcaagaattgggtgagaagggaaatgaaatggacaatattgagtatcaaaagaaaaagatggatgaattgcagaagagacttgctgatgcgcattcttccattcatcatattgaacttgtaagagcactcattttggtcttctgagtagaaagtagcttgttgtttataacccatataagtaacttattttgttatatgcactgatgagcagattgacaaagaaaggtttcaagtccagcaatgtcacgagctcaacatcaagcgtgccattgcaggcactgccgcaggagtcaatcttgacatcccagagtccgttggtttgtccaccccattacccaacttttcttcaaggttagttgacttagacactggaagacgtggacgtgggaagaggaaactctagttctgacttgtacaggttctgttccgacgacctatcattattaagaaaaaatgaaacaaatagcttagagctctagtttaggaattttggacgtaacctttcgttatgtccagtaaacaatgtcttaagcatcaaactcttgggagatgctgtacagttcttactacttagttatgatgtttctttaacctattctagtagcccctccattatatttactgtgattatgtatcatctcagaacagttaagccaagttatctaaaactattgtatatgcaatttggtcattgcaaaaatgaatgaaattagttctaggactgatttcaattggttctaggaacaagggtatgcattttttttgtggaagttgacattttccaattaagcttcttgtttctcaattctcaattttgagatatggattgcatgcaaagcaggaacaacaaatttactttaaattgtcaaataattgatgaggtgtaaagcaatcacttgaaccttttacatcagaactattgtgtagtgtgcataaatatacaattgtggatacgaattcccagtatccttagatttgcttaaaccctcggtgatacatctcagaggctttcaggctagaagattcagctcagcagaggcattattatacatagtgatatgtatttgaaattcaggtatgccgtcttgcttattgttaatattccatctcagtcctcactttcagttagtcctgcgatttctttgagtggcttcatcttttggatcacaaacctgttcagaagcaatagagtagatgaataagaatcccaactgagatgataatattgttctattcgtagcaattttttgtccactgcttaattaaactcataggacaaagagggtgaatcttggtaagtgtggtctctggatgataacttgggccatgagctgagaggtcattgaagtcatagcctttcttaaatgggacaattaaggtatcgtctctcatagcctccttcacgaggagagtaaacagcttgggccttgttcttccacaagagccaacaccccaaatcaggtttcaccaaatctccagcaatgaagtcccctagtccaccaccctatattaacttctctgttacccttttgccatcttactcccgtggctatcttcaccgctgcccattcttgcattggcaaagcggtttttctggtttggggtcccagggagatgggcatagaggtgccccacacttgaagttggttgtcgatgccatgtttgagatttcgggtaaaagtttgtttttttataaaaaattacaaaacttgcaacattttgcggcttgtatatatgtgtggtgtctaaacaagatgagaaattgagctctatgaaaatgtgtactcgattacactccatcgaattcttttatatattagagtttttggcggttaaactcttctaattctcattaaattggcatttaattctctaaattaaaattttgacagtaaaatctttcaaactattgaattggtaacaaatttaagatgttattcggttaactgctattatagattgtttatatgtatatttttgtatatgtgacaagtttatattgatacaaataatactattattcaaaaattatattcaaaattcatttaaaattaaataaaattataaaaataaaaatataatgtttgaaaaataaaaggagaatttaccccatatactatttttttttttttttttaaatttacagtttgggatgctatgataatttctatgtgggttgctatgtggattttggttgttatttagattgttctgttagttgctataggagtttctatgtggaattacgtaaaaatatatataaaaaaaattgttttggctgaggaagattcttgaagagttacactttaagcaagagggagacaccataatttattgtgataatagcttagcaattaaattttttaaaaattttattctttatggtaaaagcaaacacattgatgtgaagtaccattatttaagagagcacaatatgaaatgcgttattgatcttatttattacagaagtgaagaaagagcaagttgctgatatattcacaaagcctctaaaattatctatatttcataaactaaaaaagatgcttaaagtatgtcttttagaacaaacttgagagaggataaactgagtgtatgcaaccacattagttttaaaaagaaaatgttgaataaaaaagtgagtttattagttattaattataggc

SEQ ID NO: 1961 - DNA, 1553 bp, Cannabis sativa
gacaagaaaaccaagttctaatctaatatttctgttttctccaccttgacattatcaggttcttgggacgatgttttcaatgtgtcagttggactctacctggctggaactgttgtatggaacgttttctcaactggtgaaaagatcatagattagagtaatcattgtttaatatgcggcttttcacactaatcaagctaagaatgctaggtaagattggagaaaaagaagggtttgaatatagcaaaatgcaaggaatataatataggtacattcatttaatttgctattcacaagcattgttaagctcattctaatcaaaccccaaagatcaattttttctccactttccaagtcatgaagttcgatggatttgttggactttctcaccttttcaaccaagggaagaatgaatgttacaagacatatttggtaaatagccccagcaacaactttgtaaatgtcatactccattactaacatatcaattttgtgattattatgttacaataacataaatatatatttataattttatgtatgtaatgtttatttcttaaccaaaatgtttttgtacttttattttgtgcctttattgtagcatttaatgaatgattagtaagtactcaaaagttgctgcctatgtagacgtgtacctagacataattgggagaaaatatggccgctgaacaactctgctgtttctcatcagcattggataaattaagataattttcttttgaaggttatgcttcagcaatcccgacatctccacctacatgattatcaaattaaataattcattattctaaatcaattatgataatatttgattctcaaggatataaattcttatataatcaataggatttacgaacagcatagcatttttagtggtgtgttttggtgaaataattatattaataatctaatatataaagaattggctatgagtaagtatgaaaatttttgttttaaaattaattggcgatgagtgaactagttcagtatatgttctcaaagaatttttggcagctaaactttttaactatcgttttacttacatttaatctttcaagttcaaattttgacactaaaattttctaaattactaaattagtagcaaatttaaagtaacaccatgttaactgcctgctattatgaactatttatgtgtacattcttgtgtacgtaacaagtttatattggtataccaaaattattatttaaaaattattttaaaatttattttaaaaataagtaaaattataaaaataaaaaataaaaatattataacatttgaataataatattaggtgtatcaatataaacgttttatctgtataagagtgtacataatcaatctaaattagtaattagttgtgaaaaatatattgtagcttaaatttgttaatagttagtttaatggattttattctcaaaatttgaactttaaaaagaaataataattgagtggatttagtggaaaaaactcaagtgattctcaaaatattctctaacaaagtgaattgaaaaggttttttttttttttt

SEQ ID NO: 1962 - DNA, 1504 bp, Cannabis sativa
tctgaattttatgcttagccctacgtgcaatacattcaaggagaggttgctttcaacttcgatcactgtgcaattattaatcaatgataattgcgattcttttggttgtaccacttcctttctcggatcgccgcccacagcagctgtcaccttgactacgaacgtctcaactgcagccacagacccgttagtgaactcgtctccttctcctatgatacaactattcgactcctctgtcttgttaatcaccttcttctcgatcatcatcactaccttgttgccattgttcaactatgttttttcttttttttttttttgtaaaatttagaatcttgatgccaaatagtgtttaaaaaaaccaatgaaactatatccccaattgttcagtttgaataattttaatgaaatttccattcttcataatgaaaagagagaattgcatgtacaaaaccatgcttgtccctttccaacttgagtctgagatgatgcaaaaaagtcttttctacagtatccttttcaacatctagcaagccaccacacaaatctccagtctttctcattatattccaattctagagatgtagaggcattcctttgatgcctatccatgaacttctgcattcaattttcacgtctttgttttgttctttttctgaccatcaaatgagagagacaatggtgccccttgtttctagaattactttcttgtttaacttcagtaacatttccatctcctcctcattcttacaccagattacagtacggtcatcatacatttggttgaccaccaattttctgtctatttctcttgagagattgtagaagatgacactttaggccatctcgctattgtctctagacatcatcacagccctactccagtacttatcacacttttctgcttgtagatactcatgaaatttttttcgctctgttctctttttcagaaacatgttccctggcttgaagcttccattcccctttggtagaaaatcccaatatcccaatttatttgagttcctatttgaaggaggaaaactcttttttggaagattaatgttcccaccaagcggcttagtgacaggttgcagtgatcttttaacaatgttagcccatgattgtgagttaaacataccttcttctctcttcacttccttgtgttattccttgacttgaattttgctaggcgtcttttttatcaccccattgagacaatcaaccaagtcagaccatcctttttccttttcctcttctggtataattaccattctaatcttattattcttcaaaactgataacttcagaaaagctcatttagtgttgacgaatcattccttaaaaaaaactctcgttgctgtttctgaatgatctcttgaaagcaatccgtctctgtccatcaaactttttcagttcctccaagtttccaatcatccaatccactgcatcgatagttacgcaaatctcgtactcgaatagtcttgttctctgacatattcttacagag

SEQ ID NO: 1963 - DNA, 836 bp, Cannabis sativa
ggcctgcaagaattgactaagcttgttgacggagaaagcaatgtccggcctgctaagcgtaagatactgaagtgcccctatgacacttcgatagagtgtgtgatgatcaaatggggcactgtcttgaaggctaagtttattggattgagtcatgggagtgtggcaaggtttggcattagacatgttggtcttattgagtagatccaagatacttggtttgagataagtgaattccattatgccccctgcttatctcgaaaccaaggaagtatgcaacagagccaagcgatttaagagcaaaagaagcttgaagttgggagataatggcatggacctgtgatgcattattcccagtaaggagaatatcatcgacgtaaacaagaacaaagagaagagcatcatggtgattgaagaagaagagtgaagtgtcggctacagagttgatgaagccgagagagaggagagtggttttaagtttgtcaaaccaggcacgaggggcttgctttaagccgtaaagagctttgtgaagtttgcagacagcagtggggttgttgggatcgacaaagccggctggctgttccatgaaaacctcttcttcaatcgtgccgttgagaaaggcattattaatgtcaatttgctgaatatcccaatcgttggagacagccaaagaaagaataacacgaatggtcgatggcttgaccacgggactgaatgtctcaaagaagtcgatcccgggttgttgctgaaatcctttggcaacaagacgggctttgagacggttgacagagccatccgaattgtacttaactcgatgaacccatttgttatcaaccaca

SEQ ID NO: 1964 - DNA, 1708 bp, Cannabis sativa
gagaagttggctgtttatgtctcaaatcgagtgcctgaagttgtcattggtgatcctggacgctttcggcagataatcactaatctagttggaaattcaattaaggtcagtgataactcctctctatgcctactacaagcacacacacacacacacacatgtataaatatatatttatgtaaccatgtatataatttgaggcttaattactcgtgtatccattaatgcatctattctattttgcggcttttgtttttcattgctgttcttacaatttgagcactaaagaatggagcaatgatggtcaatagctaaaattattttgggttgacttaatataaaatcagtcagagagttagttatcatctcctccaaagggtggcaacatgtttctaaatgtcactgctgcattgtctgtgttgatatttttcatttattttcacgagctttgcacgaatctcgactgtttgaacattttctcagtatcctcgttcccatagttttggaatggacttgtttctttacttaataatattcaatatacaggtgactacatttctatgtctaaagtcactataaaaatgactacatttctatgtcataagtgactatttgaacgtagcattgttcaactttctcatgatggaatatagttattgttcacatgaagattactagtgatattgcatcaagttaagaataaaaatattctatacagatatatgatttgtgatcctaaaaaataatttcacaacaatttgcctatgatgtttgaagtttatttgttatcaatatgtggtcgttaatataatcactgcaatctttatttgaatgggatttaaagggtatggatttttgtagctccttgagtgtttacctgctaaacttattttggagagtttaactggatggttgttttaaaattgtatatttggctatcatttttttttttattatttgtacaacagtttcaataattttgtgcaaataattcaaatggcttgcagttcatccctgacaacggacacatatttgtcacggtgcatctagcagatgaagttaaatgcccagctgactctatggacacagtgcttaaacagggtttagattcagttgaagataagccaagcaatacctacaatacattgagtggttctcgagtggttcatagatggaaaagttgggagcattttaaaaatttaagcagctcaacaggagatgaatctgataggattaagctactggtgacagtcgaagacaccggtgttggaattcctcagaatgcacaacgtaacatttttacaccttttgtacaggctgatagttccacgtcaagaacatatggtggaacaggaataggattgagtatcagtaaatgtttggttgaactcatggatggagaaataggatttgtcagtgaacaggacactggcagtaccttttcatttactggatctttaaggaaaggagataccagttctttagacacaaagtggcaacaaaatgatccagttgtttctgaattccgaggactaaaagcattagtaatagaaaagagagctatccgagctgaagttacgagataccatctagctaggttggggatatctgctgatatagctctaagcatggaatcggcatcctcttatctttcaaatatttctaacgccaggtagattgctctttctatgatactcaaaagtaagaa

SEQ ID NO: 1965 - DNA, 2566 bp, Cannabis sativa
catttgtttgtttggttcaatttcattgctttaaagattgaaattttgcattttgaatttagattaaacccagtttgtttggttcagtttcattgttttaattatcattattattgttaaaatctcaggtttcaagccagaaagctacatcagccatagagattccatctgggtttggattgttacaggtttttgattaccattaatgaaagtttcatgagttagattgatttttgagactgagaatattgtgattgtggaaagttaaattgttttttgattagaagatgaatgttgaaagtacactaagattaggcttaatcatatagagcttcatggtgtttaatttacttttcaaatcccatggatttattaggcttaatcagaaattatcatctacttcagttcttcattcccttttctatttccccaaaatgttgtgttcttgtgctcataatgatttaatgctctctaacccatctccacagtctcttgtgagaacagtttgttcattggtttttgaatctttttatgaacatggtcaaagaatgcaacttcctcctaggcttaatcttagtatagatagtgattctttgagccatgaacatgttacaactattgttgcttcactagccgatgagggcggttctatggttgcgttgagtttcttttattgggcgatcggtttatctaagtttcgccatttcatgaggctttacatagtttgtgctatgtcattgattagtaatgggaattttgagagagcccatgaagtaatgcagtgtatgttagtgagtttttctgaaatcgggaggttgaaggaggccggtgatatgattctcgatatgcaaaaccagggtcttatgttgacaacacatattttgaactctgttcttgtaattgcttgtgaaataaactcggttgagtatgcagaggagatttttgaggaaatgtctcatagaggagtttctcccgattcggttagttatagatctatggttgttggttattgcagaaatggtgggatttctgatgcagagagatggttaggtgaaatggttgacaagggttttgttgtagataatgctactttgactctaatcattagtacatttagcgaaaagggtttgacaaaccgagcgttttggttcttcaataagatgagcgagatgggtttgagtcccaatttagtaaactatacttcgatgattcatggtttgtgtaaaaggggaagtgtaaagaaagcatttgaaatgttggaggaaatggttagtaaaggttggaaacctaatgtttacactcatacagcattgatcgacggtctttgcaagaagggatggaccgaaaaggcttttagattgtttcttaagctcgttcgaagcaacaactacaagcctaatgtacatacttacacaaccatgatcagtggctattgcagagaacagaagatgaatcgagctgagatgttattaagcaaaatgatagaacaaggtctcgttcccaacacgaatacctacacaactctcgtcgatggccattgtaaagatggaaatttcgatagagcatatcagttaatggattccatgagaattgaggggttttctcctaatatttgtacttacaacgcagttatcgatagcctcttgaaaaagggtaggatcccggaagcttatagattgataaaggaagcttctttcgagggaattcgttctgatcgagtcacttacacaattctaatctctgagcattgtaagaaaggtgagactaagggagccttaatgctgtttaataagatggttaaaacaggactcaaccctgatatgtatctgtatacaactttgatagctttcttttgcagagagaaaagaatgaaagaaagcgaaatgctttttcgggatgctattagggttggtttgataccgagtaaggagacttacacttcaatgatctgcggttactgtcgaattggtaacatcactttagcaacacattatttccagcgaatgaccgatcataattgtgcaccggatagttttactttcggtgcactaattagcgggctttgcaaggaggaaaagttagacgaagctcgtaaactatacgatgctgcaacaatcgagaaagggttatcgccttgcgaagttacaagggtaacattagcttacgagtattgtaagcgagagaagttctcgtcggctatggctatcttggagaggcttgagaaaaggctatggattaggactgttaatactttggtgaggaaactttgtagtgacaagaaagtagggatggcagcattgttcttccacaaattggtggataaagaccgaaatgtggatcgagtaacgatggcggcgtttatggcggcttgttatgagagcaacaagtatgctcttgtttctgaattgtctgagagaattggcaaaactggtttggctatacaaaactcatgaaaattagttcattgtagatgtaacttgttgtgcaagtaatgaattgtgatactcaattttgattcaatggtgtttaaatttattcttcaataaacatatttattattattatt

SEQ ID NO: 1966 - DNA, 1490 bp, Cannabis sativa
ttttataggtaaaatggcgcgcaattcatacaagactaaaaaaagggaggttgctgcagtcaaaattcagaagaatttacgaagaacccttgccagaaaagactataagcaaatcaagtcatctgcaattgttttgcaaactggtttacgggcaatggtttctcgtgatgagtttagatctagaaggcaatctaatgcagccattgttctgcaggcctcgtggcgtcgttataaagctttctcagattatcggaatcttagaagagcttcagccatatctcaatgccgttggagaggaagaattgccaatagaaacaataacaaacaagacatggtaagttgcacatttggttttttcgcggcaataatatccccaatttttttttttggtaataatacaaaaagttagtattttgttgtaatttggtacaaactgttaattttttgttgttaaatgtgtggcaacattaacgtagtatgaaaaaaatatttaaaatataaactaaataaaatatattaaatatatgatgtcatatcgttgttataacaacaaaaattaactatttggacctaattgcaacaaaatatctaactttttgtattattaacgtaaaaaaaattaaatatttaactgcaacaatcgaaaagatttgagtattattgctgcagatatttttatttatttctttataattaaattgcaattattgttttttaatttgaaacaaaaatgtgatacagattgatgatatgaaagaagaaaaagaagaacaggcaacagaagtaaaccgtctcctgcaatttaatcctagtaaaggcgaagaatcagatttgttgttggactgccaggttgctgagctagagatggagtcatctgatcctattgtcgaagaaccttctagtcttgaagatgctagaagggttgggatcctaactgctgaagtaaaaaatttgaaggtaaaataatgaatcttacttaaccgccaccatcttcataatgattgtaatgattacacaatttctgtttttaaacaggccatgctaaatgcggaaagaagacgagctgatgattatgaactgaaatacagagaagcccatgaaaatagtgaggaaatgtatagaaaattagaagaaagtgaaagaacagttgataaactccaggattccttaaacaggtagcatttgcaatcaagattgaaattataataacactttttactaagtctcataattaagtgctgtcttatctttctctcttatcagaaatgaatgatttgactaatgctagatatgatttagtgtgtctcaggatgatacgttccatgtcaaatcaattttccgagctgaaatcgatcttgcgtactgcttcaaaatcatgttcaaactccgggctaactattagacacaacgaggttgaagcttcttcaagtagttccgaatattcatttattgacccggatttcacttttccagtgacaagctcaacctcg

SEQ ID NO: 1967 - DNA, 1776 bp, Cannabis sativa
tgggcatattgcttcggtggtaacaggggaggggtttcaaccgtggtatctcacttgtttttatgggcatccggataaacaacagaggattttctcgtgggaattattacagaatattgcggggttaagtgcggcaccatggttgtgtattggagactttaatgagattgtaagcttttcggagattgtggggggtccaatgaaatgtcccaggtctatggaagattttcaagaggtaatggataattgccaactaagtgatttctgttcttgtaaatcggaactcacatggggtaatggtcatagagacatgggggttatggagagattggatagggcgttatgtaatgaggagtggctatctatgtttgatggggccgatgtgaaggttcttgattggtgggaatcggatcaccgagctttggtggtgaatttgccaattggagccgtggcgggtcgtagtataagtaaaagtcgtcgaagtcgatttcattttgaggaagcttggtgcgaggaggatgaatgcaaagaaattgttgatagtgtttgggaaagggagggtggtacgtgttcggctagtggatttaaaaagaagtcggctaggtgtggggttgagttgaaaagatggaacattaaaaggaagaagccactgaatgaagaaatgagtaaggcaaaaaaagtgttgaatgagttgtccatggttcaacagccgggtatatggcttgaaataaagaagcatgaaaaaaggttaaatgtgttgttggaaaaggatgaggtatattggcgtcaacgtagtcgggctctttggttaaagtgtggtgaccaaaataataagtattttcatcgtaaagcttcggggaggaagaagaaaaatgaaattattggcctggttgatcatatggggatttggaaggagggacaagggactgttgagggtattgttagtgattatttttcaaatttgttcactgttactgctattcaacaggaggtgcttgaagaggtgattggggctattcctaggagagttacgggacctatgaatgatgaattgttggaaatttttaaggtggaggaagtggtttgtgcggtgaaggaaatggccccgtctaaggcaccgggtatagatgggctgcctgctttgttttaccaacagttttgggaaaaactgaaggaggatgtcatttcggtgtgtctaagcatattgaatgatgcggctgaggttgagagtttgaatgagactctaattgctttgattccaaaagtggacaaaccgcaacgtattgaggagtatagactgattagcttatgcaatgttatatataagattgtttcaaagtgcttatctaatcgtctccggcgatctttggggctagttattttggattcccagagtgcatttgtgaagggaagagttattcatgataatgctatagtggggtttgaggggctgcattgtatgaggaagaatagatttgggaatggaacgaaggtggcattgaagcttgatatggccaaagcttatgatagagttgagtggtatttcgtagtggaagtcatgaggaagcttgggtatgctgacgcttgggttcgaaagattttgagttgtttgacttcggtaaagttctcatttattattaatagggaagtgcgtggtcaggttattcctaagagaggactaaggcagggtgatcctctttcgccttttatgtttctcttttgtgctgaagctttctctagtttgattcatagggaggaagtggcagggcggttaca

SEQ ID NO: 1968 - DNA, 2190 bp, Cannabis sativa
ttctaaaagtatactttacttttttcttctcaaaagtaaataagtaataatggataatataatatatgtttcttagtaccttctaattcatcaaacaatataaagttaatctattctaccctccccttctataattttccacacatataactcgacattcatatcaatggataagaaaataacaccaacaattatatgattattgaattaagcaattaaaatgaataaaaaaaaactcattggataaaagttttaaaaatttctcattccctattaattttatttgatgtcaattagaacaaagaatacattttcaaggaaatttaaacttttgacacttgatgaagaatataatgttatatatggtcacaatatattggtctttttgttgagtatagtactatagataatgtgaattagatatttgatagtgaatatactttaattagcatgtggatcgtatttaaaatattaaatataataattaaagtatatgtttaattaattaatatgacaccatccattcatccaattccaatccaaccatctaattaatatatttaattatattttatttccttttctttttctttttattttaaataaatggaatgtatatataggtaggttgaataagtagttttaaagggtatttgaattagtcataactatatattacgtgtacgacagattcatcaccttaattaacattttagatccaaaatgtaagcaaccacatattaacatggaaaacaaatctcaaccccacaaaaataactaacatttttgtcatttatatatatataaaaagatgtcaagtagtgataattatttgaagcaaaacataattaattaattcattaatcattaaaagagataagagatagaattaattaagattaagaatgaagaacaataagtgtttaatgatgtttgcttcagctttgtgtttgttgggtcttttgggtttgggtgaatgtgtggagcctaatcttattgtggaaggcaaagtctattgcgatacatgtcgcgctcaatttgtcaccaaagccagcgtttacatgaaaggtacaataaacgagtttttttttttttttaatattataagtattaagcatgtctttcggttagacgataatattattttttatttatttgcacgagaacagatgcaagagtgaggttggagtgtagcgagagcgaaaaggggaaagtgatatacagcgcggaggcagttacagatgcaaccggaacatacagaattccggtgagtggagagcatgaggatgatatttgtgcaattgagctggtgaagagtagtgatcccgagtgctcggagatcaactctgagccttaccagaagttgagtgctcggatcagcctcaccaccaacaatggtatagcatccaatgttcgacaagccaaccctcttggttttcttaagaagacacctcttcctcagtgcaaagatgtcctaaaacagatgggattgactccagaagatctcaataattaattcaaacataaatactactttataattattattattattattattatcatgatgcatctcaacccataataatcacaaaagtattatataattttttctttttttcttcttcttattattattgtatccccctatacccacccacctaatattataaactttgagacattattattgttaattcatttcattttttgttaattaaatttgatcattactttaccaagtgattttccttgtatcccattttttttaccatatttatatatttattttcatttattgatggtgatttgattttactatgtatatctatatagtgttaaattatcaaaaccattacaccttaattaaaaatgaataaaagtttgttagtggtgttgatgagtttattcagatttaaccattaatgagaattgatatatatatagtatacccttaaaaaagaaaaaagaaatagaagtgtgtgaatgatccaatttggaagtggaaattgaaatggattgggttgtgttgtgttgtctcatatttctaagacaaaccaccttaccttattccttatcaaaaacacaaacacaacaatagtagcccactttctattagtgtactcttttttaatatcactttctacatatcattttgtgtaattacttactactagtactacaacataa

SEQ ID NO: 1969 - DNA, 5862 bp, Cannabis sativa
taggacaatgatgcctttgcttcttctaagaagtatgagagtgatagcttttcagaaccaaagaagtatgatctacctggttttgctgtaagtctctcgttatgcttatgtatatttcttttctgtttacctgcttttgatttgtattgagtgaaagattagctttgccgtttctgatgctagaaaagaatgccttgtttagcttctttggctgcctagtttattaaaggcttgaacttttatctatattgattctgtctttgttatgttgaatgaaagtgtgaattttacttgctagttggtacatgatagttatgtatgtgtggtagcaggttagatggctgtctagattcttgagtgataggttcatggaattatccttgcttgttttatgaatttgacataacaacgggataaactgtatgaaagacaattccgccaaagtcctaatcacagtatagttttaaatttgttgaatgggaattttaaatgagtgtgcaattctacgacaatgaacttcctttactgctggaaacttcgcctttgacatcattctgcccttttgttgagtaattatttatcagtatggagatggtctctcaatgaaaaatattacaatctgttcttttgagtgcctgttggtattttattggttgtcgcatttgatgcagtaactgatctattaacctttcagactatgttctcacccttctgtcttttcaataggtgattaagacaccaaaaggtcatatagcagtagaactctttaaggacggttctccagaaattgttgacagattcctcgacttgtggtgagtatcttatactcttgcatatgatttttgcacttgcatctgttttctgtgtgtgtaattttgtgtcttgtcattcttcaaatccatttttgataagagagctagtgatagaaaggaagaacggagagatagaatcaggaaacttataatacttgcaagtaaatgcacaatcaaacccctttttcttttctgttggagggtaacggagatctgctgtggggacgatatttgctgaaggctctgttcaccattagtatggcttatttattcttcagtcagttattgagactggtccaaatattgatgtgtcctacctattacattctttatgatagttgcttgtgttatactctggaagaatatttaatcaactggtttttcagtcaaaaaggattctttaaagggatggcattcagacatgtgattaaaaactacgtgattcatggcggaaactcccaagggattggaatagctgaagactggatatccagggggaaggtgcacagtgaactcactacaaggttctcttctcgaaacttcttttacatgggaagttatcaagccccttttaatagttctctgataacttatggttaataattaatacacagcccaaagcatgaagcatttatgcttggaacttcaaagaataagcacgatggcaagggatttgagctttttatcacaactgcaccgataccagatttaaacgataagatacttgtgtttggacgtgtcatcaagggtgaggatgtggtccaggtacggaattattgattgcggattatttctatgttagtcgccaacattataggcttgcatctaaggtataacaatttttctatttttactgccatcccaggaaatcgaagaggtggatactgacgagcattatcagcctaaatctaatgtaggaatcattgatgtcactcttaaacgtgagatctaaaatccgaaccgagctagtgtaaagttttcccagtgccactctgttgtttcctgtgtgtcacaatgcattgtttttacttcttgatctttgatctcccatgtgatcatgcatctcattctctctttattttttctaattttactgctaattttgttttgtattttccagtgggggcaatgggggtaggatatattttgagtaggtttgatatggatgttttagttaaaaggttccacatcttggtttttgatataatacaacattgggttaaatttcacttaaatcttttactgttctgtggccataatttgttttttattctcttgtattcttttttgatcttttgcagagtaatgaactcttcactgttattatattagaaactttaggaatttgagcattacatgtacaattgtacatacatacttatcaaagtcctataattgacctttaataatgaagaagcttcggttgggtggctaatgtaatgtcatcacgtacaaatattctcttcctttgattattacacgtgatgacatgaaaacattattgtgccaaaatatatatattcattcatctactcattgggattcacatgctatcttttgttgtttaatggtcatatcatatgatatcttaatatctcttttgttgaatcaagtagtcattatattacattgtgatctcattgtattattctaaagcaaaccaaacattatagagagtattttgattctattataacacccattatgacaaattgtttgctcttagaatgaacatggtaatatgaaagaacaaatacttattcgagtacagaaagaaatgactagtccaagtgtttaatacactttaaatatcaacaattattgagtggacaaatatgacccattaattatagtggagatattgacaagcaatgaataatttaggaaattagctaaacatttattgtttaatattttagtttatttttattttattttttgaataatggataattgtactaaaataatacattgttccattctttataagaaaaagtagattaagaatttattttaacctttctatgtaaatggccggaggtggtaagaagccttacactatatttggtgcttcttacactacatttggtgagaagttgagaaaatacaaccatttttacctcttaaattatgaaatatgtagggttttgtccactaaattattattacttttttggtaaaaaattctcctaattttttttgttgcattttactcatttttttttttgagataatttattaatgttgccacaaaccacacgtatgattatagtatgagaatttatttaactaacttaaacttaaacttgttggaactagggacaaagccaaatgtaaccgaaaggggtcttgtcccctcatatatttttattttttattttctgataaaattatatacaatttcatattgttatacttaatatgtttttttacaaaaaaaaatgaaattgcattttggcccccacctaattgatgattgcctatctatagttagaaccgagtataccgagtttaaatattcaaaaattaactctaaaattatagatatgcaatcttattgttagagtgatatttatgtaattattttttgtgtggactcttgaattatagtagactaacccttaatcattcttactgcaaatttttttttttacaaaaatgaatgaagtgtaactgaaggtgcaaatttataaccaaagtttgaacgaattttttttgcaaaataaataattcagaaggcaaaatccaataattgttataatttgaaagtaaaactcttatttataggaatgctggataattaatcaggatggagacaataacaattcttcttcatattattttgttatttttcttcttcctctcattcttttcatacaaaacagtggatttttcagtattagctttttgaagccttttattatcaactgcttttttttcaccaaaacataaatttattaagaaagaactaggcaccatgagtccttaattcttggcataaatcttatattatcataatcgtatggataaagtgtctcacatttatctattccaccaataatatatttccacgtcagtagaataaaatccgagaagggcacgatagtaaaatcacatacctatcttcttcttcttcttcttcattttttttgcagtgttcttgttctccatttgaaacagttcaattcaagctcagctccattaacacacacatacacaacaagcatgcagcttcttccttcttcttcttcaaaccctaatcctattctcttttccagttctcaaaaccctatccacctctccaaatccactctccaccttatcccgcattgctcttccgcacattccaccaccaccgtttttttcactaacgagagggcttcgaagaggcagcaccgcgtatcttctccggaaagtgttctggtggttcgccggccggaatcggcggtctcggccggagacgaagatagtttgaacttgacggcaatgattaacgcgggaactccgaaaatcagagttaaatctgggtcatcctcccaagctttgtataaggctaaggttttgatcaggagtaacagatttgcagaagctgaggagattcttcaaaaggtttgatcttttgctatgttgttttgctctgtacattaagtagttttggggtttgattatgattgagaatgagaaaacagtgtatattttattggccagaagatgggagagcttatgtggttttggggaagactttaatcaaacaatcaaagactatggaagctcgacttgtttatgagaaaggttctcaagctactcatggaaacaatccctttatctggcgggttagtttaaccatatcttcatggtttcacaatcaaaaaatcttgttattatgttatttgatcaaattgattataatgaaaatctagcattgtttgttcatttttgacaagcataatcagtgttctcatgtttgagttatttttagctaaaaatttagttctttggttcaattttgacaatgatatgatcatctccaacagtgctgggctgttttggagaaaaccttgggaaatataaggagagcaagagaattgtttgaggctgcaactgttgtggacaagagacacattgctgcttggcatggttgggcagatcttgagctgaagcaagggaatatcaggaaagcaaggtgtattctagctagagctcttaaattttgtggagggaatgagtatgtttaccaaactcttgcattgctagaagctaaggctaatcgtatcgagcaggctcggtatttgttcgggcaggccaccaagtgtaatcccagaagctgtggcagttggctggtgagtcttggtggattcttctcttagtcaaagtaactttatgagtgaatcttaatgattgatatttttctcatttgcctatgaaacaggcatgggcacaaatggagatgcagcagaaaaataaccgagctgctagacaactctttgaggtgactatttcatttgcatctagtaaacagctcaaggattgtgtttgaactttgatctggaatgttataattgatttaattgtttctttcgtaatgtagaaagctattcagtcaagtcccaagaacaggtttgcatggcatgtatggggagtttttgaagccaatgttggaaatgttgataagggaagaaagcttttaaagataggtcatgaacttaatccaagggatcctgttctacttcagtctcttgctttattagaatataaacactcaactgccaattttgctcgagttttgttcaggagagcatctgaaatagatccaagtcaccaaccagtatggatggtaagattttcatattgcaaaggcttactaatcatatatatcataacatttgaatttggaagaaactgtatctctgagaagatatgatatcttttaggcatggggatggatggaatggaaagaaggaaacattgccacagcaagggagttataccaaaaggccctgtcgattaactcgtctagcgatactgctgctcgatgcctacaggtacctac

SEQ ID NO: 1970 - DNA, 1688 bp, Cannabis sativa
tttttttttttttgaaagaaacacgtactaaattttaattcacaataaatgctatttttttaattacctatttattactcattaatattatttattaattaaaaatatttttatatttatatattattaaaataacataaataaattttattatttttatatttttaatgagtattaatgatattattgatttttagatttttagagttaatttgtactttgtgtattagattacaaatataaaaattgagctaattataattttatggcatattttaaaccaaatttaattcaaaatacagatgatttattggatggtctcacgtaatctttctagtttctatttaaaatatttaattacttttcaaatataaatagttaaataaataatatttaatactcaaaaatactcctctctcacctaaaactcttcactattttctgtctcttcctttcttttctctttaatttatttcattttcctatatcttatctttctctctttccctctcattttcctctctactatgtagatttgtcaaaagaaaaaaagaaaaagttatccatgaagattcaaaggaaaattctagatgatattttttgaacttattaaactcaccagtaagttcaaattagacactaatctatgcattttaaattgatcatataagttgaaatttgtagaaaattgagtaataaaagtgcttttgctagtaaaaaaaaactaattttcagacttctgcacttacaaagattattccttcaatactatttattaaaaatagtctcacattattagaaatataaagcatatttaagatgaataagacttagttagttaattgcttttgctcacgatgtttaggaataaacctacaaaaattaatataatgagcgggtgaaaactaaattagggatgtctcagcttagaatttattagaaatttgttcagaattaactagttagatgttattatgttacgatagctaagatcttgattagttagttatacttaatcagttgtgtacataaaatttgtaattaattatttcaaagcaatacaacagatacaatattcatacactttacaataatgtcaccacttgaggctagcttaagtgactatagaagagtatacgtgtgtgttagatgttttaggttcgagtttacagtgatctcctcttcataagcctcaagttctcagccttcaagtttgcaatcaattgcttttgctcgatgctaaccattattaagctagtaacttgactctcagcatgcattttgctctcttcactctctacaagggctttcccgatttcatttaccttcgcttcaaattgggctatattctcattatgcttcatctaaagaaataagtattcattgaagagagtatagcacttaataagttatacataaatactcccattatgcttcatctcaagataacataatgtttttggccctcctcacaaggtatttagtagtaatctacaaaagctcaccttttgttcagatttcacttcctcaatttgctgcttcaattttgcattttccttttcaatatcttcactttcttcttttctaattattattatatatttaacaaaacaaacacattatatataagtccaacaagcacatttgatgcttctattagagtctattagttaatattagtcaataaa

SEQ ID NO: 1971 - DNA, 1124 bp, Cannabis sativa
tggggcgttgttagaggtgttacaaggtaaaacatagcaaaattgttaaaccatgtattcgatttttatgttcaattgtttattagaacaaaaggatggtttcgattcatcattcattttctttcttttcctttttggcgatttgctattctttgtgaagtgcggtggggttacttccagaaggattgaaggaaaaattgattgaaaccgaagaaaagagaaaccaatttcagaaattgtataaatccgtgcaatccctttcgaccaaggatgctcttagactgtttaatgatgctattgtggctgaaagaaatagagaacaggttggaaatgctgagattagttcaacagatgaaattgaaaatcagctagaaagttactatagagagcttcaatcacttgttttgggatctcctttaatcaatctacagttaaaagagcaaggtaccattccatgagatcagatcagatctgtactcttttcctttgtgttctgcatttgaattttcgggttgtactgaaatgtctattaagtttttctcatggatttattttctcatttcattagtttcttttgtatgtaattttcattataatgattgtatagtttatatagtcctttagataaaattaattgaacatgaaaagttgttatgaatgtttcctaacaataacaccagaaattatgttgggacattcaatttaaatccaaaataattaagtcaaaatactattgcatcatcttcttcactgctaactaaaattcaagttctctttttttatttcaattttttttttgaatcatgattagttgaaaaacaaagtgacaaaagctaatatgacaaagcttaataaccatcctactatttaagatagataggaatttttacacaaaatatctaaaatgatatttttctttttatatttttacggtataacaatttcagcaataatttctgtgctaaaatatacaaactcttaattatgaatgtgctagacaccaccagtagagatgatgatattaatttaaatctaaaagcttagttgtgccctaatacgactccttagcctcttcaacaatttcttaagaatgagaaccaaaaaaataaaaatcaaactaaata

SEQ ID NO: 1972 - DNA, 1682 bp, Cannabis sativa
acttttactatcatccttgtaactttttccttagtaacaaatctcaaaagtggcattgaaaacccacaacggtacataattccatccaagataagataccagacaactttcctcatcttctttcttgctccgttcctgttttctgacaggaaacctaattggaggtaagttactattggtgtcgtctaagttggattgtcatctagcatgtatatttcttttggactagaaatacttggatcttgtaagaattgaatagggactgggttggtcttgtcttctactacatcaatggataaccaggcaagggtatttgctatggcattttcttctcaagggatctgtttgatggtgaacccttcgcattgacttagcaactcttgaatcttgcttaggtatgccatcatcattttccccgagtagtgtatttacctagtacatgattaatcacaagtttgaagtcactgaatatatctaggtattctgactggacctcgtgtgccaactttagtatagaaataagagcttcatattcaacttcattatttgaggctttgaaaccaaattttatggcaccatggagttgctgcctcacaggcgtaataaggggaatccccgtgcaacttccagacaattctttcttgctattgcttcttctctgactctctttcccataagcttttagagtttacaggagttatgtttgtgcattcagcgacaaagtttgccagagcttggccctttattgctacccttgggtggtgggttatctcatattgtccaagtttgattgcccatttaagcaacctgccaggcgcttcacgattttgtaatatttatcacagttgctggtcggtatatactctgatgggataggcttcaaagtagggccatagttttcttgaagctagtgactaagaatgccttaatgatgaaatcatttgtgcacaacttttcaacttgattttttcaatacttgagtttattctttatccagtaacctctgtttttgttgtattgggcgaaagtttggatctatgttaagggcgtgagaaattactgatggattgatttttatcatgtcttcatctgactaagaaataatatcgaggtttgcccttagaaatttgatcaattcgaattttatttctagcactaaacttcgactaattttgagtttcctagtcagcatggaggggttaatctctacatcttctaattcctccacttgtccaaagttgttagcacgatccctaaagtaaggatctatgtctatttcctcaccttaggcagactctcactgcccttggccaaactcgttgtttgaactcttagcaggtgagtcttccgtttttgctttggacagagcgatgttgtagcattgtcgggcagactgttagtctccccctaggcattcaacaccattcctcattggaaacttgaggcatatgtggtatattcaagcgactgcttttaagtcatataggattggtcaacctatcatgacattgaacgcagatgccacatcaacaattataaattgggtcatgattgtcttctttgtgggactttcaccgattattataccagatgtaacctagaggagccaattcttggcctgagaatctgtacatgagctgcgcacaaggtgtcaaatctttcaaatggtgccctatcttctc

SEQ ID NO: 1973 - DNA, 1376 bp, Cannabis sativa
cactagaaggttggaggatcaaattgccgccttaactaaaatcacagaccgagtggtccataagaaaagtggcaccttatttgatactgacgacgaagacccaaagccatgcattagaaagattttagaagcatcacttccaaaacacttttgcatgccctgaatggaactatatgaaggttggacaaaccccagggattatcacttggtataataaattgatctcaagttagtgatgacggaagatgtctttgtgtcccactcactttagcttgatccattgaagattggtggatttgtgcgaaattggcgagatttgcaagaaaaaatatgaaagttccagaatcaagagtaagtctattcacactgaaatttggtcaacatcgacttgctagatgggcgagataagtaataaatagagacacaaaatttatagtagttcactccccatgttgcagtggtaatggagctacgtctacatttaatttttatttctcacaagaattaaaagagaattgactaaggaaagaggtcatatttctagagagaaaaagtagagtgtgatgctctgaccttataaagacttagtttattgtgtaaagtaagctaatcgagctctcctttcataggcaaggaggtccattaaaatattactaaaataatacaaaaatatggaaaaaaaaaatcatcattggctaatcttgaccatttgtgatgatctaatggataaaattgaatttagatgataatcatcaatttttagagctcgagtcgtgtttgttggatcattttggagtaatctacgaaaaaaaattacacttaacttggggacaaaattttgacttgaaatctctagaattgcgatataagtgtgagacatgtcctcaaagatcttgaaaagagattttcaaaggatctgaattctcgttaattctatcaatattgagtgagtcataaccattttctgaaagcattttagcaactagctccctggttgacatccagtgcctaggttgacattcttaagtcaacctggatgatgtatgaggggaaaaatgggttagacttctattttttgatgcctaagtgataaattgagaatatttagtcaacttcttagttttggtgaagttattcatcagttctccgagatgtcacttctttgcaaaattgtgtagactcaaaatttctcgatttgtagctaattttttgatattccactttgttggaaaggtgaaatatcaaagtatgaatttgacttcttacaagtcataaatcttgtttactacagaaacatagtgagatgcttgagaagaaaccaaaatcggataagcagaacccatcgcaccagactatatgtaaacctaggcactggg

SEQ ID NO: 1974 - DNA, 2191 bp, Cannabis sativa
aattactttaaacataaataattttaacaatatttttttattgcaaaaacaataaatttttctttaaagggtccttcaagtctatttttttatgttataattatttaggatattttataaaatttttaaaaattaaaaaaaaattgacacgaaataatctgttagaattaaatttttctaaatgatgtcttaaattactacaacttaaacattataaaaaaattgaattactttttattttctaaatactgaaataaataaagatttatggactctcttaatggctgcattgtatactttttctaaactttttgatccctatacaacttataggtctcgaccaattatatggcaaaagtctttgaccaatcggaccaacaatattactctaatttaaaatatcaaaacttatcccataactggtagagttaccctttcatttcatccaattttaatttatttttcaaaactataaatttcaggcattgcagaaaattcttgatggcggccacagacttcctaacccagataatattctaatcaatggcagaccaaacggtaccacattaacatttgaaccaggtaagttttagacaatgtacgaactttaaaaacatctatttttttaaaattaaaaaaggctaaaaattaggttttgcatgcatttgtacaggtaaaacctacagacttaggatatccaatgttggtatacaaaactctctcaatttccgaattcaaggccacaagatgaaattggtcgaagtcgaagggacccacactgtccaaaccacttattcgtcccttgatgtccacgtaggccagtcttattctgtgcttgtcacagcagatcaggcacctcaagactattacattgcggtctcaactcggttcactcgtaatattatcacttccactgctatccttcactacagcaactcagccagtgcagtttcaggcccaattcctggtgggccaactatcgaaattgattggtccctcaaccaggcccgatccattaggtaacctcacaagtcacaacatctcccctcctttgatagttgtagcctttttctaacagtctttgttataattttccttcaggaccaacctaacagctagtgggccaagaccaaacccacagggctcgtaccattatggtcaaattaacatttcaagaaccataaggttagagagctcggcagctcaagttaatgggaagcaaagatatgcactcaatagtgtgtcctttatcccagctgatactccccttaagttggcagattacttcaatattgatggtgttttcaaagttggaagcatctcagataacccttcttccaaaaagatgtaccttgatacatcggtcatgggtgctgattatagagcttttattgagattgtttttcaaaatcgtgaaaatattgtacaaagctatcaccttgatgggtacaacttttgggtcgtggggtaagtccaatattaatacataaatgtatgctcacagtatttttatttatatgttattgttttagtttattattgatatttttgttaacttggaatttcagaatggatggagggcaatggagtccagaaagtagaaaacaatataaccttgctgatgcagtttcacgatgcaccactcaggtttgtaactttgacttttacttttctacttactaataatgtttttttttagttttggaaataaagttgaaaatcatttggattttgttataggtatatccaaagtcttggactgcaatatatgtggcgttggataatgtgggtatgtggaatttgaggacagagttttgggcaaggcaataccttggacaacaattctatcttcgagtttacacacctgtcaagtctacacgtgacgaatatttgattccccaaaatgcccttctttgtggaagagccgaaggcaaaagcacaaccccataaacaaacaagctgcttcaatgattgatacataatgttaaatctttacgtatttagtaattttaattttattaattatcataattcaaatttcattctttgaatacctttgcatttttttaagttgtatgtatacacctatattttaacataataaagtatatgtatcctttcattaaaatcaaatatgtgtgtagatttttgaacaaatctaaaagggaaaaagggcaaatgacaaatgata

SEQ ID NO: 1975 - DNA, 2463 bp, Cannabis sativa
ggaaggagaagaatagtatgcagcgtgttaagtaattcccctttgttattagcatattttgcaaaaggggtaaaaagaatgaacctgaacactaaacatcagtatatatcttttgtaatctaaaatggttgggactccgcccatagtactgattattttcatatatgaagattcaaatcaataaaagtatatatgaaatgagtaatccacaattccaaatgtgaagatattgaaagaaacattaaacagagacctgttaatagttgcatccatctcttcaacaagatcaacataaacttcattattagcatattttgtgtctgtagttctccatggaacacaagatgctgttgcaccaggaagtgtgtcactcatattggaactgttacccgtcataacactcaacatcttgctaacaatatttggtggagcaatcatctctctcaggatattaggttctgtagtgagagggaagccgttgtctatcatctcatccaaaagctaaatgttgcaataaacagggtggtcattttcaattcaggcgtgactgaaaaacacataacaggagttggggactaaaatgatccaccaaccataacctggtaacatagtcggggaaaattgaattcaaagatttccatctagctttttttctctaattcaagtattcgcattccagaggtacaaaaaaccaaggaggttaatgaacaagcaactatggtttgtttaccaatacaacttttatacacaaaacagaaatataaaagtgaaaaagtaaacgaaaatattagtgatatatttgcataaaaccataaacatgaggtctgttttgtgttcacatttcacacaccgtctagtaagaaaccgcactaagattcagtgaaactgcaaattcctaatgacaagcaaaattatcagataagtgtagttaaaatacctcatatacaataatgaagttatcctttatcaaatcttcattgaggcctccgaggtaatctgaaaggacatcagctaccctgcaaaggaactatacaccaaatagtataatgtcaagaagctgaatttttccatactacaaatgacgaacacatgtggctaaaccctacctcaatagccatcagaggtggcatttcaacttgggtacatgctaaaaatgtgatcccctcacgaagaatttggaaaagatagtgtgttggtgaagcaattactggttgtaactatcaatcaaaagcaaatctcatacaagagaaacacataccaagaacacaacaagagtatatcaactagaacagaaacaataactccatatcagaaagttcattgatctcattctaacaacagccaactaatccaaacccaactattgtaattcagaaatatgagaaaccaagattttaaaatctaaaaagtacataaaaacaaatgagccccaattttgcattgcctgtggactcggttgatcccacgatcttatgcacatatgggcgccagcggtccacgcagaagatcttttttgaccatgtttggttttgttttctagttttcttgggtttaacttttggttttcatccaaacaaatcctatgtgtatttattcattccctctcttttctcaaaccctcaggatcattattttcatgtatttctctctcttcacatccttcctaaataaacttataataaactcttaaaatcttctttcacatacataaaatattttaaagtacaaaatcaaaaatcataaatttattgttcttagtagtgagagtgaatatgaaagttgattatttctaacttcaattatccaagaaacaaacttatgaatgctacagacccagaaataaaattattcgaagttgagctcctaaatatctgtattttcattggcagacccaaaattagcagtggtaccttagaggaatcgccttgagaaagagcgtggttccagaaccaatcacatatggagcggtctacacgatgaccggtgagctgtttctcaagcataacctcactgtgaaattcaaattcaaattcaaatacgattcatgatcaatcatcttcttcctccaactccgacaaaccaattcaaatcaaatgcttggaatgaatacaaacaaaaaccaatttcatgtgtaattcagcaaataaataaatggaaagttcgaaacaattaggatcattggaaaatgataaaaatgtgttaccaacccggaatctgagagtagaaatatgcattgcaacattgtttactcttgtctctctggacagatcgctttggatagagaagaagaaaacaaagaaagtgatttttcttcatttttatcttgtaattgatcttatgactacaaaaacgacatgtcgttgtagcatttaattaattgggattaaattagtaccacaattctgtccttaatttcaagatgagttgtatcactttaatctaattcttaaatcattttggacc

SEQ ID NO: 1976 - DNA, 3193 bp, Cannabis sativa
gaattgacaatattatgttttctttttaatgataatgacaatattatgtttgacgaaggtattacttggagttggaattattgtttctaaattagtagttattatttattttatattttgctgatagaatttttttaatgctgtacacgaatattaattacaaaacatttgttatctgcaatacttctttgaaacctgcaatattattgttttctttacgcaccttgcaagttccttagttacatgagtttaaactcttaaccaggtagctaaggctccggatgggaatggaggagtttatacaggtgtctttctgttaaatgatttcctagtgttaactattatataatgttagttaaatgccattgttgccttccttttgtttctggttttctttttctttctttcttgatcctgctaatattagtttttgaacagctctgaagtcctcaaaattattagaagatatgtccatgagaggaattaaatatgtggattgctatggtgttgacaatgcattggtgagttctcttccttccctacaataatttcagctttataaccagagatagaaaagaagggaacctctttcatcatctgtttggataaagaagagatgaaatatacgctgaagtaatttccaaaattttcccacctgaagtgttttacttttttaacttacatagaaattgctatagtttttggtccccaaatattgtagggttaggtggaactttcattagattttaaaatcttgcatagaggaataacatctgctcataagtattttttttattgttattctcttttttcttttttctttgagaaaaaatgtctcgttaaaacctcaagagtaaatccattcggaaaaacctcaagaggcaaaatcgtgtccagaatatattatgtaatgtcatccagaataacaacatgaatacaaacaaggtagccagaccacctaacataatgataagtcatagagagcgctagttttaccaatgaatgtgcaacactattggcaatcttaagacaaaaattataagagatactagtaaaataattacaataagcaagaatatctctaataatataacccaaatacgaaaaatcaatttggcggttgttaatggttcaaatcacattcacacaataagattccaaaaccactgtttgatagccaaggcgagaacagaggaccatgctagaatagacttgaaagcttcaacaacattaggctcaaaaagactgctccacaaccaagtactcgaagcatgaactgccccattagtatcacaaatgaccacccctgccccagagaattttgaacattatcattagcagcatcacaaattagttcgaaaattcgcggagtaggtttcgtccaccgttgtgccactgcctgttgtcttcgatcatttgtgacagtaataggcctgccatgagcagtgaggtgaattttgccacaagagaatcaagagctgaatagagtctctaatagcttgctttccctaatgaagcttgattaaaaaaagttagatccctgacacccatattcccatcagacttatgtcaacaaagtttctccaagtgccccaatgtaacttctgcttatgaacactaccccccacaagaatctagcacaatgacgatggatttctttgataaaactagcaggctgcttgaataaattcatggaataagtagggctggcttgaataattgacttgataagcacctcttcccaacagctaaaaaagaccgagatttccaaccaaacagtttattccaaatacaatctttaagagtctaaaagaggccttttttgctttgcccaatgtaacaaggtagaccaaggtatttctcattacaatcaaccacaagaacaccaagcataatagccatttcaattgcacaggagaaatatgagaatcgaaacacataacaaatttttaaaaattaacaagttgtcctgatcctgaagccttaccgtaccaatcaagaagttgcttgaaacgagaacatgtgaaaatagtggcctttaaaaagaaaaggttgtcatcagcaaaaaatagatgagaaattataggctctgctgtaccacacatgagccttgaaaggaccctgttcctaatttttagttttctagtcatttgtattcagcccacatataggccattcttttatcaataaaattgagaataattctcacaaaaactacatggtatcagagcaattgtagtgtaaatattaggatttgaaaacaaatcccatccatatccttcgttaaaaaaagaaattagggtttcatactttgtggtccatccttagagaatcattttagagtgatcctttatcctcacctccgacccagggagtttacccggcctgcaatcggcaaaaccccaaatctcagtgtccatcagaatcacgtgtgggccccacacaccacctccatccgctacaagttccgccacgtgccggcgtgtgtaggcatgacaaccttcttccgaccgtttttttcggcgttcactccatcggcacttcgtgcttcgactctgtctcttcatctggggttgtttgatgatttcttcaaacaactgtatctttgcctaatttttcactcattttattattcaatggctatatctcagccaatcagtatcattaaatctcataaatctctcaaacttatggtagtactccacccattcatcacaaaataaacaatttctcggagcatcttcgaatcctcctctacaatttatacatcagccaaattcacatttaagtgaggcaaatgtcagcataatgtatcatcaaggtcctacttctagaacatttactgcatccagcaacaaaggtactcggattgttgattcagggacttccaatcacattacaggagataaacaagtcttcaacactttcaaactatgtgccagttctcacacactgaaagttgtcgacggctctctctcaaaagtgatggggattggatctgtatcattatcagacgactttctcctttcattgttctatttgtccctaaactaatttgcaatcttctctcaataagcaaagtcactcaagatttgaattgtcactaaattctatccaaatctttgtgaatttcaggttgagggcttgaaaaaggtgattggtagtgcttaaatgcatgatggactctatattc

SEQ ID NO: 1977 - DNA, 4367 bp, Cannabis sativa
gttttgttgagtgtaaaaattgaacttctgtatattatgattttctcttctcatggagttgagtttagtggaagcctttggttgattttgtaatgcattaggatgctgttaaaaacctaaaacttaagtctagtaacttacatatgttattgttttttgatgaaattttggttgaactacctgacttggttgatggacttttcaggttctgttttgtatgcattgataattgggctacaatcacaaacctttgccctctttgtcaaaatgagtttcaattgatcacttgtgttcctgtgagtatttgatattttatatccatataagaaagataaacagattatcttgctatctgtgagttacttgaagttgtggtttaagaaaatgagatttgaatgtgaaggtatacgatactattgggagcagcaaagttgacgacgactcttattctaggtactattgtgactatcacttgttcttaatttgaagacttgtctcctatcatttctgttcgcatgatgctggcattgtatttgcaagttttaacattgttatcactactttatgatttctctggcagttcaattgtgattttcatagtccaactttggtatttatttcctatgttttgttcataaactgtaataatgttataactgaccgaccataggtcttactttttatcatagactaattttatgtagtgatttatgcagagatgatgattggtccatcgaagggaagaataacactctctcttttccgtcctattatattgatgaaaatgtaattatcttcttaatctttttaagccttttttttatatgctgaatctttattcctaggttttagatattaatgaactctttactttagtagttgaatttttattctgtttactaatgatatttaaacataattgtcaatttgattttgaaacttggcgaagcttatttttgctaggctgtaatctgatttcctctctaaggtgatatcatctaacatcaagtacttatttacttaaatcacttttaggcagttatctgcttggatggagagggttgcaaaattcgaagtggatcagtcactgccgagggagattccaatcttgatacatcaattgcttgtgattcatgtgatttatggtaagaataagatcaaatcatttaatgagagaaaatgaattaagaaatcctaataacttcttatggttttgacttgaattttcatacaggtatcatgctttctgtgtgggatttgatcctgaaagtacttctgagaatacttggttatgcccaaggtacactattgggggtttgagggatgtttacttcagtaagctgcagaattagctattagaatactactctaaactatgacggggaggcatctaatggcttggccatgtaattgagtgataaaactaccatattggtcttatatttgtaacatttaattattattgtatgcatttttcttctaggtgtattgttgacgaggtttcaccaaagccagatgataatttagaacacggttcgaactatccttgtagttctgaaaatgcaaatacagagtgtgcggccggggacacttactctaagaaggtgtctatctctgttgctgatgctggggaaacagctatagttgtctctatggttggagatggtaaattagctgaagaaccaagggagattattcagccaaaaattgaagttgatgaggaattggttactcaaacttttatcttgacttctgaagatgatagtcagaagttgacagcatcatccatggaaatatcaacaactcatccgactttgaaagctcgggaacttgaactgtccttatcatgtgatatatccttaaatgctgataaatccctaaatgagcatagtagttttggaggcaataaaatttcttcagtggagttagctgaggaatcacacatcagtaacattccctctgataatagttctgttatgggtgttcatcttggtctttctgtgggatcattcttgtctggtagttctgcacatatatatttttttctttctgtctcttccgttgaagtttgatagctctccaaatcattcttgttgtttatgtgcgtgtagttgatgaaatggacaataatggaactaaagatcaaatgaatgaagatgtaaaagagaacaacgattcaaaggagcatatatgtaaaggtagagtcatgtgtatatacattgaaaatacctttttattggggacaatgagttttgaatttggtcaaatttggttatactaaaagtatgtatatggacttctttgcacactgcctcattggtgatatatttttcagctgataagactatagccaatgccaaagtgaatgtgcctggaacgactgctgtaaagagaaagcattcgaactgcaggttggttctgtctatcaaatattttgattaatcctaatactttcatagctttcagcatcattagtgatagcaacattttctcatacccttgtaatactacctagcagtttgtagatcaaattgagaaaaatgttgactgaaagaagaaaatatcttgggtggttatcacttatcaccaagatattattggcccactttatcttggctctctgcctatttatttcagaccttaggctgtagtttttcttcttcactgttatttgatttagaaaatcggggcagtgtttctttttcagttcttgctttcattaactgatgtagactctactatcctatattattaaaatttcattgtttttcggtaaaatacacttaccagggtagtgttattgtctccaaagtctaaagcttgtctttaaggtcttgcatcagcctatttaactcttttgatttgaaaatcattggccttcacatttctcagtacacgcagagtggaaactctcaactctgattatatcattttgggtgttatatctaaatgttagtgtggccatgttatgaatgttgatagggatggtgagaaaaagagtgagatagaaacttcttcaaagaaaataaaaactgaggaggggattcaaccgatttcgcctgaggaccagaccaggtcatatgccttagatgactccaaaaatggcatgatgattgaaaatcctattgattataaggatgttcgtcctgaaaagggtaatgcccctgctgacataatgagtattgttcaagggaaaaaccgtaaaacttccaagaggactcgattaccaaatactggtgataaatcatcgaaagaaccagaaaacatggctggtttgagagtaaagaagatcatgaagagaactgctgaggacaatgagtcatctgcggcagttcaaaatctaagaaaagaaataagagaagcagttcgtagcaaatctgctaaagatattgatgaaaatcttttcgatccaaagcttcttgctgcctttagggctgctgtttcggtacctaaagatgaatcggttaagactttgtcgcatttggctgtgaaaggaagaaagtcaattttgcagaagagtaaggtgcgtgagaatctaacaaagaaaatatatgctactaataatggaaggcggaaacgtgcatgggaccgtgattgtgaagttgaattctggaagcatcgatgcctgactacttcaaagcctgaaaagattcaaactttaaagtcagttctcgaccttctaaggaaggatccagagagcactgaaacagaacaaacatctgaaagacaggggagcaatccaattctttcacggctatatttagctgatacatctgtattcccacggaaggatgatatcaagccactatctgctcttaaaacatctggtgattcggataaacaacccacagcggggaaatttccaaaggtgtctattagtgcttcaagttctgcagagactgacaagggtctgtcaaaggttgttaaaaagaacaaccttccgagccaaaagagtaatgctgtttctagtaaagctcatccaatccgacactcagaagggtcatcagtttcttcattagacagttccaaatctaatgcctctaaggaagttgcttctaaatctgatgatatgaaaaaggataaaagaaaatgggccttggaggttcttgcccgaaaaacaagtggtgcacgtgagggggcagcaaatgaaaaccaggaagaccttgccgtgtttaaaggaagttatcctttgctagtatgtagtaagttatttttcaaaactgctttgttatgctaataggtttgtcagtaatcacattttattttgcggttgctttgagcaggctcagttaccaattgatatgagaccagcgttggctcccagtcgccacaataaaattcccatgtcagtgagacaggtatggaaa

SEQ ID NO: 1978 - DNA, 2066 bp, Cannabis sativa
actacaagtatcaactcattaactaactcttctcaatcttccccaagatatactcagggcagataattttgaaaacatgcatttattttatcttcataaactttctactttcctaattattggaactaaacaagtaataactaataagatactgaagtagtggtgagatgtaaattagctagcctaaggcaatccctaaagtctaaacagcatataccaaaaaagttatgggaatactttacttcatgtgtgcgtgcattagaaacaactgaaataacttccttgcaggttgctcgtatgactctgcaaaaggaatgcaacaacgcatgtgaagatgtcctatcaggcctcaaaagatatatgcaagagaaaacagtttgcgacaatgaatgacccttgtgccatgttgcctgccatgaaaacagtaatttagatgaaaaaaaaaacacacacacacacaatgacttttatatatacataaatttacacatttctttgtactttatgtaataatgttttagtataaaagacaacatgctatgtttattagattatagttttcttcaaaagtgaagaaacatattacaaagtaaaaaaagttatctagtgaaagaagagtgataaaacttatcaaggttccttgatacctcaagacaacggtataataggaattagacagaataacatctcatgattaaaggcatcagctaaagcagcattgattttgccatgaataataacaccaattgagaaaggaatgtttaaaataaatacctcgcaagcaagaagatggtccatgatatcaatagtgcatcgaacatcaatagttttatcaaaactaatcggaattggtgcaacaccatcctcaattgcttcctcaacagagtagtatttacataccatgccagaatccatctttgggtccattatctaacatgaaaaaattcatttaaaagaccatatttatatttccatagaaaaaataaaagtgcaatcacaaatgcattgtttgttagcaaggccatgcaattctttacataattgtcaactgtgccagaccaaattaaaacaaactaaacttttaaaaagtttgaaaatgacacattgcaccaaaccatgaagaaattttcattatagagtagtgaattatacaattgtctcctgtaagtaggttcgatcatctccatgaaaacaatgacacaattttccataaacaaatttatgaagccacaaaagtaatttccaaaagaagctccaaagtttcaataaagatcaaacaagggacacaaagattaattgagaatgttatgcatacctccagagcagacatggcggcaaaaagattgaagttatctccatgaatgagctcgccgtcttcaagatctgcaaacattaattttaaaaactgaaaaaggtttctttgcattttttatagtttagaatttgttcgtttatcagattaacagaatctaatacaataaaaacaactgattatcgacgatgaattcgcatccaaattctcttttcctctaatttcttgcgaaccaaacatgcaataccatcagcagagaagcaaagaattgaacaaaagagaggagagggaagaagattaaaagaaaacaactaacctctacaggcggcgtcaagcaggggagagacgtcagcccaaacagagttctcgccggacggaatcgtggaggagcgttgtccgccaggcccagcgaaagcttcatgagtagccttggcgtccatggataccgagtctgatcggagagaagtaaagggtgtgttcctctccgctggctggaccgccgcgtctgtggttcttgggagagaaaagaatgagcttgagttgagtaaaagatgagagtgaaaatgaagataaatccgaacaagagaaggaagaaaggtgtgtggttgcgttaatggaggtttagggcaatgccattagcggaccacactctctgcttcgttaaggggtcggatcacatatgttggttttcatgtcctctgtgtcttgttttgtgtgtctgcttactcaagtgaataaacgactcgtcgtttaa

SEQ ID NO: 1979 - DNA, 1375 bp, Cannabis sativa
ctcataatcttcttatttctctgtttttctcttcttcaaaatccaaaccccatttcctcaaccaaactactaaccaaaacaaaaagcttcacatacgaaacatttgatgaaggaaaagacacacctttcttcaaatttagtgcctcttcaattgatctaaacgcccttcaattaacaccagacaatgaaaaccaaccaaatggttacaacaacaaatcaggtcgtatcatgtattacaagccatacaagctttggtcatctcaaaacgacgacgtaatagcctcattcaacacaaactttgtcatgaacttgtatcgaaacaaggattgggaagccggggaaggactcacttttctcatagctccatttggtgatgacttacctgaacagagttatggacagtggcttggtttaaccaatgcaacaacagatggtaacccaagtaaccaaatagttgctattgaatttgataccaaaagtcaagggtttgacccagatggtagccatattggtcttaatgttaactcagtggtttctaataagactgttcttgttaatcagtttgagccaactgtgaattacagtgtttggattgaatataatggtgggtctaaattaatagaagttttcatggctaatgatggtgatgacaagccaaaaaagcctcttcttagtgagaaaataaacttgaaaaatcatgtcaaacaattttcttacttgggtttttcgggttcaacaggggacccttcaaaacaattcaactgtgtcattagatggaagcttgaaatcgatgacttgagtcccaagaaaccttggaattggaagacattgttaattggggttttggttggtttaatgttattgggtttggttttggtgttgttgtgtttaaagatgagaaagaagagaggtgttaaagatgaagagtccaatgttttgggaacacttaaaaggttgcctgggatgcctagagagtttaagtttaaggatttgaaaaagggtactaataattttgatgagagtatgattttgggaaaaggtggatttggtgttgtttatagaggtgttcttaatgaagataataataatgataatgaagtagctgtgaagaaattttcaagggataatttggatggtaaagaagatttcttggctgaacttactattattcatcgtcttcgtcataaacatcttgttcgattagaaggtatgcaaatcaaatccttaacaattttaatttcatttttttttaaatttgtgtaagaaattgaaaaagtatggccctttgacttttttttttttttgataaataatcaaacttcattgaatagaaatgtttgtggaaagaacataatctcattaagaactttacaaa

SEQ ID NO: 1980 - DNA, 1392 bp, Cannabis sativa
agcttctagatctggttcttgatgttctacaactacaatttgagttgacatatcaacttctttatcactctattcaatatgagattcagatgcaagaaggagagcttcgatctcaaccacagtatactattcagtcattgtatttgtggatatggtaaaggtgtcatattcactcgagagacccttgaagatagcttctatatgatcttttggtgtcaaaacttcactaacttagccaagaagatctacagatcccttaaccttaataaggtactcattcaaggtcatagaacctttcttaagattctatagtttagttcaaaactcaagaatcttggctcgtacttgtagagtaaaaaacctttctaatgggacaagatttgattagcagaataatagcgaaccatttaagtacgttataagttggcagtcatcgaagagagaagccataacacaatgagctgatcttgagcttcctaatcaagataagcaagattgatgctctatagagcacgatcttcatcatgaagatattttggaggataattctgaccttgaatgtagctctacaatctattaccacaaacaattgtgaggatttgttgtttcaaaagaagatagttataatcattgagctttattaaaggaccataactgagtaaactggagagcagtcatttgcttcattccttctagtttactttagaccgtgttgttatacaccattgttgccatagttggaatgatcaccaaagccaataacaacattcactgatagcggtggccattttggctctgataccatagaactttttagacattttgtaagagaatgaaagagaaagagaaaaaatcaaagagtaatttcttaatgagttaatgacatctagctactaatttgaaagttatagctagcaatcatagcttagccaacagccatcacaaaaaacaattagtaactaagttccaacagagtagagtaactataatattattaacaatattaagtttggtgtagggttttctctctaggtgctttttcttgttgtcagctctaggtgttgtcttctctccaggctcaaccctaggctaagtcaagctaggcccgtgcttagggcctacccaaacctagggccaatttttttatatataattttatgtagtgaaaaaatagtactttttgtaaaattttataagcccgataatactcaaactctactttaaatataacacacaaaaattcttcgactaattattactcaaggttgaccttgcttatctctcttcggccagggaaaattatgggcttggttgtagccttggttagggaggatggtgtgcttgcacattgaatatgataatgatggtggcatttcttttatcgtctttctt

SEQ ID NO: 1981 - DNA, 2760 bp, Cannabis sativa
agtaaaaaatggctggacttccagcaggaagctgccgaaccaaggcagctactccagaagccataccctcgaaaggggtaatgcctggatatccctgcacaatttcacataaaaacagaaatgaaaaaatgttttacggccatatatcattgaaacaataagatagaaaaacaggagtaagagaacactcaggcttaataattagcaattaggcataccaagagcgacctttgcatgtagtagaaagcaagctgctccttcaaggacattctttcctcttcattggactccttccctgaagataagaatgcgacaaaagtagaatgggaagcacgagctacttttccatttggatctcccaaatatctgatttcttggtattaagaaagtacaatattccatacaagcatataaaatatattcatgaagaccaagtttttggcacaggatacaagaacatagttggagcaaccaccttcccaaatatagggctaggcaaacgttcaatgcaagttgcaatgactcgtaggtaaaatagaactcgtgcagtttgaacctcatcttcacaccataaatatttcgttttgtgctggagaatgaaggctgaaagattatatgcacacaagttaacatatactacaataaaaatatcagatgagttagtggaaaagatgtgaaaaggaaatctacttagacagcatgcataccaggtccatttgtcaaatcaagataattgggcatggattctacaaacgagatacaagcagaatcattctcttgaatggtcaccacaacctcgcgaattgtatccatatactcgggcaagcgaatacgacgaaagtactctaaacaagaaaatgcaaccagtatacgtacagataagtctactttagcctggttcaatttggagctaaacttatgtttggtgactgttaatgaaaaaactacaaccataagaaaagcagattcagtgattttctctatatcggtaagtaactcattggattcgcctcgcaatgccaaagccactttccgatgctccatgtaaataaaatgacagtaatcccacataagattctccaccatgctttggctctcttcagtcactgaagcatactgactgcaaagaactctagttatggtccctgcttccttgaaaagggcatttaccaaatgttctttaacctcattatgcaatattcgcgctggatttccatgtgaggactcaagcacttttgtataaaatcgtcttaagggaaatatctctatcaataatgcagaagcaatgcataaaaataaaggagagcgagaagacactggtccacttcgtgccaatgctaaagagagacactgtaaggaaaggctgaccataaggtcgttttgagaactataaaaatctcttgtggaagaaatcaaatttcttgctacagattctatcctatcctccgcagaaactcttagccttgaaataatatctagccgcaggccaccagctgcagatttattcaatgtcctcaatactcctgcagcagccatgacaacagcaaatggaacatagttttccttcatggtttctaaagcctcatgagaaaaaacattaacattttccagagaccgggaactgatcaagccagaagttacccattcaatcaaatgcaaaatcatgagcccgtgagtaaggctaccttgagggcaacctactttgccccaaattcccaataaaatgtccaaagtcctaacataataatcacacacagaagagcatagagcatacccgattcctgcaagcacatccggaacaattgcttcaaatgagcccataagttgatgcttttcttccaacaacttgcaaatcaactccaaacaaactcttttggagctttcagatgctgagcgcacgaaagcaagggaacccaaaaggagaacaccttctgaaaacaagagagggttctgcacatgatcaaactgagaggagaaatactgagaaatgacctccacaacagaatcaataagagctaaagtgggtctgttggacttcctgacccaaatataaagaagcctaaagaaaggaggataagattcgtgagggagattaagttttggcgaggaaagaatggaaaggacaagctttgcttggggttctgcaacatgaagagaagcttgagaattaataagagtgttcaaagcttggagatgattggaatgaaatgactggtgttggagggaatctctaagctcagcccatgcctgaatgattgctctagctgatgaagaagcataagaatttttggtactactactataaccacagataccctttagccaatcctcaaggaaaatactattaacttgctttgccatcttaaaaacgtccaaatttcattcataaaagcccaattctaaactgagcacatgaacaaaataatgcttcccacaaattaaggcttaccggaaacttcagagagatttttctaactaccttaaagaataatcatgaagaaacccagaaatctcactaaatatgtcccaggtatgtactccagttattgctgcgagtgacaaaaaaacaaagagagattttcagccattcgaaaagaattttactcaagttgaacctaaacgataattttctaacagttcgacatggactacataccaaatagcagaggaattctagtggccggcggaaacggcttccggcaaagaaaatgataatcgggccgtgagtttccgcctgggtattcgctctttcttctaaga

SEQ ID NO: 1982 - DNA, 1946 bp, Cannabis sativa
ctaccctatactaatatgcaaatgctactctacaactactctttacaaacttgctatatttaatggcaaacatgacaaaaagggtcacttttaatcatttattattcttaaaaccattcaatttaacaattcaacaaacaaccacagcaaacactagaaaatcccattttctttccacccaaacacaaaattgcatcactactttgatttcccaattcccaaatccaacagaaccccatgtctccgattccatttctctctgcgattctcatcttcttcacctcagcaacgacgtcgtttgcctccgcggacgattacaacatcctctcagcataccaagtgctccagcagtacggttttcctcaaggccttcttcccaaaggagtaactgggtacgagctgaacagagacacaggagagttctctgcccactggaatggaacttgtaaattcaacctcgaaggttcgtatagtctcgagtacaagtccaccataagtggaatcatatcgaaagaaaggctcaagaatctaaagggtgtgagcgttaaagttctcttcttttggctcaacattgtggaagtggttcgtgatggtgatgagcttcaattctctgttggaatcgcttcggccaattttccaattgacaactttgaggagtctccccagtgtggctgtggattgaactgtaattctaactcagttgaggttcagtgatgggtaagaagaataaaaaagttccaccatagattatataataatgtattaaatgtctttatgggtaaagcttaggaattattaggatctagatttttaggtgtagaaaagggcattctaaaacagagcagaggacaagattattatgtttgttaacttcttgttattacttaatagttaattacatgctctttataattctctctggtttatgtgaaaattagagttacatagaaaaaggggaaacacagaaaaatggtactatgataacataagcaagattccaagagatattttaaaatttagaaaaggtactttcttggaaattattgatagttatacctaacctccaatgtatatggatacattacacacatgtgaagcaatgccaaatacatgtaatctcttacatatatatttatgtgtatgtgtgtatgtagctcgaagattacaaatagccaattccaccggtggaaatgagcataagaaaatttaacctgacacatattttggagagacttgtttctatgtatattatggttaacgatagctttactgagaatggtttactttcttttgaagttttcatgttgctgttacactctttttataggataagtttactatgtagtacgattttctcttcattgtatatgtgtggagatttctaccatattctgactttcctatcactgaggtcaactaatgttcatgtatatatattgaccaaacagtcagactctcaacactctataaagggatctctatttactatctgagtttcctaagtttccactttactaaactactaactgacccttaatctctccaatggcgtattatcaattcttggttctcttctttctgatgtcgtttacaaccccattgtcttctacttcaacggcttatgaagtactagaagggtatgatttcccagttggtcttcttcccaatggggtattgggatacaagttggacaatttcacaggtacattctttgcctacttaaacggctcgtgtagtttcactgttgattcatatgagttaaagtataaccccatcatagcaggcaagataaccagcaataagctatactacttgtctggtattgaggttaagatagcttttttctggctgaaaattgtctctgtcacacgcaacaatgatgagcttgaattctcagttggcttcgccagtgccaactttgatgttagtaattttgaggagagccc

SEQ ID NO: 1983 - DNA, 4260 bp, Cannabis sativa
ctctctctctctctctcacttttcctcccaagctttttgaccccatcttcggcgctctacaatcccaaaaatccaaaccctccatctcacattgcccagctcgcaccgacgatgaatcctgttgcctctcgcactgatgactaccttcggtgctgtgaagcccacaaaacccatgacaaccacctcgaagccccaaaatcgagggccaatcgtcaagtccacctcatttagaccaacgtcgacgtggatacaaatacccgagccacccaccatcgattctcatccacccaccaacatggataacaatactcaattatgtgaatattgagtggctctctgcgatgtttaacgacatgtttgcagcatgttacgatttcttcattctgtctgttttggtttatatttttggacaattttcattggttttttgcattttatcgatttgttgcgatgttgtttgtgatgtcttacgatatcagcaacaacaaaatacttatcgttagacgtcaccaacaatgttgtaagacatcgatgaaacacaaaaaaccaacaaaaatactccaaacaaataaatcaaacagacgaaaacctgaagaaatcataacatgtcgcaaacatgttgttagacatcgcagtgagcccaaaagtgcattcttttgttgttgctatcacaaattgtgtcgctaataatattgtttgcgacattttgtaatttcattcaacattttccataaatgttttgcgatgcaggactaaaatttatcgataaatgtcgttaaacatcatcagtgacctgtgcatgacactatcatcgcaacatatcgcaaacaacatttcaaaatatcgttaattatctaagacacaaatatccaaagctatatcgtgacacgttgacaaatatcgtgaaacatcatccttaacctctggctagcactagtatcgctagatatcgctaaaggcaacgcaaatatcgttaaaacatgaaaaaaaaaaccaagaaatgcaacttacattgcagacacagaatgacaaaacaaaaataaagatatgtgtagatctatacatatcaaactaaatgcaactaaatctaacaacaattagtaaagaaattatatagtcattattttttgcaatgatttggttcctaaatggcatttttaatggttcccttggtgcaaggtcggtgtgtgtatgggtgacgaggggagctccgatgagggtggtccagcagggtgactgtgtgtgggtgtagagtggttgtggccttcctaaagagggagagaagagagacaatggataaattagtttttaattatagaagggtataattagattaaaaaattatgggtttttttacaaaaatacttgattttggataaaaatttacaattttactgctacacggattttacataaatactatctttttataaaataatcgtaaaacaataaaacaaaacaattaaaaacaacagtggaaaaactaaaaaataaccgtaaaacaacagtgaaaatctaattacatagtatttttgaaaaaaaaattcgctccgcagtataaaagaaaaaaagttgaaaattttagtatgtggtgtgaaaatagtagcataaataagagactataacattatatttatgtcttgtctattgacatgttattgtatgttattgcttatgagtgaaagtttatgagtgaaagttttgatctggtgtttagtgctacgagtgttaggagaaagtttgatatggttattatcctgaaacattatggcttcaagcagtcaacatgaagaggatctggtagataggtatgcgcagattcaattggaggaggaggagggtggagtgttaatagcttatgatcaggaggaggagacttaagcttttgatgatagatggtgtttagttgggaaatttcttactggccgcactattgactttgatgctatgaggcatatgatggcatctctttggcaaccagggaaaggagtttacatcaaggaattggatactaatcgatacttattccagttctatcatgaacttgatatacaaactgtaattgacggaagcccctggaccttcaatcggttacaacttatttttcatcgtctgaggagaggtgaggatcccagaatggtacgcttgcataagctagacttgtgggttcagctacatgatctaaaatatggcttcatgtctgaatgggtggtgaaacatgtgggtaattatattgggacgtttgttaagactgacctgaagaattttgttggtatatggcgagactatcttcgtgttagagtgacggtcgatattgagaagcctttgaagcgacgtatgaaactaataaaacaagatggcacctggatatggactacattcaaatatgaacatgtccctatgttctgttttatttgtggtcatataggacatacagatagattatgtccacgaaggtttgatcagaactttgatgcttctaatagattgtatggggagtggatgaaggcaccaaacagaaagaagaactacctgataggggctcagtggctgcgaacgggcagagaggaggaggagggcagtggcgatgggggggaacgtgatcgaagcagggaagtgggatttcaaattaatggccttgattctaggggatctgatggagtgatttctggaggtattacgggtgattatgaaataacaactaaggagagaaatcaaggggagaaaatgaaggaggttattgatattcctaataaagagagtattaatactgatgagaatgcattagctggtcaacttgatgatgaggaaataatgatcttggagaataaaaggcgacgcactagtaaaaaaggaaacatggaggcacgtgaggaggaagatagtattatgagtaatactgaagaaacaagtcaggatccaaaaaactttgtacaggtgggccttggtgttcaggcccaacaatcattatgagtgtattgtcttggaattgccatgggcttgggaacccatgggctgtacaattcattaaggatttaataatccaaaagaagcccaagttagtgttcctttgtgaaactctgtcaaagaaggaggctttggagaagcttcgggttgctgtctaatttgatggtgttttttcagtggattctcaggggaagagtggtggtgtagctctgatgtggaaggtcgaagaggaagttacccttttagggtatggttctaattatattgatgtttcagtttcaagtggggagcaaggtagttggagactcacagggttatatggtgagtcgaataggagtttgaggcacaatacatggaatctgatgcgaactttaaaacctcgatcaaacctgccctggtgtattattggagacctcaataatgtcacttctcaacaagacaaacgtgggggcaatccttacccaagtaggctcgtggaaggcttttgtgatactttagaagattgtgggctcattgacatggatttgggaggttacccgtatacgtgggagagaggaagaggcagtgatgcgtggatagaagtcagaattgatagagcaggtgttactcaaacctggttagatttattccctcttgctaagttaattaatcttgaaatatctacctccgatcattgtccaatacacttgttgttagaaaacattgagagagtagctgttaaaagaaattttcggtttgagaatacttggctccgtgagccactttgtctgcaaattgtaaaggatatttgggatttgtactttggttgttcggttattgataaaataaattactgtggggagaagcttattgagtgggggaaggacttcacaggaaactttaaggactgaataaaaatgtgcaaagcagaaatgaaagtttggaaggcaggtagagacttggtttcagttcagaattataaaaatgctgaggtgaaattgtaagaagtgttattgcagaaagagattttttggagacaacgttccaagcagctgtggttgagggagggagaccaaaactctaaatatttccatgctacggctagctctagaaggaggaacaatccgatcagtaagctaagaagaaacgatggtacttgggccgaatggagtactgacttgtctagtgtgatagtcgattatttcaaccaaattttcttgtcttcaatggtggattgtatggaggttgtgcggtctatccaaaaacgagtttcagaagaacaaaacaacaccctgcttgctgctatagatgatg

SEQ ID NO: 1984 - DNA, 2058 bp, Cannabis sativa
ctctctctctctctctctaataatgaatctataggtagctcaaaaaattattcaaaacttatatatacataaacacccaatatacttataattatgtgtttattatctcctcaaaacactgcactaaataattagtgaatccgaacaaaaaaaaaagtgaaatatatttatatatattattaagaattgagagatttcatttcaaaactaattcgttatgtaaaataattcatatttttatatataactcaatattctatcatttatttttttcaatactctatcatttatttcttgtagacaatgtccaccatatatatatatatatatatatcagctagctattctatgtataaatgtattaggcgtataattagttcactacccaatacatgcattaataatagtttgaaattggtatagagatcctttagaaagtacttgtcataatggagaatgacacttacgagattcgaattggccagatggatgatagaaatcaaaatatatatgcgcgtcttatctacccatttgcatgtgaacaatgatacaaatatatatacatatatctagttatataaactggtagaaaggttatacattaaatataatattaacacaaaatgaaaagcctttaataacattgagcagcttaataatagtagttatatttttatatattgatatatatggtatatatatatatgaaataatatttggatttatttgtgcatacatgaattgtcaagatcatgaataagaagcaggctggcttattgtaaaagttggaatatatatttgtactttaaatatacataatagacaaagactactcgatactcacacactgcatgtgtaccacgatgagataaagagaagttcgtagaccctttttctttctttggtttaatttcttcttttattttatataaatttaaaacaaaatggattttgtgttgttttgttatttattttattcacgtctgtatcgaaattcgagatgtttatatatgtatcatgatgataggaaaaacaatgaacatagagatattaattttcttttcactctaggatgaaattagacaaagtaattcttcgcaaaaaataaaaactaattcttttttcacattaaaatatattattaactgttaagggatcttagtaatacccaatattactatatacccaacattactatatagatatgttatattgttattattagttcaatttaatataataatttgtatattttaattaataatttttataaaaaattactaacatgcgccactttataagtgtcacctcaataatgacgtctagctactaaaaaaggaatttaggcgattgtttttaacaattagattaccctcaattcgtaagactgatgattatgctcctgacgcaaaaagaaatggtataataagcatcggttataagtagtcggtattgagtatttttgattgttcctacgtcaaaaaggagagagaataaataattgttttaaatattcgataaggaataggcgaccatttataatggttgctaatacattacttgttgatttaacaccgagaacaaaatacaaaataaaaaaaaaataaccaaattagattttccttcatctccacaacatcgaaaataataataataataataaaagagtccacgattttcttgcaccatataatatatacatatcgaaaaatatatacaaaaaattcactaccacaactctttcctcgtcgaactaaccaatcgccacagccctatctttactaaacgatccacaaccaactttttctcgtcgaatgaaccaccactaaccttccctcgcaacaaaaaataatacttagatcagaaaaacaaatcacatgagagagacagagagagacctgagaggcaagcatctttgggattaaggttggtgcgatgggcaaggggtcaagcctctcgcggttcgtgctggctggtgcaagaagaagttatgggcaagggatcaaacaaagggatctgaaagtttttaccatgtgtattgagagagagagagagaga

SEQ ID NO: 1985 - DNA, 3386 bp, Cannabis sativa
ttgcttttgactcccccatacgaaaacgatctagtaaacttgtggcatatctttgttgagagacaaaataaccacctgaccttacaacctctaagccaagaaaacagctagcttctcccaaactcttcatctcaaagcgaagagacaaagcttcttgaagacgagtaatttcagcatcatcatcaccggtaataatcatgtcatcaacgtagagaagaagcattgtgcagactgagactgttttcttaacaaataagcttgagtctgcatttgaagatttaaacccacaaaactcaagatattgagcaattttaccgtaccaagctcgtggagcttgtttgagtccatacaaggccttcttaagtcgacacacatggtctggagattcctcagatacaaatccttggggctgctccataaatatatctcgatctaactctccatagagaaatgcattttttacatctagttgccacagtttccagcctttgcaagcagctagtgaaataattgttcgaattgtcaccattttagcaacagggctgaacgtctcctcgtaatcaagaccatattgttgagtaaaaccgcgagcaacgagacgagctttatatctgtcaatagtgccatcagctcttttcttcaacttatacacccatttgcaagtaattaaatcaacattctttggcttgggaacaagctcccatgtgttattcttatttagagctgatatttcctcttgcatcgcttcttcccatttagaaacacctctagcttcgctgtaagacttgggttcattttcacatgaatcacccattagaaagcaagacacaatagagcaactattcaactgtacttcataatcagttaaatattcaggttgtgttctttgtctggaagacctccttacaacagcccttgtagcttcactttgctgacaattttctcccgaagtagcattactctccttttcacttgaaccttcctcattagagaaaggtgacaaatcagctatacctctatttatatttggattaatttgatgtgatgaaacttcatcaaacaccacatcacgagaaacaacaatctcctttgtttctggatccatacatctccatcctttcctgtgtgtatcatagccaacaaaaatacactgccttgcctttggatcaagtttagatcgtttattttttgaaatatgaacataacaaattgatccaaaaacgcgaaaataactcacattgggtttatgatgatataaggcctcaaaaggagataaattcgatcccgcccatggaggtagacggtttatcacatgacatgcggactgaatagctgctgcccataactctcttggaagattcttttcatgcaaccacgacaaacacatagaggtgagatgtgccaatttgcgttcagccactccattttgttgtggagtgtctggacaagtcatttggcgctgaattccattggctttgcaataatttagaaactgatcagacatgtattctcctccattatcggtgcgaagacactttatggacagcgaaaattccttctccacttgctccttgaactgaataaatttggaaaaagtctcacttttagtttccaaaaaatatatccaactaaaccgagaaaaatcgtccacaataaccataacataacgaaaaccagaatagctgggtactcttgttggccccattaaatctgaatgaaccagttgcaatgccacagtagctctgttcattgagtttggaaaaggaaggcggtgcgattttccatattgacaaccaggacaaaccacatcgtggtgtatatccttaaagacaggaactccattaagaagtttcttcgtagagattttctgcagcaattgatagccaacatggcctaagcgagcatgccaaagtgctacactagaattttgacctgtcttttcaacatatgcatcacttgcagacaaaacatagagtgaatctttcctttttccagcaaataaaatatcagcctcaagatgttttatattggaaataattttcacatcatttggaccaaaaagaacatacctcccagtgtcagcaatctgagaaactgaagcaagattcttctttaagcctggaacatgataaacatctctgagcgaaacatcaccagtattagagacatttttctcaccattaaaatgtccttcattcactacaggatgtaatgaattatcagccgtcacaatgactctttttccatgatgggaacgaacatcagaaagaagagaaacatttccagttgcatgatgtgagcacccagagtcaacaatccagtcatttctatagtctataaaagcattagcatgcacattagcaggtccatccatagcctcaattgataagcattgttcccatgtgtgttgttcagaattaatgctttcttgtgcaatatttgcttcggcttctttaagattcacacgacaatttggttgaatatgaccagattttccgcatcgattacacaccacttttacacgacaatcacgtttgatgtggcccaactttccgcatcgaaagcactctcttgagtttcctttggactgcctttcatttctggagtgcttgctgccttctgaaaaatgtcgttcagttttgttgtgcttatttccgttagatttgtcttttgtatagagtgcatcttccacctgggactggggatgcttattgttgccaatcatttgtgtcaccaatgcttcctgacttttgagcagattctccaaatcaacaatagaaggttgatttacccacccttgtatcgaagagataaagggcataaattcctttcgcaatcctcgaatgagataacgacgcaagcgagcttcactaacaggttcctccgtatctaactctgaaatttcagcacacacagttttaattttcaaaaaatattctgaaatagataggttaccttgagtcattacagcaagttcattctccaaaaactgcagccttgttgtgttcttttgagtaaataacctttcaagtgtgtcccacacttgcttaggtgactttacatcacgaacatgctcgatatactctttgctgatagaagttcgcaaagcaaataaagccttgccacacttgatcttccactttcttcgtatgtcagcattctgtggtgtatcttctggaattacaatctcatcaccagaaataagatcccacaaatcttgcccttgtagaaaagcttccatacacagcttccagtaactatagttgtcaccagaaagtttgtctacacagatattgcttccaccattcatgatcactgagtactcaatccaaacagttgataagcaccaagctctgataccatgtaataaaactacgaatagaggg

SEQ ID NO: 1986 - DNA, 2366 bp, Cannabis sativa
cattttaagaatatagacaggaaccaacaactgctttttgtttgttttctttcattattttggtatatacaatctaggttaaactttataatagattctctaacatatctaagttaaattaaggatatcaaaattataattcaaataagtgtttgatatttatatgattataaaataaattatttgaatcttaattttagtatcttaattattttttaaaaaatgaaaatttatgtgaaatcttctatacatcatataaaaaaaaattacaactcattatatacgacatattaaatacagcacatataaaaaataattactatcattaattaaaaaaatacaagaagcttaaaaattcagccacaatatacatcatgtgatactttcactatcaaacaaaatttaacaagttaaattaaatgctcattttcccaataactacgaggtaaccaatctcattggattggttaccaactcattttcaaactattaacacatattacaaatctcatttttaaaagtaaaaatattttaaacttgccaatttttttttctggttcaatttttcttgacaaaatggtggaaatatattcaaaccttaaaaattctatgtggggtataaataccaatcgagtttataaaatcaattgcatagcaatattattacttttaaaaaatgatttgtcactaagaaaatatattaactttacctaacattaaatgtactttgttgtattatacctaccaaattcatgacatccgtgattttgtgagggaacatgaaaagtgtgagccatacacaaacaatattactaaatgataattgtatacaaaaataatgtttaggatcaattatccttattccaatactgtttttattgattatatgtatgttatttatgtttttgaatggacgacacgtgacattttcaaaatataattagtttacataaatctaggctcaagtcttccggcatataaaagtctagtccaagttggagttgagcccgagcccaactaaactccaaaagccttgcctccaaagacaaggctactatgcttccggaagcctatccaaccttccaagagatagaacaaacgaagccctccgaaaaattgttgagatacattcgaagaggtagtccaagaggtgtctccaaaaacttcttccagagtgacgtgattgccttctgacgcctggttccaccaaatcagattatgttcctatatcagaatatgatagtgcacgcaccaccaaagagagtatatcctctttgtccaacgatgtctatttgacattcttgtccactgtagaagctcttgcgtgtgatacctgtctagactacgtgggccccatttgtacagacaccttcaccccacgagccataatcttgtggcctcaaagtcatgaaataatttgtcacataaatatgtgtcaaatttcagtataatttataattgaagaatttttaattttttttatgttctatttataattttacggtctaaaattttaattataaaaacacatttgtaaagtttaaaaattatagaaatacactttgatcagaaaaagtaaaaaaaataactaaaaaaaaacaagaaatcaacctcacgacaactataaatcaattataaataaattataaaacaactaaaaataaccttaagacaactataatacaactacaaataaactataaaataactaaataaatggtttattacttttacatgaagaggtatttttgtaaataaaaaagttcaaagagtaataaaatgaaaaaatttctgtgttgatgtatttattaaatttttgtgtaaatttttctttataatttatgtgtgtatgtatatcaaaactctatatttttttattagtgccattttgttatcttcaaatataaaaaggaaattacaatattccttttaaaaaaatcgtatacaacactagatcaagatttgtgattattccttttcagtaaccattagggtaagaaaacttgggaatttattccatgatgaattattctagtttgtttttaattttattttttagtgtccatgaattatatattcttttaaataatagttggaaataatagttggagtgttcattcaattaatgttaatgatgaaattttggaccattttagatatgttcaaatgttgagttcgaattctcggatagtagatgttttcatttttgtgaattcgattataaagatattggattcatgtgtttagaaaattcttattaaaagttggattatatagataaaaatgtttgcttgaattagatttgtctaccaaaaattgaggaataattaaagataacatatatattcttcaattttttttttttt

SEQ ID NO: 1987 - DNA, 884 bp, Cannabis sativa
cacatagcaacctacatattacataacaacttaaatcgcaacctaaattcacatagcaattaccggaacaactactgaaacaacccaaacctaaaaattaaaaaataatatataaggtgattctactattttttttaaccaaataataataataataataaatagagatgtatgtcttagttggttatttgattttaattattttcataagcttctccattaaccatcattaatcaatctttttaaccctactccctggacagtgatattttgccaagaataatcaaattctatgaaactttataaaaagaagaaagaaaatataaatataagagactactagagaatacattacacatgttacttaaagttttctgcctaacattagtggctatgaataaaatgaagccgtttttaactttgggatcacaaatcaacacagctaaattaacaactctaggaggacgtaaagtcacaaaaccaaaccaacataaattggaatgaagaactggagaagtagagaagtagcccaatcatgcaagttggctcttttaaaagactatatggtgaaccacgcacgcattcttatccacaggttcaaaagaaaaagaaaataacaataatgtatcacttcaaatatcttccttgattttcacgaaggaaacaaaaaaaaatgttagtgaaaataacctttatgtacataaattattgaaaacgttgactagatatctgaatcatttggctgaacacacttggattggatatcaaatatcatttgtgtatgttggcttggtataaggtggatgcatagtgtatctgcagaaaaaagatcacaataaaaaatcttgatatttttagttaaaatatacattctcacaagttgg

SEQ ID NO: 1988 - DNA, 2424 bp, Cannabis sativa
gttaagctgaggagtatgtctgtaacattattatgggtgtgaacgcagcagtgtgataatcaaaaatcttttggtgttaatatatagtttattattttaccaaagaaaaatatagtttattattttacaatcttgtgtgctgacaaatttactgcctcatctctgtgtatgtataataatattttgcgctgtcacgactcacgggaacttgaaggcaccaccttttttaagggaacataaataaattgataaaaaggggtgaatgaaaacgttgaagttggataatttctttcgtgtaacttttgttttgttcattctagacattatatttgttgactgactcgattatatatggcatagataaagcaaaagagacatctaatgggaatgttggtcggttaagctggaccatcattaacttttccaagcttgatattaagaagctctattcagatattttctatgcaggaggatacaaatggtaactaaatctttgttatgccttacttttggtattattattattattgagtcagttttaattaaaatgtgcaggagaatagcaatttttccaaaagggaacgaagtggatcatttgtccatttatctagactttgctgattcgaaaactcccggttggactgtaaatgtccccttttttagcatgtcgattatcaatcaaaatcctatattaacagttacaaaaggtaggctagctacttattccttgagtttataaactattagaattctcattttagccaaggttgtcaaaacatgttgattcaatgtttcatgttttgcaatatgtatttattatatcattttttggaccagcagtaggaacttatgtgcccttatatgaaacatagtttataaactattcagtgtttaacggtttgatgggcattttattttataaatctatgaaccaaaaaaccattaatttttaactttatgttaccaaatggttgtagtactttaggggctaacattgtaaggagatgatgttcgtatgaagaagggaatatctgttgaataacacacaacaaaactgggtactggcttttaaatttctgttgtctgctattattgtgttcttttactatttacagaatcagaacatgttttcaacgccaccgagcaagattggggtttcacttcattcattcctcttagtaaattaaatgatcccagcgaaggttttcttgtgagagacgtttgcactatcaaagcagaggtttgtgtgtgtttaagtttaattattgcttaagaaactttggaactaagaacccatttagaaattcatcatgttaatgacaggaactaacttctgaactttttattttactagttcatagttaagaaactacttaactactctgtttttctttggtcaagaaaattaaacatttatgtgcttttggaattacaatgcaggtaaagttgaatattgaagaagacgacaaagacaaacatgaactgtctgatcaggtgaacactgatatgcatattgcttattagcttcttggtggtatatttataactgtgtatattatatatatgtgtatattatatatatctacattagccatctaatcctttcgttacattgtttcagaattctgcatttgtaaaagcagatacaagtacatccctttctttttctgaatatgatgcattgtttatcggcattcaaaaactactcgaaggagagagttttaagtcagacaacattacaagcagtggctgccctccttcctggaccgtagaagagattgcctatgcaaaaaaaatcttaaaacaatgcttggatattgatcttgatagtgtcatccaattgggtagagatttcgagctcaagaaatcactttcaatcctactaagtagcaatgcctttccggagaagatgagataaccaagtatgtggctaactttgtccaaagttgtgagcaatatgaagttgccaaacaagacctaagggaggtccaagagaacgaaaaatcaatagaaattcttaaaactgatatgaagaatatatcttctgaatactttccattaagaaatcaagctgaagttgttgataatgaaatagccgagctcgaaatacagttgtccgaaaggaagatgaagaagaaacgacttagtaagatgcttgaagttttagctggtcgggcaaccacttctaaacaagcactggtcagtgctgaacatgatcatgagaagctttccgtgctaaagaaagtagaggcagagaaggtgattggtgacatgaaaaggtcatgggagtctctaaagcttggctattctaatatgcttgtgtaagtttttagatgatgttgttaagtcttttgaagtagtttactagtttttcttctttagcatctgcgcattcacacttttggagactagactgtggttgta

SEQ ID NO: 1989 - DNA, 3306 bp, Cannabis sativa
tctctacaacctgatatacagaaaacccaaatggaaaaaggaagagagaatctctaattagatagagtattgacagtgtgtgtaagaaaccctgatgcagctcagctcaaaatatatacacacataggtatcagatacttacagactgatcaactatagggatgagtgactgcagcaccttagccacgttgaacttgatgttgggcactctaaagtaaatattcaggggagtaatcaaaaaccaccaaaccagatcaaatccttgcttcaaataaagtttataggtcaaaaaaattaactagatacctgtcctttgatgcattgacaacggcaggcagcagttttgaacaggtaatttctgaagacatgactggggcaagaagagagattgcatgcaatatagtcatgcgatacaaataatgtgggttgttaatcatctccaatacctgcccagattacatgaaaatttctgctaatttagagatatatcagtatatacgtctatattcatcaaaagtgacaaataaaaggggaatttagagtgaattagaaaccgcctagtatgattaatacacaaaaacagaccaacaacatgtatattctcattgtaagcagttacttaaactccatcccaaaagttttgttccacgtgttagccaaaagaaaaaaaaattgcaacccctggagttaaagaaattgcaaagtcaaaaccattaataaacctggggaattatatgctgcattgcccagtctggaccaaattcttctgcaagacgcttcaagttgttagcagctgcatcacggattgaatgaacctgcaatgaaacaccagaataatgagcaacagaagaaactgcatcagtagttgattatagttgacgtgataaagcatagcttacaagttacaaaaacaaggacaaaatggatgtgaatgtcagaaaaggggaagaacataacttgcatttcgttggaaggaatgaaaacacaagaacgggaatgtgaatagaaatagggtgaaattaaattttaagatgcataaaaagaaattgataaaaaaaaatatttttttttcatcttgcattggaatagtctttcttccatttcaaaatgaaataagcaatccaccaaaatggtggaaaggtcattcattagaatgacattctaatactttgaaatgcagccaaacaaaacctatagtgatatgttgttcaaaattggtagcatgcaaatcaggattacacaaaccttatcttgtaaccactgcatgcaaagggcgccaagtttgtcatcaaaaaagcctacacccaattggctagctagtaaaggtatatactctataattgctaaccggaccctccaatgtctatcctcagcaagctcaacaattgctggtaataaggactgagacagcagatctattccaataacctgcacaaaaagcttgttcaatgtgaacactatcaaaaagaaaaaaaaaagtatttaataaatagatagtgcattgtgctctgcaggtagaagatgtggaatagtgaagaaaaacataaacactaggtaactaattaattttcagtcggacctgattcacttgatcaagcttgctgataatattaagccgcacatcaggaaattcatccttcagaagagagagaaaaataggaaggagctgttcaattgttgcatcctgcattgaccagcaaaatgagctcttaaaatcacatggcagtttataatattacaaatactaaaataatgttgaaagaccgattgcatattccagacccaaaaaatcagcacgagagaaactctagcatttgttcaaatacatttctttcataaaaaacatacattacaatggaaagaaagtgacgtaattccattaacactagctcaaaaattaataggggacgttaacaaggataaaattactaatgaaatggaattctacttcgtcatattaacgatttatgtaaactaccccatcatgctttctcaagatccttccgcaacatctcaaacactatttctctcttgtttgtaaggtacgatcagcaagaagactagaaaggataaaggtgttatgatttggggagagaaaggattaacaatctgttaggatcccatatatgccttaaaaggttgtctctgcccacatccacatggacacaccccctctaatatgtttagtattttggaagtgaattatacatcaataattgtggcaaatagtataagagcagatacccttcactgggaccgacgtcacagaaaaagcaacctggataaaattgcctacacatcattattaagtgtggttttagtttgtagaatatattcactcaggcaaccttcttttggaagctagtctttcgtgatagtttacctacgtggttgtaacttagtcccttgaactgtttggtacatcaaatgataaatactaactatttataaataaaatgttactatgcctaatcattttcggagggtatatataaatatatattataaaaaaaataaaaataaaaaaagaggtttttatcatcggaaggatcaaaaatggtgagcccaagagatttctgttgcacttctcatttacacctacaatctttcttgccaaacaagtttttctttatcaaaacccatcaatttcccttccctccactcccacttctccaatttgctaggacaacaattaatccatcaaaagctcaagcaatatttggcaaaggaggacttagatggatggaatgagtggaggggcaatgatagaaggcacaattccttggttaacaataatgattgtgggagagtagagtgaattgaaggggttagttcgttagaaaagtttttggccaccattttgatccttccacaacagataagacttaatctctcatctccttttctataccaaatgaaaaacattctcttttaaaatcatcaaaagatgattacaaggaacatataactctttacctatcatttcaactctccaaccctttatctatcatcgctcttatttgggtctaaggggatgtcaaacattgagcaaaagaacacccgcagaaacattcctctactacaccatccaaaatcaaagaaaagaaaaagaaaaggaaaagacaatccaaaagagaaataatgaaagaattagactttactataatttctaaacagaaaaagagcataaattaacatcccatcagatattgttaggtgcaacacggagttcttagagcttggttatgagaagaaaaaaaattctgaacaagatgcctctcttatgatattcttacctttcctaag

SEQ ID NO: 1990 - DNA, 1251 bp, Cannabis sativa
aaacttcacgtaattaagaaaaaagaaatatcacaattgaaaaacaaccagatgtccttccaatcaacatttggcagcggttatattttataaactgagaattatgattttaaatgaaaagactacatttgaacttagaaaacaaattatcaatcctatataacactagtcagaccaaatagcttggtttggttttcattcaaaaatttcatacccatcaaatgctcttataaaagatgttatatgtatcgactttctcagcaataccacagcaagtaagattacttatcttaaaaaagattgtcaaaattacaactatcatctaactagtattttcaccaaataattacagttgtcgagtatgtcagactgtacaatcgaaaattcccagaaccaggttacctgtagcacaaagaaggcaacctccaagagagtaccaggctttagttgagttcctcttgaaaaagtaatatatataaactggattaaatgccctcaagacactgctgtcatatttaacaatattataaattccaatgcccgcaagagaacaaaaccatataaataaggcaggacctacagcaaggccaactttacttgtcccatatttctgcacactgaacaatactataatgaaggcaactgaaatcatcactacttgttctgcaccaaaatgtgaatgaaaaaaacacgtcaatatatatcttaaccagttcactaataattcaataacattaaacatctggcaggatttatgttcttcaggagtctataatagctacatataaataaactcgttgacttctatttaatactttcttcaatttaataaaattcacatggaggccattcaaaattcacattatgagatcaatgacagatatttaccaaccatagtcaatcattgacaaagtcaaagatagttataagcaaaatcaacacaataacacatatacttagcacaaaagactgacataccataggaaataaatttaatatatatataggagaaggcactctataatccactgaattttgtttagtgtagttgtttatccccttatctttgaaacataaccaatgagtccgaaaatctacaactgggttatgatttcccctgttagggaagacgataagataaggaagctacagaggaaattttataggataagataaaatgtcaagtaactactttggtatattttgtaaaaggagttcaagagtgaaatgtattctaattcaactaacaac

SEQ ID NO: 1991 - DNA, 4361 bp, Cannabis sativa
agttaagcatcacatgtgatttctttttgctttcttataattcatgtaacaactaattattattcttagctagctagctgctgctccatcaacttcattatccttattaataagttctaataatactcaaataatcaaatcaaaaagtggttcaaaaggaatttatttttggaactttcaatcaatcatcacccactaaacaaaaaagttttaaccctataacacatgatattagttatgccattgctatatgagtatttgtgtcgaaacatatcctcctctagtggggtcaagagcaaaattttaaaaataaatcttttatttaataagaaataaaataaaatttaaatcatttttgtagcaaaaatcttttaaggagccttataagctaatgttaaaaaaaattgttaaaaagtgttagtgcttctcttaaagcatcttcaagagtaggattgtaaaaagagagtatttcacaattacaccaaaacaataaaaaaattacaaaatccagtttcacggaattttaagcatttttacgattttcttttagtttatttacagaaaatacggttgttgtactcttgttaatttgttgatgattttttgttatctatatgttattttttttgttgttgttttaatgttatttttatgtattttttttttgttatttttatgttatttctacgaaaaaccgtaaaaatatatatatataaaaaatctttaaatgtaaaaatataattttttttaccaaaaatagtgccttatgtaatgatcccttataaaaaatacttaatgaggtggaaagcttaaatggaagaataaatgaatgctatagtagagataaaagaattatatttttgaaatttacattaatgccacaccatggcattgatgctatatatatttttttatatataaaaaataaaaaatgcaatatatatataagatttttttaaggtagggaattttgaaaatgcctgaggatttattataaaatgggccccactatatttttgtagatataaaaaggggtacatgaccactacaatgtggtgtagtgtacgaaattaatattaatttttactgtgagtcccacttatttaatgttttgttttttttttttttgaaaaagtttgtgttttttatcttaaaaaacttattttttttactatacgatggtctgatcaatctcaactgcactgcaaaaaatatttttttattattattgcataatttaattttctcattaagtccgaatatggtatctgttagattatgggaccggagtcttcgagtggcggaatcaccgtgagcgggttgagaaaccttactaactagagttttaccttcgttgggaacataacgaagctcaaatagaatgacctggtctcgattctctccatcttcgctacatcccataaacctttgcccacaaattctgttactcgattcctgtgatcaaaggcgacaagtaccttctaaagacaccctattaagcatggaggtctgattgaggtgataagtcttcggtgttagatcagattatggaagaaaccaaatgcagtgtggtggatacgaccgaggactacgccaatgggcaagaacaataataaatttttcaacgtatcatgtccatatttatggcttaaaatatgggcatagcaataatatcaaattgttcaacttatatttataatcaaaatgtcttttataagcttttcaaggtataattcctaataaaaccatgtcacagagacaagagtaattaaaataacctaaacaaaagacactcaaaagaataaataacactttttccttgaactatgacccttataaagttttatcttgtgattttttttttgttgtggcgaaaattcttttcaaactatacaaatcgctgtaaatatccaccttcaattatatgctgcttacttttttaaaataatttacatgagttacaagtatagttgtagtatgatggtctatttaacaattttaaactacttaaaatccaacttattggctttaaatatacaatagctctaagaatgcctatacatattttcttatgaagagggggtaccttagcactagtagattaaaaaccaagaaaaagccaacatctaatacaacaaggaaaggaaatgacaaaagccaagaaacatcccaagcaaaaaactagagaaaaataatagcccaaatgctagagataacaaaacgaggggacctcttagacacctttaaaataactcaagtactcatccattccgtataggtatttagcacctcatggagcacttcgttccttcttaagacactactacacttttttttgatagcccatttcaccacattatgagccatgaaatcgcacttttgagagatatgcaaggcttctcagcctatgaacttcttataatttattataagtctattatttatgtatgtattttttgtctaaactttttattataccatgttaacgtctcgttagtgttatatcaacaaattatttaaaaagatgagtcgaatatagttgtaggaggttatttacattaatttttataatccaagtaaatttttgcaatagaataaaatttaagaggcgaaattatataagaaacataattttggggacaaatcatatttattaaaagaatattaataaataaaaaaaatactctcatatatttgttattttttataattattgtagtataatatctttccttttttcattcttctttagatttggaaactgtttacttttcttttcggtaggataagattataaataataagacgtggaaaatgagtgtgctagcctttgcacgtttgaaatctataacatatttcatttcaatatatatatatataatttgagtaatgtttaaatacatactcaaattgtacacacttatcacaatgtgtagtcatttatatttttaagcaaaatcataacacttttagttgtataatcgagattaattacacatcattgcatataaaaagtttgtataatttaagcgaattccaatcatttttctaataataatgataattattgttccatcaaaataaaattaaaaatataataatatttttttgctaataataataaattgtccaattttatcaagatgcatatttaaaaaggcatgaggttctctctgtttctctccatggggtggaggaagaaagagatctagaagctgggtatacaagtcattgggcatgttgaaaaggagatcccttcgatctagatggtgagtgaagaagctattgaggactttcatgatacccagccgggtcgaggtgctgaaatgctccaacaggcagagtcggtgcagaagggttcgtgggctatggaaatggaggaggtggattttcaagcttcggctaaggaaacctggaacaaatttaaggctaatcaagtaagaacaccctctactaagctgaaatctactgaaccattgaaacatggtgatcaattaattgcccaaattgatttagatgagtttgaagctgaagcttcactgtggaaaaactctgtgatatgtgtttttttggttccaatccctcttgtagaagtttcaaaggctttataaagagaatgtgggataatttgggtgttgagagaatagtaaggatgcactctgagtttacaatgttctgttttcatgatggagagactatgatttggttcttgaaactagtgtgattcaattcgacaaaaaggtagtagtgattagaccttggttaattgatttaaactccatcaatctcgtgaaatttgttttgatttggatttggttgaatggtttaggtctccaatattagggtaggaacaccttgagcgctgttgttagcatgtcttgattttggctcgaagttgaacttaactcagtagcttcaagttaaagattttactaagaaagatgtgaaggatgcactttttcagtattcattcgtctaagagccttggtccagatgggttcggtgctggcttcttcaatgtagtttggaatgatatcagtaataattttttttcgactattctctccttttttaatgatggcttgattcttgatgatcttaacaagatggatgtttcttttataccaaaagttaatgccccttcttcagctgttgattaccgtcctattggttgttgtaatactttatataagcatatttcaaagatgttatgttcccatttgaatattgttttgcctaatctcatccacaacaatcaaggagggcttattataaagagattgctaatgcataatattttaatccttcaagacttaatcaagggctatacaagactaaacatctcagctagatgtttaatg

SEQ ID NO: 1992 - DNA, 1032 bp, Cannabis sativa
aggagaaaaagtaatgtttaccatgacattgtaatgcatcaaagtatagtccatatcatatccaatggcactaattgatctgagattcaaagttctagtgcaaaatataccacgaggtgaatatctggatgaagaaggattctacagcaggaaaaagtgcacaagttcagtaaagctgtcatttttaataaagggcaaaaaagagagattgtctaagagagtagaaaaagcaccggaatgccaaggtccctaagcaaattctcagcttcttcagcctccatccaagccacttcttcaatggggccttctaatgttgattgaccatcaactgctgcaaaagaaaaagtgaaaagaactaagcaaaacaaaggggggaaccaaaaaaaaaggcaaagaaacgattttgatatatacccaatgagtgaatatggtccaagttgaggttcaaatctcctttggtactctctcccaagtaatcaaagtcactggaactagaagaagtaactgaaaacacatcatctccaataggggtctggttagcagtggcacaaccacacttggtggtggtgacagcaaaggaaagcttagagttggagaagttaatggtgttgttgttatgtgaaaagggtcgtaacaaaagaaagactgctgcagcgggtgcttgcgagacatacatcttcttggtcgctgtgagttgttgtgagaatgtagaaaaagaagaagaagaagaaaaagagggaaacatgggaaatatctttctactctgcttgactgttactacgagtcttctactccttcgaaagcgaaagacagggtcttgagttttgggctcttgctttgagagtccaagaagctaaaggcctttcctctattcatgtttaccgattaaagttgtaacctttttacaaatcatactttttttttacggaaaattaaatatttttataatcatataattttatggctaatgattccaacccgcttcctctttttgtggtttaagttacgcttttgttgttttttttttttttt

SEQ ID NO: 1993 - DNA, 1081 bp, Cannabis sativa
ccaaaactgggtatcagatcacagcctcaaccacggattcttttttaaggagaatcatctgctgttgtatcaaacatgtttatgaataatagcaatgcctctgctccctttccacagaatccatatcaatctcttaccatgccacttcatacaaatacaacttcccctataaccaaatgtactccataaccattgctgaatcaaacatgttcatcactgaacgctctacatctcctaccatacctttaactacaagtagcactgtcagtcagggttgctctgtagcgaattcacttccccataaccttacacccatcaccaatttagacaacatttatacccctgatattagctctgctaaccatccacacattccatttacaacctatccaccaaatctactgcctaatatcagcaccagtggcagttttttacatcttcctttctctataaatccatctctgatgaccattccacccccaattacatccacaatatgcaataaactagaagttagtaaagaaaatatcaaccccaatagagtttttaagaggcacactgatgctccatctatgagacaaatgcttaagagattttgacaccagaataataatgttgtcattccttcatcgtcaaaaggtgactgcacaaacaagaatgtttccttggtattcaaggatattcagacgactctgtggagattgctttgcaatctcggaaaggaacgcttggggattggggaacccgagagctttaacacatctacgattgcttgttcagcagcaatctccccatgttctctttcttatggagactcgactcagtaacaattcattaaactgcctacgaaaatctttaaaattcacccacggtctggaagcaccaaggataggacttagcggaggtcttatgttgttgtagaaggacgacattaatgtcacccttaatacttttggttcctcttttctcgaatatttgttgattgcagctggaggcccacaattctattttaaagctttttacagagcacctgctgcacaaaatagatctaattcatggacacttctttgtaggcttgcag

SEQ ID NO: 1994 - DNA, 3687 bp, Cannabis sativa
caaatctttccactgcaccaacaagtaagtgagatcagccactctcaaacactaaggttgatgcaaccattaaacacatcttatcatttcggacaaaccttctttcaaagcgttggaaactcttgtggtattcagttatcactacatttgcagcctctatactcatcattagaatcaactagagaaaacccttttatgcattcacaaagtggtctcttattttgatctaatctacatactctattataaccacaaaccccactatttccatacgcaaatggctgtaagcatatgttatctggtatggaccaaacaacagaccaatcactttccttagtgaaattcttagggtgactatatgtggtaaaaacaccatcaaaatcaagagttgctttataataataatctgcaatagaactactccctgcactaaacatatccctttcattattcattaaatactagttgcttactagtattagtagtttcctttgtgtagtaattggaattgagatgctcagatggcaagttcatggtataaagaccaaatttcccattagtcttcaaagagagctgaaaccttcctttagaaaagtttgtagatgatatccttgaagacaccacaactcccttttccaatacttgtgttgtgttggtaaaaaagtgtcagtaagatggttaaaactttcccatatcttctcggattttctgtcgaaaagaacaaagttaccagtatcattgaaaatggccatatctgcctgacttacaatggtgccagacttccacaactcctgatttcgagggccagtgagcaataggcctctgtctgcagtgagctctagtttggacccttttggggtaggattattgggagtgtcagcataccatacaactgttttcccaggcaatttgttgaaccatatggctaacaagaacagatctttattgtgagaagttggtgaaatcccaaggcaaattcacctgaaggagaaagccacgagaagaccttatcaccagctgtgagagtagcaccagttttgatagtgccattgccattgctgttctaagccataagctaaacaacaaggaattatgctgatgatgagataatgaagaaaggaaaacattcttttttatataatttttggttgcatagctattggtgtgtgtttaactttatgaggtcaagccaccttctttattaagtttgataattcaaattttgactgacattgttcttcttaatatatgtatcatatatgaattgagaagcttgaattattattattattattattatttatgatctttaaaggagcttttgattgattcagtcaatttttacttttatttttgtactatttgtagtccaatacacggtttcaaatcaaaatgagaaagagaaatagcaaattcaaccttggcaggttccaacatttattacacccaagaaaatatttgtagcaccccattattaaattaaattaaattaaagcatgcatttgcttttctttataatactcaaagaagggtctttgtagagcattgtgtcatttgtgtgttagagtaactaaactaccatgtgaaaatagagtcaaaaaaaccatcttaggacaagtcattaacatttttcaatcacctaatggctaattcacctcctcctaacatgaactaaactctttacataaaaagatttccaataaaataactcgatttcatctccatctcgatcacaaacaatgtctcttgtatttcgtgtatgaatgttaaacgactccaatttatttacttcgttccaaagctgcattagaatctcatcattcttccaaaatggcgcctcattgtaaaaacattttaccggattagcatgaacatattcagtccaagaacaagaacctgcttcagaaacatccatcttgaagatacgaaggattctctccttggcacttttcacaaacaacacaatcgaatcataccacaccgaaaatttgacatcatatttattaatggtccaatattcaaaatctggcaaatgtatgaaatggaattcctcattactcatattaaaactgagaatcgatgtgaatccattaccagttcgattaaccatccagtaacaaactcctttctaacaaaaacccgaagatagttcaccatccgttatgtcttgacacatttttatctttctccaagaatcagaacccattgtgtaaacctcagctttgcacatgctttctccacaccatatggcgacacatttgtagtcgttgcttttagaatcatgtccaaattcaacgtaaggagatttttgacgaatctcattcttgtctttgttgaagcaagttttcaaataatttggttctgggagaatcgtggattctttcaaagtaggattacataacaacattgtcccaagttcatgatttattagcaaaattagcccatcacagtgacgagtgccattgctataaactgagcgataaatgtaatcagtatcaaacgagctttcgctgtaaataagtggtagactgagggcttctttgacggttctataatgcttgttctcgccatgatcattgccataggatatagtcaacaatgtgtgagtgattaagtgacgagtatgatcgacatggaggtaaggccctgtgaaaagtaaggttgtagagggatggtgtttggtaatgaagaggtgtttggcaacaaagtaggggtcgttgatgaaacccgagataagggaataccaaaacttgtttacagatttgatttgtactagagaatcagcaggtacccacaacatgatgttcttgattatttcctctggcaaattacataacctctccatttctgccataaggaaaatcaaacctatgcattcaagcaatgcatagaattattaattgactttcatagtaagagcaacatcaaatgtttataaattctataattttttgtacagagcatcaattcaaacacagagcattatgatcaataataagagatggcatgaagaaaccattatcaaaactaaaataagaaagcataacacatattcatatataacagtaaagcatgtttattatcaccaattgaatcaagaaaatacaaatcaagaaactattaaattaggttcaggtattatattctatttaatctttgttttgttttcctaactctagggattcagaggacacaaccattacaaaaagagagacttaaatgaaagtgagtgagtcactaaccagaaccaacaccaaagcctgtatggagatcagcaaatgggagagaaactgagtgtaaaatgggaaatggggaagaagagagctgacatcaaatatataaatattaaagcaaaataatgtatgttcattgtaaatgtcgctcatttatcatttggaatttaatcttaggatacaagagatttaaggtgttcttatcaagaaaagcttcttcttcaaaaaaaaaaaataataataataaataataaaataaaataacgatcagattggccaagctaccattacagttgccaagtacaacaagaaactcaattctaactcattatattcaaaattatctttaaataacacattagtattttattttcttaatagatggcccaacacattttatattaaaaagggttgatactattttagacccatttagcatagaataattaaagta

SEQ ID NO: 1995 - DNA, 1403 bp, Cannabis sativa
ttagggttcttcttcatgcattcaaggaaggttctttcgaagagggagcagttatttgcgcacctcgttccaccgatatatcattgtggacttcaaggtagagttctttctttctaattagtatatagtcttatgtgtttcaaatttgtatactttaggatacgttcggttggaaggagtgaaaacaaaagaatactttaagctaattaaaatgtgtcccttgaaccattgtgattgttggattaaagaatttttgtccaattccgttttattttactaacatgacgattatcccctactaaatcgtgcctcctaaatttaaatatttaccttatcgtgcttcccaaactctaacatgtatcaaattatgctctctgaatttttattcatatcagacttccgttagtaaaattagataaaaatcttgaattcctataatcgcaataattcaggacatgatttagtacatatcaaatttcagggggtaaaatcctaaaatttaatatacattgcattagaacggttttttcttatatttttcacctgaaatggaatgaaaatttgattcttttccattccattctattttattacatccaaccaaacacacttttaatcatcatatccttgacatgaacatgtcaatttcagttcagtgaacattgaaggaggacttcaaattcccgagtcagcagtaacatcatacttcaaagaagattcttctgggaaatgggaacttcaaatgcccgaagatcctactactaatcatcgaatgccaatcggtttcgtcacaactggatttgtcagagggaggttagttagtaaaagtaacagaatgaatgaacttttggcaacttcataccattcttttgtttttaaagtttcttccttttttgttttttcatgaacagcaagaagaagctagtggcggaagcattttgcgaggcgttgttacttgctcaccttcgaaaagagcaatggtggaacgaagaagattcggaagtaaaacagcaacaaagaagaaagaaagagatatatgttcttgttcgaaatctccggtccacggcatacagacttgctctggccaccattgttttggaacatcaagttgatgatgttgatttcctttgagtcttttgctgttctataattacttcaaaataattcattttaaatattaattggtaaaaatattttttttttagtgtaattattaattatttttaccacaaaataacaaaaattcatatgtaattaacagttaacaccttataacaatttgtctttatcctaatcaatccgattcttaattatttttaagtctcacattctttttaaaatagtgaaatattaactataatgaaaaattacaatataacctttatacagcttaccaaacgagt

SEQ ID NO: 1996 - DNA, 2919 bp, Cannabis sativa
agacattgtagatggccaagtctctaccatcttaattatgtaataaaatggagtattgtgacattaccaacacgccaccattgcattgcatgatgatggattattatttaaatttaacattaggtaaatttttttttttggtaagtaagtaaactttcattgatcaaaactatacaaagtaaagaaaatgcaaatcaaaaagcaatcaacaccagccccactaagtagggtcaacaagctaaacaaatcaacattatacacgacacagagcccaaaaccactcaatatcttcttttttaatttttaacgaaatgaatttgcttattctaatatattatatactcattaacaataaaaattaattaaaacataagcagtaaaattatttgtaaaacaaattttaattttaatcggtgttattttaaaatttggtaatcgggcttaacccaaaaacaaaaaatgagatcccaaaagcagtggatggtcgatcaatggttgtggttaattttagtatatggtgaagtcacgagaatgggttcgagaattggagacgacttttctacgaactgacttccaaaattaaattaatggaacatcttctggactgcatttccttccatatttccacgtgagtgtcattttccaattatctatatataagataggagagaatttcggttgtttattatttaattttgatcgacttaatcgttaacactttgtaaaacaattctttcaaatggctcttacttcgtctctcttccttagcattattttcattatattactgtatgggcagtctctgcatgcttcggaagataatcgtaaggtatgaaaatacttattattattattgtaagtcacacatttactataagggtataatactccattaatacagatattatctgctataattatcaggcatttatagtgtacatgggagaaagaaaacagaaccagccttccacgtcagcatctcttcacatgagcatgctccaaaaagttgcagggaggtatatatattactattattattataactaataaataattcttttcactacatgagtgattacttttaatatatatatatatatattcagcaatgttggagtaggatctctactccgcagctaccagagaagtttcaatggattcgttgcaaggttaactgaaaaagaagcacaacaattggctggtgtgtgaagcaccttatctctttctttattatttcccttatgattattattgaattgcttggctagagatatattgcgaagtatatattgtcctgtcgatcattttcatttctttttttataaatatataatattttatgtagctttgtaaagtctgtcttgttattactcaaaataaattacacgtgaccctacagtgtacacaacctcaaacatgcatttaattattagaatgtggtcgttatcatttctcagcattattactcttttttttactatgtgcgtcgacaatgacttttacctataatcgaaattaattgcttttataacattcaagcttagcaatatcaatcaaattcataaattgatcaatgcttcatatcgaatatcaatgtttttgtgatcaactttcaataatttagcgataaatgcgtttgtcaattacttaacatcattacattatcattttttttttcttaatattcatttattttttaaaatttaataaaacatgttaattattattttttgtgtgtaataaaagaaacggagggagtagtgtccgtgttccctagcgaaaaacagcagctgcatacaaccaggtcatgggacttcattggatttccagagacagttaagagaagtacaactgaaagtgacatcattattggagttcttgacactggaatttcacctaaatccccgagctttaatgacaaaggtttcggcccacctcctaaaaaatggaaaggctcatgccaagtctccgcaaacttttcttgcaacaagtaagtatatatataaatattcataatataaatcaacaatcattggattctactatgattttctccatacatgatttgtattattgttcacagcaaagttattggagccaagtattaccgaagcgatggttcaattccggaagatgatgttaagtcgccgatggacactgatggccacgggacacacacagcttccacagcagccggagggttagtaaaggacgccagttttttcggactagcctcgggcacagcgcgtggaggggtaccgtctgcgcgtgtagcggcctacaaagtgtgctggaatgacggttgtactgatgcagatattcttgcggcatttgatgacgcaattgctgacggcgtcgacataatatccgtttctctttcgtctggttcttcggattacttcaagaatgtcatcgccattggagcttttcatgctatgaggaatggaattttaacgtccgtttctgctggaaacggaggtccggagctagagactatcgctaactttgcgccttggactctttccgtggctgcttcaactactgatagagacttcttcactaaacttcaattgggtaacaacgtgtcatacaaggtagtcactcacagttaattagcaaaaaactatagagaaatgtagtcactttgattgtgcggtatagccttatttgttttttctctttctttctcctttttgttaatgttatagggattctcaatatctacttcggatataaaaaatttgcctatcatatacggcggagatgcaccagctgaaggttttgaaggttcatcatccaggtcattatataagttttctaatcaccaatttcgcaatactcattcatacttaagtataataatattttaatttaataagttgactctggtcaattcaaattgtatgttttttttttttt

SEQ ID NO: 1997 - DNA, 1174 bp, Cannabis sativa
agtatatggctaaacctatttatagacataggtaattaagacaacaaagaaaaaggggcagttaaattagttagagtaactaacttaactatcaatattcaaagtaaactagtacacgtgcattcatacaatatggagtcaaaataaaactaacaaatccccaccttgagtttaattgtatttaagaatggaacacttagaaagcataggagagatccttaaaacatcattcaaagatttgcaacagattgagacaatgatgaaacttgtctcttggtaaagctttggtgagcatgtctgatggattatctttggtggagacctttaggagcttgatttttccatctaatatagtgtttctaatgaagtgatacctcacatctatatgtttggttcgttcataaaacacttgattcttgatgaaatgtagagtacttcgactgtcacagtagatttccacaatctcatattgaattccaagttccctggtgatgccattcatccatagagcctcttggactgcctcagtacaggcaatgtactcagtttctgttgttgaaagagcaactatggactaaagattttccttccagctgactgtgtttgttgttcattttgaacacatatccagtttatgatttttttagaatccaagtctccagcaaagtcagaatctacaaacctcacaacccctgagtcttcaatgttaattttggtccatagattagtcccacatttgaggtaccctttagatatctcataatccatttaatagccttccaatgttcaacacctaattttcccataaacctgctgacaatgctggcctactgcatgatagaaatctggccttgtgcacatcatcaagtacatgatgcttcccaatacacttatgtatgggaactttcttcatgtaattctcttcttcctctatgcagggagcttggtcattagacagtcaaactgttgattgattggagtgcaaactggctttgaatcagtaaagccaaacgtggacaaaatatttgaggtgtatccttgttgagttagcttaattctcctcttagttctatctctatttatttcaatcctaagaattttcctttctgcacccaaatctttcacagcaaattctttgctcaacagttttttaattttgtcaattttagtgttg

SEQ ID NO: 1998 - DNA, 1130 bp, Cannabis sativa
tacttattattaatttttcttcatatgtgtgtagttctgggacatccgagggagagaggaaactaatgccaactattcaagaagagctggaaaggcggtcccttctgtacagcctcttgatgccagtgatgagccaatttgttccaggtttggaaaagggaaaaggaatgtatttcttgtttgtgaaatctgaggctaagactccaggtggactagtggctcgtccggttctaaccagctactacaagagctctcatttcatgaaccgtggccacgatgatgcttacaccaactacacaagcccaaacgaaacaatcttttgccaagactcgtaccaaagcatgtattctcaactgctgtgtgggctttgtcaaaacactcaggttgttcgggttggggcggttttcgcttctggattcattcgtgctattaaattccttgaaaagaattgggtttctttggttaatgatatcaggactgggactttgaactctgagattgaggacatggaggtaagagtttcggtcatgaaaattctcatcaaacctgatcctgaactggctagtttcattgaggctgaatgtatgaaagagtcatggaaagggattataacaaggttgtggcctaacaccaagtatatagatgttattgttacaggaactatgtcacagtatattcctactcttgactattacagcaatggtctcccccttgtttgtaccatgtatgcttcttctgagtgttactttggcctcaatctaaaccctctttgtaaaccaacccaagtctcttataccattattcccactatggcttattttgagttcctgcctgtgaataaaaaaagtggcaaagtttctgatgacccagctgaatccctccaccaagagttggttgaccttgttaacgtcaaaattggagaacaatatgagcttgttgtcaccacttattcaggtaagactcttaaatattcaccatataaaggtgtttatgttatacaaaactcattaaatagtgtgattttttttttctataaagatgggtacgcataatatatatgattttattttgaaaaatattgggaaacgtatagtacttttggcagttcctatatcttcaatcatcaacaa

SEQ ID NO: 1999 - DNA, 1090 bp, Cannabis sativa
ctatgaccgaggcaggcgaatgaaccagatactcatcagagcagaaagaacttatattttttgcataatcaaattcaggggagagccttgctagaaagctcatgatagccatctgctctcgttgacgttgttgaaccttcacatcaagactaaagggcaacatcaaattatgttactcatatgtcttcttgacatctataaaatggtttatgagggattgatcttattttccacacgataagatgccttgcacacgtcatacatgcaggagagatttccttttccagagtacaaaatttctaaataatctattagttctttaacaaattcatcgtgattgatcaaaccaatcacctcattttaatttgaattttgaatctaaagaaataagtgagcattctccctaagccatgttaaatcagccatctccttgaaatttgactttggaggatctcgagtcaagtgatcatctttgtcaatactttgtaaatagaggcgattagtcttgctccaatccaaatagtttaaactattgagtttatgattagtaattttagacattattgacaccacatccgtcataattgaagagttattttcagccataattttgaaccaacaaacaaggacaatagaaaagggaagaaccacaagaaagtacgacaaacaaacctcaacagtcacaaaaaataatttgatggaaaaaataaatacaaaactaagttaaaaataccatggatagaaaccggtagaaaaacagttgaaaaacatatggccacatgcctacatgcattggcacatgggagaagtcgccagatcttcaggcggcacgtgaggctcacatgtaaggggtccgaccaccaaactcttgggttactttgattagcggctgggcaatcttatggtgacggtagtaatgtgttacttgccctctaagtatggtttctaaaaaatggaaccccaacaaggaaaaaccttaattgcaatttttttaataaaccataatttcaaatttcgaattgatgctctgataccatgttaacaaaggcgaagagaataattcacttgtatttcattgagaaaagatagt

SEQ ID NO: 2000 - DNA, 601 bp, Cannabis sativa
tcttcttcttcttcttctcataattttatcttcaaaccaatctattttctgctcattcttttttacagtttcataattatttttccagaatcggacttcagaaacgtttcgcctcttctcctcctccgccagtaatgtcagctctggttttgggtttttcgatactccagagtcgccggttccgccgccacctccttccgttgaagtactttcctccgaggtactatactatcatcaactttcttacgtataatcaaatatttttatcttctttcaagctaggattatgtttaagttattgaatttaacttgaaataggcttcgtcgtctgtgaaatttaatgtggagcctgtgaactttgatggacttactttgctcaaggtcagtttttttttttttggttatgtctgtttggtttgttagaaaatcttgaattaggtttacatttccattgtcatagaagaataggttagtgtttttttaggccaatgatcaaagattctgttttataggatacacactggctgtttggtagaatcctatctgtttcgtttcgacatctagaagagcggttttggtagaaccatatctgtttcgacat

SEQ ID NO: 2001 - DNA, 1550 bp, Cannabis sativa
cttttgtttttatcataatggagaatatgaagtagtagaatatcaattgttctctaataaagtttttcgaagaaggtatagggaaatgatataaaaaacaaagaacttttattaaagtggaagaaagtttaagttctgcattgtgcttttgtgaaaggcaagaattgaacaagtctttaaatgcatgtcttgggatccaaagtagaatataatcacatttcctttctttgattattattgatttattatggtacatcttgcttaagatggaggtagtctagctgttctctttaacatattacatcacatcacacaccaaatgggctagaaaccaagtccacaatgactctattctgaatccattttgtcaagtcaatatatgcaaaagcctaaacttaataaatttaagtacgtgaataagatttattttttaccacattcaactaattgaatgtccaagaatatattttctctgtgatcacacaacctgcaccaattaagaacagaaaacagaaaaataaataaaaatataaatgaaaattacatgtaaaatataaatataaataaaaataaataatatatattggcccccataaatttctgagttggattcgtcattgtaatttacttcaaacaaagttacaaattatatcaccatggaagactatgatcaaacacacatagttcttcattacaacccctccaaacactctttctttctttctaatctcattttgtttcactagcttccaccccaaaaatagttggaatagacttctatttataggaacattgtcttctgtaatgtcacattattagtaagcatatcaacaacattgtcttgtgtgctgactttcttggcttgtatttctccttatgttgctatgtcattgatgaaatagtatttcatgtctatgtgtttagcccttttatgaagcatagaattttttattaggtgcaaggcagttatcacaaaatattgagtcaaacccttgagctagagtatttctttgaaagcttctactgctatatatttagcttcagtggttgaaaaagcaactattttttgcatattagatttctaactcactcacatacacaaaacaccaaaccagtaagagactttcttgtgtgtatatttgctgcataatcattatcaacatagtcatacacttctgtttgttgatcagactctttaccaaatacaagtcctagatgtgtttaagggcactaagtttgagataacttgaagtgtggagctagagtagacacttttgtagccttgtccatcttaaacttctccatgaatttcttcacatgcttcttctggtgcagcttagttgtccctggatatggtctctctatttcaataccaagtacactattgtctttgccaagacctttcatgttaaacccagtatttaggccttttaacttgtcgatttccctttttgcatttaccaacaattaaaatatcatcaacatataacaacaagtatatgttgtttaggtaaacacagagatcaaaattgcttttgacaaaactaatt

SEQ ID NO: 2002 - DNA, 1217 bp, Cannabis sativa
gaagaaattagatttttctttcctaagcaatcaaactaactaactagagttttcaactcatgtgtcatacctgagacatccgaggcctgcaatgagggtctcttctgatgcataaggaggcacattgcagcacgttgcaaacctcttctttcgagtaattgttggttaggcgcgggtctacaagtacatcaactgaaagtttttctagtaagggccttgcctgattcatattgtacatttaagttagttttgttgttcattaaaactacagttatagataagaaagacaagtacttggatttgcagcatatatttgtacaaatacacttgatgcacttcaaatagcaaacataaatgtatgagttttccaattcatacccattcagtaaggcattgctggcctttaggccggttaatgtccacagctttccttcctgtcacaagctcaaccagtacaaccccaaaggaatacacatcagccttttctgtgatttgtccactttgagcatattctggagccaagtatctgtaaacataggattttggattagtcacttgaccaaatattatgagtatagaactatagaaggaaatcttttcaaatcatggttttacccaaatgtcccaattactctggtttcgacccctttgcctccatctggttgccaccttgctagtccgaaatctccaacctggaaaacatgatatcaataaatgaaagttgaaacatgttctattgacacatacaagcactaaaatcagatatgaaaagagcacatactaatggttcaaaatcatgggtgagaaggatattgttaggtctcatgtcgcgatgaacaatgcagcccactctacactcttcgtgtaggtatctcaaccctctggctgctccaaccgcaatcttctttcttgcagaccactccaagggattttgatcttgtcctgaaattttgaacattgcacttaattgggttaggcattgactatttgtttagtgtgtacatgcaaagatggtcttacaggattggttttcatcgtaagtgagaaaaactctgagagaaaaaggaatatgaagggtacactgagaggcacaaagcagaaccttttcaaagaattgtttaagaaaatgaaagtgatggccaggcaacacatggttgtcaacagtagagatttcgcatataaatttcattattcaaaaaagttggcatgccaaggct

SEQ ID NO: 2003 - DNA, 3158 bp, Cannabis sativa
cttagggcatctttctgaaaccctaatcctataagaaggaagggtttagtttcgcatcggctctttcagccagagctgccataacgttcgcgcctcccactacctctgcgcttcagcaaaattcaatctctgcgaggttagctgatctcaatcaacaatggcggacaaggcagtcactattcgcaccaggaagttcatgacaaacagacttctgtcaaggaagcaattcgtaagtatcgattaaacttttcatctttcttttcggaaactggctaaaattttaatcctttactactgcttcgttagtgcccaatgtagtggaatgacaaggttttgactttagactgaatgttttcccttcaatttcttcatgaagagacagatatagtgatattgtaatttctatcagtcgtttagttatcccggactgtttagtaacaagggttttgtaaatagtaatcagatctatgtttggatatgctttatatgggtataattatggttagcgagagtgtcagattgatgatttttctgtcattctatcataaaataaatgaatgatttatcttactgctgtaaatttgcataagcatatagttttttttaacgtattaaattactattattttggtaccttaatattgttgttgtttgattatcataggtcattgatgttcttcacccaggaagagctaatgtctccaaggtataatttttttcttcgtgtcatgtataattataagagaattgtcaggttacgacttcataattttgtttaaatgtagttgattttttttttacatatctctttgttctataggctgagctgaaggagaaattagcaaggatgtatgaagtgaaggacccaaattcaattttcgtattcaagttccgcactcactttggtggtgggaaatctactggatttggtttgatctatgattcagtagagaatgcaaagaaattcgagccaaagtacaggcttgtcagggtatgtttaacacttatcttttatttgttaatgcatgtatttcacttgagattcaaccatgcttaactcttttaagatttttgttctatttcggttcagtttcataattgttggaattgatgttttttttgaaagttggagtctttttgccacctgagtctagctcgagttgtgtggctctattgtttgtaagagttctgggttcaaaccttagctggcttaacaaattgctaactacacactgtttcttatttaaatataagtatctgatgcattctgtttgattttttttttgtcttgattgtaaatggatgatacatttaccacttcgtttcacttggtaaaaaacagaacaaaaagtgtgttcaaagctgtgatattattttcttgtttagataatttggggaaaatgattgtctatgccatttcaacttggtgaagataagtgatatgaaatattaatcatgtgtagctgtgttgttgctaacatctgtgagttactgtatcattcaaaatgctaatttatctttggattacagaacggacttgataccaagattgagaaatcaaggaagcagatgaaggagagaaagaacagggccaagaagatccgtggagtaaagaaggtaaataaaagattggctggtttatgttattggattttagtttttaatcacattttttcttatatttgtatcctcaatttgttttcagacaaaggcatcagaagctgccaagaagaagtgagaatagagaatgtttcgccagtgttgaagctcataagcagcaatgggcgcatttattctcacattaggtgcattttgaaattatatatcttttatatcattgtggatgtcgggtctcaactaatgtttagttttttcttttgagagttttgagtaatttggagaacaattttgtagcaagagatttcaagatatttttcatcattaagctgtgattttacaaaactactcctaagtagcaacagaattttagtgtggaatttcttcctatcgttgttgctgaattccattgtcctatgtcatatgatactctatgcccagtcatgttaggaccaatattattaacttgataagtacgtaatatctcatgattaaagaatggctctatttctcaatggaaaactacttaatcatcgggtattgttgtgttctaacgatataaaattcattcttatcaggcccttatgatatgatatcgtgagtgattgtgttttagcatttttctttaaatattgttcgttggaacctaatgtagatacctccagggatttgaatcttgagctatctcacattcaggtctttaagccaactatgacattttttttgttgagaaaattagcctttgaaaacaccaccaggggccgagacctgaatcaatttggaaagccaggccactaaagtgtactgcatttacaacatatatagctaaaacatgtgctactctattattctaggacaataattaaaactagcaatcaaacttattacaagccttaatatcagaaatgattaatcccaagtatagcctcaactatttctggttcaaagagctcacgccaacccattggagcaccttgccaccttgccaaaacctgaagctccatttgatgaagaaagtgaagcataacaattaatcttcaccttgccaaaatgaagaaattggagccactttggagtcccatttgcatgtgtagatacaggttcattccttttcttgttcaccttgaaagctagacagaaaatcaatggcccaataaaccactatatcggtaggaataatcactttctcatggacaatcttgctgcatgggaaccaagttcttcaaaagatcatcataattaattcaatctcacaaataggaagaatggaaattaaattaactatgaaagcatggaaattagaaactggagaaataacatcacccatagaaaaatacatatttggttttggtgttgcacacttgcaaaacaattattttttaaaaaatactaaattatttttattccattccattgtagcattaaaattacacacacaaatatgacatttcgtggttacattggagatgctctaaaaccgaattttgaactcaaaattgacttgccatttgtcaatgcatgttcttttttttttttttttt

SEQ ID NO: 2004 - DNA, 2947 bp, Cannabis sativa
agaatttggaattttatgattttggatccaaacttgggctcaaattgacatagatcttgaattatgagataatcattggtgggagttatgtttttgttatcaaaaatgaaattttgggttcgtttggtaagctgaattgaattagttcgtattgtattgtatagtattaatactaaattatgatttatatctcatttttgtataatactatgtgaaattttactttatgtgtacatgtatatacaaataactctttgtgttcaattatttgttgaattggctttcaattgatttgttaattgcataaacagctatacatgataagtgttttgatcattcaaagtagttgaattgaagagtccatagatacttactagaaatatatatattttcttacaacagatcttcaattctaggaccatcaaaatggctagtaatgatgtaaaagaacccttgcttcaacaacaaattgattccattcctaattcccaatcaaggaggagaacagacacaccaaagagaaaaagatttaggcgttgtaaaagcgcgcctatggtggattttgttcccttagataggctaggcacaacaacagactcaattccaaaatccaatttcatgttcttgattggacccccaagtttcttcaaagtgatcatcttcctgtgtttctacttaggtgtaggaacgattttcttctacgtcgtgagaaaccagctcgatggaaagaagactgatggagttcttgatgctgtttacttctgcattgtcacaatgaccactgttggatatggtgacttggtaccgagcagcaatgctgcaaagctacttgcttgcgcgtttgttttcactggaatggctttagttggtttgacacttagtaaagcagcagactatttggttgaaaagcaagaaactttgcttgtgaaaacattgaacatgagaagaaaagatcaggctgaggttctaaaagaggctcagactaaccgaacgaaatacaaatgtattctggtgtttatagctcttctggtgcttatgacttgtggaacaatttttctaatcactgttgagaaattggctcctgtggatgcattttattgtgtttgttctaccattacaactttggggtatggagataagagcttttcaactaaaggagggcgtgtgttcgcgatattttggatcttgataagtaccatttgcttggctcagttttttctatacattgctgaacttttcactgagagtagacagagggctttggttcatttggttcttactcgtcggatgactaatgtagacttagaagctgctgatcttgatgatgatggtatcgtcgggtaagctaagctctgatgttctctttttgtatgacattttcttagcttcttgttcggttataaaataattaggtttatgctgcttacaaactcaaaattgtttgatattccttgcagggctgcagagtttgtgatatataaattgaaagagatgggaaagatcagtcaagatgatgtgtcacaaataatggaggagtttgatgagcttgatgttgatcaatcaggaactttgtcagcctgtgatataaatctagctcaatcctctccacctcatcacacaaataacaattaacttgatttgatttcattcttcacttgttaaaaatctcaatatataatgtacatatcaattgagtggtaacatgaggacaagtgttttgtacattaaagttataaatatgaatttagatttacaattattttgcagtaccattgccaactagttatgttggtgttctaaagctgagattgtggtaagttgttaaagtgtttttggagctttagaagcctgaaagcagcttctaaaagccgagtcaaccaactctgtattattagtaaaagaatgatatacaaatctttatatttgttggtcaacaatgaactcaaatacaagagaaaactattgttaggttactagactactacagataatgctatttgtattaaattacagctctgctctgctcttgaaaatctgtaaacagcagcacaatagctctctccaattgcaaagcaagagattcaggttccagtgcagatgaagattgagctgagcaactttgattttacaggaccaagtgacttcatcagtagtgcaaggagcaactaatgcaagtaaaatcagagaactcgggtgatgaaagagtttgtttatactgatcagaaagtacctcatggaagctccaaacagaagtgcaatgtggtctttttcagaaagattaagtaaacaaaagaaaaaaatcaatgatatgtatgtatgaactgaccttgacatctcaacagcttccacattggtgccacaaaaagcccactgcatcaattttggccatcatgaaattctgttttattctattgatttcaatgccttcggttactgtatcggatttcctttaatgtacatcactcccctactcaccttgttgaacaaaccagaaccaggtggatcttctcctgttcaaaaatcatatgatttacatatagacaatgttttttatatcaaaagactaaaccaaagaaagtaaacattacagtaattgcaaacacctctgctttcttctgtttattaaaatccgaaaacagcatcacaacagctctctcttccattgcaaagcaagagattcagcttccagggcagatgaagattgagctgagcaacttcgagttcacaggtccaaatgaattcatcagtcacataagaaagtacctcatggaagctgcaaactgaaactttctcagtggctctcctgtctgcaacattggctggctgcaataacaaataaaaatacctttacagagaagatgatcccttgaatgggtttcttagttgttgattatgatgctgatttccaaatatttttctactgcagagtgcccatttattgattcat

SEQ ID NO: 2005 - DNA, 1873 bp, Cannabis sativa
tgagagtgccacttgtcagttagtttatgttttaagttaaaaagtgtgcttcatctaatttctaaatgatttttttagcttttacattgtagtcttagttaaatatatgtgaagatccatagtgattattattacaacatgaaattattatcacttcatatgaatattctaaatcttggattttggaagtcgatgtggggtacgttcaccataacctgcaaaattcaaattcatttcaaacttatgtgagcaccaatatatcattttgataataactttttaatataaatatgaagtaattaatttattaaattcaatgggacattcaaagttcaaactggaataatcttgcttatcttatataagattgaacttgtagttgggttacacttacatacatacatcttggtatcaaatcaactatcttttcattttgacaaataccaaaatcaatgaatatcactcccatataaacaaaaaggaaaaagagaggtatgaactaaattgggcctaaaaaatgggctacatctcagtcttcccggtgctgtgatatccagcccacatcagtatttgcggaattgggccgagaagaggtgaattttcatgtcgttttctcaatgtttgtaacttgcaatttgcaagtatagactatagttctttgaaccaaatatgctatattaatattaatttaaacaaaatgtgagaaaaagattcattaaaagtctataaataaacagtgaacttaagtgagaaaatgcttcaatttcaaaccttaattatgagcaaataaataaggcttcatgttcttattcataccaagatttcataacccttttggttaacataacaaacaaatacaacagaagcaaaagaaaaccattctttttttataattttcttcttgttttctttgtttgcatttaacatcataacactacaaagtagaacattattgtagcaagcaagagtctctacattattgtcaccctttctaataatactcaaatactaaataataatagttataatacaatttattatattataagtcttctactacaacactactaagtattattattgaatgtgaatatccaattccttaaaagggtattactactaacccatggtgtaagaaggagttggcaagtttatgacagtggtcttcactttggtcatcatgttaatgctgtttgtgatcccttgtgacccaataccactgtcttttataccctgcaaccaagaaaagaacttgtttggattcaaagaaaatgttgatctcaaatatgatcatatgaagtgtgtttgtgtgtgtgtttacctgaaatgggaaatgatctggtccgcgagccggtgcagagtttatctgaacggttccagtctccattgcatctccaattaggattgctttgttgatatcctttgtgaagacacaaccctgtttgaaattcaaacatgaaccaattttaaggacaatgcatagaaagagagattagactaaaaatgttccacctcaaaaccatattgcagtaagggaagtaactccttaatcttataatgtaatcaatcctatgttgtttaggaaggctgtgctttaatatcttaatcctatgtaagaacttctcttatgttcattacagattagtgaacatgagcaaaactaacaatcatcatagataaatggggtaatttaagtaaaagggtaatttcaaaattttcatttgtttatgggataaagaaggccttggccaaaaaggaaaaaaacaaaaagaaaagaaaaatgcagataacattgcacatcaatcaagatgagtctggtctaaccaaccagaaaaggtcaaaacacatgtatcagaaaagacaaatttgttgg

SEQ ID NO: 2006 - DNA, 2576 bp, Cannabis sativa
gctatgtcgtttggcagatacacgggactagtaactgggattggggatatggatcctgttagatggcctggctcaaagtggagatgcctagctgtacgtacttcctattgatttgtttactcatcttcaacgttttgatttatagaaattgttcaaatttacacacaagatccatttaaaactcttacatactggtatataagaccttttacttgatattttacagtatgcactgttacgcttgtgcctaatagacactaccttgcagtatatgtatttatatgtctgataataaacataaaacatgcttgtaatacattcctggcttttctgatgagattttcatgtcattaaaagagactgaattttacttggtgtttcgtacaattttgcaggttaggtgggatgatattgactcgaataggcatggcagagtttctccatgggaaattgagccatctggttctgtttctagttccactggcatgatggcaccaggtctgaagagaaccaggattggattgtcttcggggaaagcagaatttccagttccaagtatggttttattagccaaatcttaattgatttaattaaacaaaaaacttccgatcatatttgctttcgatgcttatttattggacttctaattttctgacagatggaattggtgcatcagacttcggggagccattgaggttccagaaggtcttgcaaggtcaagaaattttgggttttgatactcctttcgatggcgtgggtgctcaatgtcaacatccatctgagaggaggggctttcctagtttaaacagttctgggattgctgtaatgggtaataatagtgttagacacatgcgtgtgaattctgacaatattacccctgctcgcatgggctttggtgaatcattccgattccataaggtcttgcaaggtcaagaaatacatccaacctcaccatgtggaagagccccagctactcatgaggaaagtgagtacagtggctttgaattcatggatcgtgttcaggtgccaagctctagaagtgcatggtcaaacgttatgcagaataatacaacacttggtcgcacatctgccaaatctatacaagtatcttcaccctcttccgttttaatgtttcagcaagcaatcaatccactttcaactttcaatgccattcaaaatagtcataatcaggaggagcagagagctacaaagcgaagcttgtgcactgctgaatctactaatgttggaaagctaatgccattcccgttgtctgatcgtggcttcaatggtgaatatcatgggggaacaaagtctgtgtatcactcttctgatcggaatcctcatggaatttcatgccctcttacaactcttcctgactttaggagcagtcaagatgtagtttcatcatgcaaaagtagctgtagactttttggtttctcattgactgaggaaaaacatcttccaagtgagaaaggctctccagtttcctcttcgttgaatcctggagttcctttgtttcctgatgttggagggcagtttcatacaaaacctcctttgatgactaaagcagtccgaagcaattgtaccaaagtaagcgacctctacactgtcaaagatatgcttttcgatattgcgttgtagtagaaatctactgcatgataacgaactacagctttacaagtgacagagtgttaaagagaggaccatttgaacatctaatttgcatgttccaagtgtattatataggaatggattttgactagtctagagaaaggttggagtattgtttggaaggatggcaaggatgatacacagggctcatcagacaaagatatatggcagtaagtccgaatctctatctcaactatcaaagttgttttgtgtgcacatttgaaatcataaccgacctcatttaacaagattaacattggtgccaatagctatatttttgtttcaaggcttgttaatccatgttaaataatattttttagtgttgttcatattagagccttattctttttgattcagtctctcataattgtttgaattcttttgcaggacttaggtggtgcaatccagaattatgatatgattaaaagatgttaccttgggtacctgacgctgtctgtagtttgatcagattgtgtgtgtgtgcacttaaattaatttaggtttgaaacaaaaaattgtaattatactccaagtaacctgacagtaactttttttttctttcttttaagacttaagctatgataagaattagctcttatgtaatatcaggtccctagtgattgtccttgtttgcaagagggtctgttttcaacttatctcaatgccattcattcttttgaaattattattggcaattgaacttgccctcaacgccttcttttttttaccaaattttaaaagtttgagctattgttaccttcttgttatttagaaaaccaaaataattgaattgagttgcattgtgagaataagaaagaaaaagaaaaaagttaagaaaaaaaagaattacaaacattgtttgtgatattacctaacattatagtcgtaaaatgcggctcacaaaa

SEQ ID NO: 2007 - DNA, 1036 bp, Cannabis sativa
ttttgctattaacataatagacaacccctgagattagtaactcctagtgtggttgtccgaataccattaaaaattgttctagatatgagtatttatcccaagttcatatttttttacgtcaaaccacaaaattacttacgttttattcattttaagaatttttatgaataattttatgaaattttatgaaacttagggctcatttggaagaaattgatgtagaaacatggaagaaatatgaatttctgtcaccaagcttcagccaattttctttagatttttttgccaaatgctctctttcctgtgccaagcctctttcaatttggaatgaatataactttcttcaatgcacaaattattatccaattgttgttgttgaatcaacgccagtctacttttaagttgatgaacaagtagctcacattcctcaaaatgatttttcttccatagttgcagcactctccttgttctgtccatattacgaatcatgttctaggtgccttcacaatatgtattctgccaaacactatcaatagcttctttacaagattcttcattggtcaaagcttcaaagaacgtaaatgcgatatatcctttgctattaaatatcagagaatccaacaaaatgggggcatgatcagaccctagccttagggaaggtagcattctagttataagatccgatgaatctatccattcgttccctaatcaaccctccaagaaaacatctgttatgccaagtcaatttacatcccttaaagcgaagatcaacacctccaaagttgtacatgaactcattacgccatctggtgtcttgtcttgtaactctattacctcatgttttatcaacagggccactgatacagttcaggtcaccaattacaatcaacgacatagtgcaatcattgaccatgttctctattttattctagaatatttccttgtattgatcatatggtgtgacataataaacagcaaacaaacttcacaaagagtttaactgagcatcccaaatcaacctcaaaaatagaatttt

SEQ ID NO: 2008 - DNA, 1060 bp, Cannabis sativa
gagagagagagagaggcgagaaaggggctggcgcgagacgatgggatacccgtcaggatcattgagcgagggagagaagcggatgggcgcgagagaatgagaacaaggagaggagtttgggagaagaagaagttggaatagggtttcagtgtagaacattttaatattatttttggctttaaaaattaaactttggtcttgggttagaaccgagacataaagaggtataaactttttttaagtctcagttctaaattgagaccaaaagggtgtttatttttaaattttttcctttaaattttttttagtctcggttttagttttggtgtcagactactgaccgacaccaattggttttttagatgtcagttataaactgacacttaaaactaagagtaatctatagtgtcagtttttttaaattaaatgatacttgaaccgacaccaaaagtatcttttgtagtagtgaccgtttagggaactgggaagaactctacaaagaaagctaaacctaagaagattggccctacctcttgggatatggtgattaaaaccaaatatgttgatgaaattttagcggtgatggaattggagataccacagaagttggaaatacaggagacctggtgcgagaatgtctactcgcttgaggaaacagagaagatctttaatcggagaacggagattcgtcaagatatttcagattggctgagtgtagaaaatcgcaccaaacatgatttaagtgttgggaagcagaccattcccccaatattgagatccaatatgatatgaaacttggaaagcagctttgatggcacgaaattgaagaagcaacatgagactctaacgacagctgagaaacagaacatgactcgaagctccaaagtgaaaattcatttcgaggatatagtagatgaggtgagctactagaatccatctattgtatgtcatgtaattagggttaattcccctgtcaatataattgatagattcgttaggaggctttggaaagactcggtaacgaaggtggggatgctcactcgaggcgtattctgttggg

SEQ ID NO: 2009 - DNA, 1766 bp, Cannabis sativa
cgactctgcaagcccctcatcatcatcatcgtcgtcatcgtagacgtcgtttttggccgcgccactcttctcactggatgacttgggattcttccagttatacaagaagacccttttgtctttaccattccctgagccattctgattcagaggatcaagtgcagaagccccataaaacccttttcccccaccattttcagagctttccctccgagtaacagaagtaaaagccgccgcagatctagcggaagcgagaggagacctccacgaagaagtggtaccgggatcacgaagaacccgagcagccttccgaatctgagtgagctctttcttcaagtggagtttgctcggatcagagaagcgcgtttccgccattgtcgttttcttctttctatatttaaatactagtcttacaatagactcaaaatgagtaaaaagccaaaaacccagacaggtaaatacaaaatggtctctttttcagttatagatttctctcaaagtaaactgagaccaaagtaagaagtcctactgatctattcacattagaactcaaaaacccagtaaatcccacatccccattgatgttcaaactccacaaaagcatggcttctccttctgagagaggcctacacatacatacattcatatattatatatagatggcaatggagaaaggagatggataatcattgaaaatgaatgcatttgatgaagttgataatatttatgagatgaagcagctatacagatctgacaaacacagcacgggcgcgaaggaccctcaaagtttgagactttgctttctttgtatttgactatgtatctatctctctctctcactgcctctgtttctttctgtgttgtctggttcatttcattatgcttctgtttgtttagtattagtatatgctctttatatataatattgtagggtttggcataataaatatgaatcactcataatataaatttatttatgtcaccaaaataatttaatacaataacaaaagaaaattgggaattgggaagtgaaattgaattgacaatggagaaatctcaaatctccctccaaacaaaataccaatcattctctctctcttcttttctttttcttatttgtcttctttcatttcatttcacatttcacaagtgagatggcattgtctaagttttaatataataaatatatttgtaaatttcaaaatatatatttgtagagaaaattaagcggtttaatgtgtactattggtataaatgttctttttctaggggagaaagaaaagaaagtaaaagaaataatttgtttttcttttctctttacaaattcaaaaggaaaggagaataaaagaaaaagcttcaatttgtctattgtaaatgaaaaattgtgtacactcgaaatgaggattagttgactatggctcgtaagctaaaatacaaaagtgtttaaatgtgtaattggagaaattatgtactaaaattctgtgattttaggaagaaagtacctacataaatgacttgattgcctgttttatatgtatatcgcttaattaatgagtatcggggccgaaaacaaatcatacattaattataaatttcacacctttacatataaatattgacctattattattattagttatgtgttgcgattgctaccacacacacagttgtagtttattggtacttttttaaaggataaaatagtataggaatttttttatatttacgtttcaaaataatttttgtgaagcaacttaaatcgtaat

SEQ ID NO: 2010 - DNA, 2335 bp, Cannabis sativa
attctccatttcccatagtaactccataagcaatcgtctaggtaactgacagttgtaaccttgttgccaatgcttggaaaataaaactgtgagtagggtaaatgaggactaccattttagtactttctaccaatcattttaatttcatggtcttgtttgaggatagccctgccaccaattacggacacctttaccttcgtattcacttcaatggaatcaagttctagtgtgttgttttcatcttcttcgggttcttggtcagatagcatgttgcatccctcttcagacatgatcaacacattcatttcacgttgtttacacctatggcccgatgcccacttgtcatcacaacgaaaacaaaggccttcttcacgtttctactggatttgagcctctattaagcgccttatttctcttgatgcacgttcttggctatttttaaacgtggtgggagtagtgtgaggagtggggtaaagtgttcttcttgttgtacttatccgctgcttgaatgggctcaactttctcagtttttcttcaatatcttgagaaatttccatagcttcatcaacgttgagcggcctttgcacttttagttctgctcgaatggagggtttcagccctttatgataagtgctcatctgaatttctaagggggcattattaaggggagccaacaagcgaataaaagtccctattatatttgttccttcttgcttaactaatacgaactgttcgtggagcaaacacaattgtgtgtttctcaaatgtttgagaagtaaccatttcaactctccccatctcagaacatctcgcttatgactctcatattagtaccaaagaagagcatcactcgaacaaaaaatgagcgcgacttcaattttttcgccctcctcatacccattgcaggtgaaaaattgttctgcttgtaatatccacccatccggattatccacatcaaaagtgggcattttgagtttcttaagccgattctcatggagataacaagtctcctgtcaatccttgtcaaaataccccctgcacggagtgtgattcaatcgaaattctgtcattggtgacgatcccgtggtaacctgccgtggttctgagatattagcgctggtttgtggtgtcgaggttgtcgtaggcccttgaatttcatccttctctccggtcccagaagctccagacccttctaccttgctttcttggaccattcttgattttcttaaacttccaagaaagtcttaaattgttgttgtaccgtttcttggagtgattcttgcaactggacatgtagctgtcgagccatctcttgccttgaatcctgagaggaacccttgtccttgatgcttgaaatttcaatctacaatatcttattccaaaaacatggaggattcacctttctccaactgtttcttggtgaaatggatattccatttcaaaatgggtgaccaatgcaagattaatttattttttatatgcgtattaaatttaattgattctattttctgagagaacaaaccatgataaaagggtatacataaatattttcagtgatcctcctaacactctatataggctattacattaaaacaacaaaccaacagcctaaaataaagctagcaaaatgtaagagcataaacaattcaaaaatcgtgaatacaatctaacttgacatataccccatgactggaatcagaaaaatacaaagtaaataaataatgattgaaaaggcaacacgctattacaacaaattagcgttcaacaaacaacgataaaacaaatgaattcaaagtgagggaaaatacctcgttttgaggcacaatagctattttcaacaacctttaagcaaacatgtctcattggagaagaataagcaacagcaatacctgcagaatcataatgagcgcatgaaaacaagatattattttgacataaacatagtgaaaaagaaataagagaacccattatgaattggtaatttaatcggtgataattaatgtccttcagctgcagactaacttcattgaagaaagaaaaaaccaaaattatcattaataaattaacatactaacagctccctttttattttcagcaagagccaacttatacaagctatgcttaatgcaatgcagtaaactatgacttcagtcgagatcatatcattaaattatactttagttcttcgcaaaatacgtgcaagtcagaacaacaacctaaagttccttgattgcatactaagtttggaacaaaatactttagtttcttgagaatcaatgtcttacgtgaatatctaattgccatctccctgtcttcgtaaaaaaaaaaaaaaaaa

SEQ ID NO: 2011 - DNA, 2251 bp, Cannabis sativa
agcgaaattactttacctcttatctttttccctctaatttgaccgtgtattaggtttagagttgaaaggggtgaaatatgatttttccttctatccatgtttttcttttctttaatttaaatacaataactctttcactattttctaatttgggttgtcacggtattgcttgaagaaattcgcatgaaataatttttctttttctttttttggtatatgaatttcagaaatctgacaaatctaaatcttagaacaaacaatcttaccatctgtttccttttaataaatagaattgtttatgagattgagttttagtaccatcatgtattttactaattaatctgaaacttagaaacattgtacatgaaactttgttataaggtaatgtattttctgcttttaaaatttgtagagctaagaaacaccatgggaagcaaaggaccaagttgggatgaacaatggagtggagggaattacagttttgaaggggagaatggtgagaagggagggtcgaagaaaggcagtgggaagaagatgacagaggtgaaagcagtggcctcggctggacttgggaaggctaaggttgcggccaccgtgggtgctgaaaaggcgaaggttgcagcagtgtttggtgcccaaaaagtgaagagtggaacctctttcggtatcaaatgggttaaaaatcagtaccagaaaagaacctctaataagtgattaatttcttggaaagaacaagtaaagaatgtctgtagattttttagccatcaatttagttgtttttttttctaaaaaaaaaaattcttttctttctttagtgtccttcggattttgtgatattacatctttttatttaaataattcaaattaatattctgtaaatcgattatgtgaccaatgctataaacaaaattttatttaattctctccaagtttcttttttagcaatcttaatctttaaggcctctaccattgatgattctgcactccaacgaaccttaaatgctattccatccacagtcaccactgacatgaattctgggctattaaaaccctttttctcagctgaattagaatcagctgtcagccatatttttccaataaaattggcacattgttgatgatttggttactaaagtggtactcaaagtactctcaggtgctgatcctatggatttaccccgaactataatcactctcattctgaaaattaaaaagtcccagcgtatgagactcccgcccatcagctcccgcaatattatttccaaactcataataaaggtgttggttttaaggtttaaacatgttcttcctgctgttaattttgaggctcagagcgcgttttttccaggacaatattttggtagccttcgaactagtgcatgggattaaaaacaaaactacacgttgtaatgacattgccgctatgaaattagacatgagcaaagcattcgatcgtgtagaataaaggaagttatgagaaaatggggtttgctgaatggtgagcttataggctcgttgctacccattagaggattacgtcaaggttgttcactttcgccgtacctgtttctaatttgttcagaggtctctcaagactttttgaatatgaagaacatgcttgtatgttgaatgggtactctctcacgaggcgcacttcaatttcacacttgttcttcgcaaatgatactctcttgttctgtcaggccaatgagtcctcatgttttggcattaaacgtgctctggatatctatcaccgtacttctagacaattgctcaatccagataagtcagtgttatctttctcacccaatacaactctagcgactcaagttttatttcatcgacagcttgctatgccgattagggaatgtcatgaaagcttacttaggaagggataagtcaaaattgtttagtaatgttaaggaaaaatttagagattaatgcacacttggaatgagaaaattttctcagcaaggggtaaagaggttctccttagagctgtagtacaatccattctaacatataccatgagttgttttcgactaaccttgaaattctacaagcaacatgaaggaatgatggctaatttttggtggggttcaaatgcaaaaggatctaaaattcatgggagaaaatagaacttgttttgtaaaacaaaaaaggatggtggcatgagtttttgttctttcgttcatttcaactaagctttgttagcgaaacaagcttggcggattttgcaaactccaaactc

SEQ ID NO: 2012 - DNA, 2069 bp, Cannabis sativa
gaatcggattggattcttgttatgtttgtttattggggtttcttatatggttgatcttgaatgaattacaggttatatactgcacaagcttgagctggagtgctgatggaagcactttgtttagtggatacaccgatggagtaattagagtttggggaatcggtcgttattagaaggaaaaagcttctatcagtaatattattctccctaatgcacttcttctactgttttcttagtttttgagaacaaaaaaccgtatttactatcttcttaaattctagtgttttcggaaaaaaggtatttaggtttttgttggagatgttgaatttttggaattctcttaagttgatgacttgtggctttgaggccccatttgttttttggtttttgttttcttttatatatttcattagataatcatattggtctctctatacttttctctatttgaaatcccaatttgatggtggaattcgatggtggtgtgtgcatgtgcaatgtttcatgaattgtatgggctcaattcccttcaaattgaatgatgaaatatttttaaagttgaagagtgaaaataataatgattagttgcaaaaatgtgtgtggattttgttatcaaaatgtgtttaatgaattgtcaaaaccaaggccaaagtctcacaagtcttgtcctattattacctattctttataaattcaaaggccttataagatccctattagaaatcctccatttcctcacatgacaaactctagctttgatgcattttttttaatcagtcttatcttcaactcaaaagtacaaagatttctatagaccacactagccaatactgcatagaacaactcagttattaagctagccttgaacatttttgcaacacgaaaaatgagtggctttctcgggctagaccgcccatagagatagagcgattacgaaaccgaagatgagaatgaattgcctgccaaaggatgaaactgtgtttgggaggagaaactttggcaccaaacaacatattcccttgagaatgtctctctatgtttcatgagtttttgccaataccagtctagcttcaactcatgaaatcatatatcttggctttttaagtagatattataaatggaaaatatcataatttgctatgattttggttaaaaaattatgtttaattttgttaatatttttacggtattttaaaaaaataataaaaaatataaaattaacagaaagcaatattgatatctcatcaaaacaacataaaattgattttatgtaaataaaatcttaaaaattataattttgttttttgtttttgtattttttttaataatccctactattaatccactccatccataacacatccttttcagaatttgaggcccaaatgtatttttgtcattgaagctttgtttctatttgctcaattgtgtaattttattctatttttaaaaagcattaatagagaaagtttgaattaaaaaaatttatctttatgtgtacgaaaatttctcaacaaaacagttatatttattttaagtgaaatttaaaggtgttttctaatttttagaaagagaataaaaaggaaagaatggtgcaaataacatgttaattcttattggcattttaagatggtgctattaaaacgtgtgcatattatatattattactcttttatttaaggcattttaaattttttattaaaaattaataataaaattaaaagagagaaaaggtgtaaacaacatgttagctctcttaaatgtaaacacatattttatgtgaatcgtcaagatttaactacttaatatgcaccaaaacattacatggtcatttctaattatcatctaaaataaatgtgattagttgaagaaaaaaaaaattaacacatgcattctttgtcttgggaagtctagtatggggaaaaaaggtgatattaaatgggtatagatagaggattgggaataagaatagagtgaaggcattggaagatctatgataagccaagtattccgccacaattgtttgttattgacttgaaccaaccaattgggcaatgggaaactgaatc

SEQ ID NO: 2013 - DNA, 1482 bp, Cannabis sativa
tatatatatattaacattattgagtaaacaattacagctctccgttttgacaacaacttttctgcaaatttgaaaggcaataaagagtgtgatggttaaacagcaacaaaatatcgcgtcttcagagaataattatcatcagtggtgtgacttataacatctcaaaagggattttgtcacaagacttgattaaggtaggacagggtatatgctaggcctaaccatattagaatcataaagttttgtgtgttcgctgacttccctgcataaatataaatcatagacttttaagagaagagtttgaaatagatgttgatcttgaacaaaatgatagaatcctttatgtatgtgtgaacaaacatatgtgaatctcagagttaactaaaagagcaaataagcctgaacaattacccaattggagatagttgttcctgatgttccattcaaaatcccaatgttttctgtcgttttttaacgtccagtaagcccatccaaatgaagctgcattataaacctccaattgagccctaccgaagtcttgataatctgtttgagaaccacttgtaacattccactcattcacccactcccctgaaaatacatcaagctttcaagcattataactcatacaacctaaacatgaagaaataagtctagtaaataaagaaataacttgaacttttacttatagacatgaaagtttaacacttgatctctctcataaatagagaatgaggtagcttgaacttttacttatagaaattctccattaaagtttaacacttagatcttctcttcaagtatatttaagtggtataattggatcttggcataccaataaaaataagtgggccattggcattgttcaaggcttgcagttgagcttccctgctcttgtatatgaattgtatattatccgaagaactcatattcacaaagaaagtgtcaaatagattgtaatagtgcaaatcaactactaaattatgcgatccgatgtttgcctgataaagttccaagggatctgcatttccaattctttggcaaactattacatacgctgatgcagagtatttccgtacaatttgatagccttgtctgtaatatgaaactaaggtatccaatggaactgtggctgcagatggttcgtttaataactcaatgcccaacaacactgggtgctttgcatacctgcaatcaatattcatgttaagaaaggacatgtcaatcctgaactaaattgactttgtcgttttcagtggcattcatgaacattatttcaacaacacctcataacaacagaaaatcatcagccagttctttccattaatcattatgtgcatgaattggtatgtatatgatgttaactacattatgtaactagctagatggtgcataatttcttttatgaattcagttgcaattaaagtttacagaacttataacacacaagtgagtaagtttcacttattacaacacaatttt

SEQ ID NO: 2014 - DNA, 1633 bp, Cannabis sativa
tatctacatatctatctctatcttttggggatgggtttgtagttaggatctcatttatacctcaaaagtgatatatgtatatctaagctttcaaagtgggttaaagatccatgggacacattccaatatagttaacattatcatgtgattatagcaacttaaaattgtactcaattacatatgggtggtgaagctcttggcatcattgattgttaaagcattatttgttaagtgtcataaaaataattgattgatgtagcttccaaaatggtctaaagagttttcaaataaaataaaaaatggcctatagtatacaccctagtataacttatgaacactactgagccgtatgcataataatacagcaatgagcaatctttaaattctctttacttctttagatctacaaaattagtaaattaacctacatatgagatgattaaatgcatacttggatttaccaaaatacccttgtcccttggattcttctcaagacaaaaatatcactttctcttcatcttagcattatcaatctctggcttctgagaaccaaccaatatgcctagtatgccttttccattcttctgcattgtttctttgcttatcatcatccgggtgatattagatctgggacctatctctcaaataagaataatacctagtacaaaataatgttttttccaatggtaatttgtgaatttacacacatatcctcatgagcatacattgttattaacttgtgtggcagtaaaacgttcttccctctttctcttttttcgggtagtgatcaattctcttaatggagttgactcgagatgaaaattaataattatacgtgtcactacaaaagcactataattttctttttttgtgggatatttgttctctaatattgttcggtcttataactttttgacccttaacgtggtaaaatgggctttcacccacaacatgtatggttggttcaatgttgatgctattcttacaatttttttttgtaataaccatcaggtttaaaacttttaatttttaatatatcgtcttttgttaaaaaaaaaaaaattgttttaaccttatgattttttccctcaacttacacttagaccccattatttagcatctctgacattttgtaccttcttctactcttctgtagggttaaaagaatcttctttgtttcactttacattaccaacaaaaatgacttagaacatcattagtgtaagagacaatgtggagcgcaagtgataaaggtgtttcttctcaaactcaaataatcaaacttcacttaagacttaggtgtgttattcactcaagtaaaagctctcttaactattaactatgtttaatgttaatagtattccaaattttaaaaaatatgcttatctcaatggtttcattcctaataaaaatgcattaactttttggaaaaacaatcatcacaatttcatcatatattttttatctttctaaaaaatactataatatgcacattatcaaccatatctagtcgagtttcaaccatgggatgtgttggtaatttcccatgaagggtaaatttgtaaagttgcacaaaccctatttgtgttggctttgactattaaactacagaaaatatgtaaatgactaatga

SEQ ID NO: 2015 - DNA, 1329 bp, Cannabis sativa
acacttgaaagaagaggagtgaagaaaagcgaaacgaagaagcagaaaccgatgacaacagctgttaaccccgtccggccgccttctttcaacccggccgcagattctatgtatgtggcaactgttgtaactcctagtgttgagccaacaatagttgatcctgcatcaacaatgtatgccaaatgctcaccttcaaagcttccttgctcatttacaaagcctccaatttcagccatagtgtacaatgtgcctgttgtggccataacatctacatacaataaggtcactaatgccacccaaacctcacttttgttaaagtttgtaaagctaatggccccggctgttttttggatttcatgaaaatcaaccacttttttgaaatattcaaattttgtgtcaccaagtggattactaggaaaatatgtaacagaagtgtttctaaaccatgataccaatgtcacaaaaagaataccataaatcatactacctttaatgtttctcattaagccataacttgtaactaagaaaccaactgatcccaaccaaaatgttgggcttctcattgtcccaccaaggcactcaccggtctctgggtttgttttggaacaagcagtgatggtaaccaatgtagatgagtccggcccaataaggcctattccttggtgggcctgaaggcccacaaaggcaataaaaagcccaattcccgcagcacaagcaagccgaaccgtatgaggtatgagcctagccagcttagccctgagcccaagtgcagataaagcaagaaacacacatccctcgaccaaaaccacagctagagcggttttgtaagacattgggcctgttccatgaaagcccaccaagttataagcaagataagcatttgggcccattccaggagcgaggcccaaaggaaggttggccaagactcccatagcaatggaacccaccatggctgatagaacagtggccacaatgaggtcactcttggttgttgcaagacaagcttggtaaccagcgttgggcgtgaccatgcaatctgacgtggcagtctggttgaccggagcggaacaatcggcaacggaacaagtaccaccggagtcggcgatgatggttgcgttgactgttataatataagccatggtgagaaaagtggctaggccagctcgaagttctgtggtgaaacaactctttcttgcttctaacttgaagtatttacctataaagctctttgaaacggtgtcgtttagagagttcttcatctttctccatgaattcccacctcccatctctctctctctctgtattttgctctgttttttctttagaaga

SEQ ID NO: 2016 - DNA, 1424 bp, Cannabis sativa
tgatataagaaatgttaaaaggcattagtaatgtcaagtactatctcatatattatattattattggtagaattaagtattaggtctcacataatttaatttaataattattataaattatcgttaactatattgctagacaccaccttacagcaatactagacattattggtatttaataacagtgttcatatagtatacattaatatcttaaaatttagttttcatttttttttagatattgtgtttagcataattatttattaggaccttgtgttataaattttttaacttttatattgcttgttttgtgaaagaaaaaaaggggttaaaagtgggcttttggagccaattttaattaaaaaaataaaaataaatggctaagaagcccaccagctctatttgagttacaaatatgatattcataaatatttttgtaagaattaggtacaaaaatctaattataatatttttacaaaatatatggttccaaatttttttaaaaaaaaaaagatgtccaactacataatcagagacaaattcaaaagagtattgctattagacactagtagtgtttagtaccttttcaacatgtcacttttcaattagttggtgatattttctaaaaattattacagcaaattatataaaacccgatacataagtacaccaacaataatatagttgctagcactatgccttttagcatttctcaatccaaaaatatataaagtttaatatctaataactaatgggtaccattctaagtttctaacttaccttcaaatatacttaaacaatgatttagcttcaaaaacttcttattaaactacccttaattttaatgaaaagttaatgtgacaaagaaaatatatatgttaaaccactattgtatttatttaaagataattcttgtccaatactagtagcttttgacaccataattattatatttgaatcatgtttataggaagtaacatatgatttggattgggttaaataatattttatcatgtaatttattaatagggagtggacatacgatgtagttcaatattttttgtaattgagacttaaaaattattatccaatgtaattgagtaattctacttattctaattattatatacaattaggtggtttttaatttgttttttatataaaaataatcttttatctatctaatctaattaaaatttaattattcaaatctagtgtaatataatactttttttgagttaattaaattaaattgattcaatataattaaatttatttgtagtttgttcccatgatataaccaaaaaattacttataatttaacacaagtgtccaacaattaataaaaaaaatcaaatatcaaaagcaaaaaaggaagcgatgtcattcatagaatgtgtgcaaggttctagtggggagattct

SEQ ID NO: 2017 - DNA, 4778 bp, Cannabis sativa
aggcccctaaacaaatcaaaaaatatattttataaagattcaaactacgtttttcatgttaatcaaaccccaaagatcataatatcaaaataaagctcaagattcaatctttttcatcaaggagttacaaattatgaatcctaaaactattgaacgaattataatgcgcaaaaaaacattggattcaagaagttcataaaagcttgaaactcaacaatggcaaaagcttgaaaaatgaaaaaaagagagaaagcttcgaactacttacccacttgaaagacgaaaaagaggatcgagctagcgcaccaagtgtggatgtcagaaactcaaaaatccacgaagaactcaagctcacaagaattcgactctaaggagtctttgagagaaattttgtatttcaaaagagacaagtaaagaatgaaaagaaaatgaggcttatatatatagtttttggaaatttttctccaagaacttaatgggaagttaataccacaaaaataggcatccatgggaaaagaaaggccaagagttgcaatatgggaaaatgcgcagttatggcacgacttcccacattgataattgcaaaataaaataattaccatgaggtcatgtaagtcaaagagtccaatacctgggcatgcatacctacatgacaaaggaagctaaaacacaagacagacaaaaagtccacacctaatcagaagttcggatagggactttgggagaaaatgttatcccaaattttgttcacttaaagtggctcctccacgtggcaaaaaacaaaaagtatgtagaagaccactcaacactaacatgcaaggattagtgtcgaggagcccctcagccttagagattctacgatgcacggtacacgtaagccaattgggatacacacacattccagcaaagccctgaccagacctataattggccggccaggagtgccaacttccatgcactaggcaaccttcagcaaggctggctggctaagggtgcaaaaacacaccaacacttgtgtttctctcacaagccttccaactcactttcaacatgcctatgactgtggattagctcaaactgcccacaaacatagggactcaccatcagcaaataacacccctattctttaggggattttctctctgtattttaaatatatgttgtaactttcctattctctaagaatatctctatacatagtttgtaaaccctaatactatataaagggtcataacctacatgaaaacgaacatggtcacgttttggtacatgcaatcacactcagaagcactatggttataagtcctctctcttttctcatacttctaatctgcaaaactcattgtaaaactgaagagtgcttagctagagattacaaggtcttaacctataatgtacttggtattatctcaagagtgaatacaactaaaacgggaggaggtcattacctaaacaaaaggggtcgaacctctttaaaatcctatgtgttttttacatttattatcgttctacacgtggcagtcataagcaatgatcctagtcagactctgcgtcgattggttaaaaccacagtcaacactaattaataactttactttttgtgtagttcaatgaacgtgtacaataaaattacaaaccgacggacttgtaccattatatggataactaagatatgtccacaacagtcagatgggttacaatgtgcatactacgtaatgaagttcattgaaaaattcatgactgaactaaatccaattcattgattaacggaaaaggtaaatcaattattaagtgcttttaagtttttttaattactttatttctattattttgataatttcaatgttactaatttaataatttctctcttttattttacatgccatcagcgggttcaacaccccatatatacacaaacagtcagattaatcttttacatgatcagtgggtagattacgtgaaagcaaaggtgatttgataagaactacgagtatttttctcaaacatggtgtatttttttattaagtttttttacaaacattgttattatcctgtttatatgaaattgtataaatctaaaaaattaatgcagagaaaatatgtatgaaatttgcctttttttcccaatgtaacgtaaaaaacaaaaaactatcgctgaagaatatatttttagattttaacccgtagctcatactataagttaggtttaaacttacagcttataatactatatgcgacgattttaaatagtggcctatattgcacactatatatgacagttttataccgtggagaaaatttttgccgataattttcaactattacttattttattcattttatgacggttaaataagcaacaattaattataaagaccaatgacaatattttatcatattctttaaaatagtccaaaaaaacaaattttttagtaatgaaaggcatacacatgtatatatttactgtatacacataacaaaactttttgagcggaaaaaacaaaataaatctagttatattcactcgatatattcagcatgcatgcactacatattaaccatttattttaatttctaatattatatatataattttctaatattaatcctgcactacatattatatataattaaaatcttgcaaaagaccgatatagcttagtataggacatatttttaaggctaaaaatagttctagggttataatttatttattgcttgggaacttgttttacgaaattaaattacaacaaaatattataaaaacaggctagacacttaaaataatctaattggcatatattatttattacagtagttaaaatcgaactgatataaaactgcaatatatcataattttatataatatttttcttcattgactcattcatctcccttttgggtaatcagttatctcggagaacacagtcccagacatccttttcctagaatcgtcgtcgctgctactactgatcagtttagtagaggcactgctttttgactcggtcgtctctgcccagctactagtaaatgtcccatcatcatcaccaatgtcaattttattgccataagttttcaagagagtaacctcatcctcagcggccttcgtctttagttccccaccatcaacactgtcgtaattattagcctcccaataattctgtaattgaagtgcaaactccaggctccacacaatgtccttcatcgaaggtctctctgtcccattatccaacatacattgcataattaactgaccgtatttcttcaagcactctggtgcaatcttacccgttagatacgggtccataatctcatgaagcgtttcgttctgatagctattttgtacccattcagcaagggagacttgtcccttctgtgctgtccttagtataggtggcctaccacaaagaacctcacacaaaacaacaccaaatgagtaaacgtccgacttttcagttagctgttggcgcctatagtattcagggtccaaatacccaatactacccttgacaactgtggtgaggtgggcattggacatgctagtgggcccagttttcgataaaccgaaatcagaaaccttggccacccaattttcatccagaaggatatttgtagttttaacatcacggtggatgatggtatactttgtccctgtatgtagataatgtaatccattagctgctcccatacaaatctggaggcgttgtgtccacgtcagaggtgggttgtcagttttgtaaagatggtcacggagggtcccattggacatgtaatcgtagacgaggatcatttcggggtcttcgttgcaatagccaatgagagagacaaggtgtcggtggcggagatgggagagcaattcgatctcatttttgaactcttggatcccttgagatgactcagtctttagtcgtttgattgcaactggtatggtcccattgtctatgtatcctttgtaaacgttgccgaaacctccgaccccaataatgaaaataccttcgaagttatttgtggcagctatgatctcaaccaatgagaagtcgcgacagcgatcagacggcaatgatgatgatccgcccgctttgcttgacttggtcgtagcaaaggatttgggggcccacctaattcctttgctggaggccgagtctttgatttttcttcctcgccggacgacgaaaaatgcaagaagtgagaggataattacgacagaaaccacaccagatattataccggcaaccaatctggtcttaaatccattttccttggtgaataagttattaggtgaccatttaggctttgctttagggttgggaccggcaaggttatttttggagctcattttgaatatctccaccccatttaagattccgtcattgtataatgattgcgaatccagttgacttgcttgcagagcgatagagaggtttattggggtctctgtactgctattaaacattgagactagatagtctgtgacataaggaacaaatttaccaccagccagcttgatcacgtcgaagtctgtctctgctgtttggtcagctatgaaaatggaaaacacccgatcaccggacgaattcatttgaagtacaatttcgcaaaagtgcaaccttaccatgtagttaaatccattatccaccgggtattcccatgtgagattgtagctcctaacaatttctttgtctttgttacccattgttctggctgtttgatacacggcttttggtgcagtataatttggaaccatttcgaaattaaggactgcagaagtatcggctggg

SEQ ID NO: 2018 - DNA, 2952 bp, Cannabis sativa
aactttgatcaaaattagagaactgtgaaaagaaagagggaattaccccaagacataaatgtctgatagattatcaacttgaagaaaatcatccaaattaaggccactatgaggagatattcctcctgcattccatgttgctacaaaaactctaaaacacaaaaaaacaaacatagagatacaaaaacagttagataaccttatatgtatatatagtcttttatgaagtgagatttgaatagaaaaaagcaaataaaaattggcaagtacttgtaggattgaacatgttgacgagatatcattgatccccctctactgctagggcaaagactctcagaatctgattgatctgcaagtagaaacaggcaaaaataattgatgaaaaatgataagattgtagtaggaaaagtacactatataaaatattattactaactctgaatatgtacctcagaaatgtatgcctcaaaacacaagtaatccagttataaccagtagcacataatttataagggctaaagaaagaaaaggaatataacccagaagaagagagagacaaagatgtaccattcccacttcaaagatgaatatattctaatttgaaaacaaattgcaattatgcttatcccattttcataatcctctatcattatctatattttgaataaagtaaattcaaatatcttccagtaaagataaggggcccaataactaaaaagaactgttctataggtagggatgaaagttataagagataattactagaaaaattaatggaatgttggaatgttacatttctatgaccaaagaagacaagaattttgattttccataaagaaaaagctaaccttcttcaaacacaaatgagaaaacagattattttgcacatttgattcttctgcattttcatggacaagaaaataattttaatgaataattctcccttacaatgagagataatgacattgataatgatatcacttaccaacagaatcatcccttcttttactcaatttccttccatctctctccctggagaaaatcttctgaaggaaactctgaaacataatcatttttcaaatttaatgcaagaaaattgcagaagtttccatttgaaaataaatctgaaattaatgaaaaacagagaaaaatcggaatatataaaaacaaaccttctttttcctgtctttatttcctattgccatgccttaaacagccgttttatcatcaatgtggatgatcaaaaactaaaagaaccttcataaagaaaatatattggatcagaaaaaaatcatattggatcccatatataaattatattaccaaaaaagcccttttaattgcaccattctccatttcaatacaaaaacaaaacaaaaaatcataaaagttggaaggtacaaggtaacaagaacatatcattttcaataaaaatgaatgagtcagaaaaaagaaaaatcaccaattcagagaataatcaaagtaccagaaatgaagaaggtagtttgggacattatcaatgaagatatagatttaaagagatggataataacaaaacataaaataagggtggcaaaggagttggcagaccaaatgggttttctctcgaaaaagtcaactcgctaagcaattcttaatcataataaatgattcttgtaatcaaatttcttttcttattttccgggaaaaagaatgaaaggaaaatataaataaataaataaacaagaacttgaaatgaaaatattggatttagattttggaaaaactcacaacctcatgccaacgtgtctcatgagacccaaaaatcgaaaaacaaaaagaaaaaaactgaagccaaaacttacgtgcaaataactacttttaacattaaaagagagaaaaaaaaaaaaactttccattaattaattaattaattaattgattttgttaaaaagagaaaaagaactaaaaacagagacggtcaaaaaagtaggagggtggggtgtgggtgtgtgtaagaagaactaagaataagaatctcacatgtcccttcaaacataacaagaaacgccgctctagtttcgtctttttattctttgttttcttctccataataaaataaaactttttttgagttattttcccaaaactctccgtgcatccttttatctttattttattttatttattattgagttgaatggacttgtttgtttgggagtttgaagcaagtttggagcccacacttcaactttgagacaaaatatattttttagactttggaaaaataaaaatgaaaagcaaattaatccctcatggaattacattataactacaactttgtataaggatgggaccataaggtttgccaagagtgtgacagttacctagtccggaaatgatgtgttccttctctctctctttgcatgaatgaacggtctcagattagtcttgttgattggttggtgagaatagggttaaaagattactgtacaatgtatgcatggttttggattatctaatttggtgatgtaaacacctttgcaatagagcctcatatctctccttttctttttttaataattaatctcaatttaacatccttgttttggacttaataaatctcaaatatggacttattctaagttttgtcatctaaacatttttccaaatagaaaagcaatgcaaaattaacaaactctcctcctaattttctgcattcttttctttcgagtttcacttataaaataatgagtaattataggtgcaaatattttatactaacaactttttattcaaccaattatatttatttaaatattaattgagttcgatttaaaaaaaaaataactgtgtatacacatatatttttaatggtagaaaatacattacaattaacagttatagttgtgttgtgaaaaaaaataattacagtaaaattgtggaaaaaaacttgagcgactagctacaaaa

SEQ ID NO: 2019 - DNA, 2306 bp, Cannabis sativa
gtaatagtatatgtgtatatataaatatagaaagatatatacatatatatatataatataaagccttttcaagatcaaatatttctttgtcattgaattgtttagatattttctatatatgagaaaaaataaaaataaaacgaaataaaaatgattactgatcgtttctattttgtggctttttatttgactgagttggtatatatatatgtatataatatatgctagtatatgtgtatatataaagataatataaagctttttcgagatcaaatatttctttgttattggattgtttatatattttccatacataagaaaaagaaaagtacaacgaaataaaaaaatgattactgatcgtttctattttgttgctgtttatttgactgagttggtatatatgtatacaacatatgctagtatatgtgtatacataaccatatatgaagataatagaaagcttttttcaagatcaaatatctttgttattgaactgtttaattatatgtattttctataaattagtaaaaagaaaagaaaaaatgattactgcagatcgtttctgtcttgttgttttatttgagtactactgtgttggtatatatatatttatatataaatatatatgtgtatatataatcatatatgtgtgagagtaagatcttagactgggacatccacgctgtctcttcatgcagatggactcgatatacgtgttatagcgtacttattcgaatgtttgttgtaaactctagctgtaggtttttgatatgagttgacgagaaatagtagttttctcttcttcctttgactcatcccatcatctttacatattttatagccaatcatattctttgactttctttcgaaagtagtcaaagcttatgcagtatgatgtaataatagttaaaacacgtatatgctttacgcttttagtatcttatgtttattaatatatatatttccattgttgttttgattcagtggtttgcggtccatattacataccagtagttccgcagaggcatcatgagcaacatacaggaattatccaccaaccccacaattccagtaatgttccatcaagtagcagcacgagcataccgagtctagaagaaatggataaaaatgctagggctgtcccttttggtgctgctgctatagaatataaagcggtgtctattcttcataatggtggaaagaactcttcttatatcggttgcggtgctagtcgctactatgctggaacttggggcactccaattacctcattgatagaggtgccgacttatgattataatcaatgtaaccaagagacactttcactctttccagtcagcccaacaggccttctacaagaaaaagaagaaaacatgcgtctttgttcatctgaaattgatcaacctggttgctcatcagatcgtgataaccctttctttaactttttttccctttagttaattaaatatatatgttagaagtactactgctttctaaataatcagaataagttaagcatataattagcaatatggtttgtagcaagaatatattaatacttttaaatattagagattttatctctaatataatatggttttctttagtcgttttcttttaatgaataagaatagttagtttatcttatcataatctatgtaatataaataaaggttaaatctatgaagttgcttttgtttaattttggatggtgctttctattttgtaaatatatatactggcttaatatattactccaacccacaacgcacgtataacacctattgttaattattttctttaatttttattcagttatgtataataataattgtataattagtttgttattttagtattattaaaaacattatttttttaattaaaaaaatttatagtttaaggctattaatataaaaaaatataataatatttaaaattaattgtcattttaatttgaatgggtaattaaaaactttattaatcttcaaattcaactaccaaatatgatgtagcaattcaattggaacaatactcatgaaagtacatttaggatgtaaactagatgctctttcatatgaaagagctactaagtttatttaacccttaatatataaaataagtagaaatattttttaactccacaagcaataaagacttacattttttaataatcaaaccaaatgaaaaaaaacattttaaatggactctgtaaagcttgcacatctactaacaatctattcagaattgatgccacccatgcggtttgatctagcttaatccttctctaaccccaatagccttag

SEQ ID NO: 2020 - DNA, 1571 bp, Cannabis sativa
tatttgatatgtaccaattgctaacaaccaacaatcctaacaggcactcccctttggcgtaatggccctcccgagaagccagtgctatgcaatgcatgtggttctcgttggaggactaaaggaacactagcaaattataccccgcttcatgctcgggcagagcctgatgattttgatgatcacagagtatccagggttaagagcatatctataatcaagaacaaagaggcaaaactactaaaaagaaagcagaactatgatagtatggtggttggtggttttgctgctgattacaaccagggttttcgtaaggttatggaagaagatgcaagtaatagatcaagttctggttctgctatatctaactctgagagctgtgcacaatttggtggaggagatgcaagtgatctgacaggttggatattcattaaaattgaaacttgtttagactcaactacatagttctcttgtttttgtagttgacacaatttagtgtatgtatttgttgagttcatagtgtcaatatttagcagtttattcatttcaatgaagggctgcttagattttaatactcagctgtagttgttagtaacaaaggagacttgaatgaagcttaaatgccaagtgtgttgcttgcatttattcaacttaagatttccctttaagtttgctatggtatgtttaagattaatatgtcagctcaatacattctgctcaatgttgtttagcagctaatagattcaattgccttttataggtccagctcagtcgaatgcgtgggacactacagtaccttgtaggaaaaggacttgcattgttcgtccgaaacaatctcctgttgagaagctgacaagggatctttttaccattttacaagaacaacagtcttcatacttctctggatcttctgaagaagatcttcttttcgagagtgaaacaccaatggtttctgttgagataggacatggaagtgtcctaattaggcaccccaatgcaatagctagggaagaggaatcggaagctagctcgctttcatttgataacaaaaattctcatagtaatgaggcttattcgcattcgacaaacctttgtgatagcaagggcattactttcactgggtctggaagtaagaaggtcaactttgctgaatatgggatggagcaagaacagtttagaaggtaatttactgcactagcttggattattgttgattgcatataacatgtacaaacatagtctagttagttgcacaataactcctcaactcatattcaactataagcctaatgtatatgttgcacatatgaagtgtttatgtggagatggcacgtttattatacaataagacataacgggaagaataggaccatgaaggcacatgtagtaaagtggaaacaccaccttagatacttgaatgtgtatgtgcacggctgcacgcgtatacttgcctgcagatagaattagcacttttctatggtagaaagaaattgttcttacaaggatggaaaagtataaccgtttcccactctatttctaaaacatttctgtgctttggattttcagggaaaagt

SEQ ID NO: 2021 - DNA, 3006 bp, Cannabis sativa
aagcttggtcttgaggtaattgaatctgtcagtcgataatggctttgttaggatatcggcaacttgatcaatagacggaacatatcgcacctcaagttgtttggccaaaatctgatctcggatgaagtgcaggtctatttcaatatgcttcgatcgggcatgaaataccgggttggcagcgagggaggcagcaccttggttatcgacccaaattatgggtgaagagggtaagtgaacattgagttcttgtagaacagaacacaaccatttaatctccgaggcagtgttggcaagagctcgaaattcactttcggtgcttgaacgagcaacaacttgttgctttttggcggaccaagatatcaagttaccaccaaagtagacagcataaccccccgtggaacgcctatcatcagggcagctagcccaatctgcatcagagtaggcttgcaaacaaagtctagctgctggtcggatgtgaagaccgtcatgtagtgtgccttttagataccgaaaaagtcttttacatgcctcccaatgagtggttgtaggtgcgtgaataaactgacttaaccgattgacaatgaaggccacatctggccgtgttaaagtcaagtattgtagcgcccctaaggtgctccgatatagactttgatcttcaaatggttctccacaggttaaggaaagcttttgagaagcactagtgggtgagggacttggtttagctccatcaagatgcaattttaccaagagatctgatatatatttggattgagagagatacatgccactgttatctcttactatttcaacccccagaaaataatgcagtgaaccaagatttttgacagcaaaaactctgttaaggtcagcaataaggttcagtattatcttctcatttggacctgttatcagtatatcatcaacgtacactaataacatcatgaagttggcaccagacccgtgaacgaacagagaggtatcggaccgggaagccttgaaaccagcagcatataaagtttgtttaagcttctcattccaagctcgcggagcttgtttgagaccgtatagagctttgtgtaatttacacacatgatgaggcttttcgggatcaataaaaccttgcggttgggtcatatatacggtctcttccaatgtgccattgagaaaggcattggagatgtccaattgagtgactttccaattattagatactgcaagagtaagcataacccgaacagtggcaggacgaacaactggactaaacgtgtcggtaaagtcaatacctggagtttgatgatagcctttagccaccagccgtgatttgtacttgtcaatggtgttgtcgggtcgaagtttgactttgtgcacccatttatttcccaccaagtgcatcataggatcaaacggaactaatgtccatgtgccattcttctttaaggcaaagatttcttcctccatagagttgaaccatttgggatcttttaaggcttgttgcaaggttttgggttctttaggtaaggtggtgatgggaagaggatatcgggttgcatggtaagctttaggtttataaatgccagctttggaacgagtgagcatagggtggttgttggctggtattggggtgggattagttgttggtggttcaatggatgcggctggggcagtatttgggtgattggcagcagctggtgtaggttgctgaggcaaaggagggctgtcatttggtgcattattctgtggcaatatggtgcgacatgttggaacagcttgctggtttgagtggctgctggtgtggtgaatggcactaggcaaagaaggagcagcagaagtagcctcggggtacaaaaacgaagtgtcagtggccataaaatcagtacaaaaagtagtagtgggagaaacaataggaggagaggacatcacctggttgttgttgttggacatagcagggaagtccaactcattaaaggccacatttcgtgcaatataagtccttcctgtgggatgttgacataagtatcctttatgagacattgaataaccaacaaaagtgcatttgtccgatcgaaaatccaacttgtgttgctggtaaggtcgtaaatggggataacaagcacacccaaagggcttaaggaagtcataatcaggtgccttgtgaaacaaacattcataggggcatagatcttggatgactggtgatggaagcctgttaataacaaatacagcatgctgaaaagctaaccaccaaaatgttagatcaagaccagattgtgcaagcaacgtgaggccagtttcaggttatgtgtctatgttttctctctccgccctaccattttgttcatgatcgtgaggacatggatgttggaactgaatcccatgctgagataagaacttagagaatgatctatactccccaccccaatcggattggactttcttaatggtgagactaaattggttttcgaccagttttttgaactcaagaaaggtggcataagcttgagacttaaccgagagagggaaaatccatgtatatcgactaaagtcatcgataaaatggatgtaatacctatagccttctatagaggagacatgagagggtccccacacatcggtgtggagtaattctaaaggttgggaggcacgagaatccgacaaggcataaggtaatttatggcttttcccaattttacatgcttcacagaatcgaaggtccttaagattgcttttaatgcctatgttggataaaactttggtaagagttctaggggctggatggcacaattttgagtgccaaaggttaatgtcaggtttagcttgaacattaaatatggcacaatgacatgaagtagaacagggagaacaatctgttttattaattgtggaatcattacaagaagttgcagctggaataccagctggtttattacaagtaaaggcagtaaaagattcctgagaggcactaggttgagatgtggctagattacattgaagctctacatttggagg

SEQ ID NO: 2022 - DNA, 1745 bp, Cannabis sativa
gttttcccaacaattatgagggtgtaaatataactgtccaaaataattttctaattataataaacatacaaagtttgtattacaatcttacaggatacatacaacagcagacggttcctgacttgagtacactcaaaatatttgaacgaaaattctttgttttactggtttgggttttttttttttgccggctccaacttccaacccactagatggtagtatggagctaattttagatacagaaatacaaggtaatttcccaatttatgctacagatttggagagaatggcattcaacacaacttctctagttggcaaggcaggaattgcacctctaccagtgactgtcaatgcaccgcaaacatttgaaaacttgagagcatctctcagtttttcctcgttctacaacatcaattcagacacatcttaagttagactattgcaatatcacaaacaactgagaattttcaagaacatagcttagttaatggcacttgtttgctacttgtttaaaacaagatgtatatgtaggatgctaaactgacttgagtaattgactatttgagctgagatgtaaattgaaaacaaaaatagtggtctggttaaaagaccataaatggatctttatccatctaatagtgtaaactaatactaaattctaaacttccaaaaggcagtgcaagtcaagtatattttttcaagaattgaagtttctctactgaaagtttttaagaaaggaaacacgtctgaataatatgctgtgttttgaatgtgcagtacctgaagcaaggagaggtcatcagctagttgtgatagtgttccagctacaaaggcatccccagcaccagtggtgtctacagcttctacctttaaaccatcaactctcccactgaagtcctgcaaagatatacatccttaagattttgtatcacaggagaagacgaattcccatgttttctcaaacaacaatgatccaattctttagagatataaacagaaagatagctttggaagattgactatgaatgatctcatcatggagctttagtttcctagtaaacgaccagtaattgctgcacactaaaattgacttttgtatgttgtaaaccttcttaaggggaatacagttaaatgaggtaaactgattgagcattatacagaaaagagaaaactattcatttaaaatgagatgagcaggaaaagttgaatttgtaaaaaatgtttaccttggtgtaatatctgcagccaccagggccctcggtgaccagcaataatttgtgatttggatggaacaatttacgaacaacagagtcattgtatggatcttctccttgtgttaagaaagagacctcttcatcacttacctgaaaatataaagtagaacaatcaaacttggtagctcaatttacttttggctttgtcaagaaaatcaactttccaagtttccaatacggtacagatcacccttaattaatttttttaccttaataatatcagcagtctcccatatgcttaaaataccttctctagcactgtcagcagaaggccatagtggaagtctgagattgggatcataggagattaccacaccagcatccgttgcagcttttattgcagcaatgtgtgccgacttgcatggttccgtaataagacttatagaaccataatgaaatattttggcctgccacagaataaagaaagaaccttaggtggcgtttggttgaggggaatgaaaacataagaat

SEQ ID NO: 2023 - DNA, 1430 bp, Cannabis sativa
ttaatttgagttagttgagattaatataactagtaatcaattaccttcaatcttttaatggtagcatggtgaatgaagccagaagtgtaattgtaataagtgtaagaagtggtaatggcacgagccatgtgcttgtgattgtgattgtgatcattgtggtggtgaccttgttcccaatacttaacataagggtaacctcttaatggtgtgacccatgaaatgatgacactcctcccttgttgatctccttgtgttatatgaacctgttctggtgcattgaacccagaaggaggaggcaaagtttctagtggcatatccatggagggtaaggggtttctcacataaacacctgtgtatcctccattacaaaaattactactaacaacaaaaacaaacaaaactattactattcttgttgaccacattgaaattgaaaatgaacaacacattttgatcctattggttcttttctgttttgcaaataagaatgaataactctgtttatttatagtgtaaataatgaatcctaatactattctgagtagtatacgaattttaatttaaatgtaaaaattatttattctgttgttaagagatggatattttttttattattgttactaaattttaaattttaaaaggaaaagatatatatgggatttcatgtaactaatacatttttgataaaaaaatatcttgtaaagtcgcaatattatttaaaccgttacattctttaaaaaatctttctatgatgatatattttttttttttttttttgaaaaaggatgatatttttttctgtagttaaattttaatatttatattatcatattgatcaatcagctataagataaagttgaatttctaatatctaatatttatcaataaaatataattattatatgatttttatattacaaatataatttaaaaagatttttaacataacttaattattatatttaaattgagtgaaatagtgaatcatatgggatttttaacaaaattatattggaatttcttttaattgaagtaaagttgttgaccaccttattcaattaaattttcaaattggaatttacaacagataaaccaaaaagtaaagtggttgatttaatgtttgtattgattagatcttttcttttattaaatgataattttaatttatatttttaaaataaaatataataatagcatgaatataattttaatcataataaaactttacttaaaaatattatgactagaacttgtttgtactaggacttcaagttggttatatacatattagaaaaaagaaattgaaattatttattattttaaaaaaattagtatcccaattattatttaacaaaaaaataatttgataatttttacaaaataaaaaataatatttacattttatttaaaaagagaagagagagagagag

SEQ ID NO: 2024 - DNA, 1645 bp, Cannabis sativa
  modified_base (440)..(440): a, c, t, g, unknown or other
actagggaacacttcgtgcggatttaatatatctttttaaaattatatatagcaaatttaatattttatttaattatgaaaaaaatatcaaatctaattctttttttttatttaataaataatatcaagaattatatactatatccagaaattttaataattaaaagttgtatatataatgattataaatttaaattctccaaatattaataaggacacaataagttgtacatgcaatttaaaatatctttctattttgtatttatccattaattattataacaaaatcttatatatgaataaagtataaatatatcccttatatgttttattagtcatagcattttataatataaataccgaaaaaaactataaaatttatatatatctaaatttatatataaaatttattatacaagaagagaattttaatttgtgtnaaaagaagtttaatttttgtaagaaaaaaaaataaagtttcatagtaaataatataattaaattgcttaactgttaaaataattatagtaggaatttatataaaaaattattcataattattaattgctaaaagagatcttgttaaatattgaaataattatttttaaaaaataattaattataattaattgattctaaaaaagaaagttgtacctattggtaacctgctattataggtaaaagaaaaatgtaaccataataattacaataaaaatgtaatcattaaataatcatccatgtatatagtgatagttctattttgtgtatagtatataaaatattattttctttgcatgagagaataataagattgaaagatatgacatacatgtaaataatacttgaaaaatataatattgtgagtgtgaagcctcatatgaagaacgggagaacaataacatgaaagatatgtattgcaacataaatagtgaaagtaaaaaaaatatgtttattcagataaaaatgtgggtcatgtgtgcaattgtagtacaccacacttgtatatatagacttattaatttttttttttttgccttttgaattttctctagcaattaaagactatataatataagcgattttaaattaatgaatgattgcatgtttgttttagttgagagtaactcaaaagtagtattcgtttatatatatatacatatacttataacattttctttttattgtcttttgaattttctcaattaattcaaggatctttgaatcaatggattaatattgattaagttgattgtaactgaaaattgttaatattaaaggtcataacattcattcaaaacatgctcaaatacgttacattatttacatatataaatgaaaagtatatttaatgttaatctaaagctaattgaatgtggtgaatagaataaaaaattaattaaacataatttttttttcatgtaaggattaacttgaaaaattaaggaagtaaagattaagaaaaaaaaacttaaataagctgccacgtaagtaactactgtgcattcttttatttatatatatattgatattgattaattcttacgtttatggagtgagttgttacatggagatgtttctaaaataaaataaaattgactttttagggatttttttcatttttatactataaagtagtgtttttttt

SEQ ID NO: 2025 - DNA, 1746 bp, Cannabis sativa
gtgaatgtgaatgtgttagctaagaattattctatcatcaagggtactaatgagtaaacttaccactagagcagcaaaaggcaacattttctccactggcattttggcacaaagagctacaaaagaaatttagaataattatcattgaggatgatcaatcgaaatttcactacggcctcagtttgatcaagagtgctaattacaaccttctattacaatctttttcttaatttttgtattcgaaaacatgctagaatattttttttttaacaaaaaaaatttataatttcgttatagttacaacatcatcattcttataaattttttgaaaaatttctaatagtttacagggttcaacaagcgtgataaactggaatattaagaactctgttatcgatactgtaaattattcgaaatttttaaaaaatttacagaaatgatgttataactataacgaacattaccgtgaaaaagaagaaaaaaaatattttagcatgtgttttttgatgcagaagttgagaaaatagttgtaataagaggttgtattaggaactcgtcaaaaatcaatatctaagacagaagaaaaacttggatggggtgttggcttggcaaaaaaatgaagaaagtgttccagtgaaacacaaatttatgaaactagaaagttcattgggtaccataaagaactgctccgatgaatgaatcaccagcgccggttgaatcaatgagttccgaagggggtatcttctcagcagtgcccaagatcaacctcccagaaattgttcctatcccattagctcttatattctccacagactgaggtttcacacaaaaaagtattagaagctaacaaaacataaagccattgtagttgtagttaccaaaaacattataaaaagtttaatacaagccatatacattatcagaacaataacaaaaaaaccgttaagattctgagcttttcgacacacttggatatctccccaagctcacttaaatgttaaaaacatttcatttcagccgctaagaatttgacaactcggcctttatagagatggtgatattgtaactataacgaaatcataatattctgtaaaaaatttcgaaagagtccctaattggggttaacgaaattgatttaccgatgaaacgcacgtgggaaacattgtagtaccatcctttttttgctttagagattccaataagctctctacatcaacttctttgctgggagtctctgtcaaaatcagaatattatatcaatattcacatcttctaactcttcaaaccatattcctacattaaaaagattgaactaagatctaccatttacacttctctccagcattatacacccctcttcacctaaagtcactatcacaaatttcaattttggcaattttaaaagcatggaaaccattgcatttggaaccgattgggctcccgaccatgcctgttacaaacaagttgctacatcaaatctgtagatacagaaaaccatgatggaatagatatgttttaacttgaaagaaatcatttgataatgatcaacttacctttggaaattttacagagcatacaacataagtagacaagtctagaagttcatccaacccttctcttactctttctgcatcaactaaaatagggatatttttgcgagctgcctgcactagaaatcgttatgccaacaccgaaacaaattacacattaaccgttatacaacaacttcaccgttatgattacctc

SEQ ID NO: 2026 - DNA, 2432 bp, Cannabis sativa
gacaacctaattaatttcattgatgattgccgtagtccataactagtacggtcatgtttgaagtgcttcaatttctttttcaaaggagttatcatcaggtactgattatctgtgatccttttcgaccattggccttgaaagtgggtgtttttattgtgtagttctgtgccagaaggataaaatcatacagaatgtgtcttctagagtttactactttataaatttgttatttgataataatatgtgcctctataagctctgcatcagaaagtttacttttgagttatattaattatgaacatatccttgaacgaaaaaagaagcctggtaacagcagatggtaaatgaagccggacagtatcaagaattgctaaacatgttcgggaattgcatcttttcttcacaatttctgtattgtttttctttcttctcttcataaatatcaaggttgtagagctagagacatcgttcagattgatttatgaacacctctatagtaaagcaagaaaattagtgggggtagttaatgttattagtattactaatatatgttataacctatcctattttaccttgaagaaaaacagattagctgtctcgcccatccatgtaataaagtcattcagattttgttgtaattgtttgtacacgaacaaacaacaagtcttttagagccaaaacatttcttaggttggtaatggtattatgtgggacttgtttaaaatatgctgcaatctgtttatctttgtttacttgtggatttcttgtttcatgtaattatgaaaatgcatcaggtgaatggatgcctctcatactttgacaaagttccagatggattttactcaatccttggaatggatccttatgtgtggactatgtgtactgatctgcaagagaatggtcgtataccctcccttgaattactaaagtctgttgattctaggcttggctcttcaattgaagcaattcttgtcgataggcgtagtgatcccagcctgaaggaactgcataatagagttcttggcatttctagtagctgcgtaaccacaaaagaggttgtagatcagcttgcaaagcttgtacatagccgcatggggtaagtttgcattttttcttcaatgaaatgcttttttactttgtttttttaaaaaaataattctatctttcagaaaatctaatcaaagcaaatttttgttcctattacaaggggttcagcgtctgtaggagaagatgacttggtttcagcctggagggagggtagtgatgacctgaaagagtgcctaggctctgttgttgttccaataggcactctatccatcggcctgtgtaggcatcgtgctctgctgttcaaagtaagatcccaaagtatgctttagtttattagtatattggcacacctcacaaggaaaatctaattaatttgcaaggtagctcttggatgcttatgtttttttaaacttgatgcatatgtatataaacacatttttccctcctagtgttctgcttgaggatacattaattgatatatgtatatttgcaaggttggtatagtgatttactaaccttaatatggtttctgcaggttttagctgacataattgatttaccatgtcgaatagccaaggggtgtaagtattgtcgaagagatgatgcttcctcatgtcttgtccgctttgggcttgataagtaagccttacattaaactatcgtgcatactgctagcaatgatttgaagattattaattatttgcatatacattgttgctagtttattgaataactttctcattcttctctttacaccaaatcacttagctctacagctattgaattgccgcttactgattttgtctctcttttccctgttgtcaactcaattatttgcaaagtccaactgaattattgaattttgtttctttcacttttggttttattctctctataatctttctactgccttttctggttagttgccccttcttttttttttaagtacgtatttatatttcaatctactttcatataatatttgtttattttgttatttggggttaggggccaggttcattctgacttgtgttaaaaagagtaaaggcatctcatattgttgtttttttttttcagggagtatttaatagatttgatcgggaatccaggtttcctatgtgagcctgattccttgctcaatggtccgtcatccatttcaatttcttcaccattgcgctttccacgactgaaaccagttgaaacaatcattgatttcagagcacttgccaaacagtacttctcagattgtcagtcacttaatcttgcatttgatgaagtctcctcgggtaaattattgttttgaaattttatttctgagtgacatttgtgtttaaaaattggacgtgttaaagaggtatggagtgcatatgtgagtttttaaaagt

SEQ ID NO: 2027 - DNA, 996 bp, Cannabis sativa
tttaaaaaaaaattacaacgagaaaaaccgccattggagttttcaagcttccataagagccttattcttcttctcctccaagtacttctctttctcctcctccgtcatgaacgccgtcgccggaaaagatttcccaatacccattggggttttgaagtaaattttcttcttggccggatcttcaatgctcatctccacaatcggaacccataaaaacatttgcttgctcttaaccccactcatcttcttcatcttgaatttctccacatacgccgtcacctccaccgcgtagctaaccctagtattagtcttctcaaagaagtgttcgtacggtgctttctgtttcatccaaacgaaaccagtctctttcactcttccacattcttccaaatcttgtaatggaagaaccccttttggaaaccctaattcctcaagaagctcaattgatctgcgctggcactcctccgggccgtacacgatctccgctcccgcacgctcgtcttcgctcgccattttttaaaggtgattgtctctgatacactagatttcaactttcttagggttagggttagggtttgtgtgtaaattgggggttttggtgggttgatatagaaacccaatagaggaataattagggtttgtgttttgtgctgtgaattgggggttttaaagggttgatataggaatcaacagaggagtaattagggttgttgagctgaatttaggcctcttgaaaaggaggttgttcaactaatgactagccacttaaatgttctgtctttattgtgggtgtgactcattgttgtgatgaaagttttcacctttgtgagctaaattttcttggaaaacgtaagctaaaaactgagtctttagcgtgtacgcacggttttacagccatgtatctaagctaaactaaacctatacccattacctattcaaaactagagttgttaaagggtaatataagaaataaatgacatatcctaattagtacaa

SEQ ID NO: 2028 - DNA, 1283 bp, Cannabis sativa
tgtcgatgtgccagatcagggccttttgtgtgatcttttatgggctgatccagataaggatattgatggctggggggagaatgacagaggtgtttcatatacatttggagctgacaaggtagctgaatttctccagaaacatgaccttgatctcgtttgccgtgctcaccaggtgatttgactatctttcttttggctctcttgaggcttgtatgctcatgcatgtcatcattgaattggaaggttaatacttttgcattgctgttcatgtatacattttcaaataatctgatgattttattggctcactgtgttagttttctttcccttgtgaatgctagaatcttttggcatgaagtaattcagcattctgatatacaatttcttgttcttccaaacttgacaagatatttaattcaaaaaatttgctcccctgtataagcaattggatgattgtcttttggtctatacagatatgatattgctatttagcaacacacaatctcgaggcaattatatggcacctgttcctacctagtctcgcccccttaatggaaaataacatgctagtattcacaatgagtattctttaaattatttttcttttgttttatcttgcatttcttggtttttgtttattaggttgtggaagatggatatgagttttttgcaaagcggcaactagtaaccatattttcagccccaaattactgtggtgagtttgacaatgctggtgctatgatgagcgtggatgattcattgacgtgctcattccagatcctaaagtcttctgagaaaaaggggaaattcgggcttgcaaacagcacgatacgacccggaactccaccccataaggtataagaacctttctaatcatgttcattgaagaaaatgtatagaagaaaaaactagaggcttaatattagaagctactctaactcagccaatacctttaatctctttttacattaatacttcaacacaactttgttaggaagatgaccagtactttgtcctgtgactcataatttataaacatctgtagattctaggcttttgcgaattagtacagatattttacacctggtctttatgaactcatgcttatgctctctctctctctctctctctctctctctcattgagagtaaaaggacaacaactctgctccaacctgtcaaatgaacttgaaattttacttgaacaaaacaaatcttaggatatgctatcaaaatgttgagtttgctgcgtgtatttattatatttttatcattactttcagg

SEQ ID NO: 2029 - DNA, 2632 bp, Cannabis sativa
gggtaaagcataccctaagtataactgttttacaagatcatcagaacaacatccagtaagtctgccacgtattccatgaggagaaacaatcactgcaaatataaattgaggttacaaaaataagtcaataaaaatgctcatgtagaagtagaacaagaaagggagcattttttttttatttctttctttcagcggggaagggaaagggggggagagacaccagaaaaaccttaattttctcatccctttaaagaggtaaaccaacctggaagtttgtaactagaattattagaagattgcttcgacactctctctatgtcaccacttgaaagagcacggacatgcctagaatcaaatgaagaaaaatatatgttaacattgacagaaaaattcattccaaggaaacatacaaggtgtgaaattcaagtactttgaggatataatagcgtgcacaaaaattccctcttccgttgcagcaaagatgaattcaaccgtatgctgccctcttctacaaaaacatactgacggattagtgataataataagaaataacattttattaagcaataatagtttcaaacaaattaaaccaattatcttttagatacaaaatacaagtttgatttttcattgtgttataagaaaataaacagaggagttttatatgaaacaagagtgatcaatgtccaattataaacatacctgaatgtttcttcgctttgagatggacggaactttgagaacacatctccgtacctcatataggagagtccataaagtgctctgtcaatatgagaaaaaaaaaccatcaaatcatgatcatgtttcatacgatccaaaataaaggtttatttgtaacctgctaacctttctatacaattccttaaagcctgtgaaagagcagtggcaacctcttcagagtctccaggagccaaccaaaccccagatttaacaactacctcgatataaataaaacaaataaatcaatcatttcaaagcacaaaatgaatatactgcctacatatcttcgaaaaaatataataacaagggccagaaaaaagccttattctcagacgttcattacacaactcgcaagaagaacaacaaaaactgaaagaatgagtgctacctcttagtcgagatacagcagcttgagcagactcaatgacagaagaatgatgtccaggaagaaaaagccacaacttgattttctcatctgtgaatttttatgaaattaagttacataaccaaatactatccagtatatcatcttatcttatcaaagaatactagctcacaaacagtaataccaccgatgcctcgctatctcaccaggattgtgcaaaccctgagatggatcccagggtccaacaaaggaattggtccaagtgctgagaaatccttccttctgcaactgcagatgtgatgaaagcacaagcatcgtagcagcatctttctgctccactttcaaactgctcatcaaataattctacacttagaaatgtttccagagtataatcatcagtggagtaaaaatctttactttgattgtattctaaccttttatcgggtatagagatccaatctgattcatggggaagaaactggaaccatgaaacttgatgaagacctccctgtacatataattactctcaaatttcaaccccaaaaaagactggtaactaactagcaaaccttaaaaaacagtgacaagttttccaacagctttccaaagactaccaataacatgaacatgtctaaaatccttaaacttaagatcttccaaagtaaattcattcgacgaaactgtcactatcaacatgtgaggttctcattctcgtaaactcaatctctcaattgaaaaactaatcattttgtctcactaagaacatgaaagcattcatacctaacctcaaaccaatatatagttaccccaaaaacaatcacttaagttaattacacaaagccattaataaaatagtagaattgaatcaataatttaaactgagagagagaaaaaaaaaagaaacatacgattttgaaaacattagtcaacatctcttcaaaattgaccgtgaatccttaaacctgctaataagcctgcaaaaacatcgactcactatgaattcaagcttccacaagctccctcaatattaaaatcaacatttgttttttcattaaaaaattaaattgagcttcgacagaagaagtagtatagattataagttcgaatcttgaataaaaaaaattaataaacatgttattattattacacttactttcattgttgaggaatgaaatagagaaaccctaggaaaccatgactgaaactcaattcgaatcttaagagagaaggaggttgaaaatggtggaagacgagtgaaggcggcaaaatcttaagagagatcgaattgcgagtttgttgtttcgttttgattgggaatttgattgtcaatttttccgagtaaccaaacacaaataatcagaggaaaatagaatctgagaatggaagacagacagcgcgtggagcgcgtgtctacgaaaatcacatgtaataaaaaaaatatttcaaaaataccaaaaaaaacaaaataaaaatagtataaattaagggaaattaccgttgttatac

SEQ ID NO: 2030 - DNA, 1693 bp, Cannabis sativa
gtgcaattttctaaaaatatattacaggaatgcaagtccattctttagattattaccacattttaaaactcaataatagtaaaaatggttgattttgatttcgaaccagaaattcaaaagaaaagcatatgaaagaaaaaacacactcaatgtgggcaaaaagtaaattcattccttttaccattttctctatattatatcatatcatattatatatatattgattccccaacacaacccaaaatccattccttattaaaaacccaaatccatattaaaaaggtcttcttcatcagagaccaatttccatacacttcaccccaaaaccaccaccaccaccaaatataaaaaaacacaccctacaaaaatcaaagttctagtattctactaccacatcaaattgtgacaaagtaaacaaatcaattcttcgaaatttttatggtttctcaactcagagaggtcattcaattgaccaaacaattgctcagtacctgtagtgaacaggcttgtatggtccctcaactggcacactgatgtagtcagcttggtccttggagagcttggtgagtctagctccgagtttgcccaagtgaagagcggcaaccttctcgtcgagatgcttaggcaagacgtaaacctccttcttgtatttcccagatgacttctcgttccagagctcgagttgggcaatgacttggttggtgaatgagcaagacatgacgaaactagggtgtccagtggcacaacccaagttcatcaaacgtccctcggccaagacaatgataccgacgttggtctcggggaagacccacctgtcggtttgtggcttgatggtgattctcttaacaccggggtaggtctcgagacccaacatgtcgatttcgttgtcgaagtgaccgatgttgcagacaatggcattgttcttcatcttcctcatgtggtcaaccatgatgatgtctttgttaccggtggtggtaacgaagatatcggcatcggagacaacgtcttcgagtgtcaagacttggagaccttccatgagagcctgaagggcacagatggggtcgatctcggtcacgatcacacgggctccggcttgcttgagagcagcagcacaaccctttccgacatctccgtaaccgcaaacaacggcaacctttccggcaatcataacatcagtggccctcataagaccatctgggagagagtgacggcatccgtacaagttgtcgaactgttaccaatcatcaaaaacacaaaattatattcaataaaagcaatttatttgattcaaattaaagtaaagtaattgaacagagcaactttatatatacattatatttaatcttatcttattcctacaaatatgtaaaagcaaaatcctttattaatgttcaacccttacatagattagattaatctgtaagaattcaaatcctaagcaggaaacagagtaaagaataatatatatatgagatttgagcagaaaaaccagagcaactttatatacattattaaattcaatcttactttattcctacaaatatggaaccaaatccctgtcccaaaaaaccaatgttcaaaaacacaattatattcaattaaagcaatttctttaattcaaatgaaagtaaagtatttgaacagagcaactttatacatacattatatttaaccttatcttattcctacagat

SEQ ID NO: 2031 - DNA, 1182 bp, Cannabis sativa
  modified_base (257)..(265): a, c, t, g, unknown or other
accaataaaattatgacacgtgtacactgggtccacgtggacaatccaacatgacaatttacagtcaaatttggatgaaaattgtaatttgctaacgatattgtagttttggatgttttaccgtcaaaatttgaattttaaaagttaattacaagcaaagtaaaattattagagattttaccgcaattaatcctaaaatgaattaatggttaaaatttaattatttattagcaaatacctattattattattattannnnnnnnnttattattattattataagaatttttaacatattgtgttttctttacctagtctctttatacttatgtgtttgtgccttcaagcttaagcctattatttttcgtgacatgccttgccaatttgtgcccaaattcataatttttcatgtccaattatgctcatgcctcctctcaaactcgtgccattcaaaaaccgtagcctgtatttacagctcccgtgcgtacaatcacatgcaacggaataattttgaagggcacagagtagaattaacgaaatacattatatatatatataagtacaactgatattgaccctaatatatccaatggcatacatatgaatttaaaataaaataactactcatgccattggattaaacatcttcaggttgagaaagaagagggggggagaacaaggaagaaaaccgaagagcaagaaagaaacaaaaccttaatttacattacatgaaagacaacgtacgtcctcatctagaaaaaacaactcccaaccagacagtccaatacaatatgaaactgtagaagcaacagtgatagtctcaacaaataaaaccgccattgagtgatccgagatgaggcagctgaaggtttggagggagctcgtccagcaacggctggagcaactgcaatgtcaccagggttgctctgctgttcatttgtcggtaatggatttgctggtgtcccctttgggggaggtgtaagattcatgcccttggcatcactgagatcttgacctgaaagtgcaagttggtggtttatattaggtggattatgaaaaaaaaaaaaaaaaaagttgcatttctgattgttaacatctgtatctcgactaattagtcaagctcattaaccgaattttatcaaactaatgatcacgaggactggcatacttatactgattgt

SEQ ID NO: 2032 - DNA, 5937 bp, Cannabis sativa
ataaattttctctaaaaaataaggtaacacaacacccgccagctcagctcggcacaacggcgcgcatggtggttcggtgtgtgagtgatcatctatgcgcgcaaaattgggtaccccttgaggcccgtacccatatctcaaacttgcactatttatacacttctaatgaagtgtttttatctcatgtgagactccaattactcacacacttcactatttatttttgtaagatttcacaaaggtccaacagctgtgtaatataagattccaatgagaatttcttatcatcccaattttttagtttttgctaagtaaaagaaatgttcttaaaaacatatatttgagttcttaaacataatggtttattgattgtgttagaacaatgattcaatcaaaacattattttctttggttttgcttatttgaaaaagattatttttttcttttccaaaataagtaacctttcttttcattttctgttctgtatttgtattgaatcatgtccaagtatagtatagtatctattgatctattttggcttctcttcattattgttaattttattatctaaattaaagactgattttattgtttcagttttattgtgtattattaatactaattaatactattaaattttaattaaaaggaaatttaaattaattatgtgcaatacaactttattatctttccttatatactcattattatatttggtatgtaattacaaattataccatttttttttttataattgattctttcttttaggatttctcattgttaaatttatactcaaagttattttttttcttcagctatacatgcggcttttcctgcaaataagtgtagtttggttaaacttgtgttttgttattgcgattcaagtagtttccatgtcagtgaatgatttatcttaatataatttggtaacataaatttatcatcaataatatgttctagaatggttatttacctcaagaatttcactctctctcaacatttctttattttcaaaaaactaattagaatttttactcctaaactataacatgttaaaaattttctgaactattgagattgttagattaaagacttttgtttaatttcattcaattttactatttcagtgattgtttatatactaaaccagactttaataaacaaaattcaggtactattaaaattaaacaaaaattattaaatctaacaatctcaatagttcagaaacatttttaacgaccttactgcatgtcaaaaattcaagataaaaattctaattagtcttttcaaaatttagatttttacagtcatagttaaaacgtagaatcattcattaattttgatcttttatacatgggttgtaatgtctcattttcgtgatcataaaatagctctgccttttttgttgggagaccaccacaattcttcttcttcttcttcaaattagccattgttaacctccataaaccctaactcctctactgcaattacaagtaagttttgaacgattcagaaaaacacacacatatatttaaagcatgttagaaattcatttcctctggatgatatgatacgccgtatgcaaatgctttaataaagttttaaattttgtataataggaatcaaaggtttctaatttatggtttctctttctctagggtttttgtttttgcagttacagtcaacaaatcattatcgttttcaactttctatggctaaaaagggcgtggaagaaaaccgtcttcgtccggcgagaaaaagagttaaagcaacatcgttgattaataaggctgctgaagacgaggacagaatttcgaaactacctgatgccaccattctacatattctgtcgtttcttcccactaaggatgtcgttccgactagtcttctttcaaagcgttggaaactcatgtggtattcagtcccaacactctctttcttagatactgaatataatagattgccatggtactgtgaaaggttctgcgattatgtggaccatagtttggaacaccgtaagagaggtatgttttttatgggcgattctgtcataactagttttaagcttcagatgtatagctatttgaaatgcttagctgatcgcctagataaatggttagcttttgcggttcagaacaaagtcaaggaaataaatataagcttaagcagggcaatggtgtatgatcatcatgagcactactgcatacctaaaacactagtagtaaacgcaatacatttgactattttggagttgagtaaggtggagctgaattctcgttactcatttagttttccatccttgaaatcgttgtcaatggatcttgttttgtttgctgataatgatgtgcttgataagttgttgttaggttctccttcacttgagaagtttcgattagattgttgtagtttgagtactgatcatcagctcaacataattagtttcagcctcaagttcttggaaattcaacttactaaggatatagtggagcaaattagagtggcgaatcttgaatctttggaactatttggtgtttactttggcacaataaatctctcagtgtgcaaggcaattagaaatctttcaataaattgttattggggtccggaagagtcgtcatcattagaatatcttatctcaaaccttcctctccttgacaatttaactttgagcaattggtatggattagggacgaatcacattagaatctcgagtaagcaattgaaacgttttgagttgaataacccgtttacagatgaaatgacagttataattgaatcagcaccaaaattggaatcattttgttatacgggcaatatcaaatttagtataacaatggtggagccatccaatttgttgaatggaacattcataattcttgaccgacaagggaactatgatggaaattggtttatcggtttgattaattttcttttgaatcttaaatgttgttggaatacaataagcttagatgttgactcagttgaggtatgttcatcactcgttttgattgatttgttctgttatttcaaattatatcgctagtttatcatatatttatatattttaatacggtttcttgattttatacatgaaggccctcatcgttccagaaaatttgaagagtatatgtcgttctcctttagttaattgggagcatcttcgagtttttactgaatgcaaaccagaaatggaatcagatttgagagatgctctgatgtgggtttctccttctttaaagacattaactatagcaaagaggggcattcattagaaactttacggcattttaaaatatggttatgctatatagattattgtcttatattttttttccggatgattgctatattagtatctatagagtgaatgagtagacaggatactttagtttgaagaatgtatatatatttatctgctttcgatttcagttttcaatcctacaaaacttgacctgtagaattgtcaagatgttaatttgctgaaatgtgctgaatgaaaacttaagaatttctcatggtaattatgaggctgcatatttgccctgatgaggaatgccaatcagttggctttgttagatattttcactttttcttgttattatgctctgatgaggattgccaatcagttggcttgtttgatactttctctttttcttgttatcattttcaattctatgatgcattacttcattttatcatcagtaatctgttctacaatggttacctcacttgtattgaatttatgcattatgtttagtctgtacatggatctcttgtttcgtctacaaactatagaaggatatgtcattgtttaaagctttgcacatatcgtggttttgacaacttgatgagtgatactttattgtcattttactcatatttatgttttacaaattaaaattgaaaaatatgtagtatatctgccagaacatgtcacaagtggctttgaacaaacaaggctcctcccactgtttagttcatgaatttgaaaagcatgcagaatattgtttggaatcagttctttctgaagggataaaatcttttctgcttctcatagccaaaagtagggaacctgagaagaagaatcattgtaattttgatacagatatctttctcactgtcagtaacaaatcttcattgtttgtgggaattgttgtttgtgttgggattctaagcattttgtgtgtgttagtggctttctactttgttcaacccaaaagcaggctcaaatgaaataaggtaacattccaactttgaacttgaaatgctctgctgactgatgtttttcttaagaaaagctacgtcattattgatatagtgatctgtagagtatagactatagactgctgatctgctactttcataacacttttgcaggctataaaatcatcaatttgtcgttacaaaagctctgctgacagtgattttaatgtttttagccagtatgttgttcaaattgccactacatctattgcgcaacatcttaaccttgtcaaattatatggacgctgtattgtttataagtgtaccttgaaaacaagtcttgatcaagcattatttggtttgtgaacagcaataatttgatcaactgattggggcaaaaacaatgattatctgcaccttgctgctgatctcaagtcggtgaagttttggatcgaatctgactgtcttcaagcggttcaactccttggaaagaaacatcgaggctgcagtgatgttgacagattgtgttagtggctttctattgtttaacaaaaaaagcaggctcaaaagaatgtaggtaacatttaccttatcatgcactgaaacctcaccaatgtccatctatgtcaaaagtggtggggatgatcttaagagatagtgatgtgagcactgaaatttcaaggcctggtttcttgggtgacttgaaattcaatgatgtctgttccctaatgagccagattacagaagggactgattctatcttctgtggctcatctgcaaccagaagcattgcccacaacaccatcaagagtgaaggtgatgaaaaattggtttgagttttgtttgtgtaatgaaatgttttactgctttgtagctgtgtaatataagattccaatgagaattatagttagtttttattttaaccaaaagattattcttagttgaaaatgaagctatcacactattcacttgaaagaagtactgaaattgttcttaaacattccgtctcttacattagaccatgactatatggacaacaaaaggctacataggttgtaatttaggtcaatgacaccaatttgatacgaattatttcgggttatagccattaaaaataaatactggctagagttaatacatgtgatgtaaattgacctgtttatatatatttttttttgaaatcgaccggtttatatttaatatattattaaaattattaatttatagttaaattattctttatttttataaaaagtatatataaattagaaagaaaattggacagtttaattctttttcataaaattattttgaattgtatttttttttttttatgtcatttattcagtttaatttggatagtttatttaagttgggcggtttgtaaattttttttgaacagcggaaacaatttttgtactctacgtgtaaaacttttgtgtaaagagaataaaatgaaaataaaaataaaaaaaaaaaaattccagcacgcgaaaggcacgtgtcatcttttctcgagcgagaagtacagagcagcacaactatggttcgtcttcttcttcttcttcaaattcgccattgttaacctctacaaaccctaatttctcacttctttaactgtttctcctgcattcttcttcttgttgttgttgaagaaagagaagaatcaaaaattctactgcactgcacctacaatctaagtatgaatcattctagttttttttttttttt

SEQ ID NO: 2033 - DNA, 1171 bp, Cannabis sativa
aaaaatccaatgtgttccaaatctacaattaacatctttcttaacaccatcgatttcatatttcataaaataaaactcattgtactctgagtaccttgaagctgaagaaaaagtgaagacgtgagttttacaagtatatgattctgtcataaagttccataatattacacttaactaaaatcgtcaatatattcaaaataatttattgtttcctaagtggacttaaaaaaaattacctggtattcagctcgttgtgccagaagttggagaaccttgccaatttcacgcaatacaagaagagtcagccgtgcatccaattgcacagcttcaatctcttcctgaatacgtgatatgattcttgagatttgctctttggaggggacacttccacggctggtcacaggaaatatagaattcacgagatctgaaaggcggctcaagcagagagtcaagaaggcagtctgaaatatatcaacggctgcaatcattttatctttcccctccaaactaatagctggtaaaacccctttgacatctgtatcacgtgaaattctttcaagaaggttctctatcattaaaaagagtttcggataccccatggtgaaaatttctttgacgaaacttgatgcagtgaaagcagacttcatttggttagcaaatgccttcacaatggcttcccagactcgatctgttaacatagtatcaccttcctaagcaagtaaaagttgatgtaagctaaagagaaagagaaatcaaaaatactgattcccaaattgaaacaaattagcaatcagcaatatgagtcagtaagctattttttctacagatttacagagaaaaactaactactttgtttaattgttctgttctgtctacgcaaacgaaatcgctaacctgataactcagcccacaatgccagacaatgaaattaaacaattcacaagtgtcatttaacttctttcattttacaaatcaaacaaataggagctcacaaaacaatttatacacatatgaactaaaaatgcataccccactgacctgattaacctcatcaagcagtagcacatgcgtgaaagggtcacgcttcttcgacaaaaccctctgcaaatgccaaactgcgaccaaaaccgaatgcagctgttccatacagcccgccatcctctgccaaaga

SEQ ID NO: 2034 - DNA, 2062 bp, Cannabis sativa
aatcaacagaggaaataagaaagaagaaaaagtggggcttgcgatccatgccataatcatcaacaaaatttgtgacttataaaaatgggccatgctataactgctttaaaggggtatccaattaaagttcatgattataaacatttattatttgcagatctatagagagtaggtgagtatactgtatagtgcaccacaatacaatatattgcttattaatttttactattataacacgacaaaaaaacacccaaaggaaaaagtagtgtacatgtaataattaaaatcctaataataagtgatataccattaccagccaaatccatgtagtggatcaaaaactttaaacttgaataggaaaatttaaagtgaaaaaagaaaaaagaaaagcatatatggtctcatatattataattagctgtaagttaagtaaagctagctcctgatcatatcatcaagcttgaatctcaaacctggaacacttgatggatcccatagatatatcaatctcaatcaaattttcttcttcattcatctcattaatctccgccaataactccattaagctacgctgtctgaagatattattgcatgatgaaacaacgtccgggaacaaatctttactcattatattattattattatcactcttctgatgatgatcaacgtaatgcccacttcggagagagatctcaatgaggctttcctcgtcagagatggaaccaccgtcgtcgtcgtcggagaaattatttgtgttgcgcggccattgtagtttctccatgttcttcttttcgtttctgtacggccattgatgctcgtaatcagcttcatctgaatcatctgtcgtggtagaatgataatccaagaactcgctttcggattgtgagtcatcattatttggtgagttggtatgaggaggaatagtagtagtactactacttgtagtgatgatatcttggtttttttcaaagatttgaacactatcttcttcctgggatggtactaaactttggaccagtacagattttggctttgagattatatgtaatgtgaagagatagattattgtagatgttatgatgagaagggtagagaagaagaacttgagcccaaaaactaatcccacaaaagttaacagtaatggaacaaggagtagaaaccatggtggtgagtttctaaaaaagcataaatggttgattatctcatattcaaccatttttttttcttcccactttatggatatatagatcaaactaattaaaataaaggacgaaaatagtatgtagagctatgtgacagtaagccacaaataaactttttctattaatatcttttattttctcatctatagattggatattatgaagtagagatatgcttgaaatataaacaaggatcgtatggtgtctatatgaacccttttacactaaaaatattgtaatgtgggaaaagaaagaaagaatgaaaccaaggaaatggatggatctatatatatatgtcagaatgaaaaggcttaatagctaggatgaggaaaggaaaggcttacatgggagttgaaaagagtactctgtaaaagagggcatcaatatcaagaaggaagaaaatgaacataagctgtaaaatgctttgagatgtgaagaaacaaatatacatgatgaagtactgtttgcaaagaggaagcagcaggggcaatagtgaacacaaacatgagactttttttttttttttttctattacaaaattagtggactttgcaccgagaaaagtttgcaatttggccctcttatcacataaatcacacttccccaagtgccaattactttttaaaataatggtaaaatataaacaaaagggttgatccttcaatttaataacaccaagtcaggtgggttttcccctctgcaactgatgattctcttgaaaacccaaaacccttctctttcccctgctctgatttggactctctttgctttggtatctgagaaaccatgtgcacacatctgagctcaccacatggcacttttgccttccaacttcaatgcagccatatttatattaatat

SEQ ID NO: 2035 - DNA, 1970 bp, Cannabis sativa
cttgccatggatgatacgtaccggccggcataataagtcaatttaataccattgtgttttttgtagtagcaacaaaaacaaataccaaaaacacatttatatatgtatagcaaatattattaattatctgagatttttatatatgatatgaggacgtgtaaagtcttaatttggtcttatgcatgaaccttgccattgattcacttctcattattatgttgtcatttgtattaggaatcgaaatgaaaagtaagttcacatttgattcattaataatttgaagattaataattaacgaattgaaagtgaaataaatcaaatggagtagttataataagttaagaaagacgataatcgagcaaattaaatttgaagattacattcgaaagtgatagttgtgttttgttttcttaaaatatatacacatgaagttttcaagtagatcacaatacataaagtcaaatcaaaaatgaaaaacttgagttgcaaaatgtttactgtaaagctttacttgttgagttgcaaaaatgtttactgtacgtaaagatttgttaccaacatatcgataagtgagtttaataaagttaaattttccatttagaaaaaaaaaacttgatttatgaaaaaaaaaaaatgtaggaatagagatcaaaattattgatcaaattaagaatttataatttaggacggccgcaaatttttaaagttataattattatatttatgtatcatgtgtatccatccaaaaactttatatctatatataatagcttttatatatgaataatgataatgcttttaatcctgaaaataataagtggttacaacttttttttcataatcatattatatatagtagccatgaattaattgactaaaatgtaggcgcactttagccatgggaattgataatattggtttttttattccttaacctcaaaaatggtttgtggttttataataaaagttcttatatagagaaaagccacgtgcatatatgtggcttcattattattggaagttgattaataaaatttttgatgaataaggcgtggatattaaattttagtataaatttccaaattaaataagttactttgaaactacttttttggactcataaattacaagccaagagcaagaagctcaaagcaagctgctaaaaacccatataataaataaccaaaaacaaaatatttatatatagtactatatagatttatataaatatactataaaattagcgtggctctattatctccccaaatgtgcactccctcatacgattcttgatccagaatttctttaagatatttacatactaactatggtataccactatttcttttttcgatttgatgatattaatagtgtctttctttgaactccattactagtttgatcggtcttggtcttggtagttagctgcgatgtcaaatcacatgtcaattgatatttgactaatatatattaccaatatattactataattgagagaactaaggaaagatggagaatatgtgaaagaatgaaacaaattaattgatgaatattttaatttattagttggtaaagaggataaagatcaccgggatgatcatgaattatttatatatttatgagattattgtcttctctttttgttatattatactatataaatggtcatatatatgattaatgcattattaaaagaaaatctctatcattttgttataaaaaagaattactagtttaagtgtgtatttgtaactctttcttctttgatctctctcactataattaaaaaaagtgattcgaccaattcatgaatcaatatgtatttgactagctatttatattaggggttgttttttttttcttttgtgttttttggtttttgttattttaatttagaatattagcgattcaataattttattatttttaacacttaattgtacttaattacataaactccgttgagtttg

SEQ ID NO: 2036 - DNA, 2264 bp, Cannabis sativa
tttttttttgtttgttgcagatgacagtggacaagtagaattgcatgagatgctagttcctgctgtgctaaaagagtcatggcatagcacagagactcctttttgtttgcactcatactatattgagtttacccccaatcctgctgataggatttataaaaaattcggtttatttgtgaaggctagtctcccagtcgaggctgagacaatggaacttgagcttcaattggctcgtgggaggacagtaatgacaaagctcatcccatcaggcgtgacagaattttatgaagatgaggttgggagttatgtttagataaagtttaatatgaaaaaaataaagtttaatatgctgaagtcttgttaagatattctacttctgtaattttacagattattctggcagagaaatttcaagaaatgtttctcaaggtcattcttgatcgcgaggaatttgtttctcaatttgttccattgggaacaaatgtcttttctaaatcaggttctcagaccttctacctgttgctcccagtaactttccatgactatgaaaatacactgagcatagattggaagattatcagaaaatgtttatcatccccagttttcagaagtccgggagatactcttgaaaaaaatattcttgcgccggatgttagcttgcaacttgctgatggtcgcagaaaaataagtgatattgagaatagttttgcttatgctattcatacgaaaagcttttactttatttctcacattgtgcacgaaaggaacgggcacagcccatacacaaatcaagatactgaaacttatatggagcatttagttgaaaggtatgtagtaagtgttattcacttgaacaattcttaatgattgtacgttacgtaactgtcttcctcttaagcctattcttcatgatctcaattggaatatcagcttattaacatgatttatgttggaaaaacaggagtatagcattcataatactgagtggattatatcgtcatatataaaaatagtgctctttttactaagatatttcttggttaattggggagtcaggtttggcatcacacttaaataccctgaacaaccttttctgcttgctaaacctctttcctgtctacacaacttgctgtgcaatcggaagaacaatgattctggtaacctttcttgcttgatttggttttcatatcagaataagattctaatgatttgtgtcaatatattatatttttaaataacttgtcaaatgcattcttctattgaatagagtagatatacactagaaaagattctgatgactggttactatgcaactggctataatatttaattgtgtattatattgcctcgtatttagcatcgctctggttacattgcttatacatgttatacttgtattgactatacttgattgcaaacggctaagaacaacgtgtgaatactaaataatatttgtttatgcagtggatatttcaacttgtagacagcttagtttggtattgaaatgatgatgaaatgaagtagtgaactgaaccaaaccttgtcggaggagtgaaatattgtagggctaggtgtggagcctggcttcataaaaaaaataaagcagttaattgtctgactgagaaggcttctcaggattacaatacaatacagtagttgctttagttctttcctcgtgtagtcttcttgaaatatatatatttttatacaatttggtatatggaaaggtatggaaggtatctcgcatggtgaacccaaaaaatcaaaactatagtgtgatagaaggtggcatatagtgaagatgagacacatgccctcctatgttcgtcttaagaaatcttgacttcatgggaataaggaaagcatttctttcgcatgcatatgtaatgtataaacccattgcattttagggttagttcagggtcactttaatttgttgtggttccattcccactgtctaaggtaaacatgatgactggccattttatgagcttgtaagacccgttaagtcctctaataaagggggggtaaagggctataagtaggtgtttgctactgcaaagagctaattcgttcataacacagttgactgattctatagataaggcatagcatccttggctcaatattatagcacatagggctttcgtgcaactacagcacattgctattagagtctagctttgttaatgctcgacgtagtcttgaatctttgcatatcttaaaagagatagagagctcaaatgtctaagattgacgtcctc

SEQ ID NO: 2037 - DNA, 992 bp, Cannabis sativa
ctccttcaactctataatggcagaaattgattatctttctttggcttctttccatttatccaaaatctaaaggtcatatttgattttggtatatgtttctgtcttttttgaatattgttccagatttcgatttatccaaaatctcaaggtctatccttggcttctttcgatttatccaaaatattaagcttagcttataaatcacagtatctcattcccattttcacaatcatctctctcttttctcttcttacattctcagctcttctcttcaatcaaggtacgggaatggtgttgttcaacatttctcagttgagaccaagcccttcgacgaccagaagcctggaacctctggcctccataagaatgtaattcctttttctctgcatttcatttcaaatctcttcggttccttcatttttgacgttggttttgttatatttgctttgatttagattgaatcgtgctttattgtgtgatgcgtatgcgaaattggtagatcagtgaatcgaaattgaaattgtttttttggatcaggccgatccttattggtagatcgtgctttattatgtgatgcatagttatttattattacaagaaaattcaataacagtgattgtgtcaggatcttcaacaccttgtgatccaatgcttatgtttatgttctttccgtttgacctaagatgcacctgcaaaaggctttattcttgtagtgagatatgaggaaattgagggttgaagttgttggagattagtgtaaagatgggtaaatttttctagaaaataaccattagtgaaaaatgttaaaatgagaaattttcttacttttattgatacttagtactaatggtagctcttatgcaggctttacggagggagagtctcaaggttcaagtaggggaatcccatttattttcaaggtaatatttgattaccatctattttactcttgaatctttttatgtaattctatttaagttttgtagaattaa

SEQ ID NO: 2038 - DNA, 2912 bp, Cannabis sativa
tcctcttcgtcttctatttcattcaaattagttacggacagtctcttcggtacaaccctgtggacaacataaccatcgactgtggctcttccgggaaagtcatggcagaatatcaacagcggagctggactggagacatagactccaaatatttctccttattagaaggctcaaacaaagcttcagtcaccctccaagcggcgaacagaataagtggtgaggatccagtaccttatgagacagcacgactatcaaattcccaattcacctacatgataccagtcacccccggcccaaagtttgtccgattgtacttcttcccagcaacatacaaagacttcaaccgctcaaatgccttctttgatgttagaatcaacgattatactctgctaagaaacttcagcgcttcacttacttctgatgctcttcaaatagatggcatagagaaagagtacgttttgacagttaagcagcgattcatgaacataactttcactcctacttcttctcaagcaggagcttttgctttcatcaacggtatcgaaatagtttccatgccctctaatctatattattcatatggtcttggccttgctattgtgggacaggaaggtcgtttcttcgacctctcgaatgaaactgctatggagactatgtatcgagtaaatgttggtgggagcgctatctctcctgttggtgacaccggcttgtttcgtcaatgggacaaagaagagagcttcctgttcgataaggggttgagcgttttaccagttaattataatacgagccacaagcttaaatacaaagacgataatatttcatcttttgcagcacccgaagaagtctataagactggtcggtctacaggaaacaatcagaataaaacactactcaggagccacaatcttacatggaaattctctgtggattccaaatttagatacatgttgagattgcacttttgtgagataaccaaagagtttactgaagtgggtgatcgggtcttttatatttatatagcagatgatctagttgagaaaaagtttgatatcatcaatttcgctccgggtcaatatgtaccttacttcaaagactacttatggtttggtaataatactgatcaaaagaaagttaatctttctgttgctatacaaccaaacccagatgattaccggacaacttttgtagatgcaattttaaatggagttgagatcttcaaattgagcgataacaaccgtattcttgccggtctaaatcctgatcctactcctgttattgccaggccatccacagatccggagaaaaagaaaagtagtctaattactattattggcgtcgttttaggcgttgcggccacgatagttattatctccgtcgtgggattcttcattatccggcgtgggagaaaagtcaaatacgcagccagcagttcggacaaaacttcttggtggggcccagtctcatttagcacgaccaagtcaagcaaaacacgtggttcatcttcattaccgtccgatttgtgtcgctacttttcattggctgagattaaagccgccacaaacaactttgaagctattttcattattggagttggagggtttggtaacgtgtacaaaggctacatagacaatgggaccgtccaagtcgccatcaaacgactgaaaccggaatcatcacaaggattcaacgagttcaaaactgagattgagatgctcactcatctccgccatcgccaccttgtttctctgattggctactgcaacgacgaccgtgaaatgatcctcgtttatgactacatggctcaagggaccctccgaagccatctctacaacaccgaaaacggacccatcgagtggaaacaacggctcgagatatgcatcggagcggcgcgtggtttacactacctccatacaggttccaaatacacgatcatccaccgtgacgtgaaaacgacaaatattttgctggatgagaaatgggtggcaaaggtttccgatttcgggttatcaaaaacgggtcccactggaatgtctaaggcgcacgttagcacagtggtgaagggtagtattgggtatttggatccggaatattataagcgtcaacagctgactgaaaaatccgacgtgtactcatacggtgtcgttttgtttgaagttctttgtggtaggccaccaatagtaagaaacgcagagaagaaacaagtgagcttagcggagtgggcccgtaattgtcatcataaggggacacttgatcagatcatcgacccacatttaaggggtaggattgccccagagtgcttaaaaaaatatggcgatattgcagtgaattgtcttcttgataatggtaccgaaagaccttcgatgaacgacgtcgtgtggggccttgaatttgcaatgcagctacagaagaacgctgaggataacgacagcattggtggtggattatctataataaagaatgagagtaagaatgaggataaggacaaggacgacgtcggtttaatgaatagtaataataatagcgactgggagagggagtatgggactgagtcaaaaagtagtggcatgtctaaactactcagcagttgtagtggggaagattctagtacgaaggagtccatgaaagggttgtctgggactgtgttctccgagatttatgatccgaaagggaggtgattaatgaaagggttaatggtttttcgttaggatagaatataattaagtaattggttttctatattgttgcactttctttgtgtaagtagtattttatatttaataaaaagtccaaaataaaatcgggtaaaattttgcaatttcatggctacggtatagaatattaattttgaatatcttgtagaaaaatttaattttgactcgtagaaaaaattaaaatgcattttttggtaataa

SEQ ID NO: 2039 - DNA, 3366 bp, Cannabis sativa
acacaacacgacatacataacatatatataattataacaacggatcattcaagcgatataatcaatcttaatggcttcaatggtaactttcccaataccactccttggaactaaagtgaccttgacgctatcatcgtcgtcagcaccgatgtcctccaacaagtccgatatcccaatattaagtttcatttggtcacatgattggacaccaactttgctcttatgtaccactgtagagaaactcccagcaaactccgccttctgaggtccagtaatggcatcgtcatcctcatcattaatgtaaatgtcaaacttcacaggcttatcaatgttgtaatgaattccagaaacaaccaaaacctcttctttaaactccttctcgtacctgctccttgacttctcaggcctcttcacaactatagtcaccgtctcactcaacgttaacggaaacctgctaattggcgttatgttcatgtcctcattattcggaggtggatccttaactggtgatccagaattattagtcttcttcgtcaacattttctgttggtttatcttagttggtcttggcttggaccttagccaaggaagatcaacctcttgataaacgtaccctaattttttactgtcgagtgagtctccaactctaacacgaaccagttgagcattttcgtcgtagaagaggaaagtggagttgagataatcttggtcgtttatatcaactctttttgcaccggggatagatttccaaatattccacattcggtcaatgttggcatggtgactgtaaaacaagggatctctcccagctgagtagaagcttcccatgtcttcccaattctcccttctgttatcaccacaccatatatggattgtattgtgaggcatgctctcgatgctaccttgtccgggatcagggcagtcaccattcttatagggttctccgaaaaacaacaatggaattttagcagaagagaccatctggcggtacataacacttagattgattgagacttgttgtgcttccgataccggaggctttggatttgaaacttctcctgcagtgtagtcaagatcgaccattgttggcggcaagtgacaggggtttcggtttagatcgtaaagaggggaggtctggtcgacgaatatggacgggatctggtagccagaagggtgatcccagttccagaatggtaaagcgaaactgggatcgtcgattaagcttcccaatatcttctcgtaaaagtataagtaccaacggtgaaagggaaagaagagccacgagtggtgaacttgaatgtaatggtcgttaccagaattcacttggtcatacgcgccattgcagtaagcacaatgaacttttgcttgctgaacaaagcttctcggatcgtcctcgggcagagctttcatgagcgctaaggctttcttgtacttggctatgtcatcagggtccatccattgagctgctggccgaattctcaaagttctaggcggttgacaaggtctgaaatcaacaatcttatcgctatatggagggcaacatttgacatccttcagtttttcagaaggcggatccagcaggttgtggcatttcgataggtccggggcctgcaccgggcctgttgcggaggcaagcgggtctagggtcaggccagccacgccgtagagtcctcctaggccgatcaacatgtctctcctgtcaagtttactaggattttttttgttctcatcgtcatcagttgtagcactgttacttgtactggtactggctttgcatgcatgttttctacgtacaaagacaagttgattgtgtttagtggaaaatgggatgcgaatagtgggagcagaaggagtagtactgatcgccaatgggtgagtcagggagagagaagccatatcgtttagtgctgtgttttggtgcaagatactcaccatgcatgaggatattaatatatatgctttttacaaagtaggtagacaataaacaacgtgggtattttataattatttggaatttggtgcaagttaattatattatacataatttcactcaaatgatcgtgttgcataaatacagtaaagtaatatcataatttcactcaacgatatatttgttgttgttttcttttaataaaagaaatatataaaatagtgagatgacactctaaaattattttaaactatttttttttttaatatttttaattttttttaattctttattaaacttataatactaattcattcattaattaaaaaaattatatatatataataatctataataaatcacttgataaacgtaaatatatatgtacatataataaataaaaaaatcccaactcttcattattttgtttttattaattttaaaatttatttatatatatttttattctactattatataatgtttattgatgcattatccaatactttgactattgatttttcattgattttgagagcatttataaatgcatgcgttataaatcaagttagtaattttcttttattttcataatttaaaatatttataaattaattatgttttgtcaaatataaattattgactttgttttgtttttcaggtgatgacttctttcgtatataatattttatctacttgaatcaatataaacaattgtaatatgtttaaattatcaaatatatttatttaattatattaatgatttattctttcataattatcactacaaaaaatagttagttttagtgataatattttaattaaaacataaattttttgtgaccaaaaatcacaataaaatattacttgtgactaaaatatagtatttaattacaaatttttactaatttagttttagttacaacaattattgtgattaaaaatacatttaatcacatcaaattgtaattttgtgactaatacatatggcaagagactttttagtgataatgtaagaatagtgttttataattagtcaaaacttttttatttttaatcacaaattttattatgactaaaagtaaaattttttgtattgtatatataatatgtattatgatttatgacttttaaatatcatatgtaatatatattataataaatgaatataagttatataagtattgacacatgattggaatcaactagcatgtattttatttaatagccgatatattgtaacgtaatagaggcaacttaataccgggggtctgttctattaatccccaagacatcggatttgactgctcttaattagttattgcaacccttcattactgatgactgggcgattaccagcaggcgctgctggtaataatcaataccagcaaaatttcctattaatactgcaggcgggaacgtccgctcctattttt

SEQ ID NO: 2040 - DNA, 1882 bp, Cannabis sativa
caaaactataaaaatgtaatcttttcgcgaaaattgaagtttacctgcaaaaggaggctcttggtttcttcgaatttatccctcaagagctgtccaaagggctgaagttcctcagaaacaaggagtttatcatacagcgcagaaatcgcggggtctcccttggcgaacaccatctcaaccaaatctattgtgaccctaaagaatggccatgagttatacatgtcttgcatcatatgaagattcctaatatctttctgaatgatgtgtttgaatgctgctccgaatcccaaccacactggaagatggaaccttgtttgtgtccaagcaaagatccatgggattgcacgaagggattcgattcctccacttggctttcgctttgaaggacgactaccaatgttcattcgtccgtactccaactcaggtgtagcctgcgatcggggatcataatatggttagttaaattaagatttgattataagaaagtgattagatcatagttggttgttgaaatgcttgcttaccagacggaagtactcgacgaaacgaggctctttgaagacgatagagcggtaatcctctgtagcaataatcgccatttcatccataagtttacgccattctggcttaggtgaaactggtgggttcataccgtgttcgagtgtagcagcagcaaaacgctgaagtgttctaaaacacaagtgttcctcaccgaacgattgttcgatgacttcaccttgaacggtgacacgaagtgagccgtgaactgtgtctggtggttgagacaaaatagcgagatgacttggcccgcctcctcttccaactgtcccaccacgaccgtggaacatagtaagcttaacaccatactttttcgcaacattgataagctcttcttgagccttgtacaattgccaggctgcagagaaacgcccagcatctttacccgaatcagagtacccaatcatgacttcttgctttccactaattcggtttatgtaccaatctattgagaaaagccgagccaaagcagccggtgcagcctccaaatcatcgagtttctcgaagagaggaacaactctcaatggagtcttcacatgacattcgcgctgtaggagctccacagcgagcacatcagaaggcgcagtcgccattgagataatatatgcaccgaaattatcagaaggaagttcggctatgacatgaaatgtgtccaacacatcagcaatctcttcagtcttgggaagatcagggccaaacagaggacgtttgccacacagttcggataaaagccattcctgtcgacgatcttcagaccattcacggtatgaaccgatttccaaatgcttggtaatagcatccatgacatcggtatggcgatctgactcttgcctaatgtcaagtctcacaagagaaagcccgaaagttgaaacttgtctcaagaagtcaagaagggaaccatcagcgatagctcggtcaccacaagcacaaagtgatcggtagcagagctcgagaggctccaagaactacaagtgattaaaagaaaagagtaagtaccacatcgaattattataaagataacatacagattaaagaagttaaaagaagcgggaattacatcgtcgagatttgtaaatgttgcatcctctggaatgtcagagtagccatttgctaacaaatgacgagaccgctcacgtgtttgataaagcttgtctctcacgtcaccaagtatcactctatatggttcactaacaggaatttgcttccaaaattctatacaaaataaagaaaaaataaatcagcgattaatactaacagaaattgattaacaaaaatgtaaaataatctatcgaaatattcaataattaccaatgtagtgtttagc

SEQ ID NO: 2041 - DNA, 1448 bp, Cannabis sativa
aaaggttcatatgttaaatcatcttcatatagcctatattctcttctatatgttgaccctgagtactttacatacggagcaggaaacacaactttctgtacatcaaaggaacattcaagatcctctttgtgattcaagtaacttcttggctgctagcaattcaaaattaaaaatttgtcttttagcaactacatattgtcttatcattgattgatatgaaatgacaggtatgattccatatccagagccttatcagaccacatatcagcggcgccgacttggtgcattggggattgagtggcaaccatcttccataaaatttgctgttggcccagattttagtttgggcctagattatcaaatgcctcctttggcagatttggagagaatgattgagccacttccagaatttgttgatgccatgttttgggagcctgaaaatgaagtcatgagtgaagatagtgattctgagtacaatgttactgacgacaactccagtgaaggcggcaaggaaagtattgttgttagctcatctgatgattcagaatgcagtgcagaagatgatgaggttgggaatggttataaagatggccttcgaagatcaaaaagaaaaaaacacaaggtcaaaagctttttcttcttcttttttctttttttccaagttcagttcttctgaattatttgaactgaaatattttgttatccagcttcatttaatctcttcttccgggagacgtatcaagaaaagaaatttagatgaatctgcgggccctgcatctaggaactccaaggccaagaaaccaaaaactagtcgtaaaatttcaaagaagaagtcctctaaatctaaaacattgaggccccagcgagttgcagcgcgcaatgctcaaaatatgttttctcaaattactgaaacttcttctgatgatgaagaagtagaagaagaagaagaagaagaagaagaatttgaatcagataatgatttgtcagatggaaatttgatgctagaagatgtaaacatgcagagcaatgaatctgttttgaactttcagaatatgcatcatgctagagaggaagaaccatcctcacttgaatcagaagaaaagaccaagccatccaaattttctgaatctcagtcaaatgttcagaagaagccaagattgctcttgaagttttcacttaaaaagcaagtcgttagggaagacacaaaatccacatgtgacagacaagctgactcagtacctccacaaaattccgttgtagatcctgcctcaacttcaacagatgtagttgatctggagctgtctcaagaccaaatcagaaatgaatccacaattatggggcaacctgagagagctgagttttatttggaggattctgcagagaatgaaattaaatggggagaggtcaagacgcgcacatccagacattcaaaatcagaagattttgat

SEQ ID NO: 2042 - DNA, 1305 bp, Cannabis sativa
gggggggggggggcgtccaaaacgatgaaaacacagcgatttttgggggatttaaagctctatgaaggttctttccctttccactacttgggagttcctcttagacctactaagtgaaaagctgaagattgtggagtaattattaaaaaaattcagaagcgcctacacacttggtccaatagacatctttcttatgaaaggagagtccaattgatccattcagttttatttgggcttctgaactactggatgagcattttcattctccctcattgtgtcacaagggaagttgaacgactttgtagaggcgttctttggggaactaaggggaattgaagcaaactacatgttgcatcctgggacaaggtttgcttgccgaaatcttatggtggtttagggttcaataatggtgtcaaatggaatcaagcaattttggcaaagttcatttgggctatctctgagaaaaaggatcttctttgggtgaaatggatcaaatccatctatctcaaggaatattctttttgggattacaatcttaaacatgatacgagttggtattggcgcaaactttgtggaatgagtcaaaggtttgacaagcaggatattttggctgctggagtgaatggtaagtttagctcttcaaaactctataacaacactttaattcagtcaaaagtggattattataaagcagtttggagtaccttgaatatgcctaaacacagattcttactttggcaagttgtgaactctcagctactaactagagataacttgcttaagtttcatgtgcccattgattcagtggactgttctgtttgtggtatagataatgtgtcccatgatcacatttttttctcttgtttgctgtctcaaaagtgattgatcaagttttccattggatgggctggagggcttggccgaaccatttcaatggttgggtcaactggatgtgtgagcctaaaccaggtattgtgcacaagattaatgtgatttgtttggctgcaacttgctacagcatttggcagaataggaataggtgtttatggagggtttttccaattctgttcttaagattgttgaggagataaaatgtaatgtgcagagtagaattcaggttgttaaaaataggaagttgataaggaatggaaagatgtatatacaacattttttatgtaactagagcaggttgtttttttttttttgtggtctgctgctagttgctggtggtttttttttgcggtgggtgtgttgtaaggtgtttgtgtgattaatgaagggccttttcttcttgatcaaaaaaaa

SEQ ID NO: 2043 - DNA, 4480 bp, Cannabis sativa
taagaaactcgagcaagaaaggaaatgagctatctcattggctgactgtttaaattagcaacccacaatcgtacaagtcggacgaagcccttcaaggagacaatgtggataagggacacctcctcttttatcatcatgactaaccacgtttaaattaactctcaaagtgaattttctttgctaaataaacagtaaatctttactctctcgttccttcaatttttacagcaacaataaagtcaagctactgtttctaccaatgccatcaactgagaaaacacattcaaaccccatctgccttttcccccattcaactcgaccctttctacagttagtttcacaaagaaaaatgaaactacgcttcttttgtaccaccatgtccttcaacaattgtaaagcctaagtgctgaaaaatgaagactaagacaagagtgtaatggaaaagatgaagcccccttatcggattggaaccgatgagttacacttcttagggagtctaaagagcatgaccctaccatgaaatggcccgttgattatgagtttacagcatttgcatttataaatagataatctataaagagaatctctaacatgatgacattatgtctaattattagatacaattatcattcaattatgaaaagaatgcaaaagaaaatacaaaagagaatctccttagcacttttcagtcctcgtattataaagttacaaggcgaggcaataatagaaactgaataagggatgcttttaaaacatatctgtgtttcggctacccgtagttctcgaaagtccagcttcagttatgacaagtgtttacataagttttggtccaatgtaaggaccaaaactcaacaaacaacattaacataatatgtttcagcaaaaaaaaacaaacattaatataatacggccttagcatgagcctatcttattctataacttacaataagatttattgtaaagcatataatgtaatagccaacccaaccccatcaacaatggaattaaagacaattccacatggaattggaattggagttaagagagaattacagtgtcacaggcgacttctgtggctagaagcagatggtttgaagctggcgaaaccagtgatttctctacctgtaaccaagctgttgatgtcatacgtcccttcaaatgtgtatataggttctagatcacagaacgcctaaaaagtgatcaacataagagtcaacataaacataaaattttagtgtacacatctgaactctgaaaatgatagatgagaagaaaaaccttggctactaagaaatcagataagatgccgtttccgccaagtaattcccgtcctagagagacggtttcccttgcctttaaggttatccaagcctgaagattacaaacattaaggaacaaaacaaaatgtatgggatcaacaatgtgaacaagagtactaaactttttgtattattaccttggctaagctagcttgacctggagtcattttaccggtctcatagagcttgcaaagtcgccaacccatcagtagcattgcttgaacattgcccagcatacggacaagtttctcctgagtgatttggaaagctgccagtggagctccaaattgtttcctctctttcagatacctggtcattaatcacttaagaaattccagcaagaacattttaaacacatttgaaaaagaattgagctttaaagtacctgtgacacatgtcatagacacccattgatataccaataggttgccaagcaaccataacacgggaaacagcaagaacctgtttgaaatggatgatgacaagtataataagatgaaatttaacaaaagctaattaacaaaattagaagaagtaacataaaaaaccagcagtataattttcatattaaatggggaaacagtagacttaagagaacctcgtataatcaaagtaactgtttggtaatcttaatttgctggcttaaaggaaaagtattgcttaatgataataaagaggtttagagtattactatttgtagttatgcatgaaagcaataagcaagaacatgtactatattttatttttgaagttttttttccccccctcttttcaattgctcaacttgagattacatttcaatgtaagagcataaatacatgtaggtgcagctacatttgtgtagaatgatgtggaaagacacaacacacataatacaaatataggtaaaaagaaatagacaaaaaagaggaccatttcatgaaaccattaatagcataccttgctagtatcctgaaaagaattaactccaggcaatctgtcctcatcaggaacaaaaacctttttcaagagaatatctccattctgaaccattcgcagacctattttattttctattttggtagctgttaatccaggggcattcttgtttacaataaatctgaagcagagagaacaagtatttaacaatcagctctattaaactcattcaaatcttgcaacaaaactaaaacttaccaaatacagtttgaatacatatacgaaattaaatagcctcaattgactctgcaaaaatcaatccttcaaaggctaacattcttgtgctcaagttatctgaaaatctgaagtccacactcataaggaatgataatagcgaagtgtggtttgttgggtcatcgccatatcatcccccaccacaaccaaagtgcaaatgtctgtgtctaatagataggtgtgcgtgtcatcgcccaccacaaccaaagtgcaaatgtgtgtgtctaataaatatgtgtgtgtcatcggccaccacaaccgaagtgcaaatgtgtgtctaataggtatttggtgccacacaataatcgtaaatgtatgttcaaaattacagtataaaaaggagaaactacgcagctatgttgctcttgtctgtaataatttttgtagcttttaacttgaattttcattgtcagactgacttataatacagctatattccaattgggcaacaaataaattccatttgtatgttccaaatatataatcaatattgataacaaatatgatgcccacaccagaaaaacaacaagacacttgctagaagaaaagaatctatgcaacgtttaagcatctcataaatttctgagaaaattaaaagctggcatgtcctattcttacgacaacttcaactcatagaaagaagaaccagcataactttgttctacgtacccatttatctgatttgttgttgtgtttcgagcaaaaataatcaacacatcagcaaaagtactgtttcctatccaacgcttttgaccttcaagaacccaacctccttcaacctatttatttcaaccgaaagcaagaatatcataataaataagctacaaattgttgaataaggatagctatgataaagacacaccctgcccccctcaactccttttctctccaaaaactaaacattaaggcaaacaaacaaaaaacacaaaaaagaaatataaaagttgagttcacagaccttagttgcagtagttgctaaagaacttgcatcacttccatagccaggttcggtcaaagccttgacattcgaaaagagaaaacaattagtacatccatttaggtctttgtacaaaaacataaatcaaacaagctagcaggaaaggtcatctcacccaacaagctacagtttttagttgggccaaagaaggtaaatatttctccctttgcgcctcagatccacacaagcctataattgacaatgaaagaaggttcaatgcgagttacaccttatcaaaagcacaatatattcacacctcaatgactaccatgtaaataaaagtacacggtggttagaaatctgaccaatggtgagcattgcaagtgaagaatggacaaggacaaaagttgaacaactagcatcaactctagcaatctctgcagtagcaatggcatttgcagtaagagaaagaccaggacaaccataacccttaattgtgccaccagtaacacgcagggcacccagatttggaataatttggaatggaaactctgccttctcccagtactgatgaaacaacaatataacccatatttttcacctagttaataaatgcatatagaattgtcatgtacagttgcattagctaaaaattacctctgccattattggtgctacatctttttccatgcactctcgaactttcatcctcacagatttttcctcatgagtcaaaagatcatcaaagatataataatctgaagctgaaattatggccaattcataaacaaacataaaattcagtcacctccataaaaaattgaaaaataattttgcaacaacaacagaaaaacttaaatgaaaaaataaaactcagttgagcaaatttaagatgaaggaaaaaaaaaaaacttactacatggaggaaaaacagaagctggagttgcttggggaaaagcgattgagacatccagagctggtaaattaaaataagaggtccttgcgttctcat

SEQ ID NO: 2044 - DNA, 5048 bp, Cannabis sativa
gagagttggggttctgccacgtgttaaagctcgcattggctacgggttactggaacccaacgctacgattcctcctccgattataggatgagacatctttacggttgtgatatcgttaagtaaaaagttaacggttctgatttgctgattaaaataatgcctaattatgataacgtttgctttgatcgcacgcgagcttggtttgcggcttaaaatgggctctctcggcttggcttaattgtcaattttggcgtattaggcttcatcagttcctgagccgacatggcatacttgatattttgagattttttttattgtttttttatatcaatattttgatttattaaagatgaatagagttttttttatttcacccatcatccgtgcgaagcaaataataattgtgtagttaaaataatggacaaacaatcatgtctaattatttttaatcatagattttctaaaccctatagaaattaaatctcatagtttactttgattgagatttgatggtttggtaaaactttcatttagctttttcaaggataaaaagtgtcaaacttttcattaagatatcgtttaatcaccactagtttccattactactattattttactcaagagtcaagatgaatagcgtggttcaagtaatgccattattttttatttttttgacattttaattaatgacatgctgctaataattactctctaacaaagacatgttaacattataaattttaaattaattgcataatatcataagataagataagataatactattacaacaaaatactataatcaactgaaaatagtgatcaattaatgagaatcgatattttttttttcataattttctttgaaaaaagaaagttgttttcgcttgctttttggcaacgcgacaaaactaatattacttccacaaaatattctattaattatatattagttaacttaactaacaaggtatgtatcacattgttttttctcctaatcatatcgatttcttaaattaaacaaatgtttaaggttaatgtagtaatatttaatcatagaagttgacttgatgttcttctacttaaaataaaatagttagtaggaaaaatacaaactcagccactatttgaaatctctagagaatctaagaattacggtttactaatatataatatgtaagcttaagcttccaataaaaaatatattttgatattattattaaactaatatatatgattagtggacattcttgtatgaaaaagccataaaagctaagccggtccaattagtttctcacttaactactacaactagcataagcataagagagagattttcttcctatatttgaagtctggtcgtcactttcacgcggacacaaatagatagctcatctccatcgaacaattctccagaccctaattatctctatttattcctttttaatatttttttttagttctctctaattctcatcccagttgaggggaaacccagttgagaagaaggaggaaaaggaggattgagttttttctttttatggagcttttcagttaagaaattcagtgataaagggcaaaaaaaaaaaaaaaaagttgtcttttccggatttgcttttggctacgcggttttatcttgtggcgaattgagtatgaaactcgaacatgttatagcctggcagtaagtaagtctgttaatttgctttgaagagtggcgtttctgtgtttgatttcgtctctgagttacaaaaaagagaaagagaacagagaaaagttgcacctttttattcacttttaagctctgcttttacctttttctaccactgaaaagctcagggtctgtcaaaaaccctggaaaacttttttcgaaactgaaaacccattttactttcttctattcacaatccagtttacccatatttaaagacaagggagaaaaaaaaactcaaaatattcgctgatgggtttttgagttttcctctgtaaaacatttctggaaaagtaacttctctgttctgaatttgagtttgatttaatcccaattcaagccctcaacactgaaattgttttaatctgatacaaacccactttagaaaagatcttaaaaaccaatcttgtatctctattactcttttcttgtctgggtttctgaaaaagaaaggaaaaaaaaaaggttcattttttttatcttttgggggtgttgaagatgcaagaccctgcaacattcgagcccatcaaaaccaattttccagagcaagaaactctgaaatgtccaagatgtgagtccatgaacaccaaattctgctactacaataactataatctttcacagcctcgtcacttctgcaagaactgccggaggtactggaccaaagggggtgctcttaggaacattccggttgggggtgggagccgtaagaatacaaagaaatcttccaatccaaagcgatccacaccaacatcttcctcatccctcacaagctcatcgacccagaacccggatccacaacccgaatcgacccgagtttacggttctcctgttgatcaagaccgtcggttgctagacctcccaggaagttttagctcactgctcacgtcaaatgggcagtttggaggcatcatggaggggataaacccaaacgggtcgggtaccaaaatggggcgggtgagggaagctgtacattcgggtcctgagctgaattctgattcgggtcagagcttggggatagaggtgcagagcagtagcaattcagagagctatttgagtcttcaaaatggggattccaactgttggggaggaggacatgagtggccagaccttgccatttacactccaggttcaagttttcagtagaaataaataaagaaaaaaaaaagaggaaaaagagtttgcttttgcttaaaatatcttttttcttttactacttagaaactacaatggttaagtatattggagccaaaaaaaaaaaaaagaatggctcaaagttttaattgtagtattatattattctctaatgctatagagtgtgagacattaccaaaatgtcatgccatcccataccatatcattatcctttgttcttttgagtggtttttctttgtatgatgtatgttatatagatttatatatagcctacacaatataattctgatgctaatttgtgctttattttatttattagtgtcaacaagtaagttaatccaaagtgtacttagtattgtgtttgtccacaaacaagctcttgtctcttgcgcatatagggatgtatatatgtgtgtaaggtatgctatgaatatgaatgttacatgtattggtttgtgtatgcatcatatacgtgtatggtatttttgataaagctaaagacattaggatttgacacctttgttttgtatgaaaataaaataacatatgtggagtggtgggagatatgggggagtaatacagagcacatttcaagttttgttgtttttagcctgtctttcgagggccagacaaagttcaactccctttcttctcggatattatttcttattctaaagttttcccttcatcacaacatgccaagaaaaaatcattctcatttaaaagaagaaaaagaaaaaatctctcttgttgaccaacattatccctcttaagtggagcatactattaaactaagtgctcatttaagtatgacgtactttgttgtttaagcaaatatttttaacaattcagaccaatggacatgtttagtgtaatatcttatgttttttttttgctggaataaaagttcaaattttgtgttgttttagttttggtattaaaaatatcataaaatcggtggacagggatgcatagtttatgactattgatctttatatagcatatatcagattttattattcctagattaacaaccatttgaaaatgaacttctttgtcaagattttactagaacaagttgatggaattaggttttatagggagttaattgaatgtttttatttttgttttttcaaatgaaacgatagatacgaagacattttttgctttcaagggagttgaattaccattttttaatgtgtctctcttcaatgggtcacacatggttatttgcataattggaccagtctatctatgtggttagctccaactcatatacgaccaaccacatgtttgaagtggctgggtcgcttcagcattataaaggacaaattggtccaccaagaataatccaccggtattgatgtagactttactctacagaaatcaacggcttaaaacttatttgcctaaaaaaaacaacggtgattgatgaagctctgttgtgtgtgtgtgtgtattatagctcttgtttcttgccaaattgaatgaaaatggaacgcattcaaagacttttttttgcttcttggttggccttatttattgtggtttatactgttaattatggtacacattctatatgctgtaattgtggacttttgactaatcgtttgggtaaatgggttgtttgatctcactacgcataaaagaatagttaaagaagtgtgaatgagtgtacttctcatcagcaattttttcagattgggttgcctttttctatatattttacttcgtctatttaaactatcccactaaggtccaaactagtgcaattaattattaggacttccacgagctaagatgctatgggaatttaacaaagtagaagcaaaatctatcattcaagatttcatacttcgcttccaagttttttcctctttaagtattcacttttatgttttagacttaaaattttaccaaaggaaaaagaagaggaagaaaatattttccaaaaatttgatagactagctattgagattaacacaaactttactaaattgtaggaaagataaacaatttgtagggagagtgaaatctcagctcttatttcgaatgggatgaatccatatatacgcaaagttatatgatttcatcataaaaatatacaaccaagaaaattaaaaaatatattttatgtttatggttgacttatgagatattctcaattaatgtaatagttgattaaa

SEQ ID NO: 2045 - DNA, 824 bp, Cannabis sativa
cctcatcagcctcctcgaactcagaggaataaatttcttcattgaagtgactcacgcagtcatgaccaaaagcttttatttttctacaataaacccgaacaaccttaggtctgccttccttctctgattccatttcccccttgtaatggagaacagactccgttacgtttcttttaagtacatcaaaatctttccaaaattgaatgatagcctttgtgaaattctctcgggctttaggattaatcgatcgaagtcttccatgaaaaaactcttgtataatctgttccgggctcatcctcttggccacaacattctgctctcttctaggcccaataaaatcactcatcaccgagttctttgcccttttaataaaaagatcttggaaaccaacattctggtccaaggtaatattaaaaaggcccctacagtaaaacccaaactcccttaatttaatatgtaaggccggcccattcccaggaataaactcccagcccgaaactcctccataagtaggataatgcttaacgggcccatttatgtgcaggcccaccttttctggaaccctaactcctcggcccaactcactcaaacccatcttgaacctacaataatcccctatttgacagctggtacgagaattaaggaagacattcaaactgggatttctacatacacgtggccccctcaaacttctcaagaggcggttatacacggtatggaggcttaccaccattccctgctcacgtacgcatgaagataaagccatgtcttctcgagacttgatactgaagtgaccatactcattctcggccgcctcaccagca

SEQ ID NO: 2046 - DNA, 1587 bp, Cannabis sativa
acaagcttcttgtataaaaaaaaacagatagcaaaccagaaatggcagatgaagaactcaatccagctacatctcaatgtttgcacctgttctcagcttttcttgccatggaaccctcagattctctgatcgaattagctcggatttgcgatgaagggtcggtttcagaaagagtacagagattcatttggagtcattgcataagcaaagttgaaggaaaatttcatgcaccttatttgaagaattttttgaagaagcttattagtgaagctgagaagaactgctgcagtgttttagatgaagtatatgaacaatatgctttttatatgacttcattaaaggatgaagtttctatgggagaaactaaaagagtcaacaaatgcatctcatttctttttcctgatggctatccaaagtggaggaaattgctgatacagctccaatgttctcttaacatgcttgaaggggatactgggtgttcagtttggccttcaagtctttatttatcagagtgtatactttcctatcctgaattgttttgtaataaatcttgttttgaggttggctcaggagtgggtttggttggcattactctttcccatgtaaaagcttctgaggtgctattaagtgatggtgatgttttgactctagcaaacatgaaagttaatttggagttgaaccagttgaaccaaaacaaggtaaagtgcattcatcttccatgggaatctgcaacaaaggaacaacttcaaagctttaagcctgacataattttggctgcagatgttatatatgaccctgtatgtctcccacatcttgttcgagtagttgcaactcttttaaaccacacaaaaaaatcatattctgaggaggaggaggttaacaactgccaaggctcttcaatgggagaaacacaaggcaatcttggtctgggcttgccatggtggaaaggtccagtggccctcatagcttctgttattcgcactattgacacattcaattattttcttgaattggtagacaaggctaatcttagcatcacagacataacccaaacactcaaacctgtgaacctacttccttacatgaagtcatacaacagatctagtataagcctatttattgtgtcatctaaataactaattctctccctcctcttcccccaaaattttccttcattttcatttttttgcccttcattcaatttttgtgttgtattgcaagagaaagctttaactctgtattgattcttccttaaaacgataatggttttgaagaagaaaaaaaatacgatccttttgatcttcctagtaagaaagttgtcacctttttctctttggcttattggcaccatatttatttatttttttattttaatacagaaattagtcgcgatttttttttaatgttttaatttttatacacgaacttaatttttttattcttttttttttagcaaaattactttttaaatttatttttctttgtaaatttaaagtgttagttaaatatcaacgtcaactaccaattggatcaccactgtatctcaaaatatattagttttgataattttattttttgacaaattgg

SEQ ID NO: 2047 - DNA, 1163 bp, Cannabis sativa
actccaaaatcattatttctaattctagcacgttaactggcataactatataaaatgtactaaaataacatgctttgttgcgttgtagttatccaaaatattatattatatacgtaccttgaaattaataatatcgatgaagaaattacgaagctcttatatattcccagatcaaataaaacgaaataaagcccagatttctaagatctgatagctttataatttgaagatcaaagcacatcaaatatcaacattaatgtgatattatattgaacaaggaaatgaatatataatatatattattgtaaaatgaagaagagaaataagtgtattattatgtataagaacagaaagtgaagatatatttatattacatatgtattcaataacatatatatatacacaaatattgtgcatatatatagagagagatcagagggggaaggggggagtggtataaagatgtagggaagggagatggaaagagataaaacaggaaaagtgtgagtgagaggataaaagtgatgaaaggataaagagaactttatttgattgatgatagatacatgtgtatgtatatatttatatatagaatataatagctatacatataagaggtgatgaggaaaagagaggcaaataattgttatatgatgatctgatccagctgctagagttgaaattggtaggtcttgttacttcgccatttttttctcactgtgataagtttatgatagtgatcgatatatatatttaagaatattatttatttataactttataatcaactactatattgctgcttatttataggattaattaatagccactggggtcgttgggggtatatatactaatatatgtacctgtataattataaccatattataaaagtttaacgtatattttatagggtcataataattaatttcaaccttctgtctaaaccatataaagccagccatttattatagccaatcactacccaaaacccacacaaacctaaattacttttcaaaccccctctctctaagtgctttatagattcccacctaatttttcagggaatgcagcccaaccttaaattctacatttattgagtgagtaaagaactttatgagattagttgaggaactatacacactacacactatatacatata

SEQ ID NO: 2048 - DNA, 2590 bp, Cannabis sativa
agtgtcatttttgttggtggccggcgccaaaaacctttccaaacactcctgcactgttacatttttgaaattgaaagaagaagaagaagaagaagaagatcagagtgaaagtgaggcctcaggcctagatagatagagatcgagaatgagcggagccaaattgtgctccttgttaggtgaattggggtacgaaggtgcggatgcattagaccctgatagcttcgaatggccattccaatacgacgacgcacgacctattctcgactggatctgttccagcctccgtccctctaatgtcctttcactccccgaactatcccagtaaccttcccttctttctctttctctcgttattttacattgtttttgcttgccgagaaactctagaaatcagtggaggaatcgttgtgaattactgggttttatgctgtttcgtttcttttggctgaatttgaaatgaaatgtgaaatcactggtatgtaattatctgtatgatttggtttctaggtatggacaatttcttcaagaggggaagctacttgaggtatgtgtctgggtttccctttcttagtttcatttggtgcagaattgaaaattgtgatgaacaggttgaaatgatctcaagtatatgggctacaaatgatacttaatttccatgattgggcagggtgaagacttggactttgcctatgatagcatttcagcttttgcttccaggagagataaccaagaagcagtttttggagctgaagaaggattgaaggacatcaggtaatatacaattttgaatctttgatgctacattactgtctttaagagggaatatcttgaaaaaaatttggttaaggaaattttttgtgcaatatgattgattctatacaagcatctatttcgacgtgaattatgttaagatggggtggaatgtaagttatttatgtgtaactttttgatataaaacaaatagaatgacttataagaaatacagtttgatggttatttgtcttagacgtattgattaattttagatattcggtaggtttttaacattgttaatcatacaaatttaggatgtgagaattttctcgtagagttctaataaacttcttacttgttttagggatgcaactatggcctatagaactgaagctttagacttgcagagacaacttagaagcttgcaatctcaatttgatatgctgtctggtcaggcttcttccttgatacaagggagacgagcaagagttgccgctacatctactgtcaatggacaccttacgactgtagatgacagcctttctgctagaaatttacaggtagctaggagacaagagttttctttattttatcaatatttgggaattgtgcttctgttctggctataaagtaacttgtgattaatttgttctttttaaagtaatttgttgatgcattctgtgaggttttttttttgttattgcaatctgtgaggttttttttgtgattgcaatctacaagtaatttgttaatgaaatttacatttatcaagtgaaaggttccccctcctttcttttcccctcgtgatgccataatgttgtgttccaacattaaaatcttgcaaggaagtaattacctcatttttagttgttgtgtatatttttttgacaagtgatttttttttttagatgaatgcagttctagaaaagattgcttctacctcagaggagttggctcattatcattctggagagggtattgcttacttgtacttgttggctatatgattcttcaaaaacgatttgacatatttattttcttccctttgtgtacattccataatgggactaattaatggctaaccatgcataaataataaggcttaatcctttttctgctctaattagctctattttttacattcagaggatggaatctacttagcttactcttactttgatccctacttggttggagattcagcttgtataaaggagctaaatcagtggttttctaagcagttggacacggtaccaagtataaacatttattgctgttttctagaatgtatattgtgatttcttctgatactctttctacatcatttttaatttatcagggtcccttccgattagttgctgaagatggaaagtctaagtgctcatgggtgagtcttgatgatatctcaaatatcatcatacgaggtaattttccagctgccttggtgctgtcctcatcaaatttcttttcatttctgtattgtttttccattatttcttgggtatacggattcccccttgtttccctaatgtatatttatgtatgcccattgagagagacagaacattatcttttaacttttatagaatttattttattatttttaaggagatttttggaatgaaaaatcttttttctttgttggaaaattggaaagattgtcgtctgtcgtcacttgtgagtttggccatttttattttccgcaaatgaatcttctctaattgatctgtttttgcagcagatattgaaacatctcatcatcaacgtgtctctgagttgcaacgacttcgttcagtgtaagtttttcttaattctatggactggtctatttcctttg

SEQ ID NO: 2049 - DNA, 2074 bp, Cannabis sativa
ttatcaaaccgattgtggcaaactggtgtagtgtgtccaaaatgaagacaaagctgacattgtggcctattgttggtgttgggaccacgaaagaattcacgaccaccagtcttggatccctgaggtagtctggaggaaccattccttgaattgctaatggccataatggccatatttgcttgcatctgcatagtcagatctatcataacaccatgatgttcaaggcggctttcatgagagagcaggagagcttgaacctcctcaagatttagtaaatcgcttcttgcggtgattctagatacaacaaaatcaaattttggtctaagaccattgagaagctgaagaataatatcttattcatgaatttgagaaccaacaatggattgaactttgtcgacaaagtcagacgacaatccgcctttacgaattgtggagaattggctctttaactggaggagtcttgccttggattgactggcaaccttgtgttatagagcacgccagacagtaaccgaggtttggaagtttgcaatagattagaattctttcaatcatggaagaacgaaaccatgagaggagtaattgatctttttcgtttccattgagcaaaggcaagatttggtgcaccagtaacaaaatttgccggtggtggatttccattgaagagaatttcaacgagttcgtgaccgattacagtaggaataacctgcgatttctaagaaagaaaattagttcgatcaagtttagttgtcaaggttgattgtagggagtgagagaaaggattccagcttgagtttatctggactgtagggggatcattggtcaaagtttgaccaataagagctccggttgcaagatcaacagaagtggacgccttgaatgagaaggatcaatggcaatctgataccatgtaaaatttagagattaattttgagagagagagagagagaaacaaagatagaaacaaagaatgcgaaagctcaattatccacataacaaatacagagtatttatagagtaagtactctatttacaacaatattaaaaaacaagaaaatgaaaacaagtgacaaaattctattatataactaacaactaataacagagtttttaatctgatttttcattaacatatttccatcctattttcaatccatttttagctttaattcctcttttaaaccctatataaccataagatggggcaggatcaatacttaaaacaatagtaagtataaaatttagcaggtcacggatgtgtccattacaatgtatagtggtatggttgtaatttgttagaaagaagaggtcatttttagtaactgtaacagaactggagagtggaagaaatagaagtacatatgcacaccttagacatttagatgcagtacagtacacgatcatcaaaccatctatctatttatctatatctactaatgcttttcatctgtcataaatggccttcacgtgccacacttaacgctttatcatttcttaaaaaccactaaatccaaaacccactctgtctcactctaactctcactcactctctcacccaaacccaaaagatgcaccaccattactaccctctcccactcttcccttcttcatcttcctcctcaccatgagaaaaagacgaaaacgagcccacaccaaatttctaacctctataattatcctctcttcttattccccttctctgttaaaccccaaataaaacatatcatattataatataattagaatatatacaaacccagattcggatttttgttgataacccagaaacaggggtgggaatttttttttttaaaaatatataaatatattaagtatgtgttatgtgggcaaagcaacaaagatctttattttcatagtgacggttctggtggttattggtctgatcttgggatttggccttctacgccatggtgtccatcacaaggaccataaatgctccgatgcctcgtgtctatctccaccggcattcttccctaatccgaatccgtatcccaatccaacttcaagctctggccaatctagcccaacaaccccagatcccagctcaggccaa

SEQ ID NO: 2050 - DNA, 1634 bp, Cannabis sativa
gggggggggggggggggcggggcgaaagatagtgaaaaaaatataataactgtatagattttgaaacacacaaaaaaaaaagcccacgaagaagtagatgaatagagagagagaagaataggaaataggatgaaaaattgaaatgagaacgtgtatattttgggtctgatcttttttatcatcaattttaagtaaaagaaaataaaagattagattaaaactgtcacaaaagtgacaacatcaatcaaatcaaaactttttaaaacttaaaatataataaaaagattagattaaatcatatgggttgccacttgtgattaaaatgaaataaatattttttccacaaaacacagtataccgagtataaattggagcaataaaatagtaataaataacgtgcaatagtaaaattataaaaaaaaatagtattagatgtaaaaaaaactgtcacaaaagtaacaacatcaatcaaatcaagactttttaaaacttaaaatataattaaaagattagattaaattatggacgccacgtgtgattaaagtggaacaattttttttttccacaaaacacaatatatcgagtataaactggagtagtaaaaaaataagaaacaatgtgcaacagttaaattgtaaaaaaaaataatagtatcgagtgtaaattttccttaattaaaccaattggcccaattaacccataaccttaaggttaaggttagaagagtatgatagatataaagtgtaagagggtttaattaatggtaatgtggatagtaaaagaggattgctccttatttgtttctctctaagatttctcacttaccttgtgttttgtattgatcacattggagattcttattgttaatttgatgccctaaataaaatatttggtcttggatgatatgtatgagcattgttgtgattattattggattatgaggaatttaatgctcatatgctaacattttttccagccattaagattcaattttctcctcatatcatgaaatgatatagatatatctggattgaaatattacaattaagagaaatgaaactgtacacaaagaacctcgataacaacaatccaaactccaactgggtcatcacttgttatgccatcaacttgcttgtgcatcaaagtaacattctctttgggaagtaataatcatatcccttattattattatcatcattattactataacaaaaataaattaatatataaaaaagctggaaacaaacccgggacaaagactaaaatcctctagtgagacaaatgatgttaaagatgtgaatttctatcttcatttagaaaacttgtgcttcataggaatggagactctacgcaagtttcccacaattgtaatgcataactctagcaatccttgggaaaacaaatttgtaaaagatggcgtctctgaagaacttcagcccccacatagggccaccatgctgaacccaccctgacaagaaggagccagtgaccaaccaagtgactcgccaccttctttcctctgcataattagatactgctttaatcatctctctagggacaagtcctcctttttgtgcgatgcaggccccaatgtgcctacccaacaccacagcatcttcaagtgctgaacaacc

SEQ ID NO: 2051 - DNA, 1287 bp, Cannabis sativa
tttttttttttttgaagtaactattgattgattatgtacggttgagaatcatggggttccaactcaaaatgaattggcaatgagtggagtagcccatgttcttatatatgtttgtggctgggagttccatttgctcgcttgcggctggctaataggtgtgaatcgatgttgagaatcatggggttccaactcaaaaccaattggcaatgagtggagtagctcatgttcttatatatggctcaatactttcacatttaatctatgtgggacaatattctccaatatgtatctatatataatcaaaatttatgatattcgatgtgttgataacatagatattagtttatcaatttatctattaaactatatctccaatgatatatgatatcagatattttatgagatgtgttgatattctatgtgctgataacatagcaggccatcttgatataggagtactatcccaagataatatttctgcaacataatttatctcttaaatcatatttccacatttcttgtattaattaatttcaaattcacctttccaaaacaaatttatcagtttgttcatttcgtttctttattttacggatttttagtttttgtaatttgtccttgccaacactttcatagtatcaaatattattagtttttattttttaattttcttctacaaactctgtctcttcatctctacatcaattgttgctccactatatagtacaaactcaattactactttaatagaaacaattgttattctttgtcaagtgttgaatcgcatatccatcaaacttgaaccaaaaaactttttccactataggatactggttgtacaattcaaatttcaaaagttgaaaaaaataaataaactcataataagtctatattccatcaataaaattggtataaattccaaaaccccttcatcaatataattgggaaataagctaattaaattctcttaagatgtttgaatttatagacatttttttagatcatgccttcctacacttttactaagttttcttttttaaaacctgcaacaacaacatagatgccaaatttaaaatatttcttcaatcttctaacttcttaattagagtttttaatatgattttgcaatgccattacattctcctgaatcatctttaacattttaactaaatttatattattccttagagttgatagatcaatccattttaaaaaatagcaccaaatctgaacaatactttgtcaaaatcaaacaaaaaatcattacaaaattataaatacccaaat

SEQ ID NO: 2052 - DNA, 1430 bp, Cannabis sativa
ctttaaaatatttaaattcaatatataagtctcaaaaaaaataaataattacttttatatatatatataagtattattttaagttttaattagatgctaatttaattaatcaatcatactttataataaataaattaattatattattaaaaaatatctaaactttgttttattgtttaataaaattagttagatattttttataaataaatttaaaattatattatattttagatattttaaaaaatataattaaattatatggtattaaattcaattttattattatttaaattaatgattaggtaataaaaacactaatacaattctaatttactgcattgtatgttagtaatacttattatatactatatttattaaaatatataggagagtaaatttatgatccagctatgatccaattcgatccaatctggtccgggctaggtctgggtccgagtttagatccaggtttgggtttttttgggtttgagtctgggtctgggtttgggttagtgtcctgggtcttgtcccgagcacaggtttaggtttgggtcccaggtccgtgctcaagtttcgagtccaggggtccatgtctcaggttcgggtctgattccgggtcccgagtttgagatcagattcgatcctcgatttgagtctgatcccatgtttgggttagggtccaggtccagaactccgtggatctgggtccaggttcgagtctttaactaagtctcttttttaatatattgaaactggattggatcaaatctgatccgaaaataatttcacagggcggagcagatataatccaagattcaataagtattcgaatagtttggatcaaaagtgattcgtcggatcaaaactctgacccgatctaactaaatagatctttttgacatgcctagcgatagattctataaataaagttttcaacacaaattatagacccttagattaaaatcaatcaaatcatttatatgaaaacacacataaatacctaattaattaaaagataacataaaatcaaaacaattcattttttcatattttagacccttgtaatgcattaatgactaacaatacacctttacttttttttttacaaaaaacaatacaactttaagaaaataaaataagacaatgtaatttttcatatcatataaccttaggatcttctatttcgtcatcttccctaatcttagctagccgccacgtggggttcttctttttcttcgaccaaggctcatcacctctctattgggttttagtgtggctctagtcgcgattgctaatttcacacagtagggcattttgggttctctcttctctttagttcttggaatgatttttgttaagtgtctctttgctttgctggcggattaaatctcaagaaaatctgtttggatcatttgtgggtgcattgg

SEQ ID NO: 2053 - DNA, 2658 bp, Cannabis sativa
tactgttatttgaattatgcagcccggaggagaaccgctagttctttgttttgttgattttgtgagtccagcccatgcagctactgctatggatgccctacaaggtgagcttattaattcctctgcagatctttgtgatctgtgtaatgtcaaaatgtgtaagttgttagctatagtaacctgctttatagagtatgtggcacttgactttgcaataatgaagacttttcatatactgaaaacagctattgaatcagatatttcttctaggcagttgatgcagatatgttgaaatgagtaaagaatatttataaaacagggtcattgcattaatgacatgattgtgattttcgatccacctttatccggtaataagtgaggcacaagctaactttaatggtggcgtgagcgctcgatgaattttatagtagcttagttaaattggcaagcacgataagctcgtatgatagggacaacaatactatgttgctgaaaatatttcggccatcatctatggcaagctcaatccttttcctttctttctgaaagttattactttcacaggctaggccacagtttcactgtgtgtattgggtcatgatgaatcctggtaagctttgcatgtgttaagatgggactttggaatcgaaagcttgttcctgctgtctttgctaatgagtgatgattctacatattcattttttaagttactagtaaaatttatattcaatatatcgactatttaaccgtatacacgtcttgatctgcctgattcaccgttcaaaacaatggctagttgtagttacagcgtaaattggtcgagctcgattttgcaggttataaatttgatgagcatgaccgtgattcggtcaatttaaggttgcaatttgctcgctatcctggtgcaaggtcaggtggcgggcatcgagggaagcgttgaacttgaacttatgcgattttgcaggtgatttaacaaattctttttgatctgctagaccgctttatgattattatttatagccgttcaacccgtgacgacacaacgaatatctatatcaccgacacacgctaaatcacaaaacgactcttctatgtaatgtaggaattgctgggtttggaattgttgggatagtgagaggcgaaaacgacagttgcggtctcgtgattacaaacgcatagttaggattcgtcaatattcgtgtgtttgatatttaagtgaccttattctagagattgtgttagacagatgcgaattataatatctgttaatttcatactgcctgcgtatttatcttaataacaagtttcttgctcgcttcaatttgttgccctcattagttcttttcctgttttcatctatactcgtttaagtctaggattcaaaaaagtgttgtgaaaacagtaactgcataataacataacatggctatgtttgtgttatcattctgcatttttcaagataaaacatgctctaatttcgagtctcgatactatgctctctgcctaactatttagggactagaaaactataagggattcgaactccagacttttgtgaaaactaacagatttctggcatggctgaacttacaatgtagtttgtaaagtaggcagattttatgagaggctgaactacctacctccttggtaggcaaaggagttagatgtaggtgttgggaaattatagcaggcaagtttgaatttgggcaattgttttcacttacaagttatgttttcaaaggggggttttctgcaggcgaaagcacgcgttttagaactggttgcccttgtgtatggactaagtttccggaaagatctttgccatttttacattcagcaaaatatggtgccagtgcttttacaaatctttgttaaggatctatttctaaatgcaaagggtgtcatcttagttatgttttccttgcttcttgtcattgtcaagggtcgattgaaagttttgaatcccttatctcaatacaattttccaattacaattactctactgggtttgtatggtgtttagaaatattgagctggggaaatcctacaaagctattaatgtgtgtgacttagcttcaaccttttttgatcataatattatccgaatcgatatacacaatgttttgtgtttattctctaatattttcaaggaattgtgacaatattctattctagcaaccgaccaaatattgggagcttttgttgcaaagtgaagcattgaccattaacaatgtgcataaatagaacgggaaaatgaattcgagagagaaaacaaagtaataacataactaaactatattaatattcataccatacatgccatatttcaaacccattgttcaaaaaatagcaaaagccataactaacaacagcttagtttgtgaacaagccaatcaaagtcttccaacaaaagctaaacatttcacacacgataaatccaaacccttaagatgacaccattgattttacgaatcaactcaaacacacaaacatctccttcgttcaacttttgactggatgagaacgaaccccaccctttgcctagtctcttcaccaatgtataatctttgctcttataatagcacttaatatcccatttcttcttctgattattgctaacctgtagttgaatcctctctgggcaagatttcatgtgcc

SEQ ID NO: 2054 - DNA, 1017 bp, Cannabis sativa
catcgaaaggatttcgttcttcattgttgaaaaatgaatgtggtcctttatcttgtattaggtttcgaatttgtacctttatctatttcatgaattccaagacgctttgtgtgatatcctcgagaaaggaaacaaaacccgtgacactggtcaaaccacttccgtcaacatcttgttcctcgatgagaaagttctcgaaagcagaagcatcttcctgccctcctcggatgaatattagtttaggggtaatacatctctcttgcttcaatttgttgatggtacttctcaacaagcctaagagattaagaaagatcatcaaaagcctaaatcatttttcgcgaaaaaaattggttggatagtaaatgcagcagcgataagtacgcatacttacagtcatggggtggaggataaggaagtgtagggtctgctgttgaagaataaaacacaactagtgttgtaaatgcatcgaggaagaatatgggacttccgctagtgattagagcagcacggctcaatgagtggcgtggataagcttgcttatctggtgtggaatacgaggtcagcattgggtacactgcacggtgtagggagctcggttccaaagcactgcaccaaaagttttacaaaacactttaagagatggctaaaagttcttaatcatttgttggaagaacatggaaattaatggctagaccatgatgcaggtttagtcaaactctagataagacagtattcatggaaaaaatgccacaatgtaggtataagtaactctattcggtaatacctgaagaggcattgcaggtagatccggtagtcaggatgtacaccttcttcatgaaatcgaagaagaggattccgaagcaaagcaaagactaggcgaggcaaatgctgcatttctgggcattgtgagaatgcaacatcgatctgagaagacattgagcttccattcttgtattgagcaagtttataagcattattgtactgtgccgtaaggatcactagccaatcgtgaagcaa

SEQ ID NO: 2055 - DNA, 1249 bp, Cannabis sativa
ttttgaaccaaatgaaacacaaaaatttacaccacctattgatgacttaacaaaaataatactcgaacttgagcctaactcataacttatactaattttactcattgattttagggtatttttttttaatgctctttactttaaaatggttgccaatattattgataattaatcagtcaactttttcagataaatggttaaatgccaattctcttaatttttaagaattatcaaatactttcaactaatgtaaataaataaaccttactttctctatgtttgattgtagcagaagacattataaacaacttgataattatatttcatggctggttttttctattgagtctcaaccattctcaaaataagacattaagtagtctccatgaaaaaattggtagtacaaaatgaaactaagaaagatcaaaactaagacgcgattactactactttaacaggatcagattacatcattttataccaaagggcatttcatttcaatacttctgaggggcttgttgggttggcaacaatccgaaccgcttcttcaaaagaaatctctgccttgaatgcttgtcatctggtgaaaaccgagctgtaaaggaaaacgaaaagaaaacagaatcaataaagacacgaaccgaaaacaattgtgttcagcattaaataaaaagggcttttgaaataatgtgctcaatgttctaaggttgaagttgactaaactcagttaaaagtattctagaaatgtcgtcggtgattgagtaaatagctctacgaacgaataagatcaattttcaaccaacaaaatgaaattataagacattacagcataaaaacaaactaatttgtaaaacattatagaaacacgatgtcaatctcactatatactaaaatcaagtttggaaattttaccaggatgagcagactgagtagccaacccaagtggtgattctttctgcaagcaaaagagaagtttataatgatcaatatcaagtagtttaaagggacttaaatcttaaaaacaattcaatgaaaaactgaagacacatttcactaatatcaaatcaaatcaacttaaacactaaccaaaaagattttcactagaactgaagcaaggttttccaatttcattgcttcaattcatatataaattgagataaagtgtgttattagaaacaaaacttctaaattgaccagaaatttcattatcagattaaaggaactaaaatcttgaaaacaatccaatatt

SEQ ID NO: 2056 - DNA, 763 bp, Cannabis sativa
ggcggagaagtagcggcagcatgcctttgcagccattcttttatggcttgtaagcagccagcatcaactggacactcaaaaaataagtgatagcaggtttctttgtattgatagcatagcacacagtgatcttcccctgaaattcccattcgaagaaattgatctctggtttttagcctgttttggattacaatccaggttataaaactgtgtttgggggtgttcaatcgctcccaaacttgttggctccagttcaccttatcttggctcggccacaacaacttgtaacctttagcaacacagtaaggttgaatagtatttacctgacctgcaatcagccctttgaattgttctttcagtgttacaagcctccttcaataccaactcctcccttggtcaggagacttgtaatgacatcaatcttcatttgggatgtatacacaatagacccatttcatccataagctgtcttctttgtttgagatggcccaaatatatttttcaataaccgctttattccattcatgaacctttttgaagcctagtccaccagtaactttaggatgacaaagattatctccgctttattatttgagtaattttaattatttatatatggttgtatttttctcgtctccaatttcttaaaaacaaattattatatatatattttactatttaataagcccattttactaattaacaaaatgttcaatcactataatcttcaacatatacctgcatatctattctatataaagtg

SEQ ID NO: 2057 - DNA, 1442 bp, Cannabis sativa
acatatcattatcttcattaagaacaccaagcacgatttgtgtaacagagtgcccgacaatgttccaataattttgataaaaaatggccgacattccatcactaccagggctcttatctgggctcattgattggcgggcaacaacaacttcattttttgtaaacggttcaataagtgactaattcatggttggagttattgttgtagggattgtatctaacacattctgtagagaatcaggatgaacaccatctatagcaattaaggtctcatagtaagagcaaatcactcatgtcaaatcctctttgctattcacagagacaccttggtcattggttaatgctttgatagtatttttagcctttcttgaagaagcatgagcatgaaaaaatttggtattttgatctccacattgcaaccaatctactctcgatctttgatgccaatattccttctcttgcgcaagcaactcatcaagtatagcctcagaatttttaagttgattcacactagttggagttctatctgctgcattatttaatgttccaacagttttctgcaattgagttatatccttcttcatctgtccaaatttccgagagtgccatttttgtaaggcatcagtacaagtggtgaggttatgcaaaaaactatcaatgtctcctgtagagtccgaggaccagttggctctaataatgacggcaacttcttcttcctttaaccacatttttctagctggtgtttcctggtttgagccaataatcaatacatccacaacaatagctctgtgatccaatgagaagtaatccaaatgtgatgttactaaaggttggaaattggagttccatgaatgattagtaaaacaccaatctaattgctccttgatggtgtccactttgtgtcttcctttaatccaagtgaaagggtccccattaaatggtatttcattcaaattacaagagtccaaaaccaatcgaaactcatccatttggtgttcacttcgcaaatttcctccttgtttgttatggcgataaaggatttcattaaaatccccaataaccatccaaggaagcattgtagctacatctttcaatcttttgagtagagtccaagtatgcactcggtttggaatagagggggcaccataaaaagcagtgaagtgccaacagggaccattgtggaaagccatataacaatcaaagacatttgcattaaaattgttcaaggatacatcaacatcatctttccaaagtaacatcaaaccaccactaagacaaactctagggacttctaaaccatttttaaaatgtaaaagactacgaaaacgagtaatagaattacatgctaatttagtttccaaaatgaaaagtacagtgggggttttctctttaacaagcaaacgaagtttacgaatagcactcgggtgttgggttttatgccct

SEQ ID NO: 2058 - DNA, 603 bp, Cannabis sativa
aatgctaatgttatcttttggtcaaagtatggtataaacagactgatcactaaatggctttgtataaaatgttccactacttgaggggccaccgggtggggcttttgaactttgaaccggacctctactttccttttcatttacaatatataaaaaattagtgaaaaattctacaataaggacatcaattttttttataatggtaggtaggggtatttttattttttacatttagagaaatttataattcaattttttgatatggttgtgtatattatgatcatagcacccactttctttgttttaaaaaaaattattgtatcgaaaataatattcaaatattgaattgcacgtatgaaaaagaaacaactaaagtatgtttgaactttattttaaacattgtaaattatttaaattttttaaaaatggatgaaatgcctcctacaattataatacagaccgtcatataaaaaaatagggttgctgctatagtcattttcaaaaactatatataagggttaggaactacaaatatacacttcaagaaagtagccatcagtgcggataaattttttcgtcagtgataacaattaattgtgacat

SEQ ID NO: 2059 - DNA, 2116 bp, Cannabis sativa
cctcctctcaaatctcagtctacaaacctcctcccaagctaccaaatgatcgccacctgaaagatctccctaccatttggattactttcttaggagctttgaaaagagaaacataatacgtaggaagggaagagaggattgattgtataagtattagctaccccaattgacaaaagggtgcatttccatctgtcaagcctcttagcacacttgtcaataattggctctcaaagccccccacccttggcattctgagatacttcatcggccagctacccactttcaactgaggaagcacaatgtaacaccaccctctcatccacataatccaaacaattgacgcttgctcaagttaacttttaagccggatatagcgcagaagacttcaactatccttataagcatctgaagtgattttttgtaattgacaaagaatagtgtcatctgcaaactgtaaaaggttgacttgaaccttgtcttttcccatcgtgaagtctgatagtttacaatttatcggagacaattgctttatctactatcctccctagtacatccgccaccaatgtaaataggacaagcgaaagtggatcgccttgtctaggtaccctagagtctttgaatttatctattggtctaccattaatgaatatagagaatgatgttgaagatagacatcttctagtctatttcctacaagtctccccgaaacccttcttgctcatgaccaagtccaagaaatcccattatacccgatcatatgtttttttgaaatcaattttaaagaccattccacttgtgcctccacttctgcaatcttcaacgacctcgttagctaccaagacaaattctgaaatctgtctcccttctacttgttacgttatttagaaaacattattaagacttacctgatgcatgttgttagtttaaatatgtttataagtcactagtgcattaaaatgtatagatatgcatgatatagtagttaagcttgcctttattatagtcaaatattttacatgtaggatttcacatttacgcccatgtgatgtagttttacatagacaaacgtatgatatggaaatatgtggaaaatgtgcatttcttgtgaattatgtgaaacatgtaattttctatgctagtatttccttgttggatttagaagctcttttatttattatatgcaggcactaacaggtagagccatatgtgtaagatagttagttgaggtcaagcagtgatgtgtgtgtatcaatgaatgttatgtgtaaagtagcgtgccaaaaatattatgcaatgaatgttgttcaagtatttttgcattatcactttaaaggttgtaattgttgttttaaaattgggtaccatatttgtcacttttaaataaaagtgcaacatctaactttggcgcgctattgaccaccctcaactataagaccctcacgtaatagttaagattatttatttaattatctaatctttttaatgttgattggtttttttttttttacttgattgtgaagaagagatgtttgcatagtgtggataaggatttgtttcctgaatccttttggaacgggacagacttccccaactggtggttgatagattggacaggagaggccctttaattaggatgaaatatgaagcgccattttcgagtgagacagtgataaggcacctggaccaaatggatttacaatggctttcttcaagaagaattaggaagtaatgaaagaagattttgcaaaggtttcctctgaatttgaagagaacggggtggtaagtcagaatattagtgatacttacatttgtctagtttcaaaaaaggcaaattcatgtaagggagaaggctttagaccaatgagcttggtaactagtctttacaaggtgatctaaagcctatccatgagattatgagacatgttgaaagaaataatttcagaaaaacctatcttccacttgtcaagttaccgaagaaaagaatttcatggtataaaagcaccatgagattgtttcatggtataaaaacatcatgagattaacattcatttatcattcaattaatgttaagtttttggaagaaaagaaacctatcttccactggtcaagtctcaca

SEQ ID NO: 2060 - DNA, 2946 bp, Cannabis sativa
aaaaaaaaaaaaaaactcacataagcaagtttttccataacatttacgaaacaattagaacaataaaaatactagaaaggaagaatatttaaaaagcaatcatcatacgattcaagttcttgtatttgatgaggagtgtgtctgtgatacttcttcttcctcgggggttggtcgtcgccggcgtcttgatcatcgccggaggcaccttccaaattatcactaccggacctgctctcatacccatcatcccttatccttccaatcataccaagatcaaaattctcccctagtagacccatctcaccatgagtatccatcttcctctgcatccaacaaaaaaaaaagaaaacccttttattgaaatgaaatttccactaaaagaaaaccaaaaccatgattgaatgagaagaagaaagttatgacgaggcatactattggcaaagaaataacagaggaacttttcaatgagttaggcataatagtgggagaaacaaagtatggtctagcaatggctctatgtggcatgtaaggcctttgtggagaaatatcagccacaactcaatcaacccaaatatcactgttaccaataccaagtactactgctaatcaaacccttcaaagttcgaagatgatacaaagaaaaatatcaaaaagataatagtgttttctttttctttataaatatatatatttatatatttcaaagtcctaattatttgtctttcttggtctatatgaacgaagaagtgtctccatcagttttcgaaaaagtgtaatatggacttatttttaaatatttgaccttacccagccactcccagattcagctaagactgaaaattgcattctcagtagaaacagaaagagagagagagttgttcacttgtcaacgcccatgcatgacactcgataccttttcttttttaaactctctatctctctgtctagaaactctccagagaaaatctgtttaggatatagagaaaaaggcaaaaagcaaaaaggaggaacaagacaagaaaagccctttttaaattaatcttccacagttcacacctccctaatttctctgtttcactctaaagaaaacgaatgaaaacaaaaggctttttggacaagtatatgagtaacaaatatgaatgtaagaagtaataggaaccctaaatttcaaagcttttctccatcagagtggcattgcttgactaatagtttggaagtatcgaaagaggcccggaattggtagaaagtcaggaaaacgaaaaaaagggtctcttaaacttcggctaagaaaaaggaagaaaaacacaaaaaggctaaaaatctcatctcgtattcacacacgccatactacatgacttttcaataccaaatccaggcaaaaagacccagttgacctctctctttctccctttctctctctttcttatgtggttagatgtcatacaaaaccaaaccaaccccaagtacggagaaaagggataccttttaatttgacagtaaggaagagtaaaggctaaaagaagggtctgtttctgccacagccaagaaagttatggactttctgatcccctctctctctctcttcccccgtttttatttttttaatttcttttgcctctgggatctgagcaaagacatggaaaacaattattaaattatttcattggagttaataaataccattaataaaaagcagaagaaaactataataatattgaaataagtattcaaagtttggagctgaccttgctaaggacccactgagaaaaaatccataagagtcaaatatcttgtttttatattatacttttctctctttttatattaatgatcgaatttcttctactaagcctagatttaatcgaacccagatgagattctctctctttccatgcacaaaaattctcaaatttttataaattataatggtaatggtaagagcctcattgacaaaataccagagagtgtaatatttgagaaagaaaatcacagtcagaatggggacccacaaccgtcagtaactcggttcgggtactccgcccagctgggacttcactcgccacgcgcgcggttgggcttagctctttgctgtcaattctgccgtttcttattcaaattacgaagataataattggtgtattactgtatttgactgaggcattagccaataagatggagaacgggattatattgcaagggtatttatgtaatttcaaaagaatcagaacgaagtagataactacgaactattccagctagttaaggaaatttcatcgtcattcccagttttgactttccaaaaactttcatttaccttttatatattttcaggacaaaattgttttctctttcttttttttttcttttttttttacgataaattgtttctcattattacatttgctaagttcattttttttttcatttttattttagattttatacttattttagtctcgtattttgtcttattattattttttgcttcatatttaacaaatttaatttttgaaatctgtattttatcaaaagattcgaatggatacctatgaacttaatttaaattaaaattaaaataaatttctatataaataacatactttttcttttattaacaaacaaaaatgtgtgttaaaaaaaacaaataaaaatgttaaaatgattggattttggtggggaaaagaaaaaatatatattggaaaaaacaatcaatttctcgagtttggtatagaaagaattgtatgaaaaaaaaaatcaaacaaaaattttattacatgaattttttttacttttctcacactttattttcttacatttttcttatatttttctataacaatcaaaattcaatttttaaacataatcttaagataataatccaaaaaattactctttacatcaccaccttgtcaagataagttttaaagagaaagtaatttcaaaatt

SEQ ID NO: 2061 - DNA, 1594 bp, Cannabis sativa
tctctctttctcaagttgcttttcctcctacttttgtccgattaataagattattcgaactcaaaaaaatgagaaagtgatgaaataatatgtgagtgaaaatgaaataagagcagcaaaaatgtatgggctggcttgtcactactcaagtctcggtgtggaagtgtaacatttataagagtaatttgtggtgataatagttaagttggttacattattggttacaatgtattcccaatttttagattgagtgacgtgatattaatttgggtgacacatggggaggatttcctaatctaaacgagtaattcctttcatggtgtaccttctagagtgattgatttcaattggtttgatgaagttggaatatccggacaagatatgttacaccatacgactaacattcattttgcaatcagcagctcgcatgaaccgatcagagtaaatgagactagaatatctttaaggatattttttctaaatattcaagcatgtaaatctcgatcatacccctaaattttgtgaatagatttacacggagaaaagagaaaacctaactagtttccgttttcatttctcttgatttatgaacgtaattaagtttcctaatttatttctatttattttgtccaatcattttgtcttaaaaatactattttgtatactaaattctttataatgcactttttttattaaactgtttctgttttatttagttgttttacttaaaataaattaataaaattcttatgttaagtattaaaattaatgtttagaatgtatttgttaattctactacaataaaatgtgcaatatcaatttccatttatatcacttcttatatttaaataaaattataaaagctaatttatacaaattaaaataatcttttggtatattggtaaggacttataatacatctttttttattacaggttcaaatttcaatagactttgtctcgatcgcattatctcgcgagttctcatcaagtaaggtaacctctataggagctacatattaacacgtcatccttttcattggaaactgaattcacgtgaattttatacgagactgtaatcgtatttttaagtaaaaaatccgtactataacaatgacttatttgcatcaactataagtttttaaaaacttatactacaatttttccaaataagaatgatattatttcctgagagcttgtctgatactatcactaccaacattttcttattttattataaatgaaatgatattttttggggggagatgttaaatgatactatgatagctgtatattgttaaggagaatataaaacaaacttaaataaaaaatattatttgtttagcatttcttctgctctagatgaaatttgtctaactaacaatgtcaaatacaaaatttataaaacaattttacttaataatttattctatccaaaactatgatggtcacacaatgtaaatttatgattttacgatcataataactatttatgatcacacaatgtaatttatagtcgttttgcaatcataataattcataaatactattttaactagaacacttttctttcctaattccgtggctgatcactc

SEQ ID NO: 2062 - DNA, 1170 bp, Cannabis sativa
caaaaatgagataaaagaaatgtttgaatttgaaagattaatgtaagtttgatttatccctctcaaggaatcagttagttaatgtggtatagttcctctaaatgaaaaagtctctaaaaatcattcttgaaaagttgttaaattgcgaaagtaggtcttggaaggctttctagtccttctaggaagggtcttcaagaaaagtagccttcattagaaaggatttctagatggctagttgttcctcttagaaaggagttctggatagttgactccaactaactttatcctattcagaagctccttcagcgagtgacttagtcagtgatcctggaagctctcatattcgcttccgaaagcactcatacttatgctgatgtggagatctcgctcaaaggagagttggttaaattggttattggctaactaacttaacgaccttgcttcttgcagccaccgattttaagatccttatcttaaacctaataataccaccaacacttaacctttttgaacacttgattgacatgtttcaagaagagactctaagtttgagaaagaaagagaggtacgaagacaagtacagagaaaatagagagattggatttgggttttgtatgaagaatcttctatagataaagaagatttttgggtaaaagtatgagagttgaaatactttgagagaactcatcaaagaatcgatctcaactgtattgtacatgttcttgctcaatcaataaagatgactggagtagagccatagatcacatcgatctatcaaatttgaaccaaaatatattgtggtattgattttatcgttttactgttttattcttttttgagttttcctactctgttcatcctgttctctccgattattgtttgtgatttgttaatcttgtcattgttaattgtttaaagattagttgttttgattcagcaccacaccactagctataattttcccacagttagtttagctcggcagttagtttcctttcatagtttctccttcttggctgttagtttctaacttgtaactaattacatgttgtttcaaatgtgtatcactataaatacactctgtattgtatgatcaaataataagacagtcgtaatttcttttcatcttcttgattcatgcttataatcccatacctggctgcagcacta

SEQ ID NO: 2063 - DNA, 667 bp, Cannabis sativa
tctattagtgaccaaacataacaactgaggatggtgatttttattttgctccacctgtaaatgaaacgtggatcattgccatcttaagaagaaacaaagatgaataaggctgaaaaagttctttccttgaaattaagaagaagaagaagcaagcagataaaattcctaaggtttcaatttagtttcattttcatttttccctaacttagaaatatgatatctgttcttggttgtgtttatttatactattttattctagggtttatatttttttagtttttttgacgttttattattgatattattattccaatttttttccatctgatgtggcatgtccacttaatcaaaatagaagaaacgtggaatacagtttgtcaacaaccagacaggtacactccatgctacttcgaagtcaagaataagacaagtgtttagacccaggtcagaccatagttggctggccaaggaggtttgtccgaataaggaaggatggtcgacaaagctgaacaacaagctgtatggagaaatcgtatgaaaaaactgtacaaagaagttgtacagcaaagctatatggaaaagaagtgaggatagggttgtgaggaaagggttgtacagataacccctcaaataagggttggtcggccaaggcaaacagacatgccgg

SEQ ID NO: 2064 - DNA, 3759 bp, Cannabis sativa
ttaatatttacctggagctatgtagccaagtgtgccagcaatgacatgagtccaatctccaccagcctgaacaatcttagccaatccgaaatcagcaattctaggcttccaattctgatccaacagaatattactgctcttaacatctctatgaattactggcctctgacaaccatggtggagatactccaaccctttggctgctccgaccgccacctcgtaccgaacctcccaacccatctccatcttctgacatctgtgcagtcggtcccacaagctcccatttggtaaatactcgtacaccagcaagttgctgtcctcgctgctgatgctacagtacagcttcacaacgttcacgtgcctcactgagctcaacgccgccacctcggcgtcgtactccggtgaacgggacttactcttcttcaacatcgcagctgtgctccggtaactcctccgttcgttgggatccgacgtggcagcccatatgtgtttcactgcgagttctttcccatcgcttaaagaaactttgtacaccgtccctgaccctccttttccgatcagattctccggctttactgaatcgatgatttctttctctgtgaagctcaaaacttggtacgacttcatgttccatgagttctgctttaatgggtgcgaaagagttttttgattctttcttagcttgaggattaagaaacaagctagcgacatgagcagaattagtactacggcgattaaacatgtcattaatgtacggaaatgaccggaattcgtgtgtttcgacgaacaatgatcgaaacacaaacctgggtttccgttgaaactatctttaaaggctccgtgggagagggaatctggtatttgaccggtcaacttgttgtttgacaggtcaagaaggctgagcttaagcgaagacagagtatttgggatttcgccggagagttgattctccgagaggtttaaggagtttagattaggtaaaaagccaatactatctgggattttcccggaaagtgaattctcggcaaggtttatttgagagatgaaacgacaggaccctaatgattcgggaattgaaccagaaaaattgttgttgtctaaataaagattgctcaacttactcaattttccgattgatactgggattttcccggagaaatgattccaactcagctgaatcgctaccaaggaagaaagttgagagatttcatcgggtaattcacctgaaaatcgattattcgccaaaactaactgccccaaagactttgcctgagctatactcgatcccacagagccttcaaactgattcatggaaaggtcaattctgacaaggttgggcaaactccatataccatccggaataattcccgaaagtgagttgttattcacgagcaatcgattcaaagacttgcaattcccgtagctttcaggaatcccacctgtgagtttgttctgcaaaacaagaagatcgaacataaacccatttttgcacatgtcaggtggaatcggacccgtcagaaaattctccgagacgtcgatgaagtccattcctgaccaagacccaatcttttgaggaatcattcccgtcaacttgtttctgtataatgacagtccataaagcttcctcaactccccaaactcttccggaatagttccctcgaattggttttcgaagagttgaagtgactgaagctttgtcaaagatcttagctcagaaagatcaccttcgagcatgttcgttgaagcatcaaaattcacaagattagtaaggtttccaaaacctttcggtagcttcccactcaatgagttgttgtaaagctcgagttgatataaattttgaagctttgaaatactagctgggatttcaccactgattctattatcagaaagctcgagattttggagcagagtaaggttgccaatatcttcaggaaacttaccataaaggcttgaatttgagagatataaaaagtagagtttttcaagctttagaatctctgaagggaaaggagttgaatcaaatgggttatcaccaatgctcaaaaaacttagattggtaagattttcaagtgacttccatggaaatagccccgaaaacccactaagattcaaattcaagtaggttaggtcttttaaacttgacaagtcaggaactttaccagaaaacgaattcacacccaagtccaagtacttcaaacgagtacagttcttcaaatcatcgctgacgattccgtgcagagagttcgagccaagagaaatcctttccaaagattgaagcgaacatattgagtcgaatggaagaaccccagaaatgtttgtagcagagagattaatttcagagacgagtccgttcgagttgcaccgaattccagtaaagctgcaggttgaattcgcatcttcaatccaagaactgaaaagggtagtgtttgatttttcgaatacggatttgaatttcaagagtggctgaagctcgttatagtcagctccttgagttggagaaactaatagcgaaagatagaacagagtcatcatcaccatcaaaggtgacctctggagccatggctggcaacccagttgggctaaagacatgtctaagactgagctcttgagcccaagttttgtgagatgaagaagaagaagaagaagaaggagaagagtagtggttttgatatggcggctataaatttgagttcacattttggttttgaattttctcgagttgaggagaaacaggggaagaaaattgagccacgcaaggttgttgagctcaatacaattattatgcaaatatgcatggtcgtggtgcctatattttgctttgctttttcttttttcctctataataattgtaaaataatggcaattatttaaataataagattcttttgattaaaaaaaaccatttctgtcaagtgtttgggatgaattatatgaattattactgcctatatcgttttcattgatgttatttttacagcagttttcaatggtattatttaatacatattatactatgaagaaagccagttaagctaattcctaaaatataatactagttagtaaaaacaaacttatacaaaatgttcaagtacaaacaaccggtacaacaatatttgaccacctcaacaagattgcgtatgtagtgaactagctaaatattagacacatatttagctaatttatgattagtgacgggagtaagttatgattatgcaattatattaatgtttcataattatgctaataaatatttgaattttcacaaataatatatataacactttttaatagatattattgattattaaataaatttaaatatatatattaaatcattaaattttcatacaaataataataaaaaaaatatattaaaaatatatatacatatatatttttatactatataaacatatgttttatacaaaatatttaagtaatacttaactttttttttattttttttttcagccaataaaaaatctaaaaatatgagatctttccaatcaaatagaaatatgatcatgatcattttgctctatttattagtttgccatctttctcactaattgttttgttttaaaaacttaatttagctattttaaggttaatgaataatattcattgtgaaccatataaggacaaaaatatatatagatatatatgtatatttattgtgttaaatttcgtgcaatataaatcaaaattactgaatgtgaaaaggtcataaaagtgttaagataatatgggattgaaaca

SEQ ID NO: 2065 - DNA, 2016 bp, Cannabis sativa
aaaaaaaaaaaaacaagatatcaatcttcttaaaatatgctagtcattcataaattaattctaaataaactacaaaatatccaaaaaaaaaaaatacactatttttattaatcatgtacaagatagaaaaatataggaggagtgctcttaattttgtgaaaattacattctatacccatttttcattaccccatttcatttttacctcacctttctcagtatttaatttataccatttttattgctcatatttctattacacccttatgttttgaaaaaaaaaaaaactttattgaatattttctccagaaacaatggctcttctccaccacgattgacgatcaatcccttagccacttttcctcctctccaccactatcaaagatcggcactgtgcgcgccacttgcaatttcagccttttgccttcatcgctttttcttccttcgtttgtccatcaccatttcgttcctcttctttgttccttccacgatttcaaaccagccctccgcctccttctctctatcttttcttcatcgaactgtctctcccctctgcttcctcttcctccacagtccccaatcattgatcttcctttcccttgacaagtattatatatattctttaaacaagaggttccaagggaactagggtcgtggaaatcgttagggtggttcagaaaccagatacacatacctgaaatgtcacaactgcaagaagcatcatctgggtgagtgtaaagggtgaggatgtttctagtgtggtatgtctggacactacaaggagattgcctgcaactcaagaaagaagtgcaacagacagcagcaaagcccgtttcagcaatgatgtttgctcttactcaggctaatacagaagctagtccctcagttgttacaagtcagctctcagtcaacaactcttatttctttgtgttatttgactttagggccactcattcatatgtggcggccaaaatttttgataaattggatagaccgtttgatagttattataaggggtttagaaccctattgcctgacagagaattagttatctccaacaggtgggttaggtctatggcgatcagaattgaggatagagagttgagtgctgatttagtggaattgggcttagcagattttgatatcatacttggaatagatttcttgtccaagtactctactagtattcactataagcggaagatggtgatcctccaacctgagggtgaggaactatttatatttatgggattagttcagggatcctaaattctagtgatctcagtattgaaagctagagatttgctacaagatggatgcctagggttgttggcagtggtattagataccacacgacctaaatcattttggccagaggacatcgtactagttcaggaatttttataggtatttccttatgtacttgtgggttaaccactgcaacagtagatagattatgttatcgattaagcacctggaccagaaccagtctctaaaacaccttatagaatggctctggtaaagcttaaagaattgaagattcagcttcaaaggatgcttgatctagggttttcacgacctagtatgtcaccttggggagctcccgtattatttgttaaaaagaaagatggatccctacatatgtacattgagtaccgagaacttaataatatgactatcaggaataagtatcctttacctaggatcaacgacttgttcgatcaatttcagggggaaaacagttttttctaagattgatctccgattggactatcatcagttgagaatctaagagaaagacattccaaagattgctttctgcactaggtatgggcactatgaatttttggttatgtcttttggactaaccaacgctccgacaaatttcatggatacgatgaatagggtattcaagaattttctcgatatatgtgttatagtatttatcgatgacatccttatgtactctcaatcaaaagcagaacatgagccacatctctggatggttctgcaacg

SEQ ID NO: 2066 - DNA, 1148 bp, Cannabis sativa
agagcaaaaacgatatggtgatagtgaaccctattgagaagaagtttcataatattgatgaagacttttctgatacatttggtcctcttcctaactcaatctatgaccttcaaaatctcaccttattagaggatgatgactgtacacatgaatattctaataataattatgatcatgatcatcaaagtgttggaattgaagattttgaaattcttaaggttgttgggcaagggtcttatggaaaagtttatcaagtgagaaagattggtacttgtgaagtatatgccatgaaagtcatgcgtaaggataaggcttcggatgaaaatgatgctcagtacatgatatctgagagacaaatacttgccaaactgaatcatcccttcattgtgcaactcaaatactcttttcaggtactaaattataattaaaatataaaaaaatattaaaagccacttcacttgtggtgcttaatatcactacgagatacattttaagaatagaatatagataggtgaaagagttgatttaattagactgtagttactatatatggatattgtagcaccaaaactaatatcttaatcttatattatgtcagaacaagtatagattgtactttgtgctcgatttcattaatggaggcgatcttgactatcagcttcatcgcgaaggcttatttaggtacacacagctatttttatatttctaaacaatatattattttactatctttagtgttttagaaaagaaaaaagaaatgatataaaatcatgtgtgtattcctctaagttttctatattattaaaagtgcactaacttaaaaaaaaaaaaagataggatattaaagttgattgaagaacaaacaattcataatattaattgcactataaacaaacaatattcccttaattacttctatatattgtgattttcaacttaataaattagctgtaagtactatttatgtgtttaattttaacattatacattataattttcttccttgcagagaggatttggcgcgtgtttatactgctgagatcgtttctgctatttcctatctccacgaaaatgggataatgcatagagatttaaagcctcataacattcttcttgattctgaaggccatgtaattaatattaatatt

SEQ ID NO: 2067 - DNA, 594 bp, Cannabis sativa
ataggtgacacgtggcctattacataggcccaataaatatcgggcccatcgtctggcccaactagactaacaaggcggccctcctcgcttgtcaaactaagttcagattcatgatactcatcgaattcgtgatacctctcaaacatgacaattgtatcacaataaattactcaagacttatcaaaaatgtcaaaactatatcattacgccctaaagggtcgtctgggacgaaagttgaaagggtattcgagataacctactatcttgaaagtggcttacgtatcacgcttctaacatcatcccaaaaaatatggcgacatgtctcctttactagatcttagaaaggcacactacaaaaagaaaatcacatttttgaggaatacaccactattttgagattattttttccaataacaacgcacaactcctcctgttactgtcaacaactcatgcaccatacgactgattgcttttaggaaatgggcctcacctgccaataccaagcccaatagctcaaatgtaatactaaacaatgtattttaccttaacagtgggctttatagaacaataccttagtacagtccagatccattc

SEQ ID NO: 2068 - DNA, 2988 bp, Cannabis sativa
acagagcggtcctgatttaacaacggataaaacatggggagtaaactaccgagcgctacaagacttgtttgaaatctcaaaggaaaggttgcaatttgtaagatatgaagttgctgttcaaatgattgaaatttacaatgaacaagttagagatttacttgtcattgatggctccaacagaagatatcctttgcttagtgatttaattaattagtttctctaatgattaaagggtacctacatagcaatcatgtcttttatttatagtacacattttgttattaccttaacaactcagaacattagatataagaaacaattctcaattgaatggccttaatgtacccgatgcttgtttagttccggtcacttgtacacaagatgttcttgatctaatgagaatcggccaaaggaatcgtgcagttggtgcgaccgctctaaacgagaggagcagccgttctcataggtgaagaaagtttctccaattgaattttgctaattatttggttgaaactattctaactagtttgatatttttcggtttttctagtattttaacagttcatgtccaaggaaaagagttggtttcgggatcaattcttaggggttgcctacatcttgtggatttggctggaagtgagagagttgataagtctgaggcagttggtgaaagactaaaggaagctcaatacattaatagatcactttcagcacttggagatgttatttctgcccttgcacaaaaaagtacacatattccttatagaaatagcaagcttactcaagttctccaagactctctaggtaatgacatatttatagcttctgtttaatctgttaatttccttggaaatcaataatggtgttaacacatgatcttataagtgtattattacatatctaaaatcgaatttcagtgcctcttttcggctaactattggattggattgtatccttgtttgagctagcgataatgctttagtcacaacataaaaaattttgctattaaatatctcttttagttacaagaaaatgttacttgtaactaaaaaactagctagttctttaatacaagctattactaatttaattttagtcacaacgaaatataatttgtgttactaattctgttagctacgaataacataaagcttaatgagatactttgtcacaattttttctaacttattttgactataagtaactttttttttgaagtgggttctatgccatactcttccattttcttattctcctaaatttatcacaatctatgtgttttttcccctaaaaacattgttgttattgctaggtgggcatgccaagacattgatgtttgtacatataaatcctgaagttaatgctcttggggaaacaattagtactcttaagtttgctgagagagttgcttgtatagaactcggggcagctaaatcgaacaaagaaaccggcgaaatcaaagaattaaaagatgaggttcacttcttcatcacattttcttcctaatttcttgttgtctaacaaatcatgcactaattatacatccataacaggtctcaaaccttaaacaagcattagagaaaaaggaagccgagctagaacaatacaaaaacgggactctaaaacccgccatggattctcaaaaagcaagagctgtttctccttttcgccttccaagatatggcctcaacaataacactaatttgaaaaccgaaatctctcaaagaccctttgatgagactaagatctctgaggtaagtgatataatagaagtgttatgttttcttgttggaatgttgaactatctattttccttttaacacttatgtcaaatcatttttaattcttagactagaagctgttcttcgggtaagcaaaggcgatcgaggttccctctcgggttcacagaaaaggagagtttagtacctaagatgtcatacttaggtgaagaaatcagagtaacaagcaatgggaagcaaagatcatcaccttctcctcctgttagaagatccatttcaacagatagaggatcggttatcaaaactcgagttaagccagatacaatcgaaaaccaaccaatttcaagagtaccatttccagctagagtgcctagtaacaagtctcttgcaactgataacaactcaagagtaccgatcatcaacaaatcgcttatgacaccaacaccaacaccaacaccaacatatcaaagttcacaacaagagtacatttctgaagctttgtactcatttcagaagttgaatttcaagaaagtacaacaagaacacgatgatcacgagcaatacaaacaagctctcaacattagacaaggcgggattagaaaaagcaagactgaagttaaggttgctaagacaaaacaattcatcccaacaagatttcataggcctgaggctatgacaacattgttttctgacttagaaatcagtagtggtggcgataggacagaggacgaaactcgcaagagtgacttctctgagccagaaaatgagcttgtttatggtggttcacctcttcataatgttttggacatgaaaaaacctcgaaagaacctctcaagacacttacaaaaccatgaaccaaggtagattaattgtacttttactcaattggaataaaatttggtgtttttgttaaaaaatgttttaattcttaaaatgttatgcagaggagggcttgtgcctgtggtcgaaaacaagttaccatatggggcgactcgtaatcagaaggagagcagcaacacgagtaatgtgtctgaatttcgaaggagtaggtctacacctcgcgggaagtttttcgtggtgccttgaggaagaagttattgaaaaatagtaccacaatgtttatttggtttatttaatttgtttctttgtgtatagtgacttgttttatgctggttattatgaactgcatacattttcatttggatcaagagtcttgttgagagaggtggtttttctttaatatatatca

SEQ ID NO: 2069 - DNA, 3154 bp, Cannabis sativa
agagagagagagagagagggatgaacttcctttttgtttttttttttctttaattctttaattttccaatattgatgaaaaaggataattaataaaattaatcctaacccttctagtggatagctgccaccctaagatcaagccatctaatcccaaaagcataataccaaaaatgccctttttacttccaatttaagtaattataagcctaggggtaaaacggtccaaaaccttaaccccgcttaaactcgatattcctaatatctcaaatgtttatctcacaaagaaataggctctaaacttcccatgtgactctaatggtcaaccatcgtattttctattgttgtagagcaaaaatcataaaaattgcataattcatatttagcataaataatactcttagagtttaataaaatctcgaaaatggagaaattataactctaatgcccattgttaaaaatgaggtccacaccaaaataaaatcatgcatgaccataaaagattaataattaacgctaattgtctttgttaatccataacctaacataaggtcattacatccaaggcctaactatttgatgaataattctagaaaagctttagagtattttcatttgggtaatatggctttcgatagacccaagttctcttggctcaaaaaacatcgggatgctatgtttgttcaagagcatcttgatatgtttgtttgtaattcctcttggctcaagttttttttttcggactcatttgtttctcaccgtactttcaaaggtttagatcataggcctattgctctttctacttgtggtcgtcccttggttggtaagggtaacgattttcattcttgttttcattatgaaaatgcttgggtctatgagaaagattgtatggagattactggttctaactggttctcaaaagttgtggtcccacttgataatgttcaacttaatctagaagtcgtgggttctaaactaaataagtggaataaagagattcacaagagatatcagattgcaattaaccaaaattttaaagatttctttattgtggatgctaatcttggtgatgttagttgtgaggagcttcataagatagaaaaataatttgatgtacttcatgagaaggaagaaaagtattgggcttctcatgataagaatgattggctcaaatttgggtatcgaaactctgcctactttcacaaacatgcctctagaagacgtgcaagaaatgttatttccaagcttctgaatggggttggagaacaagttttgggtcaacataatattggtgaggtgtttatgcattatttttccactttatttacctcggatcatcccttggagtaggcctttgcaagagtgttagcttcagttcctttaaatatttcttcaaaaatgaatcaacatttaactcgtgaatttttcggtgacaatgtttgagaggctctttttcaaatggatccttctaaaagcccaggggtggacggatttactgcttgtttttatcaaaaaaattgacacaaagcgggtccatacactattgtggcattgttttcctaaatggggaatcaagtttgaaaggtatcaataaaactattatttgtttaattcctaaagttgataaccccgttcaagctgttgatttttgtcccattagcctttgtaatgttttttacaaaattattacaaaggccatgactaattaaatgtgggaagttcttggccatatcatttctaaggagcaaaagtgcatttctcctaagtcgtttgatcattgataatgcccttattggttttgagtgtattaatgctttaaagaagaagaagtgggggtggcaactgtgcaattaaatatgatatgttcaaagcctatgatggggtggaatgggggtttcatgagagaatcatgttgaagctttgttttcatgttaattgggttagaaaaatccttgattgtatctcttctctgaaatactctattcttttgaatgggaaggttattggttctattatccctcattgtggctttagacattgaaacctcatgtctctttacttgtccttgctttgtactaagggtttgtctagtttggtgaatcgtgattgtgagaatagtcttttgtttggttttccttgctaaataagtagtatgctcaccacaacgttgtgagccttgatagagaaagattgatagccttattgggagttgttggagtagattgtcataagacttacctgggtcttccttgttttgtgggacacagcaaagctagtttgttcaactctatccaggatagaatttggaaaaaacttaatggctgaaaatctaaattgttcttcatggcgaggagagaagttctgatcaaggttgttattcagtccatccctacacattgtgaacttgtttaaacttcctgaacattttattaagaatgttcataggatgtgtgcctatttttggtggggagggaatgatgtgaaaaaaaaaaaatgcactggcttacttgggacaaattgtgcctttataaagaagatggtggcatgggtttcagagacttgcatttgtttaaccaagctcttcttgcaaagcaagcggctaggatctacgatgttcccacctttttggctgcccgggtcctaaaaggtttgtattttagaaatcgggactttggtgatatttttttatctaagcaaggctcattcgtgtggaaaaatattttatggggtaaagagatttttgacgcgagcggtttggagggttggcaatgggtataatattgatatctactctgacttttggatcccctctgtatcaccctctttggtgttagcccctccttttcttgggaaaggtagcaaaggttctctgttacgtgaggcttcaagggactgggatttaggtttggttcgtggcctcttccttcctagtgaagcggatgctattttatctattcatttgccctcttttaataaggatgaaaaactcatttggaatttgaaaagtctagttggtactatgtcaagagcagttcctgattggcacttcataataagggtttggggcgtgcttctccttctagggagtactcgagtttgtggaaaaaaatttgatctttgaatttctctcttgagattgtttgcttgacaagcat

SEQ ID NO: 2070 - DNA, 1179 bp, Cannabis sativa
ttttattttatttcttgggaaaatacttgtaagttgtatcaatatgggaataatacaagagatctaataaaaagaagtctggctaagataattatatcatgaaactcaatatctacctaaatgaacaagacgaaaacccttttcaactctttcacattaaatgtttttgcttttctaagatttaaggaactatagtactttggagtattagcttgtacatgcatatctaatacttgattgttgaaattataattgtttaacgcaggtaatcacccaattcctaaaaatggagaccttacttgatgagagtgttaaccagaaggttgagttacaaattgaaaggggtggtacgtcactgaatgtagacttaacggtgagagttgctcttgttttgtgttgctattccatttttgttgattatttaattatagtattcttttggagaatactttttatatttattagaattagaagggtatgctcaagtgtggtattaaattgcatgctgtttaagaattttactgtcacttactggtccactggagtccggacttgatcatcattagatgaatttgttttgttcccttcataaagtttttctgtagtgtagttgggttgatcaattaagttgccttattaaaaattcttctttttctatctcaggttcaggatttacattcaataacccctgattatttcttagaagttagtggcgcagtaattcatcctctttcgtatcaacaggttggttagttggattttgaacactattaaaattacgatgtacagctttttctcctcccctccagatatttttttttttcagtatgactgactgaatttttatttcccatgctctgctggttgcaacatttgtatataatattaaaatttagtttattttgacatacatatttattagaaaattcattgtctcgagccaatcaactttattctcatttgttgttcttttcctttactgcaggctagaaatttccgttttaattgtggccttgtatatgttacagaaccagggtacgcattctatttctattttgatcttctcaagctgattttcagtagttttacttggttgcatgtatatgttgacttgactaagatggaaagttaccttctagggtgctcttcgattttttttttgctgggaagggggggggg

SEQ ID NO: 2071 - DNA, 1667 bp, Cannabis sativa
aaatgtggcgagaagtaggtgatatttttttaacggacccttataggcgacagtttaaaaccgtcggctatagtataggcgacgtttttaaaccgtcacctataagggtccattaaaaaattgtattttattaaaaaccgtggcctattttgtttactacgattttaaaccgttgggaatactaatttttcctgatgattttaaatagttacttaatttttttagcgacgatccccaaaaaaaatcatttttaagactgattctaatatttgtagtagtgtaagtttattatggaaaagtgcaaactagttgctacacctattgcacaacatttcaaactctcaatatctcagtcacttgacagtgaagctgagaggatcaagataactataatcccatatgccaattttgttgggattcttatgtactccatggtgtgcactatatttgatctagcacatgccattagcgttgttagcaggtatatcttaaatccaagaacaaaacattgggagccttaaaatggattaagaggtatgttaaagggccactaatcactgacatagtattcaactgtgacaaccaacacaaagaagaggttactagctatgttgactctgactttgttgtaaatattgacactagaagaagttgcacaaagtatgtgttcactgtgctaagaatctatgtgagctagaaagcaaatttgcataaagttgtggctttgtcatccatagaaacagaatatatggctgcaactgaaaccatcaaggagaaatttggctaaaaggattgacaagtgaattgggattcaactaagaatatcttgtccattgtgacaaccaaagtgctttgcacctcattaaaaaatttaatgtttcatgagagatcaaagcacattgacatcaagctacatttcattcgatgtggtgatgtcaaaacttgttcaagtaaagaaattttgcacacatgacaaccatgctgatgtgtttaccaaagctgtcaccagggacaaatttctttactgcctaaacttattgaacctacaagactgcagtagtcttggctagtctaactactttcactacctttgatcatgagcaaatgaacaaaatcaagtggaatttttggagatttagtccacttactcatgtgtccaagtcatcactactaatcttacatggcaaagaaagtagttaagttatttaaggctctttctacttagggcaggagtcttggaaagactataaatatgtcagctctactctcattcaagggatcaacacctagatgaaacttaaagcctctcggattcagctctcatccctctttctctctatttctctaacctttggttttgtattctcgagtgattaggagggttgtatttaggatccctgtgtgtttgatgagggtttccttaatgttagctataaggtaatggtgttaatcaccacaaattacttagctttgataggttttagttcagtttataaagtgttgattcaagttaataaagctgattcattttttccttaaaccatttaagttattgatttcattactctacttttaatttcatgtttgtgtgcaaccttgttactatgttagtaccataatagtgaggaattgagtgtgagtttttcatcacaacaataaaataaaga

SEQ ID NO: 2072 - DNA, 5109 bp, Cannabis sativa
gttaaagattggggatttcgtcgtgactttagacatctcaggacatatggtgccttggtcctagatgatttatttacattgtattaccaccaaaactacctttttaatgagaaaaaaataaatgtgttgttaattgtggttttgatagacttgattataaatatagtgttgagcccaaaaatgagtacgttttaatattatactcacaggatggcgaataattattttttcgctaaactaaaaacttcattaaacacaaataagactacaaggtcaaagttgcaacaggggtgcaacctccccgaaagaaagaaagtaagaaacatggccatcaaccgcctaagaggcaatccaatgagccacctgattacgggaacaaggaatccaaacaacattccaaaactcaaagcaaattcagagaagaaaataactttgaaagaagagaagccaacttccaactcggggcttttgaatatacaacagcagcagtgagcacttgacggtcgataaagaatgttacactgttaagatagatgatggtgctctcaaagttgctagaagttctcttgtcattaaaaaaggggagcttagaaatggtatttactatcttgatagaaatattgtatctggatttgctacacctgttatagacaaaacacttggaaatagtataaagatttagcatatgagactaggtcatgtgagtgaaagaggactagcaaaacttgataaacaagttgtgttcaaaggtggtcttaaagaaaaaatcgaattttgtgaatcatgtgtatatggaaaatgctgcaaggtaaaatttccaaagggtgtacacaccacaacaaaaaagttagggtacattcattgtgatctatgggggccctccaaaattcagacaataagtggtgcaaattatttcctgggcataatagatgattactccataaaagtctgggtgtttcttctcaataacaagtatcatgcatttcaaaactttattaattagagaacaatgctagagaagcaaactggatactgcatcaaagtgttaagaataaacaatggccttgtattctattctgatgagtttaaaatctaatatataaaagagtgaattagaatacgtaacactgttgtgaagaatccacaacataatggcttagcagaaaggatgaatagaactctgagagtaagatgtatcttcctatatgctgcattatacctttttaattatccctgcgatgagtgttctctcctcctcgcatggatcgattatgagatgttgtacgccttgtggtaccccttgcctcttctcgttcttctcttcctcttaaggtttgaatcacctcgttccccctatgggggttagcatgagctcctttcttatgaacttggagagagggttggcgatctccgtctgatgttccgcatatcccaggctgcgtccccagactttcctcaatttcctcaggttgcctctcctgagagttctgggaatacctctggattgtctcctaccccttggtatgcgagttgtgcggttttcctcgtgaatctctgcttccaaggtcaggttgattttgggaactattctcctgcgctgcccttactgcggctatttcacgttctaactcagcattacgctggtttgcttcctccaatggacgccttagatggggattttctaactcaacgattggtatgtagctggtcgggtcgtaggcgccatcctcatcaacctggttgggaagggaccaaccgttgtttatcctaggtccttcaagcctgggaccccaatactgtgttttcctggagctagtagcctgttcatgtgatgaatcaatagatccctgaggactcaatggctcttttccagggcaatgattgattccttcacgaggattattttcttcggcgtcatccattacttttatggcaggaggttttttctgagctttttcacagaggctctcaatgaaagcactaactgttaacgcagattttcgttaaccaaatttgagcctaaccgtgacaatctcacacagaaaaaataaaataaataaaataaaaatatggacacacagggtttttacgtggtttttgcagttaaaattctgcatagtccacgagtcaatcttattcagatttctgattgttttctcagggcctcttttgtatgagttttttcgtcccccccttttttgatcttactttccactatttataatcatatagtgagcagttaattacaaaattgactgtaatctttttacgacgatcatctcctagaatcatgggatttgattacaaatcacgctaagtaaatgaggtttttatttaaatttttacacagctgtgaatatcccgcttttattgggccaaaatgaacacgtattaaagatatatggcaagccttatcccattgagatgcctcactgagaatggagctgagttatatctttgatggcgagctggagctcgtcatacgtcttcccgaggtgtatattgcttttactttaattctgacaattacagtttctggtattgatatgatctttctcgcgtgcatgccctcttacaacgagatgaacgcctcgctatctatctccttgattcacccttctgcttatgcttagttggtataccttgtactatacgctaagtatttctattgtcattatatctccccacgcgacgaggttaatgcctcgtcttgcacacttgcagttacatggtttattatcgagacacaagtcaacagttagtatatttttatctcgcattagactgttcagttaaccgagttataaacatactctgttaattatgttgttaacaagttattccacgtcaagtataattatgattgcgtgtttgagctctccattctttccaactcgacacgtgttttcttcttatgtgctcaccgaatttcgagtataatagttttcactctgcttttgctttcacgtaaagaatccaccgatcacgcataacatttatctcgttatttgtgtacgaagtggagaagctatcctgtaaaacaaagatatatattaattagtaaagactaatattaattatcatatgctatttaataaagaataataattactataatacttattaatttttttaccgattgtgtcaatacgtgtattggatcttctacagtcatgaaatttttcgttgaatttcatgacgtagtatccacattgtttgtcctcaggttgttcaggacatataggatactaatacccataaaatatttaaaatattaaattaaaaatttacacgaacatcacactaatacttaaacataattaaaattgacaatgcaaaacacttcaattttttccttaactatactaaactaataccaaaatattttttacctaaatttatgcaattatataattttattaataaaaatttataattttacctaaactaaattaaaataactaattaatttttataataacaattgaaataaataaattttttacacctaaacttaaattttttctattttaaattttttttaaaaaaaatattttacacattaaatcttttacaataataactaattttaaaacatattaaattttttaacacacatcaaatttttacatgaacaactaattttaaattacacacataatttatatatatatattcaacaaaaaaaataaaaatatatataaataaacaaatatatattcagtttttaagaaaataataataaataaatttataatatatataaatatataaatcagtttttttttaaaaaaaaattaataaacaaatatataaataaatacatataccttgaggaggaagacagaccgtcagtttggtggtggatggcggacattgtctggtcgatggggagacggaggagagacggtaactgaggagaaaaagacagaggaggcagagatcaagcagtgtgttttgaagggtggtggtgggttccaaaggttgctcgtgggtttggaagctgaatttcgtgtgagatgtgggtggactaggcggtggtggtggtcgccgtcagctagttcgagagagagggattagggattctttagtggggttaggtgggaatgaggatgtgcgcgagattgggggttaggtgtgggaaccgaatattgggccttatacccgacggttttaaaccgttgggtataagccccttaaaaatttgtattttattatataaatgttgcctattttgttaactactattttaaatcgacgaaaatactaaatttttctcgacagttttaaaaattaatttttttagcgacgattctcgacaaaaatcgtttttaagactgtcgcgaattttgatatttgtagtgattataggccaaataggtcatactatattttgtattaaatttagagctatactatttttatattactacataattgattactatatatcacaaattagagtcatggtgcataacataacaactttgtgtaatttgtaattatattcttgttgtgcataacataacacctatccaagtttgtcatcaaaacttgtaaatgaacatctttacatattggctcattattagttttctgtcattttgatttaaggtttgtcatcaaagaccttagggcctttctttcttctcttctaagaaagagccaaaagagacacttgaaagtcgaaaacttcaccgccgggaatatctcccgacaatcaaaacttccatcattctactcaatgtttttcccattctcgatcaactaaacccgagcactctttctgaaaccgaaaataagttgtttcgcctcaattccaatcattctcaagctcacttttgcttgggaatgatataagcaaaataaggattgggactcaaaacaaaagaaaaggggaaaaaaattcaaagccttgttcatgaaatttaatcattaaaaaacacagcaaataaacctaacaagtattgaaaaatgtccattaaaagaaacataaaacatttgtttgaaaaatacccaaaaatgactcaaaacctaagcttggtgaaaaaccatcggttcttcccggtcttgaatctctcctcgaaacgcttcttggtctccttcaag

SEQ ID NO: 2073 - DNA, 4781 bp, Cannabis sativa
ttttttttttttgataattaaaatttttgtccttaaactttgacaaattttttttttttttaacttttttagcgattaaaatttctcctgtaataagattattaaatttgaaaatttttgtctaattttactaacgaatgtctgacgctgataaaaatttaaaatttgagggaaacaattttattaatcgctacattaataaaattgaataaattagataaaattttttaaattcagcaatctcaataatttaggagaaatttttcactgcttcaaaaatttagagacataattttatatatgttaaattataaatggtatttggttggaggtaataaaatagaatgatatataaaaaaattaatcttcatcctatttctttatttagttgcatattaaaatattgtaatattattttaattgatggaccttttcactattttaataaaattactattctattttaaaatttagaaaaaaaaaaaagaaaaacaaaactgggctttgttttttatattgttgttgaatagaagagttgagggatgtaacatgacactgccacgttgatgaaatgataatagcaaaccaaaccacacgcttcccttccctcctttgaaacaaagaaaattaaataaattattaagaaccaaaccacaattatatgaatctttggcccctcttactgccacttgatgattcaacacacctcaactacttttttaaatataatatggcacgtccaacttgtttaatttttattttaagaggattaatgacacttcaaggtctcaacccttattattttggttaagttttaacccttcaataattttcacaaactgcatttggtgtcattaatttatcaacaaaaaaagggggactttggggtatgttgtgtcgcacagatttgcgaggtttatattgcaattagcacctatcaaatcttaacctattataaaatttctgtaattggatgattttgatatttaggtaaatattgtgtatgaaaacacacattttgagtggagtttggttggtatttaattaaatccaatacactaattttaatttgtttttttaagaagaaattctattataattaattaatgaagaatgttaagggtttagtacttaagagcatctccaatggtagtattatttaaggacgctaaaagtttgtacatcatttaaaaatacaatattttattttatcccactttcatattatttttgacactcttaattctttttttttttttctgtaagaaaaatcaaactttattaaccttcaaatttagtcaccaatataggcaacaactcagttggaatattttccatactgaaagtacaatcagggttaaaataaagacgctcttgcaaactcatgagcgactctgttagttgaccgcttaataaaacaaaacgagacattacataaattagccaacatggctttacattcttaaatgacaccaccaaaatgagaagctaaagtagtcgagcttcttaatgcttggacaactaataaacaatcggtctccacccaaatagagctaggaggttgatttttaatccaacttaatgcttctcaaaagctcaaagcttctgccacaatcggagcaatattgcccaaatgcaactttgtgtggccttccatgagctcttggacaacaaaagcacaaccaaaatgattatgtccttgaaagatagctgcatccacattgatcttgatactatttacatgtggtttaagccaatgctccatcccatcataatgctgaagatcagcccatgatgactcagtttgagttttttgagcgtactgccattgatcaagatagcttttaccagaagctactattgttgaaatattaatcgatttaccttgccacactacatcgtttcttgctccccaaatggtccagcatagtgcagcagctaggcattgattttctactgtcaaagtcttaaaaatagtcacacaccagtccagaaattcaccaccagcagcagccaccaatgtacctatgccgactctatcccatacctgctgaatcactctgcaagcgatcaaactgtgtataatagactcagaaaactcatcacagaaagggcagcgagggttaacagctacacgctttatagcaagttgtgctagagttggtagacagttacaacaagccctccacatcgaattctttatctttggtggcaccttcaaagaccacaaagccttccaaaactcagacgcttccacctcattgcacaaccctttcaatgattgaagtaactggtaagcacttctcaccgaatacacacaagttgtatcttttaaccagctcaggacatcattagactggtttgaacacagtgggatctacataatcaatctcttttccctatcttcaaacagatcatctaatatttcaccatcccaagaacacttgtcaatggtcatcaaattgcacgccttagtatgttgaagggtactgtgacatgaagtcacaaaaggctaattatgatcaggtagccatggttcgtccagaacattgattgtagaaccatttccaacactccaacaaacgcccgtacggataatagattgagcttcccaaacactacgccacacaaagcttggattatttccaagagatgccgagagatagcttccagtagggaaataacgagccttaaaaacttgtaaaacaagagactcgggtcttttaaggaaacgccaaccttgttttcccaatagaactaaattaaaatcacgaagattacgaaaaccaaggcccccattatttttattgtgacacatgcgctcccaagacatccaagatattcctttattattccccgaagaacttttccactaaaatctcgccgttgtactttcaatatccctactaatctccatggaagtaagaacacattcggatcaacacttctttaccagctcgtgatgatacttttgagtcccaaccttgaagttttttcctaacctgatcctttaagaaacccaacacagccgacttgttttgccctataatactaggaagtctcagatacatactcttgtcatctgcttgaggcattttcaacaatgtattgatatcctccctaatatggatcacaatattggtgctataaaaaatataatatttccccaaatttactttctgacctgaagcactctcaaattgatggaggagatctctaacttgtgtagcttcttgaagagtagctttacattataagtagctgtcgtctacgaataacatatgagacacttttggagcaccattcgccacttaacaaccatggatgaaacccttctcctcatatcttttaatcaaacaagataaaccctccacacaaaggataaagatataaggtgacaaaggatcgccttgtccgattccacgcataggagtaatcggccccatgactctaccaccatgaaccactttataattggccgagctaacacacttcatcaccaacgaagtccagttgtccgcaaaaccaattttactaaggaccgattctaagaaattccattcaatacgatcgtacgccttactaaagtcgagtttaagtgccataaacccatccttgccctttcttttcctcttcaaataatgtagcacttcaaaggatactaaaatgttgtcagttatgagccgcctcgagataaacgcgctttgagattctgaaataattttatccatataaggcttcatccgattagccataactttagtaatgattttatacaaaacattacataaagcaattggccttaaatatcccatactttcaggcactttcttttttgggatcagaataacattaggatctccacaacctggatcaaactcccctgtgtgaaaaaatttttgtactactacagttacatcaatacgaatgatgtcccaacatttttggtagatgcaggtgtcataccgtccggaccaggactcttattgggatgcatactgaacacaactcttctcacttcctcgacaacaacttgctgctgaaggaattcctttatttgagccgtaaccctcctttgaatgcactgaaccacttcatcactgcccaaacttgaagcattaaaaagagaggaaaagtactccacagcaacatcagcaaggccattttcccaatcttccaattaccgctattgtctttaagttttgaaatttggttgaagctacggcgattgctaatagcgcagtggaaatatttactattttgatcaccctcttttaaccagaattgctttgctctttgtttccaaaatacttcctttcggtccaaaaccaaaaataactcctttttcactttaccatgtctttggacagaaaaagcatctcgtttcttcttcaacttcttcaattcagtacgacatttgttgattcagagctaaaaattcccagtcacattcgagccccatttggataatttatcagcacataaatccattttctcagacacattcaatcagctagagtcagtctagcagtctttcacaacctcaaagcaaattggcttcttgagccaagcattttcaaagcagaaacgacgaataggaatgaacttatctggcaccataaactctactaaaagtggattatgatttgaaggtgaagtatcaagattcaatagccgagaatttggaaaatgatgaaaccaagaagaagaaatgagtgcacgatcaagccttacctctatccactttgaagtgcctcgtcctttttcccaagtgtaagggt

SEQ ID NO: 2074 - DNA, 1093 bp, Cannabis sativa
aagcaatggagtgaaaagctgaaacggggctcgtttcggccagttgggtacagcgacgacgttttggatgatgtcaaggctttgctgaagagatacccacctgggtggggacttgttcatcatcaacctcagtccattattaatggaccagatcaacgacaacaagaacagcaagaacgacaattattagtgtatgatgattccaactctattacttctgcttctgctggaatttacttaacatggaaagaagagcctgtagtttgggcttcagcatggaaaatctaattggttgatcatcatatacatatatatttcatatacgttgatgccctagcagaataatataataattagaccgaccaactttgatgtatagctagatatagctagattttaatagtagtgttcatcatgcatgttgtgatgatggtcatttgataaacattactactacctagctagacctagctatataaccaaatataagtttttatgtgttgttgatagttataattatagctattttcatatgatctccatccttattatatcttctttttttctcttcatatatcttattgtgtaatcacctttttctagtattggctttatgtttgggagtttgtgttcctttgttttgcttttatttcattgttcttgtttgaaggtgtttgaaacttatatatacatatgcctcctcctcacataattaataaaatatatatagcactaatatatgtatttaatttatttgtatacgttagataattataaattatttaaatatatttttttgaaactggtcctgcattttttcgatgaatatgtacatactacatagttttacatgtaatataaagagataataattaagaaactctctccaagtttcaaccctaaattaaaaaaataaaaacaaaaattaagaaactcgatggttgcagaattcttgctaaattttttctaccaaatctcaggttaaataaatttttacgtatcatatataaatatatgtaatataataagataaataaatttatttattaattcatctaaataagatattattaattaagttatggaaacctta

SEQ ID NO: 2075 - DNA, 1470 bp, Cannabis sativa
tttttttttttttttagttatatgtcttatatatgattaaatttttaattggttagataattggtttgtgtatgtaattatttccttttatagttctatgtttcagttattttatttagttatttcaggtaattagtttctatgtgttaccttttaatttgattgctttactaattggtttttgtgttttcaattttaaactagttggtttatgtgtgtctgattctaatgtctaactccaataacgactctaacgttcaataccgttgacaagtctgatgtctaactacggtgactttacggtagcgacaacaattttgaagacttttttaatgaatgataataattccaacaaatattctcattctattttctatctttttgttgctaatatattattttcgtaaatagtgaatgttttgggtggtaagttaatgttaaaatctaggagcttctcaaaagtagtttgtagctaattttagttttaattgtattggttttagttttaatagagggttgaaagtcgggatttaaagtttttaagaagaatataaaatttatatataagttttggtacgtaattggttttttattgaaaaactgatttttccattaaataattgatgttgattatataactagtttattaatttattatctaccaaaattgcttttattattgtttaattttttgtagttttacgtcaaaaaaaaattataatttgtttttgttatataaaaaaacagtggttacctttgaaattattttttctttattttagtgtttaatatttttttcaaaaaaaaaaaaggaagaagaaaagtacacaattttaatattttttatggcattcctcttcatttttatttgtaatgatttttcttatatttttaatcatattaagtgcaattaaatttacaacttatatatattaaaatttattttttttatactttaaaaagagatataaagtatattattaaaaagtcgatttctaatactctctttgttagggtttgtttttcctcccttggtctctcttagggtttctctgttactgtgggagccgccggccagatctgggctggtggcgccccggtaccttgcctctttccgttctcatgcaaagttgaaggtcccaaaggttggggttcgtggttggatggtgtatgtcagtgttaggttacgcatcttgggttcagttctgtcgtacctggttttttcggcgagtggtcaccgttcttggtggctgggcatctctggtgagatgcctattgtccttggtcggggattgtaaatggagtcaacttttcgtgctgcaagctagctatggcggtggccttttggcagccatcttcctctcacttttggggttggcattctacgatgttcttttttaggcatgtgctttggccttggtggggtgctgctcttccttttctcttagttctcgggttacttccttgggt

SEQ ID NO: 2076 - DNA, 1773 bp, Cannabis sativa
tggaaaaagaaagagaattgtatccataattcatttagtaaaataatttattgtattacgtatacaatttattaatccagaataagatggactcgtggactatgaagaattaacttcgaactacataaaaatcctcgtcatttattgctattattataattaattattacttaatccatcctgatatattgaattcccaattcccttagggattcaagaacctgcaagtcacacagtatgacaggatcttatggcacacgtgaacaatttcaacataataatatgagcatgaaatattttaaacaacttgcatagcattttgtttccaacttttctaataggagcagcgagtagttagtttgataaattcactaaccattccataatctcctagcaacaactacccaaggatttttaaaaacaattttaggctgcaagggacaagcggccagaggcatcctcgctttactaatgtcaagcaacaactaggagaattcctaaaagcttacttaagtcgctttagtactgcaacatccaaagtaagaaatctaaatgatagcattcagttgacaactcttcaggctggaataacaagacttatcaattgcgggaggcaaaaatctttgtgcgtaaggaagaggcacggagcaggatgaaattgctcaaatccagctcgagagacaaacccaacacaagtactgaaacatcgagtactgtaacaactaaagtaggaaatttgaatcacaatggctcgaatgggaaaaggaaagatgagtcgagagattcgtcaaaggacaagaaaaagcaaaagaagcacgagatatatattctgatatacttagtgtatacagaattaaatgaaacttgtgaaaacatctatcttgcaaatgaaaactgggtcgccttttggagacccgatcctatgagacatgctaggaataagtaagatcccaacaaatatttccgtttccatcgagatatcgggcataccactgaggaacgctgccaattaaaagatgaaattgaaagtcttatttctcgtggatatctaagatagtatgtaagaaatcaaggaaatgcatagaattttcccaataaccagaataataaccaaggaatacaacctctcccagttgagggtaaggacatcttagttatttttagagggccacacctcgcaagaaataacaataatgcttagaaaagatatataaatgaagtgaagaatcaagaatccacctttcctccagaacccttgaagcaagaaaagcctaaagaacctcccattatctttactgacgagaggcattgcatgtacaatttctgcatacggatcccctggtgattatagttcagctcgtgaataagagagtaaaaagcgttctcgttgataacgagagttctattgatattctctacaaagaagcattaaagaagatgggtctaaaagaggaaaggttgaaaccatgcatggttaacctgtgtggattcacaagtgatagtgttgcaagtttaggcacattcgaagtcccactcactatgggagagccaccactatcgacaacccagatgcaagagtttttagttattaaaatcccttcagtatataacatactcatgggtggtcatgcattgacaaaaatgaggacaataagcttaatcaaacacttgtcctaaaattccccactcaatttggagtagggacggtgagtggagatcaactattggttagacaatgctatagcgttaagttgagaaattgaagggcgaacc

SEQ ID NO: 2077 - DNA, 1369 bp, Cannabis sativa
gatgggactccaataaattttattgcaaacaaacaaaataatgaaataaaactttatactttttctactaccaccaaccaaacaaccctaaagtttaaacattcaagatgaataatggaatctattacatgattttcatttacagtggtaactaatgcaatgaattcaaatcatacagggttttacagcaatatcacaaaatgatttttttcacagcatattaatattgtaagatggtgattacaaaatgcagataaacaaaacactgcatattgcaccattctcatcttcttcttttttgagcttcatattctactttgtacaaattaaaataaaaagaaagagatattttatgtaaaaaaaatctgaatcctaaactcacttcactagctctttggatatcagataccgaaaagaaaaattgtgaggaatccattcaatggcctttcgcgatttcccactttgacatttcttaacactctttcttagagattcaggcaatgtctgttggatcatctccaaaacaccaccagaacataaacccgaatcttttgcaaaagactctacaatcttcggtataagaatcttctggtcctttcgtaccccaaaacttgctcttatgtactcttctttagctgattctagttcttgcattattcttttgggcgtgtaaacccgaacctataagaaagaacaaaagtcttaaatccacatcacgaatatatactcgatccatttaataaggtgaggataccggttttccaataactttcctaacagaagctaacatttggttgaaatttaagtctagaaaggaaatctgctttgatttcttgatgtaagcatttgatttgagacttagaatgagtactaatgagcttgattagaagcaatgcagcctgttttagttgcagttaacattaaggagacaataattaaagcgaatgagatcagaagacaaagaatagtaacatactgcaggatcagaatggcttcctgaacagagtgcaaagtgtagaaggggttctgaatggtcaattgcatatgcttgccgctcatctccggccttaaattttgttcttggagaaagcagcaaccgcaaccactataacaagttacaagctttatcagtgaaaagtactaagaggagcaaattccattatgacaattcattgtctgtgtccaatgtttgatgaaagtctgagaatggaaacaaacctgtccaggacgagacatacgacatccaagtatggagccctgaatggtgtccgcgctgattgtgtgacccccgatgttgtaagcagcctaataataaagacaagaataagaacaagactgagttaacataaacattttaccactattttct

SEQ ID NO: 2078 - DNA, 1004 bp, Cannabis sativa
gactggccgaaacttttgcaatacaatttattatcatcatagatcacgtatcgagcgggtcgataacgtaattttttggcttcgagcttatcatgagggagtttgccagtttttaagtcattaatgatggaggtcatccaagtggtttgcttaataatattaatttgcataacttctttgcagtcaattgttggatgggctaatacgtctacaaaaactacatcgagtaactctgcttctctggtggagaccaatcgggccaaggcatctgcatgagagttataagcatgaggtattctactaacaataacccttttaaatttagacaacaactcacaggtgtaagatagatatttggcaaatcgtcctcctcgagcgaaacattttccatttacttgacaaaccacaaattaagaaatgctaaaggcttcaagatagtcaactttcatttttagtgcaagttctaatcctatgattaggcctttgtattcagcttcattgtggaggcgctgaattaaaaccttagagctgcatggactttaaatttattggcactgattaatataattctgccacctgagccttcactacttgaggccccatcaacatagaaggtccaacctgcatctggtggtattgttggatcatctcgctcttcagtgataaaagccacctcttcatttggaaattcgagaataaaatctgtaagggcttggccttttatggctgatcataattcgtatcttatgttgaattgacttaattcgattgactatttgagtagtcgtcatgatgtgtcgggcttggccaacacttagcgtaaaggatactttgttaataccttaacgttatgtgcctgaaaaaagggtcgcaactttctagaagctaccactaatgcaaatgcaagtcgctcatcaagtaagcgtttgcttacatggtatattggatgttatctatcttggtttttgcaaactaacactgagctaattgcgtattcggacact

SEQ ID NO: 2079 - DNA, 3547 bp, Cannabis sativa
agagccgacccagcaaataatgtactatatctctttctctacatcagcccatatacaacgcatcattaacaagtccttgctatgagacaaaatatatatcaacatttttgctgattcatcatatttatagtaaattaacttacatgcccagttcatgcaaacttataaacacttattaacttgaaaccaactatatatttgttataacttcaaacaaactatattcatcttgagttatatatatatagatataaaacgtcaccgaacatcttactcttaattatatatacacatcatttgtatttttgggctatagctagggatttttcaccgaggccacaatctcaaatctgcacttgtgatcgagacaatggatggcctcgatcatattattaatctttcagtgaaacgaagtacatgatattatgtattatacactataattgacaagggacttttggtgtgtgtttataatctaattataatgatcaactatacctgatcataccatgtcgtcttcaccatcggtggctctacaatgggagtatattgtctagagggtgatgatagcatgatcaaaaatctaagtttgatatgattttggtgtgtgttcttttattttagatatattcctaaactctagctaccttatgctatataattattgtaaatcgtttaaaccaaactctcctggatttgtacttgtaactcacaagtcacaataaaagagtaatcaataatgctttttctgaaatatatctctttattgcacgaaaacaagatcaaccaattgttttctgaaatagagcttttactgaaacatatatctcttaataagtatcaaatgatgagcactcttttctattcaacttttacccttttaacctttattactgtgtatacaattattatgctatatattctcaaataatataataattaaaaaatatatagaataatttgtaacacaaatactatttttaataaaaaaaatgttgggaataagttattaaagaaaagaaagagtaagataaggagggtgtggtgtttttacagatcaaggctgtacaaaaagaaacgcgtccatagacgtaccacttagcatgcaaaccggaccgaaatcatagctaacccttctattctattaaatcccctctttcaccaccaccccccttatctcattattctcccaaatacacacacacacacctatactctctctctctctctctctcacaagtaaagccctttgatctctctctaaatctggtgtataactctagagaacaataattaatcgaagataggacaacaacaatcctatcactgatcttttcttctctcctctctttctactatttttccctcacttgtttagagggaggagagaacttttctcacgaaaccccaattccatagaattatacgatattatagaagctagctactgatcatataattaatatatgtcgaaaatgatgatgctgatgaacaacgaatcagtagatgaaagagcggcgacagaggaggcaacggaggaagatggtcccggtgggtctcgaggtggggccgggttgaagaaaggtccttggaccacgagtgaggatgcgatcctggttgagtacgttaggaagcacggcgaagggaattggaacgcggttcagaagaattctggcttggctcgatgcggtaagagctgtagacttagatgggccaatcatcttaggcccaatctcaagaagggttccttttctcccgacgaagagcggatcattattgagcttcacgccaagatcggtaacaaatgggctcgcatggcttctcaggttaattttattttttattattattataattaattattgaaaagtacatatgatgaatatgcagaaactacttattcgcctgctaaaaaggtgatatataaatttatatatatatatcaacgggtaaatggtaaaataaaatgagttataagacaagatagcgtcgtacatatgatattattcagagatttctgtcttctgacttgaatatttacccgtcgttttctacatgtaacactcctatctcgagtcagttgtggttcatttttttagattttgttcttgaaaattctctctccccttacacatcaattttcaaaagatttatcttattttatatttaacttattttttccaattcaatctaaattagacccatctgtttcttattttcttggtcaatgtcttcctttctttgactatctttcttgacgtgactttaagctttttattgttatattccaattctaccataaattctattacttttttactaccttacctattttgtttatctctcttatattcatctttatcccaaaatttattattttgatagtttgttcaaacttaaataaacaaagtcacaacaaaataatttcaatatatgaaaaaaaaaaaaaaaaaacttttaatgtagttttgttatatctaatttaaaggggtttatccttaaaaaaaaaaatatatattaaagggggttatgaatcctatgagctcctttgaaattcagattcctttctttgaattttccttccttttggacccacattttgggacccacgttttttacactgaagtagcctacctttaagtttcttttgtcttctctttctttttgacctttctttattatagttcaaacccaatcataatttttctctttgttttttattttttcagttgccaggtagaactgacaacgagataaagaattactggaacacaagaatgaaacgacgccagagagctgggcttccactctacccacatgacatccgacactaccaaaacgacaactctcaaaggcattccacttcatcatcttcgtcgttttcatcccaattccaccagcccaagcccaactatgccccttttcatcatcaccgttcggcttttcattcccaaccatccgattcagcccagatattcaatggaaataacactggtttcgctttgcctataaattcccctgttttttcattcggatcatcctcgtctcatcctccaatgcttaaccagagcactactcacataccgattccccaaacgacactccccaatcccgcgtttcagtacaacgctcaccccggaggttttaattgcaatttcagcaacttcaatgcaattgtcacgggacctccgttcgacgccgctgtggtcggaattcaatcaccgttgtcgcatcgggtgaatatggttactgagctcccttcgacccaaacgacaccgcttcagtcaacaactacgccagcttcgtcgtacacaaacggcggaagaggaggaggaggaggtgttggaaataatgctgaagagttcaattttgaagagtatcgagagaatagtgggctcttggatgctttgttgactgaggctcaagctctatctcgcaacgaaaaatctaagcgcaaagcatcggttatgccggcaactgccaaatccaaacgtgcttcgtcagaaaatgaggatcgagaaggtcacaccgttggatcagaatcggt

SEQ ID NO: 2080 - DNA, 2739 bp, Cannabis sativa
aatgggtaaatctattttaagaatgtaatggcaaatttcccattctatttccgaaaaaaaatttattaaactattttgaatatttcttattacatataattaaatgatatcctattatctacaagaaatatacacataagtaattaagaattatttttccatttaacatagtaaaacttcaacatttcttcagcgaaaagccattgttggcggttggcatcctccattttgatgctaactaagaagttgatgtaatttcatacaaactttggcatttcgctctattttggcaaaatgtttgagatggctgaagtgttgagaatggatagccaaggacttagtgctaatacataaaatacacttcaacatgaactccccaataaaaatctatcatgttttatttgtatgtcaaaaaaatatgtatgtattacaaacaaaaaaaaaatctatggattccagttttgattatcttgatacttcttttcccataactctacttctttaattaaaatatcttttctctcaagaaaagacgctaaagatgaaacattataaggaggtggcattgtgcaagggacagtgtctgtgggagccttctccattgattccatcataaattcttgtgctatgccatctgcttggcaagccattgtctcgtaacaaagttcagtagctcgtgggggtatagtgggcttatattttaagagtttggcatattcaattagaatattaagcatgaaatcatacacataatccattttcaactcttcttcaatgaatttactcccttgttctccaatttcttgtgcctatatgtatatatgacatcaaatacagaaacaattaattagacaattaaaaaatgaaaaaactgaatatattaactttaataaatgatatggctggaaaaaataaaatattaattacctctttttggtgaaaattgccccagtcaacagcatatttaatcgatctacacttgtcattaactttgatcggccaataatggtgcctcggaatcaagcctcgagcgaaaaaatcatagtaacgtggttttacagttaatgtaactgaattgcatgaaagaatgtatttatgactaacagaccaagcattcccttcaatataaatcttaaacctgaaatagcattaattacaattgattattctaacaatcatagcacatattctattgcagcattactactggacattatctagcacattctatatgtatggctttgcgattggttagcaatatttcaaaaaaattattatattaaactatatgggacctaatatttaattgcactaatagcgatattgatatgtaggataatgctaaacacacccattagcatttctcaatctattatatataacaaaaagtgttggcaaaattataataaaattaaaaagtgtatatataatactaacctatgagtgcattggtcagctaaatttgatctcttgtatccacgccttgctgctcgattccaatcctatatagtgtcaatacatacataaacaatgcattaattatttttaatatttcaaatttatttatagaaatgatctctaatagcaaaatccttgcaataagataaaaaaacacttacttgagcataaagacgagctttccagtcataaaataaagaagccttacatttgaaaagatctcgtctattgcgagtaacatgtgagtttcctttccaataagcataaggttctctctccacccattttttcatcttgttaccttccttaatttctttcaacaatggtgtccatggctttatgtctatctcaggcctatattacaaggggaagaaaatacattctttatagtcatatataaacatacacatttaatcattttgtaacaatatgttgtaaaaataataaattacagtttcaaagttcataccaaccccaaaaagaccaatctgggaagacaatgtcaagtgtagtattatctttacaataattaaacactggaggtggtattggggcattgggcccactaaatactgctgactgaacgattggtagatcaccacaattgaacataaggtccaaatcagggactctacctgggtatctccttaacagctgtaagatcccccacagagtaaaaatatctctagtttgaaaagaatgcctataatactccacataggccttgccttttactatgacgagtctaaagttagcaaggcccatactttcggctcgctctaccatgtctcttgttacacctgtttgagcccatggctttaagtcttcataaatccaacgaaagtattctggacatgttggtgacaatggacgatcttgatctagatatggattgtaagcagtggaatgatttgaggggcaagtgcctatgttaccataagcagtacaattgactggaatattgagttttgtgtgattttgaggtggtggaaggctgtggaaaggcaggttacttaaaatttcctgttacgaaattgcaatataaaataaataattaattctctgttacaactacgtacaattgtatgatgtataacacataacaaacaaaataataagtaaaagtgtagtgtaacaatcccaatctcttacgcctgcatatcaatcccaactggccaaccacttaagctggactcaagtggccacctgatcaaaaatatttgtgttcatatgttgttgtgatagtcgagctatttcttttgattaattacgtagaaatct

SEQ ID NO: 2081 - DNA, 1937 bp, Cannabis sativa
cgagtcatttcattagtttaaagtaacacttttctcacaattgttacattcatttgaataaagatttaagaaccatctaaactgaccttcatgaaaatggcttctcctttaggaatgtttacaaacatatctcctgaacaatgcccaatacctaaaccaaaatcatccaaagtgattattaagtgtaagaaaaaagagctctattactactagatttatcttttggattcataccaggatatggaggagagttctctagaatagcagctaaatcatagttgatacccttgatatgagggtacttagagatgatcatgttaaggatggcaccatcaccaccacccacatcaaccaatgaagttaaaccttcaaaaccttgataaatctccaaaatccttttcatgcatatggggttaaatttcttcattgacaacttaaaaagctcaccaaatctaatatccttcctcacgtattcgaccatattcatcccatgtgccctgttacatggatgccctccttccaaaattgcatctttcaaatggtacctttaaccacatatttagatacatgttagtacagaaacaccatgaatcaaattcaacccaatcagaaaaacattaccatgtttcaatgtaggccttgtcttgcatggtcaatagtaaaggtgctagtgaaactccctcatgagtagcttttttaatgaagtacttggcaactgggcccaacccatatagcctgaggaggttcccatgattattattgttaggggaaagagaacaagtaagaagagaataagatgagagaaggcaaagcattcggtcaagagtcataggggcatttgggttctgagttgggagctgggaagctatttgggccggagagagacaagctcctggacctgatctctcgatgatgtcaagaaggcccaattcaattgctgctttgagaaccatagggagtacggacgaggtcacaagttgcatggcatattgagagtggttctcattctcattctcctctttgatttcatctgagttcatctcttttgtgtaggaattgatgattcaattctgttcctttcgatattatgcagcttttgcagtatttatatatatgattggcacatgttggacttttgcttttgagttatcgggtcaattatttgtatgttaaatcaaacctgaaaccaatatgatattattcaaatagccgccgcaacgtggatttaattcgagaatgcctttccaatcttcttaattttttttttaataaatagtatttttactctcgaacattttaccttactaaatttggccctcctcaaattatttaaacttattaaatttcatcctttaatctcagtttcattttggtttaaaattaatgatgtgacatattacatgtagaaaaatcatgtaatgacatgacattacaatttaaataataaataaaaaattatctcaaaaattattcaaaaaaattttatctaaaaaattaaaataaagtgatgttgcatttttttggaaaataaataaaaaattcaactcctatttttttttttttttttgttttaaaaaaaagaaatgaaaatgtgtcatttttacaccgcgagttgagaagaaagggtttagggctgatcgaaggtggctgatcgattttatggggtcctggtcgaaggtttttaggcagttcaaataaaaattgtgaggctctggttttgttgaaaggtttgggtttgtcaaaaatagtgaggtggttgcaggcagaggtctgtgactgacggtggttgcaggcctagtttgtttaggggcggctggtggtggtgaaaaaaaaatttggtaactgaaatactcatgggaaaaaaaagcttggccaagtcaaagaagaaggggttccgcactaagcagagaactgaacctccattttattttaaattt

SEQ ID NO: 2082 - DNA, 1352 bp, Cannabis sativa
catatctttgagcaaaaatcaactaaaattaacaatcaaaagtcaggatcaattagaagtgtttccctaaataaataaaataaaaataaagggtattttgtcccctaagatcaacactatcatacatcattacaaaccccatagaagagtaaatacaaaacaatataaaaagagaaaaaaaagaaaaaactggaaaaacagaaaaggcttactgtaccggtaactgtacacgatcgaatcccctgccttgtaagagattctccacaaacatcggtgagtatgtcagcgcttctgaaaccaacaatttcaagcagttttgacaaccgaagaagctgtgggcgggcactgatgaagataaattgttagtagctcccatggaaaattaacagataagagtaaatttatggaataggctttgtcgtcgggaaaaaccttatagcagagagtatttaaggactgttgtctagttcgtcatccaactcgatgatctgtgcccgtctctctgctgctttctttctgataaagaaaccccatctcattgctgctttaattttaagccatccaacaacagctttaccaggacggttgcggtcttcatcaaagtttggcatcggtgattgcatgaatgatgggaaagaaaatgtatcgtcgggtacattcatggttgaatgacctcccatactaaagagtcgaagcaaatgttgcatatcctcgtgctcgagcatttcattacttctgatacgaatctcttcctctgagaagaattcgtcaactcctttgttccggttgtgtgaccagtcgtcaaaaggattaatcgtggatggatgaatcgaatggttggccatctgatatacggacgtagatgattgaggaggagcaagagccagtccaacagaactgttttcatttcttaggccttcggctccatgagaattgctaatcaactggtcatgttgcacaaatgaattgctatcgaactgagggtgagaacttgaatttgcaagtggagcctgctggatcgaatatctagttgatggatcatcattataccctggaataaacaaaaatagaagaataaaagatcagtgtccaaatcagcaacaaagatagactacaacacatacataatctggaatctggatgctaaaactttggaaagaacacagaagattccaacaaatttctctagagtataatctcaacaccataaccacaattgtcatgtatcaacccttgttcaacaaggtccattttgctagtctggactctgaaaaaacattactagtatataattcttgaggccctctgccttattttcacagatgaattgctaggtaaaaatgtataagact

SEQ ID NO: 2083 - DNA, 703 bp, Cannabis sativa
taaaataatttccaacagtaaaagagctctttaacatatgaagatgcatgtcaaagctccaactgggtaaaagctatggaagaagaagtaaatgctcttggaaaaaattaaacttgagagttagtgccaaagcctaaagatgtaaagcctatattcttgcaaatagactttgacaaatagatgtgaagaatgcatcttgcatggagagttggatcaagaaatatatatgatccaaccaagaggatttgaggacagagtttaccctaatcatgtttgaaagttgaaaaagacattgtatggattgaagtaggcaccaagagtatggtatggaaagattgtaggggttcttaatgaaaggcgaatacacactaacacatgcagattttagtttatttgtcaaaataaaaaatgctaaaatttcagtggtgttggtatacgtggatgatctcatcatcgatggacctaatgaagtagaaattcatcaagcaaagtagaatctgtcagtgcattttcaaaaaagcttgaagaacttaaacactttattagtttagaagttgatcgcaccaagaaaagtttatttctccaccaacaaaaatatgcaaagaatttatttcaaaattttggaatgattgcttaaaaatttatatcaatacccatggaataaaatgccaaactctgtgctcagtatggaaaatgagttgca

SEQ ID NO: 2084 - DNA, 3303 bp, Cannabis sativa
gagagagagagagagagaaaagcagaagggaacaaaataaaccaaagggtatcgcggcaaatggtcgatgcttgcatgtgggtgatttggtatggtagtttgttaaccatataagagcaaaaagcctctatgtcccacttggattttgggaggattttcccattagagatacccacaaaaccacatggttttcctttcataaaccggcttagcttcaaaacccgaaaagcccaaatagacttgtttagttgctttttaagactagattagtagagtttgatgaaaaacctcttaaagcccaagccgttagtggtccccagaaagcttttaaaaaaaagggtgttagttgtgatagtggttaaacagtgtcctatcctaagtcctccttcccaccccatcatttccctccttaaaaccccctctcctctatataatacccctcaacccccaccccatttcattcactcaaccagctcacattttatttttctcctcgctccattactctacaaagtaattatctttaccttccttctctaccacatttcttctgttgctatttaagtttcaacaaagctttttcagaaacaccaagtgctaagtttctttacttcttatccttcgtgcaggtgaaaaaaatggctcttgctggtgttttcttggtgggttttttgacaatggtgtcctctgcctatgcttatggcggaggttggactaatgctcatgctacattctatggagggagtgatgcttctgggacaatgggtatgaacattaacctacggagaggacacagaatttgcagatccctccttttgtttttgtttaggtctttttattttgttttttttttgaaggtaagtgtcttatggttgcctgagatatctttctttgtgtaaacttttttgtttaggtggggcttgtggatatggaaacctctacagccaggggtatggaaccaacactgctgctctcagtactgctctgttcaacaatgggttgagctgtggatcttgttatgagattaagtgtgctagtgaccccaaatggtgcttgcctggctccattgtggtcacagccactaatttctgcccacctaacaatgctctccccaacaatgctggcggctggtgtaaccctcctcaacaccattttgatctctctcagcctgtattccagcacatagctcagtacagagctggaatcgttcccgtggcttacagaaggtgaatatgggtttccttaagttaaattgtttaggctaatcaaataagtttacaagtttgatgaaaaaagaagaagagaaatatacatagtgtttcactactacatatgcttaatgcttttatgaaatttctcctgagtttccttcctactttaacacaaaaagtacatgggtttggccactttatttttttccgccgttgtaaactagtattcagtattcactatagttttatatttttgtccaactcagaaagtaattttgttattgtttctctgtctatgtagggtatcctgcagaagaaggggaggtatcagattcaccatcaatggccactcttactttaaccttgtccttatcaccaacgttggtggtgctggtgatgttcattctgtttccatcaaagggtccagaactggctggcaggcaatgtccagaaactggggccagaactggcaaagcaactcatatctcaacggccaaagcctctcatttaaggtcaccaccagcgatggccgcaccgttgtgtccttcaatgctgccccagctcactggtctttcggccagactttcactggtgctcaattccgctagaacgtgtcctttttcgtgatgaagcatttattcacaaaattatatacactgctgttaggagagtatcttttcaattatatatatacttgagttatctatactagtatgacttgtagtagtatactaaggtattagatagtatactatgttttattggagtcggcctttctggcctttaggagaagagtctatttgatttgaagggcttattttaaaaatggttcttcattctcatttgactaagtattgttgtagggtaaccctatatgttcatgggcaaacaaccctactgctcattcatgatgtgtttttctttttttaacttcaaaagtagtgatggctgaggtgggactccatttcaccacccgcccacaccagtttgaagtgtttgttattgttcactttggaatatgttaaagcaattttggcttttcaaagttggttgttgctggcttttgttgagctgagttacacccttttggtcctatgtttgaattgtattgggagaattaaaaatgtatattgtcaattcctatcaatagagtgctagttttctatcttttgtttcttcatatatctcaattcaagatattaaacaaaaaacagttaaagtcaattgttgcaaagggtcacaaatttagtttattttcttaagtcgtggttgaggatgtagttagaacaatatgaacaagatttaacaaaatccagttagtgggatgtgactagtaattgaataaatacaaaataaactcttgtagtctcaatttgaaagtcaaagtgtgaactaatctctgtaatgttgattttgcatcagaaatcaggagtcaaaggttatgtgttcgagatttgtcaagaaattttttcttgacatttgtgttatggaaaaatatagtctagctaacatggagacttcaattgtaaaatggttaatattatcagatctatcacttctaattagctcactaaaataacttaaattgtaaaaatatagagaaatgttgttgaaaaggaactctatcagtgagtgagctaaaatagaaaaaatagggtattttgaaaaataaagtaaaaaaaatgatgtgaatgcttgattgtaccatatataatcttaagattgtaagataagatgtatgttttatggtataattaattgatatagagagaagtaatttataaattttatatattttattattttttctacatattagcaattagtaatgtgagattctttaatattttcttgcgattttttttttactcactatccttaatcacaaatgattttactttttcgatcgatatttttaaatttgtttgttttgttctgataccttattagaattgtaaggtgtatgaggttctacatcaaaactaattagctatgagagaagtagtatataacttttatatattgtattatttttccacacgttaacaatatatgattctctaatacctaatactcaaataattgttaatga

SEQ ID NO: 2085 - DNA, 694 bp, Cannabis sativa
gtcaatcaattattccaaatacacaattcgaataatggactccaatgttcacaccaccaattgctcctctcttcctaataattctctaactaaacatcaattcgagaacccttctccatctggtaaagatcaatttgggaatccttatgtatggggttacaaggttccaaagacattagtaagcactatagcgttcttgaaatgtgaaaatcaagtgaattcctcatcttatgtagacactgctccttgcaaaatatttggtcataattttgggtgtggatgcaaaaccaacagccattattatgtggtggatggtgggcttcgtgtttcggatttggagagctcgtgttgtgtggtgctaaggactttggtgtcggctaaggcaatggtgaatagaaggaatacctcttatttggacatcacaataagcttgcttatggctttgagctttcctggttgaatcaatattttattgacacaaaacttggaggaatatgctacattaattcctccaacgagaccgactgttcttttcataagtagtattaatatttgaattgaaatagtttttaattttctttacagtaggacaatttcaacttatagctaaccttttgggttatcttgaatgatacagttaacttgatgaggattatcctgttaaaaggtaagataaggagatccaagtttaatg

SEQ ID NO: 2086 - DNA, 3292 bp, Cannabis sativa
aacaagacccagatccaacccgaccttagattcagactcaaacctgactcaggatcaaaccttggaccttgaacatggacccaggacttggatcccgacctcgacctaacactttgaccttgacctgagcccgaaccttgactcggcccaaaactcaactccgaatcgagcccaaacctcggctctgatcccgagcttgaaccctaaccttagaaccaaaccccgggcactagaccggacaccgaccttgatcttgaccccaaaccctcacccggatcccagaccacggccgtgaccccaaattcgaaccctgaccacctttacccttgcccccaaacctctgcctggctccaaccccaagtccaggcctcaacctcaaactcgaccccaaattgggctcccgaccccgtgctttggaccccaatcttgtctcaagaaaatgatgtgaaagataaagagtgagaagagaaaaagtaatgagagaaaaaataatataaaatgatgtcagataaaattgacaaaaagtcaattgttatttaaaatagaaaacaatatttggttattctcaaaattattgttttttgaaattagttctctaaaaacatgaccaaacatgcctaattattctcaaaaaataatttttaattatgatgttaaacatgtactaaaaatttcatttttttactactctcgaccaaacatataactttaaagtttttgcaaaaatgaacattaccggaatgccatcaatgacacaacgatccccgacgtcaaaaggatgcattatgaacacaaacacaatgtctttgccaaacacaaaagctgccaatacaagatgagatgagaaaaagactagtacttttgtggtatcaatttccattagtagaagccatattacaatagtcaccacaatgagaatagtggtaacaagtttgttcagttgattaactgctgttttagtgtcactaagagcatgtcctagtgcttttctaccattgtacaccttcacctgcaataaaaaaaaaacactcaacacaatgatttcataaaaaacatcctaaaacaattgcatgtaggtgctctagagggactcaaatctaacatgatcgatcatttaagctaccgtactcgagtggtaaaatgtttaacttaaatgaatctgatacaactttttcggtagaactcactttaaaaaagctaatctaagaaaggagggttaccaaataattatatactactaaccaatcgtattattttagtcaatgtgggatcataacaacactctttcaacaaatgtcaatgatagtccaatttactacgagccttatcccaagattgcccctttcactcttaagggagcatgcttctgatactacttgggtaaaactcacttccaaaactaacatagaaaaagaggataccgaagtagttatatactacctaccaatctcatacttaatcaacgcgggattctaacagaatccatatttacttattcttagtctagactcttgtgagaaagctcaaatctgagtttgcatgaacagatcaaatgtcttaaccatatgagttgcccctttaaggcaatatatattcctcaagactaatagttgaatgaatccatatttgcttatccttagctaatagaccaattataattcaaactaaacattaccttaaaagaaaataacatttctattaagtgatatattacaaatagttagtaatattttataatcattgtaaaataagtgaaaaccgatattaaattacaccaataacaatataacacttcaaatgaataatgagtttgcggcttaccacccaatcagtgagagcttttcggtcaattcgaccattctctctctcaattagaggaagaacaaggtacacatcttccttggtcatgaatctcaagagatcatcctcatcaatgtagctaaatgccattgcaaaaaccaagttaaacacaaaacaaaacaaaaagggaaaaagttaataatacaaagctagattatgtcctcacttggagccaggtcgagcaacatttctgaaaatatgataagcagcagcagtagcctccatctcactagtaatctccttattctgttctgcagcaacattttccatctcatcaaactgataagagattgtcgaaagccccgaactcgaaacagcatcaatccaaaccttcatagtccaagctgaaacctcatcttgtttcatcttatgaagctgagccatatcaataacctcagtttcttcattcatgtttcccttttttgtacttgtaaaactcaattgccccatgcttggtaacctcccaaccctcttagccacatccataaatggatgccctgaaagggtttgtaacacatactgatgaaaaattgattcttgaatcctatcaaagagtgtgttggcatgaaaacttgaagccaagattttcaacaatagagcctttaacaaccataaaaatgacccaatgagaaaagttacaagaccccaagttatggactctagaattttggtagtaaatttagaccttggaacaccatggttgataaagacaagtacccaagttagaagaataaaatccaaccaaataaagacttgaacactcctctttagcccatgaaccaagtaaagaactttctttctaagcaaaaagtttctctctataatgaaaactattagatgcataaaccaattgatcattgataaaccacatgaaatcaccataactagaaaaacccatctccataactccaaaccccaaatgattgttttctctaatttcttgacagtcaagctacaaaccaaacaactaactaagatcaaaaacaaaaccaactcaaccaacacttcggtcttcaatttctttctcttctctttcttcatctcaactttttcataagtctcctcaaagtcatcaaggcctggtgaagggtgctcttcaaccatggctgtatcaatgggagctgaggtctctccgaatctggatttcggtttcaaaaagactgaccttataagagttttccgatgagtaagagtctcatgtggagcaagggagacatttgaaaaagacccttcttcctctttagcttctactacctttcgaatatcgactacacatgattctccattgttgaacaaagctttttctctcttcacttcgatcataacactgagtaaagattaaacctttacagagtaatgagaacaaaacaaagttctgaacttttacttgaatgaatatgcatacacaaaaccaaactaataaagcactagt

SEQ ID NO: 2087 - DNA, 2009 bp, Cannabis sativa
caacaacgaaagatttccttccagctatcattagctaaggctgcttactagaccaatttaagctggaattgcaaattgcaatgttgcttgaatgagaaatggggcaagttgctttgagcattaattagaagtgttcctaagttcagggatccatatgggtcgttgataccaaattttgggtcttctttcacaataatttaggtaaagaagaaatatctgtatctgtacagatcaatcacgagggagaaaaaagtggaaataagaaagaaaaacattttgacctttcaaactcccaatggtcgtagaaactataagaatgttacattattatgaactccaaaagccatcatagaaaacaaaaatccacaaccaaatatcgaaactctaccaatcaattcaactatacagacacaaacattttctttccagaagctacgaaatatacaagccaaatttttaggcataatattccttattctctgattataatatccaaaacacattaattatatctttactgtgctcagtttggaaccagtttaatgaatttatttggtgaatttgatatttttactgtgacgaaatgagctaaattacaataattttttttaattttcttttttgttttatcgatcaaagggtcactttcagaattttattttaccataatcccaaacgagatttttcttaaagagagagacggaaagaaataaaaactgagctgtccatcaggagataagatacaatatcattgaaataatcagatttaaaattcaaaaaataaatgataacttcaaccaaagaaaaaatttggtaatcataaattatcatttacaaaacacatgcattttttttatgatatacgaagtaaaattaaattaaatttaacatatatatattatatataataattttgtaacattaaactgtacaccagaagagggtagtattagctaatagagaggcaccggaaagcgtggtggcttaggaggcttgggcaaatcaacgacaatcttttcatgtcgtattggctcacaaggacagggcattgctataaacttcggtacagtatctccaggcatcaaaactggcaagctctgccattggtttcccttcaaatccttcaacatatcaaaaattgcatttcagtacttaagtagatcccaaaaagaaaaaaggaaaattgcgaagagagcccgaaaacttttgttaattacataaataacccaaaaataaagaaaaattaccgaattagaagcgttgggtttgattgggccgttttcgagatcggcagaatcagaagcgtcggaagcgaaagatctacggagggatctgagcttgtcccagtggtagcaacaagagaagataccgcttaagctgaagatgatgattaagagtaaggcggtgccgagagggaagcccagggacggccgtgatgcgtccacgtgtggcggagagaaatcttggttctccattgcttcttaaaataggagtaagagtactagtaataatactagaagtttcttctctcatgtgtttggggagagagaaaatggagggaaagaactctcctgtattcttctgagagggtttgtttttgagttttggagaaagctttgataggagttgagagggagttgggttgcaatttataaagagtgaggagtaaattattaattttttaaaaataaaattagtaaaaaggactttagtttcggacaggtgtgtacgtggaaaggtacacctaatgtccgggccatggtacggatcagggtggggcctacttgtttaagagtgtatttgcgcttcaagaaaagactatatttatgtaaagaagagtgttatattatacatctccactacaacccaccattttaactcacactcataaaaatagagtgtaatttgatgtattagagatattatattgacaagtctttcaaatttggttttttttctttaacaaaaaaggttatataaagagcaaatttagtactaaagtgatacta

SEQ ID NO: 2088 - DNA, 578 bp, Cannabis sativa
catctttttagttatagaaatgtaaagataattaagcctgctttgttcttgtttatatatataaccttatataagagtcttaacaactcttgggggggtttcatttaaagttgtacattccttcattgaaagaggatatcccctgttctttattacatggtccttcaaagaaggcatcattatatccagacgtgcaagttgtaacaaacagctattagcttaatacattttggccttcctcacaaatactttctgctccggcggtcggcctagctagccacacgcaagagtaataagatcccctagctaatagtctagtgtggggttctatatcatatatgcataaatatttgactaattattataattgcatgcaggcagatcataatctctcttccacttaatcagaaagaatattaatatacctataaccttttttcattcaaaaaaggccggttaggtatctaataatgatcgcctatttagtatttaaccaacaacatgagtctattaacaacatgaattaatatctacatatatttatgtacgtggtatttatcaggaccattggtagttaa

SEQ ID NO: 2089 - DNA, 1033 bp, Cannabis sativa
ccatgctcgtggtaccacggtgtcatccatgcggactagcttatacgttccaggtggaatgacttacgctacgcggtaagggccttcctagttttcccccaacaccgttgtggggtctcttgtattcgggaggaccttcttgaacactaggccttcgacctaaaagacgtgtattggcaccctagagttgtaatatctggctgctctctactggtatacagctaccctcatctgaaccttttctcatttttcctctaataggtccaagttctctgacaatgcctcctcattccttatttcttcaaatttctagaccctatgcgagtttatttgcgtctcgatagggagtacatcctcacacctgtaagccaaggagaatgaagtttctttggtattagtgtaggggtggttctgtaagcccacaacacaatagggagctcttcaaccatgacccttgaagtttctccagcttggtcttaaaggttttcttgatcaccttgttggtggcctccacttggccgttggcctggggatgcaccacaacagaaaatcctctttgtatccccctatcattccaatatgccccttgtaagtctccaaattgagtatcattatcgatgatgatcttttatgggactgcaaactaacagataatgaacttgttgacgaaagagaccactttcttgtcagttatgtgcactagcggttcagcttccacccacttgatatagtagtccaccaccacaattgtgtacttttcctctacccttcctactggtagttctctaattggatccattccccacatggaaaagggccaagggctggtcatgtggtgagttcggcaggtggacaccagctatagtttgcgtgattctagcacttgtcgcatattttggcaaattccatggcgtccttctctagggagggccaataatatccctacttcaaaatcttatgagacatggaatgtgcccttgcgtgattcccatattctcctttgtatatggcaagtaggattggttgtatttct

SEQ ID NO: 2090 - DNA, 758 bp, Cannabis sativa
aatctgctcattgatttcacagttgcctcatctttccataatccaagtcctaagataagcatccgtataatgttcaatcctggaatagttgctgctaaccatgctccacgagacccaggactgtaacgattccattatgttagagaaacatttattgaagttaaagagaataatataaaccaagagatggttacctgaaaagtggccagcagagcatgaaagctatgccaatgcttatatgcacaagcttcctgttaagtttctacacacattaaacagtagaaataagaatcatctagaatggaaccagtaaaaacaaccacttagaactacaaactgctggcaagatcattatgttcaaacttccaaggtagagctcacgaaaacaaatattaaaattttttccccgctaggtgggcccttgtgcctagcacacctatgccgccgagcctggtagagctttctcttccatctccagataacaaatttaccacaatacttactaatcaatgcacagctaaaaccaaaaggaagatttatcattaaaccagcaaaactttcttgaacagacgaagaaaaaaaatagacatgggccatcacaacatcttttttcttctccacttgtctcatataacttatgattctcggtagctttcctttttacttgtcctctcgatcaacctacagtttttggtatgcatgaaattctacattactaggaacgtctcatagtgaagccccaaaacttatggcagatt

SEQ ID NO: 2091 - DNA, 1207 bp, Cannabis sativa
ttacacttgtacattaatatgtatcttttgggggaagattgtcttaatgatttagttttataaaccttccaagaaatatagggcttcagcaagcaatgcaaatacagggaaagagaaaacgttagctatgataaaaccagatggtttgcttggtaactacactgatgaggtaaagaatgtcatcatcaattccggtttcattattttcaaggaaatgattcttcaacttgacgaggacagggctgcaagcttttatgccgagcattctttgaagagcttctttcccaatcttatcaaatatatgacaaggtatttcagagtgttagagagtcttaacacacagctttttatatttgatttgactttccatttttagcagttacttgtgtttagtttggagtaaggtaaacatagtcattgtaaacttgttagctgggttttttaaatttctggtggcccatcttgttgaagtttgaatagatcaacctgccttggttttcataaactgtggtatatagtaataatcatatgctcttaagctgtggactgctctctctctctctcttgaaactaccttttttactttctttcagtggtccggtgttggttatgattctcgagaaggaaaatgctgtggctgattggcgtgctctcattggtccaactgattcaaagaaggctaagattactcaccctcacaggttttcttctgctaccaccattattatttttcagtgataaagacaattgtgattttgcttacttcattctgttaagtttatttatggccctgcatctccttttaatacttataacagtgacttgaactttttcattgatgaactaaccaatattcagttcacttgtattttcagcataagggcactgtgtggcatagattccgaaaaaaactgcgttcatggttcagattctcctcaatcagctcaaagagagatctcctttttctttcaagaggagtctgctggtaacattttttatcatgatgattaataaaagagttgcaatagaatctttactttgatgagatcttaacttgtaatgttcacagaatgtactgttgtctgttacatttgttcaaggtgaacttctgttgtggaaactttagtagtatgaattcatgtgctgtcatatgtgatcaggaacatgcaataattgattgagatattccaatgcatcaatttattta

SEQ ID NO: 2092 - DNA, 1171 bp, Cannabis sativa
gcagccgaggctgcagccgcttggatatcacgaggggaagtggtggccggaacaggcaaagaaggggctgaattagggaagttgagctctgcatcttgaccctttagagccaaagccgcaacatcataagcaaccgcagccatttcgggtgtagagaatgtgcctagccaaatcctattaggttttctaggctctctaatctccgaaacccacttgccactgctccgccgcctaacaccgcggtagctacggccacgggtttcattagtattaatattactactacttgaaccactgctctgtggcttggagtaatgcatgttgagtaattagggttagggtttgttgtcgatgatgatggtggaggtggtgatgataagattgcagctggtgatgatcgggggaagccatttatggggattgagatttagagaagaagaagaagaaaaagggctaatctgttttggaaggagatgatgagatcgtaataagatcaagagtgcaaaccagctggtgatgaactcgatcgagggtgtgttttgcggctgattagtatgaataactgcgctgttgtagagcgtctgggtgtaggccagctcttgtgttggacatctgggttgtaatactgcgtttttaattaattaacctctaaaaaataattataaaataaataaaaaaaatattatcctctatatatataacagtactgaagtgatgagatatataaaaggtctatattattgatgatatatgtctttttggcccactactactactactactatatcacttaactcgtatcttctaacaaagatttctttttaataattaataaagctgattgtactcatacacttaatataatatataggtaaatgatatcacatccatttagggcaatatggcaaaggaaataattgtctttaccatgaattgggatatttttgtatagcacacacacccacatatagataaaaataatatataatatattgatcactaactcgaacatgtatcatatatacgagtcattttgtaatcaaatagcagacaacttaacaatctatatagaattaattagtactcttggaattttggtaaacactcttcgctagcttattatttaatccattctattcacataggaaccatgctaattaacgtacgtacc

SEQ ID NO: 2093 - DNA, 2144 bp, Cannabis sativa
ggtgaggtagggggactcttaattgctcactgcccaaaattgagcttcaagcgctgcgacatgcctttgcagtgttgcggcgtgccttctgtttttggcaaattcctaagagcttttaaaaggcacggttgcgatatgctcttgcagtgtcacgatctacttttaagtgactaattttagaattttaaccctgttgaaacgccaaataaagaacccttttaacatttttcaaagcaacaaaaattggaagcgagaagcggctttatagacttccatcaattatttttgaagaattctttttttttttttgttttcttttatatgttcttaatcaattgttatcggttatttacaatgaatatgattagttagacttttaattaggattattaatggagattgtttgacagtttaatgtgatttaattcttgttccagggtttgattttgcttcagaaaaaaacataactgtcacttggcgacctagcttgtattagaggtacacatctgcgatactcatggacagtcgacatccccattaggcccttcgaatactcattcgggtatcagctaggcaggcttccatatttggaccccttcgggttcgagagaggcatcacaccttctgcattcgagaagctaaggcaaggccaaggggatattcgtatatccttcaatctagacttgttcgcggttccatgaaacctctttgcgagaagattgtagtgggggattttaatcaaagaaattatgaggctaattcctttctttaaatgccacatgtcacgtgatcgaaaaaaacggataacacacatacataactataaatagtaattgaatcattaataagctgttaatttccatgtctaaatatgcgatcattacacttgtaattatatgttcatccttagatactaagttgagtatatgagacttgaaaaattcattaaaataattttaaagtttctctaagtgtcaatgtgagagaggaaataacttttaagacaaagatccttcagccttagtcaaatctactgtgtattcttcttatctaatcattttataattttgatgtaatatttttatattcattttgtgtatttgattataatcctctatattttatcttgtaatgagaaaattttcaataggtgttagaccacttaatttcttttgtagcatctctagtctatgtttgttcacattccatagtgtgtttgtgttaaaatcattattctcaaacaataattttaaatagaaaactccttttaaggaaaatattcagaaatacttttttttccctcaatatcttgaaaaattacttgagtagtaataggagttgatgatcagagattttagtatataacatcaacacacatttataagtttataactatatataacctggtgattactacaatattagcatattaattattagtattacagccaaaatgagttggttcaagaacttcttctcatgtttttgtgcccggtcaataatgtcaaactcatcaaagcacaatactaattaccatgaagaagaagaccttaatattaaccaaaaccaacctccaccacaccctagtactcttcaacttcaagaaccatcttcatcatcattattaggtatcttttctattcatttcctcatcaaattattattattagtattagtagtatttctcatcaatatttgtaacatttttaatctacaccttgtttttttttttccttgaaattaacttaaaaaaacaatcttttaataatattaataaggacttcatataagaaagaaaataacattataattaatgtcacttcttgatcatcaagattcaaggtatacattaatgtagtaaaaagtttgattttacatgatacatacaaaaatgaatcttgatcatattcttcttcttcttcttgtaacttatatattgtttaattttgattaattgatcatgaccagaagctggagaagaattaaattcaaatcctagaagtaacgtacctcaaatattcacttataatgaacttgatgatgcaacaaacaacttttctcatattgttaatctttgtggatttggatatgtatacaaaggaaccttaccaaattctaatcaggtataaacatttatatatata

SEQ ID NO: 2094 - DNA, 2714 bp, Cannabis sativa
gttggctacacttttatatatatcaagaatgttagaaatattctaaaatattcagaagaattatgacctcatcatttacaacggtataaagggaataaaatcataatagaatgataggacaatgattgcattgaggggaccattttgctatttgttatgacacctgtacacctctatacaatgacaattaaactccttaattcatttcttaacagtcaaaacacaaaaggaggtgtaggttattgtacatagcaaacaaattatggtgctttattcaatttgattgtaattctttaaaaatgagactaacttgttacaaaaatatataaaccaggacaaaaagtaactaaaggagattatctgtatacttgaaatcaatttataaccttcttttcctttaatataagttagttaccaaaagatacatttaatttggcacttgggaagaccccaagactgttcatgttttaaatatgtaaaatattctatacagaaaaaagaaaaatagtaagaaaataaaaacattccagagcatcaagacttttcctttagctctgctactggaacataaatcacagagggttcattccaagggtttttagctttgttgttttgaaactttagcagtttctgctttatagtttctaatctacctgtaactttacagagtctctccatttctgcttctgcatcttcacttccaaacccagcaaacaaattgaacctcttcctcattttactcctttcttttgaacacttcttcaacttcacatcatcacccaactccatagattcctgattcacatacacaacaaagtattcgttaatattctcgagtctactaatttacttgatagaaaatttaggagaaaagaagtgataacagtaatctttttttctaactctcataactgtatgacatgtatttttattaaattctacatttcaacaacattgcaaattatgaatacaattcagtgtcaaagaatgagatagggaaaaaaaaagagcatttagcatttttctcaaagaagaattcgcaaaaagcatgcacaagagttcaacaggttagtagagtcaactacactaaaatcaaaatcacagataaaacaaatgcaaccccaagaagaaaggaatgaagatagaacttttgaaatataaagtgtaatcttttttgatcaatgaatctatatattgcagcagataatcaaaatgcaacaatctcaaaatgtagagaaaagaagaagcactttaataaccagcaaagcatagcatgctgaagatgaaacagaagaaactaatctgtgatgttcagcaataccaggactatctagacagacaaatctagttcacttgggcaaaatgaccaacaagatcttccctactaagataacaaaataacccacaagatcttccctattaacatagcaaaataacccacaagatcttccctattaacatagcaaaataacccacaagatcttccctattagcacagcaaaatgacccaaaagatcttccctattaacacagcaaaataacccacaagatcttccctattaacatagcaaaataacccaaaagatcttccctaataacacaggaaaaaaacacacaagatcttccctattaacacaacaaaataacccacaagatcttccctattaacatagcgaaataaccctaactgataagataatctcaactattgataagcaaacatcacatttacattagactcgagacaacaaccttcttcctatttgcaggtgacataacagaggaattcttgcggtgcttcatctttgaagggctgcttagtgattttgggcgctttctctgagacagcttcttattctttacaacatgaaccacagtttctgttgaggtattgtctgacataacaagatctggagcttctttcatcatattttcaaatcttggatgcttaggtaatccaggagtcaaagtgtgaacctgtttgactccctctgcctgaacatggaaaaccaatataccgtcaggtacctcaacaaggatagtgtttaacaaaaaggtaaggtgattagatcaaagctaccattttgctcttcaaaacagaaaaataataataattacaggctacaaataacaaaactgaagataagttatatagagttgcaaaactaacagaacagtaagaggtgagtagcagatttgcgtaatagaatatggtcaccaacttaccttccttgttttcaaagctaaataacgagcatttttgaaccatttgctaacctgaaattgtcattttaaagagtcaatatgtgaaatctaaaaagtacaaagcctagccattagagcttctccaagggtgctgtgtatttttcaccaaaaatggctaaaatgctattttaacttttgtcaactttgttacaaccatgctccttatcttatctagcataagttattttgatccatatttaaaaaaaaataataataaaaaaaaataaaatctttttttttttaattaaaaaattcatacaaaaagtagctttgttaaaaaaaatggcactgtctattttggagatgaatataggaattggttggagtgctattatttatattccactctctattacagctacaatgttataaaagctactactcaaaaaaaaaaatccattctccaataaagaaagttgtaaagagaaagataaatcaatcaatcagat

SEQ ID NO: 2095 - DNA, 1249 bp, Cannabis sativa
ccaacacagctttggcacgattatgagagttttgaaatggaagggagtgtgctttaccatattgacaagcatcatagaaacttttcatttcattcttggaaaaacttacattagattgtcctaagacttgatttaaaactctagacgacgggtggcctaatctcctatgccacacatcaagtttggaaatagaaacattatcagtctgggactgatttacactaggttggacagaaacattaaaaatagaaaaaagtgtcgactgagaagaagagtgactcgactttactggtgtgaaaactgggttgaaaaattgctttcatggtggctcaagctgatacagtccatccttaagcacccttttgagcagtgttctccttgttaccttgtccttcaccaaacaaaagtcagaataaaactcaatcagcacattattgttagtggtgagcttggaaacactaatgagattcttagcaattttaggaactagaagcatatctttaagcatcaaataattcccagaattagtgttaagtttaccactaccaatgtgtgatatctgaagtttgctgccttaccaacaacaacagtttccttaccaccgtagtcttatttttgggtcatgttggaggagtcggaggtgatgtggttactagcaccactgtcggcaaaccaagcatcgctttcaagaacttcaggtgttgcgataaaggcattgtggttgctggtttgtccagatttgttctaagattgaggattgtttggatcggatcccatgaaatttttgtcaaaacgattatagcagacagccgcggtgtgaccatatttgccgcaaacctggcatgttggtctcgatccagaactggagcttcgaccttttccacgaaaccttctagcattaccacgtgaaccagagaatcggccaccatttccaagacccatgctatgagattgattgccacgaccccttccatttgaacctgttttagcagccatgttggcttgaggagtagatccagagattttattacctccaatggtgagactttgaagtctttcaatcttgctatcaaaactcaagagaatgtcttgtaactcttgccaagtggtgttctgtatagcttctatctgaacgacaatggagaggtactcgacatcgactccgaagaggacattagcaaccaagtgtgcttcgggataaggatctccaactagcgcgagtgtgtcagaccaattctttttctgtttg

SEQ ID NO: 2096 - DNA, 1523 bp, Cannabis sativa
tattagtttattttattttagttatttattaattttatatataatagggtgcatcacaatagacgaattgggcattgccataagatcattggatcaacatccaacagaagatgaactgcaaagcatgatcaacgaagtagatctcgatggcaatggaaccatagagttgggggagttcttggatcttatggcaagaaaaatgaaggtataataataataatatttaataaaataaatattatagttactacaaaaaaagaatattatatatattaatagtcgttaatttattctcattattaaaaataatttatatctaactacttgttatgaaggctaattaatgagttggagttttatttgtgtacgtgtaggaaactgaggcagaagatgaactcagagaagcattcaaagtctttgacaaagatcaagatggctacatttcgcccactgaggttgatttcttaacgttctttatgtacacacgtatatatataccaattattagttgactttaattctcataaaaataaatcattattattaaataataagcattaactgaatatttaattgtaagtagtactgtcaccctttacgtacatgctaatttataaatagtcaattcacacagatgtttgaatgcaatattaattatttttactcgtatttatatatcatgtaaatagaagaaaattaaactatgagcaatatatatatttcttaattgaattattgtgttgtggtttacagttaaggcatgttatgataaatcttggggagagattaaaagatgaagaattagatcaaatgatcagagaagctgatttagacggtgatggtcttatcaattacgaagaattcgtgaggatgatgttggctgcttaatacattattaattcattaattaatgccaagcttcacttctccaagcaacccattctaggctttttttttttttccttttaattatttaaaaaataataatcattacttttaatcttttgtgcagtgatttaatttaaggatcacaatcacatgttaacactgttatctttgtattgtctgttatatattggaaagaaataaataaatattattggacaataattatttttaattgtttaaatttagagaaatttatgtggggtggccatagttttattttgattacaatgatatggttcggtgttttattattctatgggttcttatctttttgatttattttgtgaacggtaataatcaaattccattcactgtctttttcctttgtttggtccctttttatttattaaatataaaacgtgcacaacattcatagttttttgtaatattaaaaaactttcttttttcacttttcttttctaaaaagaaagattaataaaaaaagttagtgagactcataattattggagaagagttatattatggcaatctactttttaaggggtcgttttaacgtatgaaaatcatattttttttttaccgtgttattagaaaaaataactaaaattaaaagt

SEQ ID NO: 2097 - DNA, 1494 bp, Cannabis sativa
tgatggtgtgaatccccactgcactaaacaatctttgagctttgtattccaagctcggggggcctgtttcaggccgtaaattgctttatgtaacaggcaaacatgagttgggtgtgctgaatctatgaatcctggtggttgacacatataaacggtttcattgagagtgccattgaggaacgcattgctgacatcgagctgtttaactggccattgatgagaaacagcaagggataacacggttcgcactgtcacgggttttacaacaggtgagaatgtctcggcataatcaattcctggtgtttgtaagaatcccttggccacaagtcgggatttataacgatctaaagaaccatcagcattgagttttatccggtgaacccacttgttgtcgataacacgcataccaggttcatagggtacaagtgtccatgtaccagcagctttaagagatcccatttcagaattcattgaagcaaaccatttaggattgttgagagcttctttgatgtttcttggttcagagggcagtaaggcttgtggaagtgggtgtttagtggctaaatatgacttcggtttaaagatgccactttgggacctggtttgcattggatgagtgcggcctgaagtaaccaaatcagagggtgtggagccctgtggaatagcagcaacctgtgttgtatcaactggtgtaggagtactagagacattagtaggaggattggaggttgtgtttggaagtggtaaaagaggtgcaggcaatatatgggaaacggatataggtgggttatttggtggggcatctggtgaagtgtttaatgtgggaactgtgtatgaggaatcaggatgagggtcatttgtggtggtagaaatgtgtgttggaggattaggtgaaatgcttgatggtgatggtagtgtctcggtatgacagtgggatacaccagcagggagagcattattagtatgaattaatgtagtagaggtattaaaagttgcagtaggtacagtatatgaagaatcatatacctgttgggactgtggagttgataaaacaccaggataatgaccttcattaaagatgacgtttcttgcaatatatattcttccttgagcattttgacagagataacctttatggtaggaagagtaaccaagaaatatgcattgctgagatcggaattgcattttgtgagcattataaggtcgaaggtgcgggaaacatgcacacccgaatggtttgagtattgtgtaatcaggtttggatgcaaagagacattcaaaaggacttatgttgtggagaatagcagtaggaagcctgttaatagtgaaagtggcatattggaaagcatgccaccaataagaaaaatcaagattgctttgtgctagaagagtaagaccggtttccacaatgtgtctatgtttccgttcagccctaccattttgctcatgtgtatgtggacatggatgggaaaacaaaattccttgatcacttaa

SEQ ID NO: 2098 - DNA, 6195 bp, Cannabis sativa
tctctctctctctctctccatcgacgaagatgctctctctatctctctctctcttgtctgaatctccgcctctcctcattcctcattcgacagtaatatcttttctctttttttttttttatgttcttcatcttttcattcttctttctctttaaacttactattttttgggtactcttggtgtgatcattcctccccatctttagtctttctatcactctctcaatcactgatctcagctcaaaagaaagaaaaaatccaatcaaggtactttttttttcctgttttttctattaagaattttatattaattgatttctatttgtgtgtgtatttacaatgtaatgtttggttgatggggaaaattgatgatgtgaattaaatcagattttattttagcatctcacatagtgaaataggttctaatgaattttaatgactgaaaattatggaaatcaacatatattgttagggtatttgtattgattttgagaatgatgaagaagattggagagtatttcattacttactcctcaaaaaggtacttttatgtcgttttatgattgcatttttatttcattatttaaggtaagtaaaatctataaaagaaaataatagtggagtatgatataatattactcttttacgagttaaattattagaaaactcgatataatattataccaataacaacttaagtagctaagttagagttgttttagaaacgttaaccaccaatttttaatttgaatagtaataactcatgatagtgagagaggcgactgtcatgatcgttgtccaccatcattatcggcgaacgagagtgcattcccaggtactgtaagttgcttgtactctgtccctttttagatctgatctgatttgggtgattgtaattattagaaattgtgataaattaatttgggggtgattctttggcaacccattttagtttcatttttgaattgcaaggtccatttattgtcatctctaaggattatcttacaaattcattcattttgatcacaacattcggagccgaaatgccatagtatttgacctgtaatgttctaagtttagggaaataaatatgaagctcacaaaaactaaagtaataatccaatactaaattctccaacaaaggaaaacatgataacaaattcttcaaactattatcatctaatgacttccaacaactatgattaatttgttcatctggtcattgactcaagaggctgtctggaagtgattatgatgccgaaaagatattcagtcaacttggaggtctgtagcttgatagagatgcaagggcgttggtaagccacttctctggcatgacccaaaggactgtcagagataagtttgctcgtctcactcaaatggcaacaattctcaacttatcgacgaaggttgttgcggcaaacggaatgcaatctactattacagtgcgggggactctcacttatcgactaaatgaaagagagagaaagaaagaaaaaaaaagagattaattaattggaggaggttaaaaataaataattatttatttaaataattattattaatttaagaatattattaaaaaaataattttaggaataatctaatacattctaagtattaactatctttatacactcatcaatttattacccttagattaaatatttatgactataaaaatatgcctaccatagagacaaacctaagattagggatgcaaatggggacgggacggtgcggggagtgcattccctgccccctatttttttccccgtccctacatactccctggtggggaatggggcgggaattacccgttagtaattgacaccttaacggagacccgtttattaaaaaattgctaaaactaataattttaatatattcaaaattaatataatagttttaatatatttaaaactaatatttacaaacactaaattaaaacaacatagaattaaattcattccataattaatagtcatttagataaattgtaaaatcaaaaaccccttcaatgttaaaattaaaattcataaacataagctttaaaactataagcataaacataaaattcaaacaaacacacaaaacttaataaacttaataaaattataataatgtcttcatcttcaactttgaaaactagtagtagtcaagactaccattgaagagtctttattcttaaggattggaatctacaaaacttggaccctaaaataaaaatttaactataagaaaacaaatattttaaataaaaaaatagtaaacaaataaataaatgctaagcttaccgcttcatcatcttcgacatcatcaaagaatgtactatatgaacccttattttgtgatgtatctaagaaataaacagtattagaattagttaattttttaaataaataataagagcaagttagaataaacgtacttagtttctcatcccataaccaatcttgtgtacatactaatgcctccaacatgtttggatgaagcctattacaacaaggagtcacatgacttcaactagtgttgaaggcagattcagaagcaaatgtagacactgggatagccaaaacatctctagcaacttgttgtaatgtttgatatttaagaccatttgtcttccaccaagctaaaatatcaaactctccacccctaggtacaactgcttcctccaagtataagtctaactcagacttgtaagtatccacatttgaagtactactaacatacaagtcaaaatcagctaaatcatccacacatccatcattacttttaccaattccagaagcattaaataagggatcaagaagatttttttttccatcattcggtttgtattctttcactaaatcatagcacaacattctaatttactcgacttcattttgatattcaccaacataaattttaggaaagtaataatcaatcaatttcatcttaaaccttggatccaaaatagttgttatagctaatatgccatgaatggaagcccaatactgctcaaatttatccatcatatttgatgccattatcctaatctcatcatacaaagaattaagacactccttaagcaacaactaagtttcacaaattttagagaagaattgattagcagtaggatatttagttctagaaaacatctcagtgacattgtaaaacaacttcaatttctcatacttaacttttgccagaagtcaatctcgctcactaggttcttttttgtaattttttgcagtatgtattaggtgactgaagacatctttataaacatgaaaaattaatgcaataaactaattagaatatatatatttatatgtatacaatatatttatatatttgattaaaaaagatataccaaataaatttttgttcaactattatataaattaactgtaaaaagcaactgaaaaatatagaaaatacaaaatacaaaaattaaatctacatctcatatatttccaagctatttttttactatctttttttaagttatagtattgttcacacgtatctaaagttgggtttcatcagtttatattttcatatagttttaaatttaattggaattttctttttaagaattcattgtaaaaagaattatgtaaataaaaatctatatatagttgtataagtttatacaaaagataaaacttcttaaaaatatatatatatataaatagatacagataaatttatatatacaagacaaacaaaaatttgctacaaaaaagaaaatagaatgataacaaaataaaaagaatatataagttttacaaataaaattttatatttaaatatatatatatatatactagaaatataatagaatctacctcaaagtttcttcaaatttcagagccattgtcacaatcacaaactcacaatatgttcatgtctatgaaagagagaaatagaagtttaaacaaaggagagaaactgaaaataaaaatactataactataactataaaactgtatgtatatatgtgtgagaaataagaactactattactaatatataatatatgttgtatgcatatacaatacaacaatacaattactattactaatttactaatgtataatattactaaaatatttttaagttaataaataaaataattttttgagatttaatatcaattagacaattactttagtttaatcatccgttgagtagactcttggagtcttggtgttgctgattggtgaagtgagtagcgtgtgatactgatatcaaaacattaatatatcatatattaccaatcaatacaatcagccacaaggtccgccaatcatcacatttcacctaggcacctataaggctattaatattacagttaattaatacgtcacacacgcaagtcattacattcaatgtaattaaatacatcaatatattatcatactaatattaagttatcaacattatagtgtgaaagtgaaacttaaaagtccaatatatcattaaatttttttaaatttgatatattgagaagaggaaacgggctgaagtatcttcataacaattaataactaattattatatgtttttttttgaataattaattattatatgtattaatatatataaacagtggtatatcggggcggatagtactttctctgaccctacctcgcctccgactcgagtatgtaaaatgaacttcgtcctacctctaatccctgctaagtcagggaattcctgccccattagtggtgggttcctgtctttgtggtgtttatgtgcaatccgttttaagatacttaccataaacatgtcctaaataacactatatatatatatataaagaatatagagtgtaaactaaagtggaccaatgtgaggcaatggcttttattaggcttacgtgtatagactcttgtcaatttcgaacctattctagtttttgggtgagtggtccaccacctccaagcaccaacaacattgttttttcattggtcttttgttggtaatattttttgtatatttttaattatggtttgatgagttttaaatttagaatcttggaggttttttcacggtgtagaatcttgaaattttgaagaaatttattcatgaattgcatatcctaaatttagaaacccaaaattaaagagggaaaaaagagtaaagaaatgaaatgattttgcttatgtaaaacaaacattagtaaaagaagttaaaaataggtagaaaataaaatagattaatattgaaggtattgagtctatttttaattactgaaataaagttgttaatgtgaatgttaagataaactttattaaataactagtaactattagttacataaatttggtaactagtaacaatttcctttctttaaatattttaaataattgtatttgtttgtaggttttgaattggagggggaaaataattttggtaagtgttgattggttttctaactaactacaattatactttttctaattttttgtttgaattaattatgaataagcatgttaaatgaaattgaatatcttaaatattcatctatagtgaagtatgttctatgaataaatgtagtgtgctcaaatgggtggaatatatatacatgttaaaggagtctgaatatcttgaatatttattcgtagtgaaatagattctgcaaaaacatgtactcctaggtagaaattacttttttttttcttgtttaggattattatatgttcttaattgtatgcttaattttttttgggaacatcaaatttatagttttcatgctagcaaaaattaagtagaattaggataaagtttttgatttaagttattttaaacttacttgttagattttgtttaaaatttgcagtatggataaatcgtagtgttggaacttgttttatcaggatcttaatttactaacaagtttgtttgattatatacattgtaatataacatcctaaaatatgaaattcataaaatgataaataaacacataaaaggaacaaaatccttacattggttgtaataaaaattagtgactccttccagtcaataacttaaactctcgattcctaaactgtagcaaggtattaccaagtgatgaacctagatagctttccttaacacgaactgtataaagactcacattttaccaagttaaaagaaacaaaaatatatataacaataactaagaaaccccattcgtctccccccccccccccc

SEQ ID NO: 2099 - DNA, 2394 bp, Cannabis sativa
tttgaagcactgctttttattatttatatatactaactataattaaaatgatgagtgagaaaatgaggtaaagaacaaaatgttaattacaaaaaaggccccaaaagaagaggatttcgtgtaaagccaccagaaagcagatttttctcgtttcccaaaaccccctctctataatacctttcaaacacagccttcccaaccttcgagaaacctattgtgtcttgtgaatgtgtgtatatataatacggtatatctacacacacacaccactatatatctcctcatcttcatcttcatcattttcatttccaaatatctttcttacacttgttcaccattactatttactactagagttaggctaagctaagacatataagctagatagtgaaaaatggccactgataaggtggttgagacagtgatagtaggaaattatgtagagatggagactgaaggaaaggctaaagatgtcaaaacaaggctctccaatttcttttggcatggtggctctgtttatgatgcttggtttagctgtgcctcaaaccaggtttatattattctcaaatttaccatcttttcaataccatatgcaataaataataccacccttattgtctagtttctaccagttgattaagatgatctttcttttttaacaggtggctcaagttctgcttacattgccatactcattttcccagctgggaatgttatcaggaatattatttcaactcttttatggcttattgggaagttggacagcttatctcattagcatactctatgttgaatatagaacaagaaaagaaagggagaaagttgatttcagaaaccatgtcattcaggtaaattattattattattttgacaaaaacaaatctatatatgaattaattttaatatatttacattagtttagtccaaatctcacatgagtatctgtatctctcctctctgtttttatcatgtagtggtttgaagttcttgatggtctccttgggaagcattggaggaacgtgggtttggcatttaactgtacctttcttctgtttggatctgtcattcaactcatagcttgtgcaaggttctttcttcttacacatctctctgaccctctaactttaactcttatccttacatttttatataacattaataataaagaattcgtatatatagttactttatgttttttaactggggtatcttttaatttttaatttttattttcacagtaacatatattacataaatgacaatttggacaagagaacttggacatacatattcggagcatgttgtgccaccacagtttttattccttcttttcacaactacagaatctggtcattcttaggcctcttaatgaccacgtacactgcttggtacctcaccatagcttccctactccacggccaggtaataatacaaattcattgttggtatataagtttagttttattattatgttaataattaaattaagtttggcaatttattatgtgttgtttgtgtgatcataatatagattgaaggagttaagcactctggtccaactaagttggtgctatattttactggggccacaaacattctctatacgtttgggggacatgccgtcactgtgtaagacaagcataaattgataatataatgtctttatcgttatgttcaattttttttcccatatgttatctggctttggtcttctaagttttgtttcattcatatatgctcttatgtatcgtccctagaaaagggtttggttttgagcataaaacgtggtctaaacgtcatattgaaagtgactaaaccttctttttttagacaagacctgactataagatctaattaccaatctttaatcaagaaaataaagttaaaaacatggacaaatattcttttcttttttttaagcgtggctggcaacatgtccttttcgttttttttttcatggcgaaacaactgttttttttttttttttgtttaatttggaaaagcgaaaactcttttctcttaatttgcttttgcttttatcatgagaacacaccaaaaggaatcatgtttttatattcgaaggtcctccaataattacaatattccctttttacaggggaaaaaaataacaataataattattatgatcatgagccaaccccatctcccacatttcgtattcaacctttagagtgtttgaccataatattatgcataatacagtagaattaatgagtaaattaattttggttgaaacaacagggaaattatgcacgccatgtggaagcctcagaagttcaagtcaatttatttagtggctaccctgtatgtgctgacactgacacttccatccgcatcagcagtctattgggcatttggagacatgcttcttaa

SEQ ID NO: 2100 - DNA, 2410 bp, Cannabis sativa
tgcagaaggaaagttaatggcataaaagtttcaaaacttgttcacgtatgcataaatatatcttgatcttaaaaatgctaccattattttgtgaaatgaaaaatagaagttagaggtcgagacagagtaaacaataactagaatacatgacaatttgaagcatgtagaggaataaaaagaacatcacatcactagttaaccatataagagaaaggacaaataacagactgaacacacttgaacatgataccctattactgaaggtactaaccatgtaaggcatcactatttaaagaactgtaaacagcggagcattttgtaaatctaacacataagtaatacaaggattgcaagtataacagggtagctaccttgttgtacagagtaggaaggtctgtctcatcaaatggaagatacccagccattaaaacaaaaagaatgactccacatgaccatacatcagaagctgcaccatcatagcctttattgccaagtacctgtgttgcagtacaaattcaaatgcataaaggtttaccatgcactgttttcgttctccggtcatataaacataggaaaccaaagctaaaaacaaggaaatactcaaaacgcctctaccttgtcacgttttaataagattttatggtagaaatgtttgaataagaaaacaaaatagcatatgtacacgaaacacaaagattgatactgtatgagtaaaatgatcaatgatttctctttattgactgcctttccctcagctaaaaattagcgacctttcatgacacctctctgcatcgattactttccttccccagtccccaccctataatgttgtgttggcttggcttctcactgttacacctcacgtctgcttagtgcttagattatacataaactacatgatgtctttccaaaaattggctgtttcataatttgaagaaaaatggaagaaacagcaccaatcggggactttgtaccagaaaataataagttaaacaatggatgaactgttcaaaacaattatagaccgaaagtaataaaatgaactgcacttggcagtagaaaatacagaagtcaaattatgagaaacatacatcaatggcatggcagacaatatcagaaaatccaaggaaggaatgagctattgaaaaagtacctccggtgcaacataattaggggttccgcatgttgtgtgaagaagctcaaccccctgctcaaaaatatatgaaaaatatctgataaaaactatataagggccatatacatgggtaaattgatgcacagtaataaacagaaggcagtctaacttacttgttggggcaatgcactcaaaccaaaatcagacaccttcaactttccatttgaatcaagaaggagattttcaggctgtatgccaagaaaaaacaaagtgattgattggttaaaacacatttcctagaacaaattatttggtaaaaaaatattaatgtgcaccttcaagtctcggtggtacacgcccttactatgacaatgagcaacagcatctataagctgttggaagtatcgccttgcctcgctctcaggaagctttccttggtgaacctggaaccaatacacctcataaaattttagtagaaaaaacgtatatgaagtaatctgctgatacttaaaatcccttatccaaaactagtgatagtttgtgaactaagaagaaaatatatttaacagctgacatcaacataacaatggagatagcttacaattttgtcatacaattctccaccagttacgaactcaagaattatatatatctttgtccgactagataaaacctgaaactcagaaaggagtattaaaaggattgggaaataatattaacaatatactgagttatagtctgaaaaggaataagcatatacctcattcaacctaactatgtatgggtgcctaacgatcttcattatagatatctctcttttaatctggagtccaaaacacaatgaaacaatccacattcattacggttgatttggttaacatcattagtcgaaaacgtacgtttgcattttttgtgtgtgtggcaatatatttacattttaagtgcatataaatattaaacaactcttaaagaggtacaaacatttgctaaaatgttaattgtattgcttaagaacagagagaaaatacctgatcaaccattctatgcttgagaatggtacttttggccaatattttcacggccacactctcacccgtctctgtatttctagcaaacttaaccttggcaaatgttccttcaccaacggttctgccaacctcatacttaccgaccttcctcgttacattattcctcgataccttactcatggtcactccaagctcatatcccaataactaaattataggaaacttcatatactccaaaaaaaaaaaa

SEQ ID NO: 2101 - DNA, 3119 bp, Cannabis sativa
taaatccaataaaagaactcttagaacttcaatttatttattttcctttctaattcttcagcaacttaattccaatccatttgctttcagttatggattagtaaacgcaccatgcttctttagtttaacatatacttcattattccttggacaataactttaagttggtgtgtgcaatatgatgtgtagagtatatttgatagaggccgtttgatgaaagtgatccgaaactttgatctctcaaagaaatattttctttttcttcttaaattgaaagatgattatactgttgtttatcataatttcctatcactgttacttagtaagaaacatgcatcaaaatttgttaacatgaaaaagaaaaagcagattatataccttctcccaagattaacagttgcattttttctgtgtattgacttatctgctaattggtgcaggttggagttcactatgatggaagattttacgagtttgtgccatggaatggtgaagttagttgggaaatttctccttggggttactggttcattgctgcagagaatgagactcacatggtaatgaatattgttaatatgatctcaagtaaaacagacaagttagtaattacattttctgttaaaactgaagtttgcatttgtctatatagctaaacaatttgtcagcacttagttaaaagcccaataaagtaaaaaggaccactttcttgccatttaatggaaactacttaagaaatataactgggatatattcttttcttttccactaataagatctcctttataattttccttctagtgaacaaaacacgagtattgctaatggtttataatttgtgatcgatgagcaaggttgaattgaaggcaacaacagagcattcgggtacaacactgcgtgctccaacatcagaaggtggacttgcccctgcttgtaaagatacttgtatttctgaactgagattacaattgtgggaacgaaagtatgatggcagtaaaggaaaggtgcaatgcttgacacttaattgattgtattatagtgttattgtggtgttgatggttgcagtagatgtggcttttgtgttgcggaagtccattgcttattattacttggtttagcctagctaaacagggtggttgggctaagtctgcatttcgtatggcattgcatataatctgtgcatattttgtttttgaaccagctctctgatgaattgtgtgtagcaattattagtgacacatatgacagttatgtctgaattgccaaggcaggtaattctatacgaccttctttctatggattatagctcatgtagttgtaactagtaagagctcgtttaattgccccgtgatttaaattttggtttgtactctttttccttggctcttggcatgtttcaaaagttgataatcaagcacatgaaagactggtggtcccatgtgtattctttcatgtgatggccttacttttattttggatggaaaccaaaatcaaatgatttcttttgttgataatgctgttcctttgttttctttctttctcaataattggatcatctttggtgggtgtccaatgtgatttcagagtattcttatttatatcctttttttcttttgtaggtcatattggatgtgacgagtgacatggctgcagttgaggttggaggaggaccatggttcaacacttggaagggcaagacctcctcacctgagttggttagcaaagctctcaattttccggtggacatagaaggctttctcagtttggttccaccgctcaaaccccctggtctatagtaacgtggtctataccagttacaaggtttctctttttatttatctttgggagacgggaattcatctctccatctctaccaaaattcaagtttaaactctcgtctattgaatattttaatgttaataataataataagaataaactatgataccttttagcaacatataaacattaaaatgtaattaaaaaaacgaaaaatgtgttcattttaattgtattttacataagtacgagaagttggagcgtgtcccattaaaaattcattacatgcaagttgaagtttgtatgtttgttacattggagagtgagtaaatcactaaatcatctaaaacagttacgtgctttcttgaagaaaaattatttatcatacattcactatactacttatttttttttctagacttgggacagaatattatcattcatttatcaaccatttaaggtttgaattacataattaatatcaaggtctaattagcttgaatagtgttgttgacttcaagggaataaaaggcaattgagtaggattattaattatggttttgagccatagaagtgtgtgattaaattcggatgtggatccaagagaaaagatttcaagtgcttgtaaaactccttaggcttctctacaaagaaaacgtggccagaatttttgataactactaactcagcattgtcccccaaatgcctataaatatatataaattataagtcagattcaaaaatactataagaaaatgaattcagaatatgttttgaggtttcagagattgaccttttcaatctgtgagctagctctaatgggaatacttggtcatgttcaccccagattatcagagttggctgcatcaattcaagagaattcatttgcatttatatagctgaattaatagaagaaataaataatgcatgacacctcagggtctacagctaaggcttgttatatcaagacctgagaaattttgggaaggtctgaaagtttcctattttttgggatggaccttatcaaatctctcttctcttctacatattctgagaacattgcctgttcattcataaattttaattaaaaacatatctgtcagtagtggtgaacacccatgagtttatgagcaatgcaaagctagcttttgttatcaacttttcaaaaatatatttcaaatacagattcaaactaaaaaaaaaaagtaaaatgcttgatttgaatatgatatagaatgcttttaaggtgcacttcaaaaaaaaaatgtactgatgagttttttttgtgttttcaatatagtagttataatctcaattttatattatggtttgtattgcattat

SEQ ID NO: 2102 - DNA, 3473 bp, Cannabis sativa
  modified_base (2625)..(2629): a, c, t, g, unknown or other
tatgggtggaggggtgaaggtgccacttgagtatatttgctcacaagcattaaggtgtattgaataacaaacccagtaaggatatgatgagttttttaaggagtattcactcatacttttctttaatcatgcatttccttcttctacatggatatacttcttttttctatcatagaagtcatctagataaatcaattctctctttagcatgttctcccataacctgccattggggagaactcctacagctatggcaatcttgagttcatgtttagaaaccttcctaaccttggtagctttagcattgaagcattgaatgtagcttcgcaagattttttgttagctttgcctcacattagtgatacttgcgatggacatgatatagtcatatgttgcttgatgttgtcggaggaactcttccaaaagttgcttccacaatgcgatagtccctaataatagcctcttgaaccatttatgcagctcctttcaacgtgaccaggaagcattggcatctagccttactgagaactttcttcatcttcatcagcacattaaaagttccacggtggtacttcagattggttgtgccatcgtatagtttcatttgtggctccttgaagttgggtggaagtggttctgcatgtatcttgtttgaaactcatcatcatccaagtctcccttcgagggagcaactatcttttgtcgtaggtcgtatatcttcgcttttatctcattgattcttttttctccccttcccttaggggttaacgaatggaactgagatcctcgttggggttggaatgggggctacatgtacttctctcatcttattaatgtgtgacttctcaccaacattgacttacatttgcctcccacttaagagaaagccagaagcgaggttccctctagcataaaacctcttggatgaagttcctccttacaaccatggggtgttcccaccaacgcgttcctctaagggagggtcagcttgggatatcttagcagacctgtagggtgcccatttagtgatatgtctttctttcgccgacctcgcgggtaaccaccagtagagaatattgtattccgctcattaacatgcatggttgattgccttctctattatcattttctgttggcgaggcataagtttttcctttaagtatgctattcagcaccattttcatgcccgtcaccatggtttctaacctctagttcttcaaacgaaggttgtttatcgccaatttataacagtgggtttgaaaactttgatttgctaaatgcacttatgcattctttctaaacttaaactttaaatgattgatgttgagacatttatggctaggtggaatgagacatcgcgaggatgatggaggccctgggtggtgccttactttagaaatatcattaccccaccctaaatcatcccgtttattactagaaatggaaacatccagaatattatcaatgacattatcattaaaatagtactgaagcttatcaatatcctaagaaccagaaggagtaatgaaaaaaagacaaagtatgcgatgggttgaatgcaacaaggagtaggatttaaatctaaaactaggaagtcaatgatcatccaaaatgttaatatcattaccagtccacactttccttataagacctctttttaaaaaatttctgccccataaaatgtttctttaggagaaaggactatggccattggtagcatcaaaaattgaagagttaggaaaatatcgaactttaagtgttaagctgagtaaagatttcaaacaattaaagattctcttaacttgtttgcaagcataacttgattaaagatgactaaggatatgaaccctaatcctcccacatatttagattgacaaatggttcttcaattttttcaataaacttttcgagtatcaaacgaggacccccaccaaaatctagacgtaatagattcaatttctttgcaaaatcctggtgggcaaacgaaaataaatcatcgcatttgaatgaatagcttgaagaacaactttgatcgaaatttctttactagccaagaaacatttatgatgcaatgaatggatgatggacaaaactttatctttaaggaaggtaaaagcgtgatacttagacctagagagacattgggtagaccaaggtatttggttatgaaaggcatattttcaagatcaaaggtacgaaaaaaataaatctcaaatattatcctgagtattaggagaaaatgaaataaaagacttaataaaattaataacttgaccaaaagctttaaaataagtacggagggtactgttcaaaacttcacaagagttatgatcagcaaaacaaaaaagtatcctatcatttgcaagaaagagatgagaaatagggggagcaaacactccctcctcctaaaaccccctcctttttcccatggcatatttacttaaagggaatgagaattaatggtatgatattgatttcatacaattgtttactaaattttggaaagggagaaagtagtggagcacacagaaattaaggaaaaaataaaggaaaagattctcccctatttttatagagaatacctttctttttcctaactgaatttattttaattttaattttatnnnnnaaaaataaaaaagacaaatatacttttaaaaatcaataaacatattataattacatgttctaataatgacaattttgtcaaattaaaacattctgattacttttcttaagtatgtaaacaaaataatatgcttttaatttttttacagacaatttaataaacaacataataaaatgttgtttcccattattttttattttaaattaattcagttctcttatttattattgtgattctaattataataaatgtacgattatagcaataaatactattttcgatgagaagattgttgtcatggatatgctctattgataattactaaaaacaatcggtagccaaattatctcattattgatttaaaatatggtactctctgtgcattgtaaatttgtaagaaaccaaacgtacatgggatgatagtacaatgtacgtagaatacccataacaattgtgcaaatcaagtcttcaaacatatctacaaaaaatatcttatcttgtttaaaaagtcaagccatttacaacactactgaggtcacatcctaaatatatattaatttaattccaaaggcacattaattgttaccaaagccaacaaattgtcaatctcctaggtttatttaaattacggttcacttatacgtggggtgtggtgatgagtctggtccctaaaaagtgtagtttttccgattttcaccattttcttccattccatctatggtatattaaagaaatatataaaccgtcaacgatatattgtcttatatttatgtataaattcctctctatcggaaataattgaagctaacatatataataacaaccacctatatacatatctgtg

SEQ ID NO: 2103 - DNA, 3161 bp, Cannabis sativa
cttatgttctctggtgcatcaggccgagctgcgcctgcaaaactcactaggtgttttcggtatgagctgatgatcttggtctgccaagagatgatgtcttgatcagagtgagggtggaagtaagttgggtgtgggattccaatgtcatttacatgccatggctgtctttcaatcaagagcttagttgggttttgcatttgctctagctctaagaatcttgtaccccaagaattttcctttctcctgaaatcccaagagatttttcccaatacaaacacatgatccttccctgaattcctaccccaaggtctctgtttctcaagccacttcatcaactccaaccccagagaatctttaacatcattggaaacattcttgaaatgccatctcaaaatgtccaatccaccatagaatggaacatagaagagcttagcttcattctcattgtgaactctacaaggatgcttcaaaactctagcatgaaaaataggctccaaagagtactgatgtgtcctgtaccatgctttccctagctttggaattggctctcctaatccttcattggtgaaatacttgcagaagttcatccatggaaccatgtccccacattgaccaaccaagtcattgttgaacttagttggcaaatcatagacataaattccattcccaacacaccctttcttattatatttgtctgattgccatgaccggtgtagttgaagttgctcattaaccattttcattgccttttcaagctcatcattatgtgcaccttcatggccaaaactatctctaaaagaagggtctgaatcatccccaacatcatgttgatcaacaacattgtctttcttcatttcaacattggcaatagcactagtattgaaaactagctcagcattactaacattttgtttcttcacttccacattgacatgattagttatagtactaacaacaaaactagtactattttcatgaacagcttgcttatcaagaacattttccttcttcaattcaacattgccatcaaaagtagtagtgttgtcaagtattgagacttccaatttgggctgtgtaccagcagaaagacagtagagatcgttgagttttcgggaagagacacaaagatgaacaatttttccagagataattgttgtggaggaagaccaaatgaagataagaagaagcaagattatggcagtgggaattttgtaaataattcttagtagaattgagcaagaagaactacaacagtggtttgatgatgatgattttagctctattttcttactggaaactactttcggtttctttttggatacagagaaggccattttgggtggaataaggaagtgcaatggtgaatgaatggagattgttgagccttggctctggtttttctatagtagggggaggttccatataatttgttctttaataattgaaaaacatggaagcacgtatattcgaaagttgcaccatatttggttgcacgtttagtttttacatatttatatatatatatagaattgttgacaacatcacaatcacaacaatatatatattccttggttggttaatctttttttaattagttaaagaagacatgcatcttaattggttgtttagtgtttcagcaaaataagaaaaagttgacatcatggatgatggaagcaaaggttcatgtatacatatagatgtcaataagacctatgaacgttcattttgatcatgatcacaaattaatattagttgagtttcaaataataataaatatatataatgacaacaaaatgggagtacatatgcatcatgcatgcaactttttttttcttcctattttagaagtgtcacgttatacgcttgctcaagtctttcgaatataattttataaatatatgtatatcttcatattagaatctatgatattctgtcggctaaattggtaaataagaattattagaaaaaatcagaaagacattattaaaaattattacaataaatagcaaggaaaatttgacaaaacaatgcgcaaaaggcaaaataaattcatatataagacaaaacaaagagtgagctgcttttatgtcaaaaaaaaaaaaaagagtgagcagctttgtgataaactcaaataacttgaaaacttttgctatataaattaatatttgcttatatattttcatttgtgccattttaaaaatatgatcaaaatatgaaataagaaaaatctttaatttatagtaataatatttatgaagcaaattaaggtactatacttataagttccagagtggtgtactaattaaaaacaaaactagaaacatgtgaagtgttacatgttacaaattataacaaacaaaaataataccccattcatattatatatatttatataaagaagtagaaaaaacatatgacctccattattgcatggtactattccaacttccaagtattacaacatactatcagtcctggcaggcaaccggcggaagaaattgaccggaaccggcggtaaccggtggcgaaacctagggtggcgcataacgaagaatcctgctagagcagctatcacttgaaacggcgtaacgtagagaatcaaagcagccaagaggcagaaactaacgaacatggctgaagcccttggatccctccagctcagcaaggaatgcattctctccccttgagtcgccacgtcaccgacgacagtctgaatccttccagcgacactcctcaacctgtcgtatctcatcctcacaatctcaggattcctggtcgtcgggaaagtgtcgaactcctcgtccatctcgtccgggtggaccgcctccgcctgagaaatcctcgtgttcatatgaggagggtacttcggccggtaccggtagttccagattccgatcaaaaacatgtagagaaacgccgtcggaagaatcaattccggaaaacagaccagcattaaataaagcacgtgcactaaaacagtcgttatcggatttttccacgtgcagatatctccgaaccattttcccacagcgaaaactccgccgaaaaccgtcattagtcggaaaaagttagccttgctccgtctcatgctccataagtgagagtccacgtcagacatgtactcgaccacttcttttctcagcggcggctcggctcgccct

SEQ ID NO: 2104 - DNA, 1522 bp, Cannabis sativa
cttgtttccaataagatgcatatggggctcataaggaacgagtgtccaagttccttgagaaagaagagccttaaattcagtgttcatggagccaaaccaaccagggtgtttaagagcagctttaagggacttaggctcagtaggaaggagagattctggcaactgatgtcgtgtagcaagataggcctttggtttgtatataccgctttgggatcgggtgatcataggatgatttcttacaggcaatggagtactagatgcagcaggtacagaggcagaacctgtaggtaacctggtgttgttcaagtctccagtgatggaagtgagtggagaagacaaagaagtcccatgatcagtatgtgtagtagctgccatagcagtattattagcatcagtagcagtggtggcaccaacaccagctgcgggggcaggaacaatgttgatgagagagtcattacacactgttgttgctggtgtagaattagcagaagtaatttctgcagttgctggaacaggtgcacaggcgaccggaggcacagcatcattatgttcagacaccacaggcaaagaagcacaatgatgcatgggattagtagctacaacattaggagaagtagaaaattgagcagtaggaaatgtagagtgttcagaaggtacctgagcaatatgtttgtcacgagttgctggataaaccaattcattgaacactacatttcttgcaataaacaaccggcctcttgaattttcacacagataacctttatgcttgggtgaataacccaaaaagacacactcttcagatctaaactcaagtttatgatgattataaggtctcaatcggggaaaacatgcacaaccaaaagattttaaaacactataatcgggtgtttgatggaacaaacattcaaaaggacttacatgatttaagacaggtgtgggcatgcgattgatgctataagtagcacattgaaaagcatgccaccaataggtcatgtcaagaccggattgagcaagaagagtaagccctgtttcagtgatgtgcctatgttttctttccactctcccattttgttcatgagtgtgtgggcaagaatgttgaaaccaaatgccttggtctcgtaaaaacttgccaaacacacgatattcacccccaccatcagcctgaacctttttaataggaagattgaattgtttttctactaaacccttgaactgaatgaacaattcaaaagattgggacttaaccgacatgggaaaaatccaggagaaccgactgaaatcatcaatgaaaacaatgtaatatttgtagttatctttggaagagatgtgagagggcccccacacatcagtgtggataagttctaaaggttgattggcacgattatttgacaaggaaaaagggagtctatgacttttcccttgttgacaagcattacacatctgcaattgtttcaaggaatgaggaatattggcttgagttaacattttggtcagtatagcaggggctggatgacccagcttg

SEQ ID NO: 2105 - DNA, 2933 bp, Cannabis sativa
cttgcatctgtgcttctctattagtgtatcataaaaaggcttgtctttagaaagtttgggctgttgaaatgagcaggtttctgcttgaactttgccgcagaaatattgtttatatatgccttgtgtaaaaactgctctgaaaaaatcatttgagagaaccaagttatattaaaattttagagctctgaaacttacgaattacttcttgtaggttatggccctgacgcagactcaacttgatgaagctatgaagcctggccaatttgattctcgtgcctctgtgggaaatcaaactagctcagttagtgactccagcatggcttcatcatctattttgacaaaagagaaattattttcttctgctgctagtccagtaaattcattgcttgctggggagaagattcaatttggtgagaaaaggcacataactgaaaactgaaaagcacataaattatgttcctaatgcttatgtataggcctgatcttttcaggtgcagtcacatctccaacaattcttcatcataccagccgtgctgtttcacatggaattgggcccccaggtccatgccgaacagaagtacagctttctcacggtcttggcggagctgagaactgtgatattctctttgaaaaagataaacacactacgaaatcttgtgtgcatcttgaagattgtgaagctgaagctgaagcagctgcttcagccgttgctgttgcagcaattactagtgatgaaattgttggtaatgggcggggaacttgctctgtctcagtttctgatacaaagagttttggaagcactggaattgatgggatgacaacaggtagaaagttttctgtattcaagttcttgttgtttcctgtgtctagcataattctatattggttatgttttatgtttttgtaggtggagctagtgattcacgatttacttgccaatcaagggcggaagagtctcttagtgtatctcttccagcagatctatcagttgagactccgccaatttctttgtggcctcctttaccaagtcctcagaattcttctagccaaatgctttcacatttccctggtggtccaccttcccattttcccttctacgagatgaatccaatgttagggggacctgtatttgcttatggaccacatgatgaatctgcatgtaccacccagtcacagtcccagaagagcaccgcaccaacttcagcaccagtagggacctggcagcaatgtcattctggtgtagattcattctatggtacacctgctggatttactggtcctttcattagtccatctgggggcatcccagcggttcaaggtccaccacacatgtttgtttacaatcattttgcaccagttggacagtttgggcaagttggtttaagtttcatgggtactacctatataccatctggaaagcagcccgactggaagcatagccctgcatcttctgccatggtggttggtgagggagagatgaataatttgagtatggtttctgggcagcgcaatcctgcaagcatgcccactcccattcagcatttggccccggggtcaccactcctgcccatggcttcaccgatggcaatgtttgacgtttctcctttccaggtaacatccaacgtactgtcctgaatgtcaagtttaaagtgctatggttgtccatgcattgatattgaatttgcactcttcctttagaatttcgatagctttcttggtttttggactgggcatagccaaatatattactacattgattaatagtgttctgtgattattctgtttacagtcctctgctgacatgtcagttcaggcacgctggcctcatgtccctgcatcgtctctgcagtctgttcctttatcgatgccattgcagcaacaaacagacactgcacttccttctaagcttacccatgcttctcctgtagaccaatcattatcaggcaacagattccctgaatctcgaaatactatgtcctctgacaagaatcgaaactgtcccatggcaactgatgcttctgtgactcgattgccggatgagcttggtttggtagacccttcaagtaccactggtaaagtagtttcagcacacaatgtagccagtaagggctcatctgtaagcatgaattcagatactagcaagcctgatgtatctcaaaatgttagtagcagtggtagtggccagaacactacctccaatgtcaaggctcaacctgctcagcataagagcaatatctctggccagcagtatggtcattcctctggctataattatcatagaggaggtggagtttctcagagaaatagctccaccggtgagtggacccatcgaagacagggtttccatggaaggaatcaatccgtgggtggagagaagagttttcattcttcaaaaatgaagcaaatttatgtggcaaaacagacctcaaccggttcttcgacacagtcgtgagaaagttattcccttgtgttttgatggatttgcttgagaggttgaatcatttattcatgaataaaaaattttggctatttttttttttccatgggcagcatctgttgcattccttaggtgtttagttatgatatttgggttttagtgactgggaaatataagtagaacccataggtaactattgtgctagttttcgaagatgaaggttgttacaacaatcatccatctgtgatgtttcttcactctacaccagattgacgattgtccatttgtgaaaaaactaaaaagatttgatgtactaaaatatttaattgttaacggtaagagttcatttttattatttttaccccacattattaatgatagttaatctttagtccttctcaatggttccaagtttctgtgttgtccttgtacttttattgttttttaagtatagttttggatgtactactacttaattctatctgggcattaattt

SEQ ID NO: 2106 - DNA, 2004 bp, Cannabis sativa
ccttggcctattcacgcgggcttgttgcgagatcgacactggtcagacggtgctatgtacccggtctagatattcaacttattcttttaatcagttatttacaaatgataaatcattttggatcgtatatatgaagcatactacatgaccaggtcatgaaatgttcctcacatgtaactcagatggatgccacatcaccttgtgctgatttggggataatatttgcccctaaatttgtgtgggaactctttgctcgcacgtagacttattcgatcactaaactggtttgaagggtgaaacatgttcgatctgcgtaccattcttgatccagtgtgactgaatgaaaaagtgatgattcaactatctcttcagtatctagggcatttaaggcctcaacatgaaatttagatctcgattggcacaacgacgattattgaacaccacatgcctgtcacatgtactccccaacatgtaatgattacactattttatggggaaacccaaaattttaactttacattcctaaattaaccatgtaaccaacgatataaagggtcaaaaattcttttctactcttttggctaatttcatcctcaaagacatcacaacacatttatttctcctctaaaatattcgaagattcttctacttaaagcttgattttttatgttcatccaagtatatttgattcattattcccttcaatggtgtagtcccaaatgagggtgctctaggagtgagtgcattcgatagtggtgagacacccttcacataattaggactccctctttagtaaacttagatattactgaaaaagggggattcgaccttcatttttttagtttaatcaatgtagatacccttgtaatcacctcatagataaggtagatttcattgtaaggagtctcaaccatttcattccaccagtgcatcatcttgttagagtggacgaatctagtaaaatttatttcctagggttcttctagcacgagactaatttaggtcaagaggacatttcccttttggctagaaggaatgttaattatgctaacataaactattgcatccttctggcatattatccgatagcttgtatttggaattatatctcatataatcttacatagtgtatctttttatttgtttcctttttaaagagcaactagataaattccaaatgggtttgctcaataacttcttggatgccatcaactctagatctgatgaactccgtgaggtaggcaaggaagtaaaaaataaagacaagaagggacaaacctctgggagtggatctcagaagctagcacctccgaccttgagccagaaggctgctccaaaggcttcaacactgcaagaattgtctgctcaagtcattaacttaatagaaactattcttgaagtggcaccattgtaacatgtggctatggggaatgttaaagaagagagctcagactgtgatggaccagtcttgattccaaggaaatggtctggcattgcagatgtatgggcaaacaaaaagagaaaggtggcacttaaagaaaaagtcaatagttggctaccacaaggagacaatatgatgaatcttaatcccgaaagggatgtgatgtctctgagagtggaaggccacctaagagaagcactagaaaaactagggacaactaagatctgcctccaccacccaactacccaaaatcattcctaccactatcacacagttgtctcaagagaagatagctttgcctccattacctcctccatacttcattcttttggtcaggcctacatcaatgacgcaggaagctaaagcacataagagagccatcaaacaattttatgtgaagaggcgtgtaagcgagtatggacaaatgaagaacttgaactatagtatttcttctaggcacaacactaagtttgctaattaggaaagtgggatgaaccttttctggacattatgaacagaatagagataacagagcgacttcgtcctagggttgggaccgatgt

SEQ ID NO: 2107 - DNA, 3156 bp, Cannabis sativa
ctctcacaaaggcacaccatccaccacaaaacttataatctgatccattaacaagcaacttaacataacaacattcctcaccaacccaaagaacaatagtttgtgtctttccctctaaataatctcttgcaaaactcaatggaatatactgcacaaagaagaatcaataaactcaatggtacattatatcttagtttatttagtaattataaggactaacattttctaccataccagtacatgtccatgcacatgtgtcgatcgcaaaatcacttgaaagtaaggatttttcgagaagaatcggttggctgcttcgcaagctctgctaagtcctgaaaatgaataaagtcacttattagtagtgcattgatttaatttcaagaacgaaaagtaagctaacttttttgacatacctgattctttctttgcaaccgagttttgtgaaatcattctcgctttatctttatcataataaaaaataaccacttcgaataaagttatatcatcaatgctgttcctcaaaacaaaggcacaaacatcacctacttccaattcattatcttgaacaaatgccttccaaccacactcgaatcttgaatatcttgaagatccttcgtactgtctagaaaagtacttaacagaccagttcctcccgtcctgaaccttaaggatcacatcttgagacttactgaggtaagttcttgcaaagtgaaatggtacattcttgacagaaaataaagaagatcaatatgataaatattttcattgtgtagttttaaaatcataacatgaaagaagcttaattattaccatacgaaacccagctccaacaacagatggttgcataggaactatgaaaaaggggtctttagatttaaaacctttagctctcataagagctttagcctttgattttccactcaaacacttctttctaataaatttttcaggttccacctcccttagtacttgagattctccacatacttcatctgacaaatcaaacttagctgaaaatagagtctacagattagtcaaaacatacaaaagaaagttcataatcatcatgaaaatctgatatttaagttaatatattgcctcataagttagattaaagatgacctctaccttcagatttaacacaaggactagttttcattttcttgtggggcctggcagaacatggtaatggagacttgtccaagacttcaattgaaatatcatctttagtatcatcaacattatgcttctcaatctcagacgacggtttctggtatcttttcggggtagatttgtctactttactcggtaagcttcctttttgcataacttcaaaggtggttgatcatatgcatgaaaagacaattgagaaataaaactactaaaactattgttctgtttctaaccatataataataagaaagaagtctctactctattttggttaagattaattaagatgaattaggttgttgctttgtggtttaccaggaacacttgatctcattttcttttggggccgagaacatggtattggagacttgtccctggttttgggataccttggaaaactgtccaagacttcaatagaatcatcatcatcaatatcaacaacattatgcttgtcaaaattgttaggattagaagaataatcaatctccatagtggttttatcaaatatgataacatggaactcagagtttccttcatatccaaaaactaagatatttccacggcttatagaacaatgttgtacaaatttattccaacccttttctatccataccttcccatcactactttttgtcaaccctacctcccatgttgatccacatggaagcttaagaaatacttgacttgataaagagccacaacatttcacccaaaatgcctttgggatttgctgcacaagagaaaaccaaaatcaaatattaaatgaaagatatcaagttacaaatcaagttaagagagttataaaatctagacatggtgtagaagaaggatgacaatgaccgtgccatacaaatataagcaggaaattgatctgatgaagacacaactacatgttaaggagcttcacaaacttcatggtactgataaaccaaatgaattagattcctctaattagtattatgctttgttattgaattagttacatagtgttgtagacctatttactatgttttgagagagagttgtaataatgtatacttactagtttggtgttcccaagagtttgttcaagcataatcttgtaaaaatggggagcagtaggagaaaaatttgtgtgaaacttggcaatatgaatatggttatcacaagtcatggttgaagaactatattctaactcaaatgaagctttgttaccttactagttaccagttaccagttaccaccctctctaaacaaagtctaaattcaacacacagacaaagcaaatatatgaagaaagggtgtcatcatcttctacatcaaacacaatttcttctttcttctctttatgtcctatcaatacaatactctttttacttgtctatcacattttatagatatgaaaatcttaatcattatgaatataattcatagatattattttttattgtaatatattttttttctagtattattccacaatttgtttttgagtattattagaagaaaattaaacatcccaacttcttggtagctacaactctcaatttctggtcagcaatatgtacatataaaagtagttcagcaattagatatatagttactaaattaactcctaaaatgtttctatatacatttaattaatacacagtgatcacaatcaggtttatcagttttagagctgaaatcaaccattgttaagtaacttagaaatacatgattagctttgaaaaccaacctgacctggcgggatttttgtagaagaaatgcactcttcaagaacacttatgattcttttttcattttttcttttctcagttaaaaatccaaacttaataggttgtcataatagctgcctagacatattttcagctatattataggttgtcatgatagcagcctagggcatatgtcaaattaattgatttttcttttttaattatgttttgttttagataataaattattttaaaacgattttgtcaatagaatagtgtgttatat

SEQ ID NO: 2108 - DNA, 1142 bp, Cannabis sativa
aagttggtccgaaagtaaagtggggccctcaccgactttgaagatgaggacccaaagccatgtgtgaggaggatcacagaagctccactcttagagaactttaaaatgcctcaaattgaattatataatggacgtactgatcccaaaacccacttggaaaaatagcacaagacaatgcaggtggcaacagtaagcaaagatgccaagtacttgtactttttctcggctctcactaagtctgtcaaggattggtggaaaatactaactccaaggttaatttatagctggaaggaattacagtctgccttctagaaataattcatagttgctcgtgactatgacatggaagtgcgatccatcaccaatgttaaacagcaggcaagagaaaacttgaagaacttcattcagcaacagatgatgaaggcaatagctaagatgaaggtgagtgatgacatgaagctcgtggccccaataatttagaatcatacttggctccctgttatagggagagatgtaaaggaaaaggtccaagaatttgtctgagttcatggcaagagcacaaggtttcatcaatttggaggacgcttatcaataggcattcagagtccttccaacacctgctcctttcgtgaccactccaagatttgctccacatgctcatgttcccaaaactcagtatactccgactatctatggaccttctgtatccgtacaggcacctacacaaacccattttctagggtatggaatggcacaaaccaaatgtagtatcgctcttggacaatcaaagtctgaagaagaagttctggaataaaatgtgagtcattcccaaagcaagggaagtggaaaaaaccaaagtcaaagtgtaactgcaaaaaatcaaggaatgattatgaaccaaaatacactgagtatactagtctagtggacacttgggagaatgtataccaagctacctacaacatgattcattataggaagccccaaaagatgtgtcactagggaaggttcaaaagagatcaaaacaagaggtgtgagcataatggagatgtgggacacataaccaacaaatgtggctacataaaggaagaaatcgtaatgttggcaagagtcagaaacttgggtgaatgggctacatttcc

SEQ ID NO: 2109 - DNA, 1807 bp, Cannabis sativa
agttgcatgaatcatgcacattctaggtgttcatcactgcacggatatcatctatggacatggagctcttaacccccacgtaaatgaaaggaagaacatcactgggcagtagcggaatggtttgcctggacgcaaaaataagaacattttcttggtccaataagatgagatgattttttgggtggggccatactcgcatatacatagaaacgatggtaagtgctagcctcacattttttattttttttggagttctgacacggtcgggtcttaatcctgggaaaccctgggagtgaggaaggtaaaatagacatgacttcgagctccttgtctaaagtaggtggaataacctcaaaattggacaagaagttagtatatgggggaaaagtgttcccaagtacctcaaatgactctagatttcaacaagtgacgcgttaatcctagaaaggtacacggcagagttggcaaccatgtcatcttgctcaccgcacaaaaccaaataatttttttcttggaccctctcctcgctctctttatagttaatgatgcgtcctagatgatcactcctctcaaacatcaggctaataaatttctcatatggctcctctcaagtaccttgaaaatcagaagacgatatgtcaatgatgtcaaccatgggaaacatttcattttgaggccacttataagtagggatcaagacaaacaagttcaaagggacacaatatatcaacaccaacacctaagaggcaaaatggaggtgttgagtttcctaaatataacacatggaagtattggctccaagaagagcccatgtggtgcaactagcaaactactagtatgaagaaggcaacatgcaacacacggcggaaagcaatctaaaagcatggtgtgtggatagaaaaaacaaagagaaaaagaatagatgctatgcctcgtgaatcaggacaattcattatacgatagtatatcacgtcaaagccggtaagatacctgccaaataaagtagaacaaaatcgtcaaaatacaaactcacaagcaagagtgaacttttttatatgatagggacccacacacatataaaaaaaataatgaatggatgaaaaggaaatgttgagagaatactaaggaaatagaagttgaaaagtgacttttgaaagaattgaactcaagatctctttgacaaagtgaaatgccactatcccaaagtgatttggtataatgaaaattaagcaaaggatgccatctatatatatagtagagacctccttgaaaaacgtaaagaacataaggttcgcatttcaacaagaccaagcaccaattccttcagtcaataagaacacttaaaagaatttttgtggactgggggacaagtattaaccccaaaaattgatacttaccattcaaggaatatatccaaaaaactcagagatcaaccttatagtagctcatgaatgggagatgataaagaataaggttgggagcggggggagccttattgtgtgcgagtgcatgtgagtgtgtgcgtgcaagtgggtgcatgcatgtatgtattagggtgtgtgtaagtgcatgcatgcaagtgcatgtgagtgtgtgcatgagagtgggtgaatgtatgtgtgtgtttaggtgtgtgtaagtgcatgcaggcaagtgcatatgagtgagtgtgtgtgtgtgtcagcgggtgcatgcatgtctgtgatcgggtgtgtgcgagtgcatgtcagtgtgtgcatgcgagtgggtgcatgcatgtctgtgttcaggtgtgtgtgagtgcatgtgagtgtgtgtgtgtgtgtgt

SEQ ID NO: 2110 - DNA, 3624 bp, Cannabis sativa
acgcaggggtgagttgatcacacccagtttgtcaatgaagtctttgaatttggagtgtgtgagcccctttgtgaagcagtcagctacttgttcctgtgatggaatatatcgaacttccactttcttttgaagcacacggtctcgaacaaaatgaacatcaagctctatgtgtttggtgcgagcatgaaacacgggattggatgccaaggccttggcactcatattatcacaccagataattgaagtagatggcagcttgaagttcatttctccaagaagagattctatccaaacaatttcagctgcaacttgagctaatgctcgatactcggactctgtgcttgagcgagcaaccaccgattgtttctttgaggaccatgccacaagagactctccaaaataaacacagtaccctgctatggacttcctgtcatcgggacaacatgcccaatccgcgtcacaataccccgtgatagatagatgatcactatactttatatgaattccacagtgaacagtgccctttaagtaacgcaaaattctcttggcagcactccaatgagtggtggtaggacacttgaggaattggctaagtttgttgacggcgaaagcgatgtccggtcttgtgtgagtaaggtattggagtgcccctataacactccgatactgtgtgcaatcagtcaatggttccccatcttgcaaagacaaaggtttgccccctgtcatgggcgtcgaacaaggcttgatgctgttcagatcaagtcgagaaagaagttccatgacatatttgccttgagaaagatacataccagtttcatctcggaagacttcaatgccaaggaagtaatttagtgctcctagatcttttaaagcaaaggtggagtgcagcttgtcaatgaacttgtggagttcttgagtgttgttgcccgtaactactatgtcgtcaacatagatgagaaccatgatgacaaattgtggagctttaagcaggaagagggaagtatcagcacgtgaactaacaaagttccattggagaagagtttgtttcagcgagtcataccaagcccgaggggcttgcttcaagccatagagggatttaaccaacttgcacacatgatcgggtttgtctttgtcctcaaaacctggtggttgacacatatacacatcttcctcaagtgtcccattcaagaaagcattattaatgtcgagttgacgaacatcccatcctttggtgacagcaatcgtgagcacaattcggatagttgaggccttaacaaccgggctaaaagtttcaccaaagtctaaaccaggtctttggtgaaaccccttggccacaagccgagctttaaagcgctgaaaagtaccatcagcattatatttctccttgtacacccatttgtttccaacaatattcattcctttctttcttggcactaggatccaagttttatttttctgtaaagccacattttcatccgacattgctttgttccatcctttgtgagcaagagcttcatgaagtgatttcggttcagacgtgttgcctggccattttacttgagcagagtacactttgggtttaaatgtaccaacctttgaacgagtgaccataggatgctgagattgagattgagtttgctgttcagagacacgtgtatctgctgctggatcagcttggagagaaacatgctgttgatcagtaataggaggtgtgccaagctctaaatcaacaaagagattgttggtgagatcaaactgatgttgctgttgttgtgagggacctgacataactgactgtgatgctccagagttaacttcctgctggtttatatcagttgaagctacagactgaggtgtattttggtgagaactttctgatgtgatattggtagttttccctggtttatgagtactggtttgtgaagtgttgagtggctgtataggaagggaaaaccatgagttaggtgtttggacagtgacttcgggttcagtgtgatagttgttcaagaaaccttgtttaaatggaaactcactttcattgaaaacaacatgccttgagatatatagtctaccatttgaacttaagcatttgtaacctttatgagactcactatacccaagattgacacacttagtggaatggaattgaaacttgtgactttgatatggtcttaaacaagggtaacaagctgaaccaaaaacctttaggaaagtataatctggttgtttggtgaacagaacctcatagggtgattttcccttaagtataggagtaggtaatctattgatcaagtacactgaggtttggaaggcatcacaccaaaatttcagaggcatattggcttgagcaaggagtgtcaaacccatttcaacaatatgcctgtgctttcgttcagcacgtccattttgttcagaagtgtgtggacatgagtggttgaagagaattccattttcagcaactaagttgctaaaggattggtattctcctccccaatcggtgtgtaattctttgattttcctatcgaactgattttcaaccatggccttaaattgagtaaaagccacaagagcatcagatttggccttaagaggataaagccaagtgtaacgactaaaatcatctacaaagtgtatgtaataccttaagttggtgtttgacataaccggagcaggaccccaaaggtcggtatgaattaaatcaagaacattagcagctctacttaatgaggatttaaatggtaatgcatgggatttgccgaattggcatgcctcacaaaaactagaattctcattagtagaaatttttacattagttaacttcaacacttgatctaatactttggatgaagggtgacctaattttctatgccactcatccttcttggaaacacactcacggttaacagaggtaaaacattgacttctagactcaacaacaccagtaaaaggacttaatacagactcggaaaggggctgtgaacactcatttgcagctaactcgacattcttgacagtagagccttccaactgatataaaccatctttaagcttcccctgtagcaccactgtccttgttgctatgtccttcacaaaacacacatcagagaaaaattcaacaaacactttattatcagcagttagcttggatatactaatcaaatttttggcaattttaggtacaagcagaacatcatttaatttcagattgtagccacaattagagtgcaagtttccagacccaatatgagtaatggtaagctgattaccatcaccaacagtgagcttatccttaccactgtagttcgatttgttgttcatattttcttgatctgaagtgagatgattgcttgcacccgaatcggcataccagccttcatggtccacgacttcaggtgtggccacaaatgcactagggtctttggcattttgagaaggattgttagcacctggtgtaaaccccatataagactcgtcatatcggttataacagtgagcagccgagtgaccataacgcccacatacttgacatgttggcttgacatttcttcctcctcggccacgaccacccctgtttgagcttcctcctccacgattgtagttgggtcccctgccatttcctctacc

SEQ ID NO: 2111 - DNA, 2682 bp, Cannabis sativa
agagagagagagagagaagggtttgtcaaagagataattgggttttaggcatttgaggttttagtcatcaaagtctccaaacaggaaaccttcggtaagttcttcaactttcgattacatccatttctcctcttttaattccaaaatccgacaccaagtttcatttttttttttgtttgtatctctgttaaccccaaaaggggtttttcatgccaaaaaagggtattttttttttctttccttacattgtaattatgtttgtgtgtgttattgattcgaagatacgattttttcggttcgtgctgctaagatatgatttttgtttttaataaataaatgccagtataatcctaaattctctgatcttacatggtttctcattttttggaaaaaagggaagaaagctctgatttttacttggcttgatggaatagctcagtgtaatgaactgaatgagtgatgtgtaattcgttgactttactatataggcttctcaatagtaaataccatctttcatgggtaggtttgaatttttgtgacattagacagatagaagattttggggattttggttttgtagtatgaagttataaatagggctaaatttattttcaatttggaggctcaagcttatggattttgtggcttatgttctggatgcaaagatttttatatggttcagagtccaatgtgtttctaagctaaactccaagaaatattccaaggggaagagagaggtggaaatggagggagggaattgtttctggaagagtgtaggattgtgttttaggaccccgaagtaagcgattgaaggaacttgtatttgataaaaagtgcctttatactgaaactgtttctgttaggggatatcttttagttgggactttccatagtgctaagatggttaggaccatcattgctgggttggaactatctgtgaaagaaggccaatgtgggccattgtcaaagacggcgaggttcaatgcttcaaaaggggtggtttatgttggtcccttaggcttttacaggactgtgagacttaaattctctgatatttcttgtatgctggcattacaaggaatgtcttggatcaatagttgttgtttctttgtgatttttgtttttcccattactattgaaacattatttgttatcgggggaagctttgaagttggttttatggtttaatatagaaattttgctttgtttaaaaagaaaaaagaaaattttgatagcagatgtggtaggtctttttttctttctttcttgggtactcttaaaatctttttgtatttcttagataatcacattaatggctgttgtagtttcagggttatctttataatcatggcaaggtcattatcacacatgctattaaagggaatttcaggtctctccactgctagttctacaagaactgtaagatttgattttgtacattatttaatggggttatgattattaaattacttttgataattctatttctatatctatcttcaacggcagtagttgaatgtttctgttataatactaggctactggatctttcgtccagtacgggagaagattctcaaatactaatgattcagatacacatgacgattttaagcctactagtaagcttgatagctctaacctatctttgaaggacattgttgagcaggtacatatatttcagcctaattcatttatatatatctatggtacattgttctgatctgtttctgttataggatatcaaggaaaatcctgtaatggtttacatgaaaggtgttcctgatcttcctcagtgtggatttagctcactagcagttagggtgttgagtctatacggtgagaataatgtttccgactattactcaaaactaatgctcgaattatatgtcctgtataacacacgttcaatctatgtgtatgtttgtggaaccttacataagatgtatgtatgtacccaattatttctttggacaaatttttgatagattgcttagttaattgtctctatctcttgctaattgtgtgggaattcatttgttaagtttattattaattagatgtgtttgccttctttagacgaatcaaaaattcatttacagttcttcacctatgtttttacacactgattttggtcttttcagatgttcctttgagtgcaagaaatattttggaaaatcccgacctgaaaactgctgtaaaagccttcaggtaaagtatgctcattttcagtttaattgtggtacttaatcgataatttgaagattgaatgaatgttttttttcccttctctttcttaaaaagtctgccacttctaatgaatcattaaatttaatctaatttagtggcgctgggctaccaattcatttctatcatcatatttacttactttcatcacattatatcactggaatggattttttttttttttttgaaactagaatcctggcctaacctatgggaagcaggaaacgatagcaattgctatgtaggtacctaagagaaacgtgaacctcatacttgcgggagcaaactacttggctaaccatttgcgctacccttcttgggtactgtaatagatgtttatatttgtcctttgatgtgtacatgcacaatatataaaattgcttagaatcagattagtgtcaaggcatattggtacacgtagggaggtaagtagttgag

SEQ ID NO: 2112 - DNA, 2282 bp, Cannabis sativa
caaagtgtaacaaacttaacaaaactaattaattttaggtaacagtaggaatagtgttaatatcccccctcaaacgaaaaagaatttgagccattttttagtttggatttgaggtggctgaatcgattgatattggcttagctgcttgggattacaataagctacttgatgttgcttgctctttctttctgtcaagttgtttagtgttaagggctgagttattgtgcaatacgagaagggtatgttacattttctttgggatcttaggctgagaaattttgtgattgaatctgattgcagtaaagcaactagataaaacaattgttaagatgactcgaatagtggactgaaagtctctgtaaaatcataaccatattgttgcagaaaacattttgccactaatcttgttttatattgagcaacactaccatcttgattttcttttttcctgaaaacccatctaagaggaagtagaaaattagtttatggggtatatcttaactaattacttaactaactctatatacaaagcatattaactaagagataacactctatctaacactaaaggctgagttattggcaatacgatcgagaatggtacgtaacattttgctcgagatcttaggccgagaaatttcttgattgaatctgattgcaataaagcagtggtctattaatggcacagttaatagttgtttagattttgatgcaatcatcaatgatatttattgttttaattttgcgaatacttgtggtaaaatatgctttgttgttagagaaactcatattgttactcatattttggccaaattagctttattttctaaagcttgtgctttttgtgaagaaattgtccccaatatggtgaatgataccattgtagcatacctaccattttctttgtaatcttcttgtggatcaatttaaactaatgtacagaattaaactaattaaaactcaaaacaagaaacaattaataatgacaatatcaacaaattcaaaaattgaggagaaataaaatagaacagaaaaattaaacgaagcaagaaaaccataaaatctactaagaattacactggttcaagtccgatagattatcgagatctatgattttaatccagttttgaaaaaccatcgtaaacttctttattgattgagcaagaacacaagtacaatacgaaacccaaaaactcaatctctttttcttctctatatatctctctctctatacctctcaattgaaactctctctcaatcgtattctcagtcctcttttataaataatgatatagtggtggtatttataggtcaaggatatctaactaagtagttaatttggttacgacttaacagtcttaattagttccttacagagagatctctaagttagctccaaagctctccgggtatgaactacgcttcttggctaacgaagctggaaggacgttccggatagatataaagtcaattggaacaagctatttgggactctttcttaaaagggacagctagtcttctaaaactctttttcaaagtaggactagtttttctgaagacttctttcggatggtcaagttagtctttcggaactcctatctgaacgataactaactttccataagacttaacttgaaattttttcatttaaatgaactataccacagctcttgagtgtttaacgaaatcattcctatttcaaagaaaaaatgagaatcatgttccataaggtttcttaattgagtagtaatgcttttcactcatgtgattagacatgtcaaaagaatcacaaaacatagaggaaaaataaaatgaaaaggtaaagcacaaaacttaccaaacaaaacaactagtcctgtatacatttggctgcaaaatattcttaattgaaagtcggttgatttatttttgtttaaatagttgacttttcactgtttattccagattttgttttgttttttttttcttttcttaaaaaaatacaaaaaaaaaaataataataaaaataaaaatatgggtggtgtgcttagattaactaaggtacagataatttcaaaaacataattcattttggaggttagaattttaattacaaataattaattaattacaaggcagagggagagaaggtgatgaaataatttaattttcccatcttaaatatttaggtgataagcttcactcctttcctataaatataggatccagctaattagaaagtaatttaaataaattaagagtgtgtgtttgggtgttgggatttgggaatggaattcaagtcg

SEQ ID NO: 2113 - DNA, 980 bp, Cannabis sativa
aataattaccgaattagttaaattttgaaagaatttttaactaacgccatttacatttcaaaacttgaaagttaaagagcaaaaattttaattaactatttttatatcatcttggaattttcaaaaaatttgaatgattactagtgccttcaaaaattaaatttgatagtaacaaaatatttgattttttttgaaaaattacaattttaaataaattttggtatgatgtagtggtaaagaagctttttgttgggattttttctcacttgggtttgaatcccttaatacttttaagcttgactttttgataggttaacttgcttaatgggtaaaaaaattgtaagaaaaaattgaaaaatttgtttgagtaccgaaacagatagaggtgtatcgaaatacttccaaaatgtagtatagatttttgaattgttatatatgtttgaatgtgatttttaatgtattgatgcagtgtgaagatatgaatgcaattgagagaaaactgaaggagctaaacataaagtgcaagaaaagaacagtagaagatgacaagaatggaagtgttatagaccaattgttttttaatgacccagatggattcatgattgagatctgtaactgtgaaaatctcaagcttgttccagctggttctcttggaaagataatgcttccattagatcgacataatccacctattcaagttcaacccaacaacaatgatgatcacattcacaactagttgttttaacatgttcttatgagatttgtaacagttttagtacttagtcatatatgcttctatttcctttttttatagaccagtgatgatactatcatgaaagccactactgtagaccaattcagattatttatgagctttatagaatcaaatatttggcaacacatcagttttgctttaataatacaaatttatatttacatctctatttatttcggtatttaaaaaattagactaaaaaata

SEQ ID NO: 2114 - DNA, 1954 bp, Cannabis sativa
acatcagtattcaaagacagaacaaaacaaagcataaaattcaactaacacacaccttggttggttgtcatgagactggtgctggtgttggtgggtttttctctgttggtctaaagattcaggctttgaatatggatttttagtgttgttgttgttgttgttaaggaagtgggattgaagttccacatgctttcttgaacgaggacgacttttgtgagagtgtctttcacagtatttttgatctggtataacatttcttgaacacctccatttcttaccatctgttcttctacatctccatggttcttgatccgagttattatttgacataccaagctctaaaccacctaacaaaaccccaagtcatttaatgcaacaaacaaaacaaaggggtgggaacaaaaatcaacaatgaacaacatacgatttgatgagtggaaataagcaaaatttgatggtggaatggtcttgggtgaagaggaagggagtaattgatgtggaataggaatagaggccatcatgtacttgaaaatcatggtttgtctttcaagttctagtctttgatcagctgtgaatggaaatctcacattcccattcaccattattcctcctccttaaacaaaacaaaaacaaaacccaacattcaatttcagttgaaataacaagtacaaaacagataataaagattgaaactttaccagaagaagggttgttgtagaaggattcagagttaggaatgagcagagttttggggagagaatctgaagaaccaagaccaactatgttgttgtatatattagccattgaaacaacttggttgcttgtgttgcaaaacaacttgggtccagtagtactgtcattttcaccaccaccaccaccacaaccagaggcagagccaccagtaccaccaccaccaccaccactaccaaggttacaactttcttcaacaaaagctctattgttgtaaagagaagattcatcatcaacaacaatatcatcatcaccaccatcttcatcttcattactattatggttatgatgattttgatgagtatggtgatggggtatggtagtagtggtggtcatcatcatcatcatcttcctacgactactaaatgatttagtgtcatttgtttgcatcctcaaacccaacccaacatcacattctttttctgctcccttctctgaagccacaaatccaattcttgtccccattaaatcaaacccaccaaacaaaattaaagttcacaactttctcactattcaatcaaaccccaaaactccaaaagctcaaaaagtgaaagaaagaaaagaaaagaaaacaaaaacactaactacccttaattacaatccaagtgagctaaacaaagctcacttctttatcactcaaaaacaacttacttggcttaaagtttaaacctttaaggctctttcactctctgtgttgaagtaaatggggttttagagttgaggaagaagaaacgttggccgccattttcaaccatgcgtttttgcttttttgcttcctaagcttccaacattcgttcctccttaagaatacagacaaaaccagtattagtatttagttcttaaactttaggtccactcttttttctctctctctaacgtcaaagaaaatcttaacagtgttaataataagagtgtaagtattattttgtcaagtgggtttgacttcttttttcaacagaaagagagaatgtgattggatgtgagtttaggtagggtggactagttttagcataggcttgggtatgtttgactaaattgaccgacactcttttttatttttgtttttgtttctccgttaaaaaaaaaagacaatggtggtgcattgggaaacgtaattggggcccactttggtttcgtgtgtaaagatgtgggggaccaaggttttgttaccaaaggtcctctcttattaagagagagagagaga

SEQ ID NO: 2115 - DNA, 1159 bp, Cannabis sativa
taccttgtattaaaatattattttactttaataaaataatatgtaaagatgagacaataataaaaaaaacattatttccaatttattgtttataactgaagtcttacaatatacaaacaagcatgaatagtattgatatatattatatataaaacaaattatttaattgaggtcaaacaccaactcatttcattgatttgcagcaacaccacttataaccacatatataatgtttatatattgtatttcgtttaatttttttgtaactaattaaagtatgttaaggttggattagttatttaaaatcaaatgatgtaatgtataaatatgtaagtgagtgcatatatacatgacataaaaaattcactcgtatgaattatttttatattttcttggaccatatatttatgtctaaaattggaaaccaatttttttaattaccaaaattcattaaaaagaaccaatttcttaacttgttacttgtgacactatgaagttggtataggacaacacattaatcaattataatggaattaggaagaaaaaaatagtcaaaagtcaaaaatcataaacgataaatttccttaagtttcttataattttatgaaaggaaaattggttgacaattacaaccaagaaaagatgtaataagatataacattgcatgtgccaagaagacatatatgtttctttccatattgaacaaatattacataagaataggtttacaaacaatatgctatatatctttgaaatacaaaatattcttttgtatatattttgcacaatcaaacaaatgtatagtgaagcttgtgattcctaaggatgtttgaaaaaagttgaatgattctaaaattctataagtatgagactatagagttaaaagaaaacttaaatagagtaattagtactatttatattaatcatatacatgttattttctggtaatctatcatgcaagaaactccgaaataatttttgaatgagtgatatgtgagaaacatataaataaaaataaaatgcattgaaaatatttgtgttgttctataaaattagtgaacaaaaatattataatatatatttttttatgaaagctatactacatggattgggttgaataatatataatataaaacctttttctcatatatatatatat

SEQ ID NO: 2116 - DNA, 1131 bp, Cannabis sativa
ccattggattctagaaggatgtcttggaaatgttgatcaaatccaaaaggcatatgaggatgtacacaatgttttgatggagcttataagtcgtaatatgcttacaaagaaggaggatgatttagtggtcatggagggatcagttttgattccaactgatcgtcgtcaatcatgtcctaatgggattacaggccttgagctggctaatgtgttggaagatggaaagtttcgaggatttgggaggatcacacagacagatggtatgatcaaatcactgagcagctgggaaaaagtctccactatattgatggatggaagtcatttgaatagcgaagacaccaaaacattttttcagtcaatgcagggacttgaagtattttctatatttaatccctggtttagaaatttgtcctggtttgattccagcatgaacaatcttcttgtgcttgtgctcagaggctgtcctctattggagaatattgatgacatccataaacttagaagcttatgtgctcttgaagtatctagtagctccttgactagcatccgtgatgatctatttggcaacatgcataacctccgcagtattaacttctccttaacaaatatcaaatcgcttcctagttctcttttcaaataagaagaactgcgttacctcatccttagaaggtgctctgaattggagaaactgccaagccttaaagcgttgaaaaacctcgaggtaattgatctttctggatccacttctttaacaggaattgaagacgagaacttctcatcattgaaaaaactcagcatgcttaatctttctaaatccaaaattatttgcttaccttcccttcccaatgttgatctcactcatctcatattaagtggttgttcatgcttgacaacactgcctaatctggaaacactgtctaggcttcaagttcttgatctttctggaactgcaattcagcaactcccaagcacaagaagaatggaaaatcttgaagtattagatctctctggtgccagtgatttggttgaaattgaaaatcaatcccttaatcatctaaggtcccttcgcattctaaacatctccgagagcaaacttaaagagttgccacagataaatgctcttgaggaact

SEQ ID NO: 2117 - DNA, 972 bp, Cannabis sativa
gtgtcaagcataaaggagagcactcacactaaggaagatcgccaaacggcctatgaatgcgtaaaggatgtcgctggcaaaatttctagtttgaaggacgatgcagcccaggagcttccagctaaatgcaaggtcgaaatcaaagttcccatttccaaaactgttgattgagccaagtatgttcttttaactcatagcttatggaagtaaatatataaatatatatgtgtattttgtttttatatttttttttttggcttttccttcatttgattaattgtttgaatacatttgattaattctttaaatattattttggagcaggattaactaggagttgaagaagagattatggagtggagaataaagagtgttacagattggctatttcttggtggcttactacatgatcttgattttaaaaagggtgttgtcgtgagagagaattataaatactgttctttatttggatgaattatagctacttatatgtaataaaacaagagtaaattatagtaatattaatgtgacctttttataaattaaatgttacatgattattttaatttttgtttttattttgataaaattacaccaaccaaatttactccatttggtaagttataatatccttcaaaaaatatactaataacttcacaattatatatactaactactcatttgctttatagtatcttgaattgtagtatcaattttgttttaggaggtttcaatgattctaaaaaagttaaagtatgaacacatataaaacatcaataacaggaaacatagagactaaaacaacaatagattaaaacaacaatggagcaagaacattaacaaatattaaagaagaagaaaagatagtacaacataaattaactcatctaatttgagaaatcaaatcctcaaagaaaggcttggcacatgatttttttttacttcaagtctctaactgcaacatgtctaact

SEQ ID NO: 2118 - DNA, 2752 bp, Cannabis sativa
taaaaaaaaaaaaaaatgcgtatttttggttaagccccatttcctcgttcatctagctcatacttacaagcagtaaaaaaaagttcctcgttcatgccagcttctgcaacatcggctctccctctctctggtataccctttacgatcatccaggttttccttctcattaactttgtcataatttatatgccctaattttcgatttctgtaaatgttaatctgtaaattatcagtataccttcatggaagattgaattgcgataatttatatatattatatttttttggtggtttattgggcagaatttgtgaagtgagattttggttttgagggctgagtagtgaggatggtgttggtgttggctttgggggatttacacgtaccccacagggcacctgatctgcctgcaaagtttaagtccatgcttgttcctggcaagatccagcatataatttgcacgggaaatctttgtatcaaagtatgtgatccagtatattttctgatcataaatttgtttagttaatggagcaattttgagctagctttaatttacccatttgtggtttttcttttgaagtattatatattcgtgtgtatgaagtcaatgcaggaaaattataatttaggttgtattccattccctttccaatcattctttctcttttctggtgatgagtatgaggatggtttccactcaattagatcaagtagaagtagttgaccgggtttagtttttagatcaaccttgattttggctttacataaccctgtcctgaaaaatgttcagttcataaactcgtttactacaaatggaaacgtttattcatatccattaactcagtacccttcctattttcaccatgtttgtagtgtcatttatagtagttttgcacttttgctaaaattgtgcttgcattgtttgtatttctacaatcaatttggaattactacgtggctggctaaatcaaaatgccactacctaagagtttgctgatgctgttttcaggaggttcatgactacttgaagactctttgtcctgatttgcatattactcgaggtgagtatgatgaagagacacgatatccagagaccaagacattaacaatcggtcaatttaagctaggattatgtcacggtcatcaggttggttctcttcccttttcaattcttaaatggatttttaatccttatcttcaaagtcaaacaccacgcatcttggttttctgataaacatgaagaaaaattattattgagcctgaacagaaaagatgattcaatattgcctttaatacatgtcctatattttcaagtttattggataagttctaattaacgtgtctttgtaatttgttagtttgtttggtttgcatttgtaagtctcgtggttcttttcctgtgatatcattcatctgtgtcagattaagatgttcactattgggaaagatcaaggataatatcttcgattaaaaatttcttcttatatttaaatactgttaccacaattgtaggctcttttcattagaaggaacatatgtttatttatttattccataagacaacaatttccctatttggtccagtgtttgtttaaaacacagcattctattattctagtccattgaaagactgtcaattatgagaacaatggtagaatggttcatcaatggtctttagacagtaaatatatataaaaaaatccttgaacttgaagtatcttcccctgtcattttacgtagattgagaaattgcttacatgcttatgtattccttctatctattgttgcattaaaaaagggggtgggtctaaattagttgtgaggaaatatatgtttctattaggtcctttatacgtctcccagatttaaattccagtagaaggatttgtaagcgtgcaaaacctcttgccatttgatatggccattctatcttatgtatcattaggcacgtctacaactgaaaagttcagaaatagattggatcagacattggatattatagtaaccattacctttcatttaacaaagagttattttaattatttgattctctctttctatttgctataaattcatgtatgctttatttttccgaaggttattccatggggtgacctagactcactagcaatgctacagaggcagttggatgtggatatccttgtaactggtcacactcatcagttcactgcctacaaacatgagggtggtgttgttataaacccagggtctgcaactggagcctacagcagcatcacctatgatgttaacccaagtttcgttctcatggatattgacggtctgcgtgttgtggtatacgtttatgaactcattgatggagaggtgaaggttgacaaaattgatttcaagaagacagcaaccgctactactcaccctgctcattgagcacaattgttgacttgtttgtttaacagacttgggaattcttccattttcatgttctttttatgtatgtgatccacattgtttttatatttgggttagagttggaagttttctataaagttcatagtgatgaccacataaataaaattttgatgttgacatttacttgtttcttctcttttaaaattaatccatttgtggtaatgtttcaagtaataatgttcaaggatattggacactacaagtgggaagtatacgaatattaattatatttatgggaatatcacatgcgctacctttgccaagaaccaccaatgtcattatctcttatttcttcaattttcatca

SEQ ID NO: 2119 - DNA, 3223 bp, Cannabis sativa
aataaatacagtcaaaatacatatatttataaactcaactgtattatattttccttctcccaaaaagatagcttaaattaaatacgaatattaataataaccgtatcttgttttcaatgtacacctaaacacgtggcttacattaccaccgtcataacggtatttttttaagtataaatcaaaaacgattacgtgtaacgtcgttaaacttatttaacggcgttaaaaccaaattccccactctcctttaaatacaagctttatgggtttggcgtagagtagcagagttccaacatttccccaaaaaagagaaaaagaaaagaaatttggattaattggattgactgctccttcttccaatccatattcgaatttcagattatttgaatccgagattttccatatgctttgagaagaatttattattattattattattattatgccggaattaagtggatttgatattaccggcaacggcgatgtttcatcatcggaaaaggtgttgttcggaaaatacgagctcggaaagcttctcggcgtgggagccttcgcgaaggtttaccatgcgagaaatattcatacgggacagagcgtggcgatcaaatcggtgagcaagacgaaggttgagaaagcgagctgcacggcgcacgttaagagagaaatctctatcatgcgccagcttcaccaccctaacatcgtgaagcttctagaagttatggcttcgaagacgaagatctatttcgttatggagttcgctaaaggaggagagcttttcacgaaggtagcgaaaggaagattcagcgaagatctcagccgtaggtatttccaacaattgatctcagccgtcggttactgccactcgcgtggcgtattccaccgcgatctgaaacccgagaatctcctcctcgacgagaattgggaacttaaagtctcggatttcgggttaagtgcggtttcggattcgatccaatccgatgggttgctccacacgctttgcggtacacctgcttacgtggcaccagagattctctcaaagaaaggttacgatggtgccaaggtggacgtttggacatgtggcataatcctattcgttctcacctcgggttatttgccgtttaacgatcctaacttaatggtgatgtaccggaaaatttacaagggagaatttcggtacccgaagtggaccccacccgatttaaaacggtttatttctcggttacttgatataaacccgaagacgagaataaccgtagatgaaataatcaaggacccttggttcaaaaagggctatagagaaagaaaatttcacatggaggacttatcagcaaaagattattttatgggaaccggagagaacaacatcaataatattaagagctttaatgcttttgatataatatcactttcctccggtttcaatctctccggtttgttcagtgattccgacgatgtatcggaaagcgaggagcgtttcgtgtcggcggagactccccggagagtggtggagagagtggaagaggtggctagaggggcaaatttgagtgtgaagaggaataataatgatgatgattggtgggctaaattagaagggtataatggtaatttcgtagcgaggttggaggtacaccggttaacggaacaactggttttggttgagtttaagttgagggaaagagaagttggaatacttggcttaaaaatttggaaaaataagctgagacctaaacttgaagatttggtttgtcaaccggaacagtcggtcaccggtaactaattaaggttatattagtcataaatcataattagagattactcaaaaaaaaaaaaaaaaaactcatcaaccactgtttatattatttttaattttattttcagctcctgtaaatataatatattaataatccgggtttacttacttttattagttttttcccggaattaatattactcaaaatttagaaaaaaaaaaaaaaaaagttaggtggaaaattgtaagggcattgctattagtacttagtagtgtaattaaagtcggtcctgaaattgggtggaacttaaaaaaaaaaatattattccctttattgaaaaatatgtgctattttcaaaaatattaatctcttagaaaatatttttttggggtctaagtttggtgaaacttaggtgcgagcctaacatcatccatatgatattgtactaatagcgatatgataccttggctagtatcatatagcatttctcaaattgtaaacgaatataaataaattttagttcttttccgtcttttccaatttttataatattagtttgttttttcttaaagaatattcattatttagatgaacaaatcaaaaccttaactaggagaaaaaggcccaaaattatggcaaatatcaaatgggttataatctaaataatttaattagttaggcagaaaataatgatttgtttcttcttcatataataattgcattttctatatccaaattataatgatgaatcatatccttactaacaacactcctcggagctatttatgaatgaaacttacaaagtgagcaaatgaaataataattagttttgctattcaattaataataataataataatcattaaaagcctgcaaattcatgtgaatgaaatatttgtaaaaatatatataaaaaaaaatctatgtcaatttatttatattaatgtcaacttgtctttatgcttggaataatgacattattgctaacaagaatccaaacaattattgattaaataaaaatcacctaattaaataaaaaggtgtgtattacatgaattttttgtcacttaggaaaaaaaagtatatgttttatatttaaatataggaatccatcttgttttccataaaccataaatgtataattttaattaataatgaacacaagcactgataatccatgcactgtaaatatgtacatgtgcaaaaatagtttaaatctaaaatgtttatgtataaatatatacatattatatatttatatttggaaagaaaggagtaatgcattagtatttgttgtcattttcatgcaggccccataataataattatatcctatatctaggcataattgtaaaatataatatatattaattaatggtcacaaaaaataatagagtagaataatgctataataacctataattgaattacaattgttcttaaaagagcatttaaagaaagttaattaatta

SEQ ID NO: 2120 - DNA, 2164 bp, Cannabis sativa
tcctcattaattattagttaactaaagtagctttgttaagtatgtaattaacaactcttcttcttctgttcatgctctaacattgctttttttgctaaaatacgtaaaaagtatcctgataaactgattgtcagtaaatatttatgatatatatagaaatatttatttagggagccaccaaatataaaatagtaataattttttttaccattacatactgattttagtatatggtatgtgttcttggatatttagttattatttgactcacttagtttattaattagtgatttactatacgtagttttgttaagcctgtaaagagtatccttttaaaccgattgtcggtaaatgttgccctcttggtcttggaaattgctaatcttattattattaattaccatgatcacttttggtttatttatgttatgttaactttgattaaatattcgttttcaataacatttgtgataattaacattaaatatatagagtatgtgtaattaatattatcataaataatattagaagaatattataatattagaatatttctattttgctataacattaattacatattaatattaattcaaaaaaattacatattaatattatgtaactaatttttttactattagtaactaattttagtatatgatatgtattctcggagatttgattattatttgtctcacttttctcattaattattggttaactataagtagctttgtgtaacaccctactagtttaggcgtgttattgggattttaatattttctgtgttctcgcgaagatggtcacaagtttacggagatgttgctgttttgcaaaaatgagagactcaaaaatctccgactttatggatattttttattgtgaaaaactagatggacagtcaaaacatcattagaatcgcccaacacactagggcttttgtcaacctgggccatgggtacttactctcgagctcccgagatctcatttttaatactttcaaggcttctgaacttgaggatgaggttttctaccctatttttgaccattctggattcaatggtcgcatccgattttgaatttgagcaattgaaggtagcatcccaggatttaaagtgagggggcataattttttttgtaagacagaggggacaaaagtaaacttaaaaaggaaaaaaaacaatgctctttatgggaattgaaccattaacatctactctataagtaatttaatttaaccattacactaaagctaatattatatttatatatataattttttattataaatatatatcgtaactaactaaattgtattacatttttttctcgatttttttttggagggcgactatcccgcctcgcctacatgtaagtctgccccagatcccaggttgattgttaacctaggcgctaggcccagaaccaggtcaacctgggtgctggatcccttttttaaaggctcgaatttgtaattttatccctaaattcgcttgaatcaatgaatttattgaaatttaaaaattttaataattagacgttaaacttaaatataaaaatactttacatatttcggaatccccattttaaagttacaattatttagaaaagtgtggcctaaagacgataacaaaaaatgttactgcgtcgaagattgaacactctaaatctaattgtaccgatatgcaaaatcttcattagctcgagcttaatgctattcagcttttgccttgcccttctaaatcttctttcttttcgctttttggtaaattgatctcccaccattttcacaacaaagacttctctctctcacagtaaaagagatcaatttcttcatcttcttctttgtggacgaaggtacttattttttaattttgaatagccttggttcatagtgattctcagctggtttggtattaaaaaccaacttttttcaaacataaatacgaaaacttgattgctgcttttggttcaaatccaaatcttaaactcaattattgtgttctgaattgtattgcccctttttcgatttctttaattattgtgtacgaaaacagaacacaattgggctttttgtacatttgatttagaagatgtagtgctcatttcaaacctaaaaatgcaaacttgattgctgtgttttgttcctctcctcataaattta

SEQ ID NO: 2121 - DNA, 2075 bp, Cannabis sativa
ggtcaaaagggcacaactttttccagcgcaagtgatgtcgccggtaaaagtcccacatacttttgcgcgcacgttttttcactgcgagggaaaatgaaccgcctttttttcctcaacttttgccggcgccaaaagtaaataataattaaaataataaataaatagttttgccagcgaatgaaagcgcaccggcaaaaggttgccaacaattcccaccttttggcggtttggtgccaacttttgccgacgcaattagtgcacttcgccaacatttttgactattaccggtgatattaagcgccgagaaaagggtggaggtgggaaaacaaagttgaccttctttgccagcacattggttgacttgcgccgacattggttaacttttgtcggtgcaattacttaatagcgccgacaaaagtcggcattcttgtagtgtttgatattgtgatgaccccattttaggaagtgtatggccgagtacctcctttgattcaatcataaagctggggcacaacattcatttaagttgttgaagaagatttattatcaagggatgctattctgcaacaacttaaggacaatttgcaacaaagtcagaatagaatgagaaaaaaagctaacaaaaaatgaagagacattgaatttcaaattggtgacctagtactagtgaaactttagccttaccgctaatctactgtggaaaaacgcctcaatgcaaagctctactgttgctaccttggtccttttttggtggtagcgcaaggtggtccatcaacatacacattagctttaccacatgagagttgtattcatctgacatttcatgtctctcttcaaaaacaattttatggtagctctccactaaaatcttacccactgctagagctgagtatcaccaacaagcctctaatggttccattgactattttggccactcaacccgaactaatcaaatcgaaataggttcagtaagtttttgtacaatggtctcttagtccacctgaagatgccacttggaaagatttctcagcatgtaaaacactatatgatgtctctcactttgaggagaaggtgattttcgaggagaggaataatgttagcaaagcccaaatagaaagatgaatacctttggacccagtgaaagtggaccaaaagataagagagtcgataaataactcagtccaaaatagtgatgaggaaacatcagctctagctgagattcacaaagatgaagtaaagaagaacaaggctgaagttggacaagaaatcctagctcacaagaagagggctcgagccaaaaccaaagtggctgaaggatttcgtggtgatcgagagacgttgaggagcaagctgttgagccactaaaagtcttttaggatgtaattccttctatatccttctattttgcgacaatataaatactcttttgtaataaattttggattggctattgaatgaaattgcaaggtattgcaagaggagatttgtcttggctcgaagaagacttttgatctatcagttggaggttcggctgggcttgtattgaggttttggggttcgaaggagtttgtagtgggagtgggttttcacagtggtagtcttgatttttcggtgatggaatttgagttttttgtcatttgtattttctagtctagttctaaactagtgttagcagagattttgtaaatagatacattttgtttttgtttatatttgttttgtaataattatacccatattttttatactaattattgtgtgattaacttagaaaggaaaatattaagcctctatatattagatgatgatggttgaagatgatgaataaggagttttaagttagtgctgatgtgttgattactaattggatgaaaaatgattctattggtgggtttttttggggggagatttgaccttatatgcataaagtatgttaaaattaataatcaaaacttaagctacccaatattggtggaataggtcaattttgatgtataccccaaaatatccccctcattttaaaactttctaacatctctctattttcctcttgctcgttctctctctctctctct

SEQ ID NO: 2122 - DNA, 1381 bp, Cannabis sativa
gccattgtgtatgccttgattatcaatgttcccagttgataatatacatgggtatatttatatatttgacacactaacgtataggcttctgattctttattctctttccagattttctccagccgacactaattttgttcttagggagtttgagaaatgtggcgtgatcttaaaacatgttcccggtcctagagatgctaactggatacacatcctatatcaggttgttcttctttctcatgctatccgtgtataccaacatttatatatttttacgagtttataccatgggcgcgtaagtgcaattgatttattctgagattgcctttatctgcctaagcatttttttttactgaagctcgccaattgcttactttgttgtttgaacagaaccgatctgatgctcagaaggcactcagcaagaacggaatgcaaattaatgggatactaatagtaggtgttaagccattggatccaatgcagcgtcaggctttgaatgatagactcaacacccaaggatttatgactctaccccctcagtcttctatcaaatctgcagaactaaattcatccggcaacactcccaggccttactatcttcaaaatggtaataccagtgtgcggcagactggaggcgccattgcttccccgacaaaatcattggcaaacaaaatcatggatttgatgtttggagtatagctactcctgtcacaaaatttcatttatatcaagagaacatatcgaatttaatcgttccggctaatatgtttcggtaggcagtttggctactcactggatcccgattccgttcatcagatcttcacctttaatttttacacctccaccttggggttgctgtttgtttgcgagacattactgcctgatatgattgtttctattataaaacatggattgagttgagtggttttgtagaatgttattgatatcctaaaaagtaggagcaatttttaaaaagaaaaaaaaagtgccatcaacagaaagcatatatgattattgtaacgttttgctttattacaatcttaagaatttaaataaacatatgagcaataacatttggctttggaaattgactacaacatcttacgatttttcattcattttttttgaaatgaaactactaggccattttagcaagtaaatgtgcagcaggggcattgccctccctcatgcctaacatgtaaaaaaccagtaaaattcaaactctcaccagctgcagagactatctctgatttaagttcaaagtgggagacattgagagttcttgcaagccaagcacctagaagccattgcattcactgataatgggagaggccaccactcagcccccacaaatcgattgattctcatctctaccaatggc

SEQ ID NO: 2123 - DNA, 2259 bp, Cannabis sativa
tcttatgtttgcggatgatgtagttctttttgggcaagccacgatcaaagaagcacagtcctttatggaatgcctgcaaaagtattgtgcgtggtcaggccaagcgataaaccagcaaaaatcaaccgttttcttctcaaaaggtgtcccaaaaaatcgaatcaatgacatcacgtccctcttgggaatgaacgagatgaagaatgatgcatcatatctcggtatacccctgttcaggtccaagaaacggactaaagacatgcaatatttggttcaaaaagttctcacaagaatagaaggatggaaggctcgcctgctatcgaaagttggacgcacatgtctaattcaatcagtaggcacttcaatccctatttatgtggcggcttcagaggtgataccttgtggaatagcaagtaaaatggagcaaagtctaagaaaattctggtggggtggaaaggaagggagaaacgcaatgcacactatttcttggagctcaatctgcaaatcaaagtttatgggtggtctcggcatccgcagaataaaagacatgaaccaggctcttattctaaagtggggctggaaacttcttaaggatcttaagaatctctggagttctattgtcactgagaagtatctaaaagggtcaaatttgtttgatgtcgagatgaaagggtctgagtctgctctgtggaaagcaattctaaagtcaagaaccttactgaaagtaggtctatgtcgagagattggtgatggacggactacttcaatttggtttgataattgggtacccaatggtgtccacatgccgcagccactgatggatgctactcaaggtgcaaacttggtcaaatacttcataaacgagaatatgtcttgggacgaagaaaaggtgaggaagtggttcagtgaattagatgcaagaaacatcctcaatatcggactccctcctcaacctcaaccagactcctggaggtggataggtgatccccgtggatgcttctcggtcaaatcagcgtttaaactggtgaccaattccacttctcagcgatcaaccacctgggattggagaatcatttggaactcgcctatccacgggaggttgaaactgctttggtggcaaattatgagggatgccctccctaccagaaggaagattggacttgctttatcactccaatcaatggactgtcctatttgtgcagaagaagaggaatcaacaattcatctgttttgggattgctactttgcaaaggccatatggtttggcagtatgtggggtctgagaacagactcccattattgtagttcgtggccagattgggtaacttggttccaagataataatcgcagaccaagatgcttatctttcgatgagttcatgacaggtgccctatgtattttcaaagcaatttgggaggctcgtaatggggtaatacatggcacgccaatccgcccaatatcggacatcatcaactcagtacatcgatcgtataacgaccacttatccagttggaattcgaagcacgagaagaaaagtcatattcgtatgcctgaacctggatggtggagttgttgcacggatgtatcgatccagccaaaccaatcatttggagcggcggtctttagagatgagaaggacagaattgttactatatttatagagagattttctgccacaaaccctctgttagcggaagcgatcattgtggctagtgcagcggagtacgcaagattacatctgaaggggaaagtggccttccattgtgataatgaagtagtggttgcgagctgttctaccaacagcatctccaaccagttcatcgacattaaggctgcagtgtatcgattcatgaaatcagtcaagcaactggaggactttcggatcaggaagatagacagaaactacaattttttggctcacaattcagcgaagtgggctgctgcagagggggttactggtactcttgacttgggagttatggatgagaatgtgttctctgatgttaatgaatggaaccctgattaaggtgatccaaatttgcaactttgggtgtggttggttgtttccttaggctgggggtggatggtgttttttcagtttggttttctaggtgttgctgttagttttcagttagttgctttcatctgtaatttttttctactgtactgtttcggctatgccgtttttttcaatgaatggggttttataacccctcccttcaaccaaaaaaaaaaaatttacctacgacacactatcta

SEQ ID NO: 2124 - DNA, 682 bp, Cannabis sativa
tcggtagtgtatgcctgtttcgggagccgtacgactctacccagaaaccaaatgagagaggtgggagaaggtttagtgaaaagtgggtatagattcatatgggtagtgaaggatatgatagtggacaaggaagatgacaatgagttaagcgaagtacttggtttggatttgattgagaagattaaagggaagggattggtggtcaaacagtgggttaaccaaggcgaaatcttgggtcacagagccatcggcgggtttatgagccactgtgggtggaactcgatagtggaagcggcggctcatggtgttaagatattggcttggccattacatggggaccaagggatcaatgcggaggtggtccgtgctagtgggctgggggtttgggttgagagttgggggttgggttgtggtgagattaaaagtgatgagattggtgagagagttagagaattcatgggaagtgagttgctgaggcggagagcagaagaaattctggacatggcaagtcaagctggtggagttggcggaagccagcagaaaagttttgacaaacttattcaagaatgggatatcaagaaaactaccaaagaatagtttaaaagaattggttgttctcattatgtaataatgaataaaaatagtcatgaaatgttaatcggctaaggcccctacgtttgtt

SEQ ID NO: 2125 - DNA, 1771 bp, Cannabis sativa
gtccatggctgaggatagaatatctgacttacctgactctatcatcattcacattctatcttttcttccaaccatagttgccattcggatgagcctcctttccaagcgatggagacgcatgtggagtttgattaaagtgttaaacttctctgtttcaagggatgttgagttttttagaagacccaataatcagaaaaataatgagaggaagaagttctttaactttgtggatcggtgtttgaatcgcccttatgctgatacaagcattgaaaagtttaccctcgaagtggaatactatggaggtcgccatcgaatggatcgctggatgagatttccgttaaaaaagaatgttagggagttagtcctacatatcaagcgagctagggctttgtattgcttaccaagtgctctacttagtttaagatcattaacccttctcaagttgaatggtttagagttaaccactggttctggttctcctattgtaaaccttccatgtttgaaagagttatgtctcttcaatgttgtaatgaacgatcaagtattgaacaatctactgttgggttgcccttgtcttgagaagcttcatgtacattattgttgtggtctgctaaatccacaagttttgagtttgagcctggaatccttggaatactatgaatgtaatagatattttattcagacattaactgttgaagctagaaatcttcaatcttttgaatacaagggagtcagtgtgagaaaggacagctgtaatgtcaacctttttcattgtgtggggattaaacatctctcattttctgatgtttgtatgactggtcgatggtttgaagatctaattccccggcttaactcccttgagagtttaaaaatagattcttgctatggggtgaaacatatcaatgttaggaatcaacatttaaaagaacttgatttcgattgccgccttaatcgaacggagttgacaacagagattataatcgacacaccatgtttggaatccctcacttattctggttgtttaacatttagaatttctgttagcgcatcaaatttgttgtatgctgatatcaatgtttgtggacaacttgataagactgcttatgatatggagtggtatactagtctaataaaatttctttccgagttcaatggcaccaagaatattagaatattttgtggctccgaaaaggtatgtctgcacttgcaatcaatttcattcattttcatatgctgtctttggtttaattaacgagtaagtattgcaaatatgattttcaattctttttttgttttaagtttttgttcatctctatatttcttgtggttaatgtgtataggctctcatcattccaaatgaactaagagatatccacccttctcctctatctgatgtcaagtatttgaaggtaaagacagctcttccattgtttagaaaggaaatgttcaggaagtctatgcattggatttcaccttctttggagacattaacaattgaatagttgtatcagatttggccttctctgcagagtgcagacattagcaatagagttatttgtatctttcatttcttgagttgcggatgtgagctcactttaattatgtaaactaaacttatgacttcttaaagagttcctcatctcatgactcatgatgatatctatactaaattcattctttaagcaaaccatattaacttgtttgattcgaaatcatattatagacaattgaaaaatttagctaagatcccatgaatttgtcactttaaaaa

SEQ ID NO: 2126 - DNA, 2459 bp, Cannabis sativa
ataatctgatctgtttaattattatttaaaatatagattattagaataattgatgatatatgttgatattatatgacagaaaatcagaggtttggaaacagcacttgcagacacaaaaaaggtaagttcttgagttaatttgaggttaattataagacatcatatctaatatgcataatcatatcatataattgtttatgtttctgtaaatattgtagaaaattgaggcattggaagatctacttgatcaaaccaagatggtaagtatacttactctccattagtaacttagattttttctaatactcattttgctttgtttttcataaattcttacaaaatgtcatttgattattacacattctacaccttgttaaaaaatcaacttttttagaggagtgttaattacaacatcttattacaatttcttagttaatttatatgcccgaaatcacatgttggaatattttcttttcaatttttttttcacaacgatattcgttatagttacaatattatctttgtaaatttttaaaaaattccaaatatcttacagtagcgataatagaatttttaatattcaaatctaccacgcgtgttcaaaaaacttcaaacctattatcgacactgtaaagtattcagaaattttaaatattcatagggatgatattgtaactatattttggaatgtgtttttcaaacacaaagattaactaagagattgtaataagaagttaacggtaacactttttgatattttaaagttttttttttttttaaaaaaaaaaatcatttttacaaagtaaatttgtttccttactcattgatatgtatttgttccttttggcaggccttaaaagggctgactctgcatattgaagacttgaaaagcttttaggacactttcaatttgttagattttattattttttttcttccgttctttattaattattcctcctaaaatcaaacccaatatttatatttgtatgtattatataacacaaatttctcaaattattattggagaattcacatgtacaacactaagtcataaaagtgttaaaaaaaaaagaagaaaataagtgttgcatgcaaagattcctttttgccttattgggtaatagaaaagtgcattttacaaccattatttattaattaccttttttatttatttatttcttctttacaaaaccaattacattatacttgtcaatatgttgaatattttgatcaaaagataagatttgttgaccaaactacccttatttgatcaagtccaagctccatattattaagtgttttcttgttttgctatgaacaagaaaaaaggattgaactttaagttttaacttaagtatccacttttaagagaggaaagttgaaacccaatttcaatttcattagtaaaattatggtcaatttagttaatttttaacaaacactttacaattacaatttacaactagtatttgtaatcaagtaaaagttattataattgagtataattagctttaaagaaaggagccttttataatcacaattatagttttgaaccatccatgcacattgcatagattagatccttttcttttcattaattcatcttttgagttgatgataatttaaatggtagtagtaatattatagagtgtattttgacatgcatataaatatatagatacgacttatcttcaaatattatggaccataagacaaaaaattatttttagacccttattaataaaaaaaaaatataatttttaaaagaaatttttctttttagcttttgtgcgtgtttggtagactttaagtacaagtctagctcgtctatacttaaagtgggccctatatatagttgcaaacaatgattggcattgccaaggtttaggtgtgtgtatttttgcttagggtgaaagaaagactcaaagtttgaatttttagggtttctgcataaacaatttggtggtcctatcatatatatacctatacctatatctatatatgtatgtatatttatatcatgttttgactatgattgaagagatcaaagccatcatagtagtaaatattaggtgcaaatgcaatgcaacaaccttttctctaatacaaattattgttactatttatattttgagatatatgaattatgatatgagagttgaggtcattatttattattattattataacttctttcatacttagctagcaaggaaaaatcatataataaaatacaataaaataaagaaaatttggttaatgcgtatggacaagacactctgtatttttgttttattttatatgagaaaagatagctttttatttttgactaagaagaaaagaaagcatttttaattactccaaagttcaaacaaacatgtttaatatttcttaaatcaaaatcattacttttagttgagtttttactccataattcaaataaataataataataa

SEQ ID NO: 2127 - DNA, 3641 bp, Cannabis sativa
  modified_base (3134)..(3138): a, c, t, g, unknown or other
caaataattataatgaacttccatgaatgcaaattggaaactttaataattttattttcttcactttatgaatatcaagggaaaatcagacagaaactatgattatgaaatggaatgtgtgagtaacttcatatacaagaagctcatatcaaatgtacaattgcagaagagcaacactcacataagctgtcttttgtgctttttctcttttcaaataatttataatgtgtttaatatctcattcaccatcttatacactacaaaatcagtacttccttcacaatttgctctaatgaagatgctatatccgaaatgctaggacgttcattaacattttctctcacagccagttctgctacttcagcaagcttaagcaaaggttctacatttcttggaagagctacataccggtcaattattgcagccgccttcccttgtttgatcaaaggtaacgcccactcaactaggctcgaagggttgtaatctctgtcgtatgctttccttccactgagaatctctagcagaacaatcccgaagttgtaaacatcactccccaaatcttcaccactaagatctttgtcatttgaagtgatgaggccaaaatctgcaatccgagcactccattcggaatccaaaagaatgtttgatgtcttaacatctctatgaataataggaggcacaaactccttgtgaagatactccagtccctttgcagcctgcattgagatcttcaatcgaagggtccaatttaagggagaaagaccaccatggagatggtcataaagggtgccatgaggcatatactcgtacaccaacaacctctcacccatctcagaacaataacccaataaattcacaatattacaatggcggattttgcaaaggacttcgagctccatttcaaagtctctactgttagtatgaatgatagtagcagcattagctctcttcaccgcgacttgtcttccatcagggagcacagccttgtagacaaaaccatagcttcctctgccaagctcattaaactccttgaaaccattagtggcatcttttagctcagagagtctaaatacttgagctaaaccaggacaaggagtagaagatggaagtgagtgtatgtctccattgttatctgtttccaattcggagtttttggattgcttcttctttgtcccttcctcttgtttagaagcaatcaatctaggaacaaaacaaccaccaagtaaaattaagagaaggaccaaagcagaagatccaattatgatcacaagtctatgcaagtgatgccaaagccttttcatctcaggaggagagtgaacaccacaaatatcccaacacgaactgttttggcaaagagaacaagctgtacaaactctatcagaattctcagtacatgagctagacaagaagaaaccatcagaacagttcgatccacatggggagcatatcttaagatctttcctaacacacaagtttgtcaaatctgcctcatttagaatacttgcattgaaagtaaactctctttcactgcaaggaccaggactacagagccctggactacaaagctccaatggtggatcatataataaaggtggtgaatccgaagaagaagatgatgatgatggtggaacattataagcccaacaatcaagtactagatcgtcttctctaatcccacaagtggtgaaatcagaagaagcgatggccttaaacccagaagcctttggtatagaagatgagttaaaactgccccaacattcaactccatgattatcttctctaatcccacaaaaatgtctagaaccagctgctagagaaacaaaacgagacccatttggaggaccactataccaatcattatcatcaccccaacatttgatttccattgatgtatccaagattccacagatagaaactttccctgaagctaaagctatgaaattttccttgacatcaaccacttccaaactcgatgagtttggcccccaacaaacgagtcctccttctctaatttcaccacagctgaatccttcacccgaaactagattcttgaaaaccagattactaatactctgattgtaaaacagagtggactctttagaagtcaaactagtattattcgatgagattttggtaatatctatatcccagcagtcaacgttacccatgttgtgatccgagtagtacggtcctctgatagcacagacgtggttgacgccggcggcgacgttggaataagcagtggtcttgaatacggaaggtacgagatctataccgggtctgatggagctccagcagtatgcttgagaagtgttcgctaaaatgccacaaataaagcctttaccaccggagagcgcagccatgggaggaatatcactgtaataagcagaggaagaggaagaagatggagacggagacgatgatgatgatgatgaagagctgttctttccccaacagaccacgtcttgcttaccgctcgcgtctatggcacagaagaatccatcttggccgaacgaggccgagatgggtcccattgatccgaacccagatgcagaaatgaaccaaaatggtagaagaaggagaagagagagttgcagagctgtaaagaagacatgaatggcgaagtgggtttgcatggtttgggtgtagtttgtggtgttagatcaggtctgtcatggaggtactggtcataggaaatacgttgaggagaagaaggaaggaaggaaggtgacgatgaaagaagaagaggtacaacaagtgttgttgttgcgcagacatttttacggtttttgctctaataaccgttagaaaatcaaaagtactgaaaagtagttaccatttttaactgtcatccacggctggtatgatgagctgagtgagtgagtgagtgagtgagtaagcgagggagaagtgagttcgatcatccaacctcgagttaaaataaatgtgtgatgtgttgtttgttattttggttttgtctttgacttgttggtcaaaataagtttgtttcatcatttaatatcagtatcccattgtctcacacccaaaatgctttttacgaatgtgaaaaaaaatatatgaaaattcttttaggcaaaatatatcattctttatatctcttatatatatatatnnnnntatatatatttttttttttgaagagagggatgcccttagagggaaagaaaagaaactaaattgcaggggtcatcgccaatccaaattgctgcttcatctaaccccactgcccacttagcgaaatgatgagccatggcatttgctgaacgactaatgtgagagactcgagcgttggggaaaagagataaagcttccttaatttgacgaatgatgtcaccaaaaagagagagatcttccttagtacttgtgagcgcgacagtaaagttagactcattgaaaatatgattatctaaattgatctgatgaaacaattgatagatctgcattttgggcatatacttccttgtccttagtgccagtacatagctcgctagctaggtaggttattagtgcctagcctaccgtcaatgtcaattaattaaagtaaatttaatatacattatttttttttatatgaaaaggaaaaaacttcattaatcacttgcaaaaaaaaaaaaaaaaaa

SEQ ID NO: 2128 - DNA, 1053 bp, Cannabis sativa
ttatagtcaagctctgatgggcctaatttgacaaagaaagatgttagtgatgttaaattaacagagaagaaagaagttaaagaacctattcaggtaacattttaatgatattggaaaatggaaatttgaagtactcaaattgaaattttatgaagttggcctctgcattgttatccttttctttactttcacttcttaattcgcaggctagccgtgtagagcctaaacccgccgaggtaactgagaagagaacaattataactacagaggcaaaacaaacagttcctgaaatcccatcagcaagagcacagctttctcttcctcttcttccaaaatcatttcaaaaagagtggaagtgtcatttgtgtaaggtgaaagttcaaagcgaaatcaccttcttttctcatcttcaaggtagaaaacacaaggatatggaaatggaagaggcaactaaagccaagaagagccagccaaagatagtcatccctaagaaatcaaatcaatctactgagggggagccaagaaacttggcgaagaaccaaatggatactcctaaagttgtattttcctatgctcaaaagcaatccaatgagttggggaaacaagctttgttgaccaatgattgggaaccaatcattgttagacatgacatgtctaaaggcatcttgaagactaacaacattgcagtgtcatcgtcgagtgtgaagaccgccattgctcctgtcgcgaagcctaaggtttaccatccatactgccatgtttgtaatgtgagttgcagtggtaagattgatatggattctcatctcaaaggaagaaggcatttgagtcaacttcaattgttggggacaaagtaacttagtaacataatgtaatagaattttagtgacaatggataaatgattagactttgttttgttgctttgtgagaaagaattggacaatttttgttttgggatttaggaactgtttgaacatgaacctcacattttctcaatcttaatattctttaaaatgtgattctatattgtataaatatttatatagattatatta

SEQ ID NO: 2129 - DNA, 2493 bp, Cannabis sativa
aagtcgaatatatagttgtttgaatgctgaatgtctcacataatgttatcgagttttattttattaatagttgttgctgagagtgttgacgatcgagttgttattgcagttttggagaagagaaagggtggaggtgcaaagagaaggattcagagtatgtctgggttttagatccaatagatgggacaaaaagttttataactggtaaatacatagtgtttttatttatttttattctttaaaaaaaacattttggcttgttaaattgttcgtactggtcttaagctctattaaattccaatgaatctgcactttcatctgttcaggaaaacctgtcttcggtacactcattgctctgctacataagggtaaaccagtaagaatcacctatgcttacactaaatgagttataatatcattcgtgtccctgattaaaggtggattatattcttattattattttttctcaaagccatgggtttttctttttgttattgaaaatttcatttaaagaagaaagtaaatggaaagatttcttcagtacaactttagtcagttggtggtgtctatttcgtgtgtgtgtttgtgctatcagttacgattaagtagttcacttttcctttcttttcactgtagctataacttgtctttccactccagattcttggcgtaattgaccagcctattttaagagaaagatggattgggataaatggaaggaaaactacactaaatggagaagaagtatccactcgctcttgtgcgaatatttcacaagcatatatgtatgttttgctctttttcactccaattatcttcccctttaaactagaggctgtattgcagaaaataaatcatttgattccttgttcatacttcatatcgcgaacttgttttctgcgttgattataggtacactacaagtcctcatctattcaaagaagaggcaaaagaagcatttgttcgtgtgagaaacaaggtctgtgttttctaagctgaattttctgctctcgatctttcttataattactgtgatagaaactaagctagaagaacacaaattcggtaagggtgaaacacaaagctgagagatttctttataaattgtgagtgaatacattatacactgatattaagaagatagggtctctccaaataagagcatagctcaatacacaacaaaccacacatcccctcacactcaccaccaccctgccttatatcatactcaccaagcccaaaagctaacacttccactacctgtctcgtaactacatatgaacaaatgggtaatctaacatactgctgttacaggtgaaagtacctctatatggatgcgactgctatgcttatgctcttctttcatcgggtcatgtggatcttgttgttgaatctggtctccatgtaagctggtgtaattctattgctttcatgatatgtcaaacacttactcctatatatgtttgccttattaaactaacttccacacaacaggaatgatcggcatgcatgacttaattttcagttttgcatgtatttttttttactgaattggatggtatgttttcttcctaattggtagatttgcttcaaatataaacagcgaaaatagaaccttgaattttctcaaatggtcagacatgtggttttcagatactaatttcaaaataacaaaatactctctagtttcgggtgttagtcatatgtagaagagagcttcattgtataaccaaccaaatggtatttttcttcttatcagccgtacgatattcttgcactcataccggtgatagaaggcgccggaggtgtcataactggttggagaggagaagaacttagttgggaagcttccccaaattcacatgcaacaagtatgtattcttgagggtcaactttattttattctaattgactttatcaactattgtaccgttttctaattcgactttaatcacattgttacagattttaatgtagttgcagctggggataaacagattcaccagcaagctctggagttgctacaatggcgataaggtttagattggccatgctttaaataaatttgtagagatcttagcagaaaagccttggttgattctgaataaatgagtttagttgcaaagaactaaaattgacaaattctatttgaagatgtacatcaagaaacaatttgcaaggacatattagcttgaccccctaatggccaaaaaaaaaaggttcctttggaaaacttgtttcttggttttttaacatattacctttatatattttctttactgaaatacagccgcaaatcataagtgatcaaatttagtatattgtgaaagtcaatatttcaaaaagaataagttttggtaaatatattgagtaaataaactgtgttttattaaaatataaatttagtaatttataatttttaatcatttgggtacttgtaacatccattgaattgcaataaagttctagttagaatgataattaatttggaat

SEQ ID NO: 2130 - DNA, 2580 bp, Cannabis sativa
tgtttcaagtttatattattagtctatgtactttatatttgataatcttgtacatttactctatacatgaaggctctcatcttgcctgaagacgtgaagagggtatgtcgttctcctttggttaattgggaggatcttagagttcttactcaatgtaaacttgagagggaatccgacttgagagatgctttgcaatggatttctccttctttaaagacattatctatagcggaaagggcatctttagatcgttttggaatatcctcatggtgttgctcattgcatgatgaatactattgagattgtatttttaggtagtttaggactaatgaattcgcatgcgtacttttcatatcggtaggatttttttttatttgttgatgagtagataagatactttagtattgtagattcatttttctattttgatgcatttttttgcaaatctacaaaacatgacatccagcggattagaaatgctaagaaggtcttgtattttagctaatttgcagacttgtggtgaatggtaacttcaaagttaatgatcaacttaagaattgctcttggaatattctatgtctacttagattactgtactgatttcatttatgtattttctataatctagacatggttctgtcaccttgcctaaacacttcagactgatatttcgttccttcactgcgtaggttgaggcttctcaaatctccaggttttgacaactagagaaatattagtatatactttacttcttttacaatatcttggatgcttgctgagtttgcaaaaagtttaattctaataaacttatgatcacacaaaactcattagaataattaggataaatttatgatgtgattactatagggattagagaatattggttatcgtattgttacaccgatgaagatgtaaatttatgaagtgtgttttttccttcttgcacttgtgttttccaatcgaagtaagaagtcatagcggtagaggtacttaacacaagtatccctgaaagtaaagccaatatcaaatggtgttgtagtcaaacaagataaacaggggtactttctatgcttgtgttgttataagcttaagtaatgatttcattggctccagacagtacacatatttccagttagtattacattttactccctaaattccagttctgtattgttaatttaatgagctggtttgttaatttgtgttgtgtgatttgactggttcagctcaatcttgtattgtatatagccatatacaatacaagattgattagtatatgttgtcataagttgctgctggtttgaagatggtgtgataagttgtaataattgaactgtattttatttattcaatttagctaatgatggagacacttttagagtggagacttatagattagtaaataattaattgtgtgtaccttatgtaatcacataaacaaaattcaaattgcagttgaaattaggtgatgaggtagaacataatgtgtagtaaaagaagaacttataatgtcagcagtaaaagatgaagaagataagtactttaaattggttcaaatcactataatgtcatgaaatgaattacaccaacaatctcaactcaagctacagcctcacatttccgacagtgacaacctccttaaggattaattaattactaattaattttggattagttcatgatatgaactacacaaaagtctgatacattattggtatcaacttctcgaccacaatcgacagaccactattagagattcatacgggtgcaatcgccgataaaaatggagttctgtggtgctgactgctgaggaaagaagagttcattactttctttttcggtgtcaccatggttggtactctaaaagcatcttcaacctcgacactaaatttgatgttacatcaacactaaatttagtgtcaaaaactcattctactctaaccacaacattaaaaattatactaaaaaatattttttattattagatttgtcgacaaatgaatcttctcttcttgaattaacttaccagcacgtgaaagtcatgtgtcatgccatcagtaaatatatgtagaatttttatttgtattctaaaaattcataaatatactttgttttaataatttttttttacatgatatatttttttaattacatttgtttattttttatttatttttttaattcatattcttaaaaaattgtacctatcaaacaaaaataaattataaacgtgtaccaaattattctcctgaaattttcatccacgtcaaattttctctagtaaaataggacaaaagttcttaaatttaacaatctcaatagttttaggggaattttaacgacctgaaaagttcaagagacatgatttgactgatttggatttttgccccttaaactttgacatataccaaatcagccaaaataaaattaaaataagcattgaaattaacaaaaaataatatgagaaaaaatctggaaaaaaaatattatgagtgatttttaaaaatttgaggtgtatttactattttgttagattgttggggtgcaaataaaatttacctaaatatatatatatatatt

SEQ ID NO: 2131 - DNA, 1679 bp, Cannabis sativa
tttcctgctttcactctctacaatatccaattaatttattggattcaaactggctaatgagagttctaattaggttgatgcttataagcaacgaactccatattttaatgacatttttgtaatgcaaattattctttttgctgcaatctatacaaactcaaaattttgaataagggataagaataaagagagttcttgagtagttaaacatcaaagaggcatgactcgtagtaatataacaatttcatctttgtttggccaaaaaacacactcatttttttatttttacaaacaacaacaatttaccatttagtttcacctaacttgagtttgatgaaatgagctgtgttgaaatcacgagctctatgatcttatatatatgaagaacaagcaatgtacaataacagaattcagttaaagagtagcaacttttgcctaaacgcacagctcaataactaacttataaccgaattaactaacttcaaactaccttcactaacagcctacttatttgacttttcctttaataacgaagttgaatgcatagtattgtctgaatggcttgaatctatctcactaccttccccatcatccttaaaagcaaaagctttagctgtcaaactagggtgcactttgttacttgaatgtttaacaccaacaacgaaatcttgagtatggtatgtttcaatttcgctttctacttcattcctatccacactcccaaccctctcttcattgactttactcaagctcctgctaatactttgcatgttctgcatcacagcactagaagcatcatcatctttataatgttcatctcttgcctcctggccattacttttaccttcttcttctgtttgatcctccaataattttgcatcctcaaactcaattctcttgtcttcaatctcttgctcatcaattccctcctccctctctctatcatcttcatcaatcaaatcttccacttcctctggttcttcttcttccactctctcttgatcatgcccatctatttcatcatcttcactcctaccttcttcattatcgttttcttcttcgagcttaatttcttctaaatcgtccttcaaatcattctcctcttccttttcaacctcattttgagtgtcaacttcgggatggaggtcccgcctcccaagctttatgagttcaaccccattatgcatcttagctgatatcattgaggagctatctacatatgccttattcttatcatgtgagtgctttacttgataaagcaaccagaagcaaatggcaagcaacaaacatacttgaagaatatgtagttttaccttgaacccttttgacctatgatttttgctaggtgattgcttcaacattattgagttttcaaatatattcaactctaccaaatggctacaacaattggtactctccaatctgtataaagtaaagtaagaaagataagagacagagactccattaataaccacacctgaaaaaagcaaaatccacagggctgtctcctattaaaacccccaacctacacttcattactgagaaaagagccacaaacaaagttaatgttcaagtaccaatattacttaattatgcaaataaagtttttagtttcaatgctccttttgaagaataaaagactgttttccaaaaagtttaaattgtcagggctagacttt

SEQ ID NO: 2132 - DNA, 812 bp, Cannabis sativa
tgattcatgtattttattttattgtataaaatttttataaaattttaaattaatctaagtgagttatattagatcactcataagtagttagcactatcgtgttaaaaatgtcagtcgttaaaattactatatatgaagccttgttagttcgcactattggccccttacaattcaatcctagttctgccccctgcacataggtaaataggatggacaaattcgggacttaaggtttctgataatttgtatttatgttcataacaatctcagaaataatataaattagtagaatatatatgtgtagaattaactataaaattgtgttagttttatttttgtttatgcaatattaaatttattgttttattttattatgtatatattcaaagtattaattatttagtatgatttaatattaatgaaatttcttgttaacaaatagaattagatcacttactaattagattatataattatgaacaatattattatttgacacattaatatacactcaatgactcaatatatattgtgataatgtaacatcttatataagtggttaaatattaaaatgcaataatataatataacatctttgaatactcttacaatgtttgagaccttaaatacattttagtatttttcacaatcactacactttaactcgaatgacattatttcttattcattttgtcataatggtgtgatataataataatttgattaaatgggacaaagtaaaatatcacatatcaaaactgaaggatcaaaatccatatgtttttaggtcatatagttcatggaccacatat

SEQ ID NO: 2133 - DNA, 1914 bp, Cannabis sativa
agaaaaagttgcaagtattttacgatggaataaccctcaaattgtgggacctaaatatgattacgctcacagtcataaaaaaacgacaaaatatatgtaacctcttacgtcaccctaactgaacacgtgttattttaagatatacacatattaattataatgagccggaacttaaatactcaaaaatggggtttcaaacttgccaaaaaaaaaataaataataattaaataatttcaacctttttttttttttgaaaaaaaaaataataaattccaaaggtgcattgtattttgaatttaaaataataaacaataataataatttcctaaattataataaagacttgccaaaatattaggaaagacacccgaaaccacaaagggtaatatagtactataaatacacaccctcacacgcatatataaatatatatataagtgcgttacgaacaaaagcattactccaattcaaagtaaaacgtttctattttcatgcactgaagctttccaaacagaaaacacagagaaaataacaaaagatccaaaaacaaaatttctttcttaattaccttaaattatcatggtttgtagtctctctctctttctctgtgttcataaatctctttaacgttcaacattttatattgacccatttttcttcttttgattcctgcaggcgtcggagatttcgaatatcacatatgaagaggtaacaatttatttatttatttcaacagttttaagaatatttgtggtttttatttctaattgattttggaaattgatattgaaaattaaaaaaattagggccatatcataaactcacgtgggatgaagcttttcacgtgcaaatggatacctgaaaatcaagaccccaaagccttaatcttcatctgccatggttacgccatggagtgtagtatcaccatgaacagttagtattttatagctctctaagctttgattttattggttggtcaatatgtaaatatataattaaataaaatattaattaataatataataatttcaggtactgcgactcgattagcaaaagagggatttgcaatatatggtatagattatgaagggcatggaaaatcagctggcttacaaggccttgttaatagctttgacgacgtcgttacagactgttctgatcacttcacatccatatgtggtcagttttttttcttaatgatgattataatgaacaattttatttatttatttatataaatatttatgatattcagagaagaaagaaaacagaggaaaattgagatatctaatgggtgagtctatgggaggagcaatggttcttatggttcaccagagaaagcctgattattgggacggtggcgttttggtcgcacctatgtgtaaggtaattaataatactttttttttttcattttatttttccaaaaataaaataaaaattaatgtggacataataagtggggcagctgactcccctagtttatttacaatttatttcatttttgtgaatttttttgtctttataaatatatttatttttcatttgttttgacatgattttatttgattatggaccatcaaatttggatccactagtggtaggtactaccactaagcataaaagtaaaagaaaagaaaagaaaatgtaatgtagcaattagtaattaagattttggttatattgttcttaactaaaattaaggattgtatttagattgttttggggttcagttggaattatcataccaagaatgtgtcctggtctttctcctatatttctactaagtagtgcgcatttttctaaggagcttgttttatttgaagttttttattaactttggaccatcaatttttaccattaatttttatttttatggtcaaagatgaaataaaagtcatggttcacggcct

SEQ ID NO: 2134 - DNA, 2737 bp, Cannabis sativa
tttaccttcttttcactttcgggagaagtccgtgactagttttgttgtaatgcatttttggaagctagctacactcgttcatatctacttctagtgtttggttattaatcgagaactataccagatgcatgcagtaaagaaggcaacaactcttcccatgtcctcatgatggtgtccaagtcctttttagtaaaaattgtggaatcacagtcatacactattattttccacaactcgatgttgacctcaaccgccatccaatgtttggcttcttgtagattcaaacaaagcacaggaaatcattttctacccattttagatagaactcctcctgtgaaaacaaaacatgaatagaaacatttgataaactatcgacaaaataacaagtaatcaaaagacaattgttcaatgctcttaagaatctttaattttatatataaaaaaaaattgtacttgtacacctctacagtattgaaagatatcatcaccccatctaaatttggccctcagacccttgtgtgcattctaaacactgtgcataataccagccacatgtgtagacagaatgatacctctctagggaaatgtgtccagaaaaagtggcatcgcctcttaagcatataggcgcacacatctacatgctacatataataatacaaatgggctgttagaatagtaaattaaattaacaaaaaatatgtaacagtttaaaataatataagttaacttacacaatcttgaatctaattctgtcgttttaataatataattataagccaagtaggactgtaatccactagtcttgacataccgaagaaaatggttggggatggccccacacaaccaactacgaaaactatttaacaacctctcatatgatgaactgaggagattaaacggcgcagaagaaggcttaagtttttttcttcatcttagtatagtccttaaaccaagtaggcttgtttctcttcctcctgtcaaactgaatccccactggtagtccttctaaggccaatacttcaccctgtgactggccaccttcacccggtaactggctatcaccttgtgattgattgtcacttatggcaacaatagtggcatctatgggggtacatggttcatcatcgacataaagatcataatcgtccgggtacatgtcaacatcttcttccatgggaggtgatgcatctcgtgcctctgctgctggatatggtgttggatccgttgccagcttcttctacaatatactcaaaatagatctaagctgctccatcataatgttttggccagccttcaattctaggtggctaatctcatatgcctccttcaactgtgcctgagaagtgtaacgacccttctatttagattcgatcctatccaacctctccaccaaatcttggtagtcagcacggtcgacacctgaagatgatgtaataatcttattaaatacattgaagtctctatatgtcacacgacctgtaaaatagttaaagaatataactttaagctttggaggcatctacaaatgataaaagaaaattggttaaaacaaaaaaaaaattattgataaactatcgataattaaacagatcatcaactacgattaaaaaaactattgataatctatcaataaaacatcgatacccaattaacaactaaacaaacaatcaaatggaaaaggcaagacaaaaaattcgatgaagtattgatactctatcgataaatactgaattgacaaaaaaattgaaacaaatcagactccatcaataacatatcgaaaaattattgataccataccgataaatacaatatatctcaaaataagtgagacaaaccaataaccatcgataaacaatagatataatattgataacctattggtaaataccaaattgacaaaataatcaagacaaaacagatattatcgataaaatatcaacaaaatatcgatacattatcgataaatactaaattgacaaatgattcaaattagaaactatcgataaacaattgatattgtgttgataacctatcaataaaaaaccaaatgtataaaataatttagcaaaagcataaacaatcgatagagtatcgataaaaagccaaattaacaaatgaatttatggcaaactagaaaccactgataaatcataaatattgtatcgataacctatcgataaacataaattttttaagaaattaaattaaggtaatattatcaacaatcctatgaaatctatcgatattctatcgttaacctatcaataacaatgtaaaaatttacagcacaccagaaacaagccacataatcaacataatctaaaaaaaaattgactaatctcacaagaacaatgacaaatccacaactaaatcacaagtaatcaaaagaatgaaaattaatactctaaaaaatcaatctttttttttttataaaaaaaggtaccttttgggttctcagtggtagctatagcgaaggcgattggacctatggacagagtctctctaacattggagaggacgagtgtacaagatggtcgttgttcgggtcgcagggagctctaccgaaagttgggttcgagtccgtttgggttgccagaagttctacttgggcggatctatttgggtcgggtgttggagagagagagagaggaatgaggagggagaggatcgagtgtttgggtcctttttgccaaatgcacgttaggttctcggcgtttgtgttgggttttgtgcccta

SEQ ID NO: 2135 - DNA, 2688 bp, Cannabis sativa
ctgatgtactgtagtgtacaatgaatttgttgtggataaacacaattggataacatgcagatctatctgtttgagaaggtacaatgtcaactagggtgttagtggtgcggtttttactattttttttaaattaacttgtgcttgcagtttttttaattttctaaaatgcatctgtaccgctaaactaaaaaatcacagaaattgtctcgttaaaaataatgcagtgcggtgcagtttttgcggcagtttttgcggtttagactattactaaataattaaattactacaaaaacaacaaagtttcagcaacatttgttaaaaataccataaaatttaaaaataaatatatatataaaaaaaataagttttaacaatacaataattagtgggttttgagttgaacattcagatctaaataaatataaatattgaatttttgtaatgtgcggtgcggtttgaattgtatattaacaattcaaaatcacaaaccgcactgcactacaccgtttagggaaaatttaaattgcgatcgcatcgtaagaaatttcaaatcgtattttttttaggggtgcagtacggtaagcagtacggtacgggcagtttaatgtgaactcatgatttgtagttttctttctttcaagtttcaatagagtatcttttagtttctttctccctagttttttccgttcgagatgacttaaaagcaagaatagtgaagcccaatttgagtttgaccataatcacgtcgtaacctataccactagaacaattcatctatttctttaaatataataaaacgtacgagtccatgaacaacctcaatgtgtaaatatgtacacatgtcaaatttcgttgatttcgacagatccaacagtttgattaagattatgaataagttcataaaataaatttgtaaatgtaagctaagatttgataaacaatagttagagcaatagccactatgagttgttgattaagagaaatagtcttctcgtcgaccgtggttgatctcaagtttgaggtgattgtgggaggagagtacaggaaagccattgagatataatcttctttctcttctttaaagattggccttccaattacatgcttatactgtccaccactccaagtctgcaataagagaaaataagaaaaaaggaaaagcaagacaaggtaatgagtttcctgttggcatgttacataacataattatattagcgcaaaagtgtcatcattttctactgggaagcttagccagcattctacataggtggcatcaactataaaaaaggtaatggaatcatgattccgggtacaaatttaaggataacttattaccataattgcatctgtggtttcagaaatgtaaagagtcctttttaactttcctcatgaagtgttggtaattattgttaactaggcaatcaagacgattttagtcattagcacgtgctgtttgtaattatatgtgcacttaattactcaaacaaaaactgagtcgttccaaaatattatatatccacagtgaaaagaagtttcttctagctataccaaagttttattattgctaaacaagaatggcttaacagcttgtttatgaaactaaaattgaatttgaactaataatcttgtaaaatagtataatgtaggcataggaaagaaaaataagagattttacctgtaattgatctccaattgtgatgactaaagcatctttgtgaggaatgaaagaaagccatcctttcttggagtagacgtgaaactcggaagtgccaccacaaaaatgcaaagtaagagcatgagaatggtcatttctccttagaagcattctaataacttcatgcctcacagactcagcactactatcatcattaccatagctttgactatttttataaagacaacaaagtgttcctgtaatttcgtgcccttgccaaacaatatcattcccaatcccaaacatcaaattttttctttgaggattcttggtaattattattgaaaatactttctccgcaaccattgaaattttggataataggatttccattcttttgctgtcagtcacagtcacacacaaaataattatatcaatgtttataatacattcaactaaaattaagttgcttaacactgttaattatttgataaataaaatatttatttaccaaaatttggaatatccacttggccgaattccctccataagcagcttcaaaccttcatccgtactccaaacaaactcttcactgaaatcactttcactctcattctcactctcttccccatgaacttcctcaaacccatacggcatctccggagacctcgtcaccaacgttctcttctccgtcggaaccgcaaaaatcccggcggcatcggcctgcaccgacctaacgaactcgctggaaattccgtgattcaccacctgaaagtagccaaaatcggctactaattcgacgatcctcgaaacggtgtcgcattcatcggaaacgagagattcgaaatcgatgatcggaggagcttggacgcacctctgcttggggaaaatcttgtccggcaatataaggtccggaacgcggagcgagtgctcgagaaaattagtgagaacagcatcgtgcgtaacggatgatcgacgtccggagtggatcggagacggcggcggtgctcggaagttgatatggttatcggccg

SEQ ID NO: 2136 - DNA, 1693 bp, Cannabis sativa
ggaaatggggtctccggttatcattctggacatggatttgaatatgtttccaatgtatcatttcagtggagttcgtattctggaagttctgttggagttatgggtcctactggaccgtcttctgtagcccctgatgctatttatcacacccatggaaacgtagctggagctaagttaaacaccaaagccaatggaaagcgttccatgaaaaatgttggggctaatggaaatttgaatatgcccactggtggttacgattcatcagggtcaaaggtcaacaaacttgataagagaagaaaacttacagtgtcttccagtttccgcaatggatatgacgaagctgttccaccatctgatttggaaacaaaaatggaaaatgggaatgcaagtagtgtgcctgatcataaactatctagtccagttgaagttctgaataaacgatgctcggcagcacctgcattcgatgctagaaagctgttgattgagaaggcaaggacagaaattctgaagaaattggaagagattaagttggattcaactgcggaacccatagttaaaaagtcaaaagcgctatctgaagttggtcaagctatggtagctaaagaaataaccgaaaaagtggactcagatgcttctgttttccaattaaatggacgtaaaactgctcctctctctattactgtacctgaccctgatttccatgattttgacaaagatagatcagaggaatgcttcaagccaaaacaaatatgggctctgtatgatgacgaagatggtatgcctcgtttgtactgtctgatacgtgaagtgctctcacttaatccctttaagatccttattacttacttgagctcgaaaaccgacagtgaattcgggttggtgaattggctggattgtggatttaccaagtcttgtggaaatttcagggcgtacaactctgatattgttgaacaagtcaacattttctctcaccttttgagccgggaaaaagctggtaggggaggatgtgtgcggttatacccgaggggtggagatatttgggctgtgtacaggaattggtcaccagattgggacagatcaacgccagacgaagtgaggcaccaatacgaaatggtggaggtccttgatgattactctgaagagtttgggtgttgtgtttctcctctcgtgaaagtcacaggattcaaaacagtatatggcaggaactctgacaagaatgccatacgatggatcccgaggagggagatgctacgcttttctcatcaggtgccgtcgtggttgctcaagggagaagagaatgatttgccagagaaacgttgggatctggacccagcggcgaccccagatgatctgcttcatgctgctggagaggcagaggcttaacacactagaagagcaggggagcacaatttacttggtggggaatgtcattttagcattctttaaacaaaacttaggtttaactgtacaaatatgtcacactttgggtagagaccattgcaacaattaggcgccggaagtggttttagagggtgtcatgtttttactgagtaaaaacttatcattagattttataaatttattgactgcttgtttacatcttatccccttttcagctgttgtaagttgtaacagttatttagtatatcagattgccaagtcaatcgtgactttaattttttgtttttccttt

SEQ ID NO: 2137 - DNA, 5862 bp, Cannabis sativa
tctaatgatatattggttgtacttgtacattgcttgtaagtaagtttcactttcacattccctgtttgagatagcccgaccccaattcatattttgtgttttatgaacgcagggccattcaaattaaatggagttccattgagacgtgtgaatcaatcctatgtgattggaacttccaccaaggttgacatttctggggtcaactttgataagtttgatgataagtactttgccaaggaagctgaaaagaagaagaagaaaggagaaggagagttttttgaggcagacaaagaggtcaattgtagtttccatcagcctttattagtattttgcatagacttgaatgcactgcaacattttttgtcatgatttttttttctttgatttctatcatatattctcttgcgtattttccatgaaacctgctctactcatataatttttaataaccctttcaattcatgtctttacaggaaaagaaccagcttccacaacaaaagaaagatgaccagaagtctgtggataccgcattgatcaaatcaattgaagcagtaccagaactgaaaacctacttgtcagctaggttttctctcaagtcaggcatgaagccccatgagctagtcttttagattacaggatatttctcacagaggacaattttctgttctggactagtttgatttaaattataagtgattgtttttggatgtttgctgtcaaagcacaaagtttttgtattgaactggttaaatttttttatagttcgtaaccttgatccacctatatattcagatatatacttttcttgcaatccactctgtgattcacaaccacattgaataaattttcacatcacctagatatagcattcactagtgagcagcagccattgctggtgcccagcctgattgtttattctgaatctgattaatttagaatattttcttatgattttgtcaacagcacattacaattatttctactctttttttttttaattctcatacacaccaaccaaaaaacaactactagaagaaaatgaaacaacaaataaagaaagaaatgccagagttaatctcagttaaaacaatgacttcgaaccaatatctcagagcatactatcagcacgagaaggcagtcttctgaagaagttgcttgggactgaaggcaacttactcctaaatctaggatgacgaagccaaaatatcccagcaaccagagcaacaatctgaaatggtgtcacataaagaacaatggctgtaatcaaacagaagattatgtacagactggtggcccttggatctctccaactgagcagagactgaaacctttctccttgagttgcaatgtctcccaccacagtctgaatcctcccagccacacttcttagcctgtcgtatctcatccgagccacgtcttgttgctttgaagttgggaaggtatcaaactcctcatctaactcatctggatgaacagcttcagcccatgaaagctttgtatccatgtgagaaggatgccttggtcgacagcgaaaattccatattccaatcagaaacatgtagagaaacatggtggggagaatcaattctgggtaacaaatcaatatgaagaacaagatatgaaccagaatagttgtcactgggttacgccattgacagacctctcctagccatttactcatggagatagcaccagagaaaagggaaacaattctgaagaaattggccttgcttcttctcatactccacatgtgtgaatccacatctaacatgtactccaccacctctttcctcaatggcggctcagctcgtccaagtctcactgccactatggtcatggcctgatatctcagactatccaattggttcactgtaaatggatgaaggtaatgcatttttggcagtaaagggtgcccgtataaatagattatgttggccagtgagagacaggtgaatctaacggctagttgaagctcccccattttcttcaaaccagatggttgcagaaccaaaagtggatatgagttggtataaattcgatccatttcgagagttgaaagtcgaattcttactttcccaattcttgcatcggctggtttatcgtttccaccaagatggcagttgtcgaagaccccaatggtgatgacagtacaaggatcataaacctcccaagtgtattgttcgttccatttgggatttgaactttcagtgattgttctggttcggacccatttttggccgtatttggctacgcaataagcatccgtagctcctttaccgtctctagttttcatttggagaagtccttgagcactcaaaatgcccacttcgagaatcccaattggttgcttccatagctgccgagctgttggtctaacatcacttatgtacattgttgactcgtctagcacatggtaagctccttctaggcaaactctgagatgaagtctacttgagaatttaagctcatgcctcttatctgcttcaattactccaaagccaaacctttcgaggttgaaccaacgagaatggactggccggtgatccagtcttcgctcgaagctgtctagagttatagtagtttgtcccattacttcgtctttagcagaggtgactttgttttctactgtgagtaccaagtgttcttcaaatggctcagctgcaacaaagagcaaatcttcattccacattgggttggttgttctggtttggcatagctttgtcttcagtatttggtttcccacttgagctttaacaaatgcttggggtggctgacttctgtctcttggctcaacatcctgagcctcaatgatgttgactcttaggtaccatagttttggtgagacataaacttttgatcggatgttgtaaactccttcaccgtgaactgaggctgcgtctgagtgccatgactcggggaaagcttcatcagcctgtgtgcccatccatactgctaacatcacctctcctctaactttgatctctctatggcggtgctctaatctgtaccactgaggagccaaagggctgtctggtgggactctggtgggtacttcatgcatgtcaaagaccaccttccctatgtaatcatctctagccaccatttctttgtctcgaacataaacttctacagcagaggattgaattttctctttcgagaaagcaaaaacttggttccataaagggtttgttttcttctcaaagtgtcttgttttgcccttgtagtttccaaccttgacctcaacgtagggatcacagtttcctgttacagggtttgtgggaagatctttggctttcaccactcgaacatagagatagtacatctgctctacgagatcatacgtgctagtagctctctcgctgcttatccacccgcctcctccacgcactcctccatgaggccatcgttccccaagttgtggcttcgtgtcctttagcttataatcctcagcatgacttgcagcagcttgtgaactcattttcccaaggaagaaaaagctttccttctcaatgagttagctactggaaaagcaatgagggttcaagcttagaagaacactattacttgatgtagagaaaaacaaatttagtggtaatgttagtagaggaaatatgaaagaagaagcgagtacatatatttgattcccctcagtacacaacaaaagcttactttacttgtagaaactgttgtttatcttcactttcattgagctttttttgcttttgttatataatctttatagtgatttcgaggaactttggacctttgaggttggaaaaagggaaatgctagagttgagtacacagactattatgaagggtctggtttccaatgctaaacctttacagccaaagttaaaggatgcttctcttttttcatttgaggttgcactgtaagcttctccttctaccactttcactacaagcttcatattaccttttcagtcggtatatcattaaccaaagatatcaatatcttttggcaatattacaacccatattatattaccataataaacaagaaatgttgtttataatgtgtagaagattagtggtggaaaaaggaatctgctttaattaaaaaaaaaatgcattagtttgtttaggctttgacaataatatagagcacaaagtataaagaacacaagggtgtgtagttgtcgaaattccacaattctgtaaaaagaactatattgatgcctgcccccccacttgaaaagacaaagagagtcttttgagacttaaaaaaacactctggtttactttcatagattctttttgcttttgcatttgtgttaatttgtttataatgtatttgtaagaatgtagtgcccattttgccccttcctatgccttcctagttttgaagagtgaagaagtcattcagtgcattctggtaattttcttttttgaacaccattaattttgttatgagtatggccaagcagagttataagaatagtaaaggatatatcttaagagctataaaagcattgtagtgagcttaaaagaaacgcaaaagtgttttagaaaagttttaagggtaggtgaccttgctcataaaaatgcctttgtcctttattctcctcctttattccctcttggatatgaatttttttccttttctttatgtgaatgttactttcttttttccataaaaacttcacaaatttcatccttttaagtgtttgaaaatttgttggtacaaaaaacagacatagtcgagcacaagacaaatcttagcaataatagcttcttaagtttaaatgagttagacacactcatttctttagagagatatatgtatttatacatttaacaagaaagaaaagaaaaaaattaataaatacatgacttttccttcctgtttaccaggttccatgttttgttctgttgagtaaagaaatggtgtaggttatctttttggcttcactatatgaagatagtgcttaaagttagaaagatacagtatgactaaattatattattgggttaatggtgagtgctctcattatttgtttttgggcatttaataaaaattagttccaacatgctcaaatgtcagatcagaccagttggtgtaatcatgaacatcataattggcccccatttacttcatttttgtcataaaataacatcataaacatatgattggctaatcaagaaatggtctgagactctgaaacgctgacaagctgttagtcaaaaacttcattgcttttttttatgctttcttcctgctattatgtactttcatgtatataattgtgaacttacatttcatcatgtctcttcattgaatacccttaaaaaatttctgtttttttttttggttaatgcttaaatagaagatgtattttcaagtagtttctcctcgtgcttattagttcaagtagtttttttttttttttcttttaaattttttatttaagcgtttatatatttctaacacatacaccgttttatgaccatttgagttagcctcaagtgttttagttaagtagtttcaatgtgttggtttcattgctttagataaggctgtattttcttttttttttttttttgctgaaagatacaaagttgtatatatttaggtttttcaaatgagttcatcacagtataacaactttttttttcttaagtttgcagtttttacattaaaaaacaatgttttaattatttgttgagtcagtacactttttgttttaaaactatccattatccaatgtaggaatttattactatcacttagtacccattttaacgaagtttgataagtatcagagagcattattgcacaagtatctgatgttttaagtatcagttgatttggtacgtactcagtttttcttttttttttttt

SEQ ID NO: 2138 - DNA, 1842 bp, Cannabis sativa
acaagaagtacaatttacataaatgttttcccaccatgtgaggcacgtgcttgaggcacaaacaccttcttaagtgcaagtgtatcaatgtaaacacttacataaacattagccaatagtatttgttgttcaatttttttctttcttgcattgagattgaagacccataaatataaaacagaaatattcgaaaccattaaaggccaagcaagaggtatcccatcagctcaaaactacattagttttctactcatacaactcgttccctccactcactcatatcggttaaataattatcaaaattatttgttcaagctagaataaggctatatatatatacatatataatatcctgaagtaatttcaatcgtaaaagctcccatagtagcaatgaagaagagagactcaactaggatggtgattgtgatcagcctggtgttggtgttgcttttcttcttcatcattttgcagataaatttcatcccaaattcgacgtttgattacttaaatttcactcaatattattcggtcaataactctactcttcaaggtacgcacacggcacatcaccgattatgctttaattttcttttgaaaagtctaccataatactttgccaactatgtgtagaggaattttctcaacttaattgctctttaatttcaaccacaatcgatcaataatcaaatcaatagactattctccttaaaattattaaataactgcttcgtagtggggttcaattaatctcttgtagactccatctccaaatatggacttttatcaaatcgagttctctctagctgtttatagtaaagtataaattaataattaatgttctattcatactattgatagaagcatagccaggttaaaattttaggaaacacgaataagctaactatggtctttgattatgttgagctgatcgtgcattatgttgtatgataacaaagaaatagatagtgatcatgataattggcaagtaggactcgtttcatatacatttatttaattaattatttttatctatttttggaacacgtagatttatttatttcaggtacgtaataccaagttcttaatgtttggtgattcaaaatcctagaaatattataccattttctcacatggattccctttatcgtgccaaatttgatataaagtatggcatattggtcaaatttggcacatacaaatcagttttatctttcaattgaatctataaccgctaattaatattgtttattgtaatacgtcaaaaaaatattgtttattttaatattgaaaagcttttactttacttcatttattatttattaatattatatactaataaataactcgcgctttgcgacagatattttaaaaaatatataaatttttagataaaataaattatactttttatttaatgataactaaattttaaaattatataaaattttaacattactaattttttatagagcttatagaaggcaccacattattgccctatgttttatcctttacataggtatatgtgatattagcgataaagccacctaacattatattttttaacatttaaccataaaatcaatttttcacgaactacctaaattgcacttttgttttggtcattaccctttcgtccaaaagtctctgttaactggcacggtggactgcccatgtatacacaggtgtacttgtatcatatttttagtggtccacataatattaatgaaaaaaataaaattttaaaaattttaaaaaattagaaataaaaataatttttttacttttactgttctcttttttatttgtcttcttcatctctcttctttcttcttcttctga

SEQ ID NO: 2139 - DNA, 2502 bp, Cannabis sativa
aaaataaattttaaaatagtgttgggtgggtataaaataaaataagcacatgtgtaagtgacgttctgaatcttatttttgatactttaaatgatttgaaatttttaaaaaaatagataagatacctaatataactataatgtatatcatgttataaaaaaattggattttaatttttttttatatacaaaaaataaaaaatactactaccgaaaaggcaaactgatacccctaccttttaattttccatagttaggacaaaatgtaaacttgagtaaaaaatatgatcaaaaataaaacaaaaacagatagatggtcttttgaaaaaaaaattaaatcatatcttaagttaaaataaaaaaaaaatatattatttattaagatattttattgaaatttaattttgagtttttttacatgcttattctcatcacttttttattttaacacttttaaaattttcttataatgtattttattagtaaagaactttgtaatttgctaataaattgaaatatatgaggaaagaaatttgtattgataatatgtcttatgaggaaagaactttatgtgtatgtcatttttgtctaatattcgtgcatgtgtttcctaaaaagaggcttttcgaacattaaaattctacacataaataaaaagtgggttgagctttcaccattagagttttaattcaatagctttcaacaaaaagttttgaattctatttatttacaaccccagaaaaaaagaatatgaaaatgagaccatgagcctgattcttaacttagtcaccatgaattggacatgaaaatttttgagtaattcttcatgaagctcatatgttttgagctctgaaaacaactatataactcacaaacaagactatccatccatgacatatgggctatgtgagtagcgtttgctaatggttattgaaactatgctaaacgttttattttttctaaatgtatttttgtagctgaaactgcaaagaaacaaaaatggactatgtaaatgcaccaggaaggaaccacctctttgttccggggcctgtgaatatcccagaatcagtcctccgagcaatgaacaggaacaatgaagattatcgttctcctgctattccagcaatgacaaaagctctccttgaggatgttaagaaaattttcaagactactagtggaaccccatttatgatcccaacaacgggtactgtccactacgaccaatgccatatcatattaattcatcatgttttgtaaatcatttagaagatcacaatgtgtctcttttattttatgttttaattaataataggtactggtgcatgggagagtgcacttacaaacacattgtctcctggagaccgaattgtatcttttctgattggtcaattcagtttgctctggattgatcagcaacagcgccttaagttcaatgtggatgtggttgaaagtgattggggttgtggtgccgacctagaagttctggaatcaaagcttgcagctgattcttcgcataccattaaggctatttgcattgttcacaatgagacagctactggagtcactaatgacttgtcaaaagtgagaaaactacttggtaagttggatcaaatcttctcttgtaaaacaaacatgattagtttaattctctagatgcatatatgttatgttttaattgctcacattttgttgaaatctcagatgattacaggcatccagcactcttgcttgtcgatggggtttcctccatttgtgcacttgattttcgtatggatgagtggggagtagatgttgcattaactggctctcaaaaagctctttctcttcctactggtatgggaattgtgtgtgctagccccaaagctctagaggcaactaaaactgcaaaatcagttagagttttctttgactggagtgattacttgaagttctacaagatgggaacatattggccctacaccccttccatccagcttttgtatggactgagagcagctctcgatctccttttcgaggaaggacttgacaatgttattgaaagacataatcgtttgggaaatgccacaaggtgaatcaatttaactctaaagaagcatacaatagtctgaatatctacgcatgttttgctaacttttatttatgatcatttgactacattgcataatataggcttgctgttgaggcatggggtttgaagaactgcacccaaaaggaggaatggtttagtaacactgtaactgctgtggttgtccctccttatattgacggtgcagaaattgttaaaagggcatggaaacgatacaatatgagcttaggtcttggccttaacaaggtagctggaaaggtcttcagaataggccatcttgggaacctgaatgaggtactgtacaattttgactactaatactattggtgaatgattaaggtcttttttatttagcttttgcattttatggttaataactgttgtggacactggcccacatagaataaatagtagaga

SEQ ID NO: 2140 - DNA, 1851 bp, Cannabis sativa
acactttgataccccataactaggatcgagtttcaaatttagtgtaccgtaagaaaaaaaaatatatatatttttgggctcttacttataaaaaatatggtatttttcaaaattaataaaaaaaatatatatttttgaaagggattttttttagactcctagactaggtgagccctaggctgctcgtattatatttatatatatgattaaggaatcattcgaagtatattaatttgttgattaataattttttctatatttgtaataaaatgcagaacaattgatagtatggcagtgggatatgctaaaggaaaattgacatgttttctaggtgatttggagtccattgttgatgttgtaagtttctattttattacataggaaattatatttttatataaattaatatatttacatattttttttctttattaaggtgtttaattgtgtttgttagtttttattttcaaaatataatatcttaaaaaatttaatctagaaaaataattgtgtagttagtttcgtaatactgaatatgaatttacacagattccagctgattacgtagtgaatgccatagttgtagctatggcagttcacgggaacgatccttacttaaatagaaaaatctatcaagtgggctcgtcgatgagaaaccctgtgaaataccgagaactccaagagtttgggtatcgttatttctcaatgaaaccatggataaacaaggatggaaagcctatcaaggttcaaaaggttacaattttgagtgacatggaaagcttccaaagatacatgaccattcgttacttgctcttcttaaaggtaattaatcatgaccattcattattaatctttgatcatcatatattgtatataatatattattaattaattataatatatatcaacatgtttttgtttggtttgtgatgaaaattattagggtttggaattggtgaacaatgcattttgccaatattttcaaggaacatatcttcatcttagtagaaagattaaatatgttatgagacttgtggagctataccgaccttacttattcttcaaaggagtgtaagtatttataatatatatatatatatatatttatatagctatagaaaaaaaatgggcttaatttatttagaaaaaatatgatatttttcaaaaccaacaaaaaaaaatgtgcaattttggaagaggaattttcttagacctggactaagtgggctatagacataagtctaacccgtctatacctaagatcgtagtgtatacatgccccaatatacattataatattaaccaacacatcattattatatatatttaatttgtattgtatactgatatatatatatatgtatatgtatatatatgcagattcgatgacataaacacagaaagattgataatggaaacgaaggaaagtgggattgaaacagaaatattttacttcgacgcaaagacaatcaattgggaagaatattttctcactgttcatgttcctggcatagtcaaatatgttttcaaatgatatataattaattaattaattcaaattgttttaaattatattataattattattttataaataattaatattggtttattgtgaactcaattatattattgtttatttgtattaatatcttaattataaatttaatatatatacgtctgaaacatatgcatgcatgcatgcatgcatggtacgtactacgtgctaatattgaatgtaatctttgtcttcataaatatttatattcatgtatcatgttgtactacaaaattaataatatattattgtttattcaaattagaaaaagtgaatgttaaaatattgtgtgt

SEQ ID NO: 2141 - DNA, 1203 bp, Cannabis sativa
atgaaggaaattcaatctggcttcccttcaggtacgatcgtttgcctttcatgtgttttaattgtggttgtattggtcatgagatgagggtctgtatggaaccaatccgaagggttgcagctgagactggtgatcccacacatggttttggaccatggcttaaagtggaggataagaaagattcaatgaatatatttgggaaggggaaattggcataaattcagttaatgggtcggtgaatcctggttctggtcttagtggaacctcgacatttttgaataagcctggcggggcaggaagtggctctgtttctaatagtggaattccttcacaatctatccctgctatgtctcccagggatgttggcgtagatacggggcttatgtcctcattaaaggttgatgtttcttgtgctgatggaatggagagggttgctgagaaaactcttgataagatggatgtatcttcaatttctccagatcgtatggtgaatcttaaaagaaagggtgtttggctggatgattcaatcagggatttgtcttctaagccgaattctttgatttgtcataatccctcttctctaccgaattttccagctgaatgttctttggatttaatggctcttcatgatgttcctattatttatgagagtaatgttattttgggagaggggaagaataagagaagaaaatcgaattttgttcgtcttaataatattggtagtgctatttcagaattggtttttgctaatgatggatcgggtatgaatggttacgctgattcggggaaaatttcttctttgcaggatttggtccttgatgttacttcgaatgtggcgaacccaaaggagttgggtcgccgatcgtcatgaatgccctattttggaatgtccaaggacttgggaatccttggacattgaacactcttaaatcccatgtcaaggaacatcatcccgggatgattttcttgtccgaaacaagactttctagttctgcaatggagacgattcgagtgccacttgggtatgatggttgttttacggtgaatgctaagggaaagagtggtggtctggctcttctttgggtggattcggttaaggttcatgttaaatcctttacggtttctcatattgatgcgttggtggaaaacgatttgggatttcaatggcgtttcacgggattctatggtagtccggatccggga

SEQ ID NO: 2142 - DNA, 2000 bp, Cannabis sativa
gacagtgataatagttgtgattgtggtgtaaaggtggtggtggtgttaatggagattgtgtgatggtggtggtgttaatggaggtggttgtgtggtgaggaagaatcagggtaagtaattagggtattttagatgaagaaggaaaaaaaaagaagaaaaggaaaaaagaaatctatttttttattttttaaattatctttttgaaattttaaaataatttttattatatttaaaattaaaattacgtggaccactaaaattttgccacgtgtcctcttgtgtacatgtaaattaaaatagtacaccataacacttaactaaggtgtttggatggaagtgtaaaaaacaaaacagaatgtgagtttggtaggttttgccgttaaaaaatcaatttatgtggttaaatgttaaaaattatattgttcggtgccaatatatcaaaacatgttattagtttttcctccctaattcatgttcgtacccatgaatcatgtgtacatgcacttaggtggatgttaaacgtaattagatggaatatttttatcttttcaattgtatattaaactctgattattataaatagaggttattttttttaaataaagtaggttataaagctaaatattatacattttattctctctaaaaaatcatctccttaaacactaaaatctccaattctctaactctaacaattgtagttcatttttttattttattcctaacctgaaaaaaaaaatttgactaaaaacagtgaagttgattgatcatttcttcaaaatagtatttacttttttttccctagagcacctcttgggtctaagaactatttacacaaattttttcttcttcttcttcttttcataattttatgattcaaccaataactatagtattgactttctttgaaattctaatatgtattttacttctaacttatgctctaatagctttgaacattacacttggtacttgaaattgttgatgccaatatgcctgattacgattaatctacatatgatgaactaaggctgctacaatagatatgtgaatctacttccgacacttcaaaactttacttcttcaactcactttaaaaccccacagactatcatggcatatgtcctcctttacagccaagtcttaacttcctcaaaacgtcaagtactgacaatacaactgaagaacaagtgttaaactgtctcagcctctttcccacacaccaagtacagattgtaatcaactatattcctcctctgcaatttatcttttgtgtgcaacctgtcaagcataactaaccataaaataaacttgtgttttggtatgctaaacctctcgcaaacttcttttcgccaatctactttgctttgattttgactcaacttctcataatcccaacaaatttgatacactatggaagtgaaggtttgggtgtctatgcaacttttaaactgatctttaattcatacaatttgtttccattatcagttgcttatgattggggtgctgtaagcccactagttgggatcccccaagtacacattatgaatccatttgatccataaattgtcttgcttcgatgcaatagcccaaatatacttgacaagtggagctatattccatattataatgtctcgaaaaccaagtctcccagttgacttcgtcaaacaaactttgctccatgctactttccctgatccacattactttgctatccattttcacaagattgacttgcatatagaattgatttcttgcaacaccttcttttggtagaatcatgatttgggaccaataagtgtgaatagctactagaactaaattaattagagtagcgcttcctgcaaaagacaaattacgtgtactccatgctccaatccgtttaactattttgtcaaccaaaatctcacaaccagctctagataaatgcttggcacaaattgggacccacaagtatcgaaagggaatctcatttttagtgtagccagagtaatctaaca

SEQ ID NO: 2143 - DNA, 3692 bp, Cannabis sativa
cgccgtgtcggctgccggtactttactttccggtgataccgaagacgagcaagatgccgaaactgcacccttgccacgtaggcacatacggacaacgccgcaagccgtctcgttcgacaccacgtcccagagcccatcgcttgccaaaatcagacagtcgtcgtccgccgtccgatccgtgatcgtcacctccggctcgctactcacgtatggttttaggtagttgtctcctgttatatcaataatatcataagacaagaattaatgctaacgtgagccgtgagtgcttaagaaatttaaatttataatccattttctgttttacctatggctcttgacatggctaggactccgagaacccgtgggccatcccagtagatgacccgaccacccgctgcctggatccgactgagctcgtctggacgatccggctgtggcacccaaaaataaaaaataaaagtcttttagattaaataataatgcaaagaaaaataaataaataaacaaggaaagccgctgagctggaatgatcagctgattgtaacggattccaacggttatttttcttatgatctgaagaatccaacggtgagtgttaaaaggttcacggtaagacaatgtacgcgcacacaatactcaatgtctcgtgatcattcatgagcggtaccgtttgttcacagagaattaaaaagaaaaatctatgaaagcgctaaaagagagggaaaaaagagaaagggcttattgaacctaattcgattaaaatttgaactgaactaaattccattacgttatgggtcatagagaaaagtgatcgagagaagcgaaccttgtgatcagaagagagaggaacagccgtaccattacgacacagtacggctctggaatcgccgcagttagcgacgatgatcttgtcagtggtgataactgcgacaaccgccgtcgaccccactgcgtcgcactcgggcgtctgcaactcgcacctgcaattcgatcccgacccactgccgttccacgcaatcacttcgtcgtccatgcgaaaaaagcttcgttccattgtgcttttccactccgtcgagttctccttactttcgagctcctctttcacgagctcatgcagtcgctctcggcactttgttgccacctgatcacgagaaagaatttttgaagaagagaaaagtcactaactaaaaaccaaacaaatttaaaaattaaaaacagaaatgaaaatgaaagggaatatatcgcacatgagagcaaccatggccgtcgtaaacgccaaagtaatgtaattccggcatcgtttccttaatccggcggaaaaacgaaggatagattgccaaagcatcctccatttctcttcgtcttccgcagacagacgcgaacccaaacttgggaagtttacttgaaatagttgtgggggtcaccgcagaaggagacgaactcgacaatgagactgagatcttctcactattatccgaatttcctgaatcatacctctcttgttccaaaacgtggctcaaaacagtgttctcacagtctcgggagttagctttagagcgtttttgttccctctccgactgcgtatcagatggcggagagcccacaccagtaacgaatttgtaccttcttatctccattcttcgtctccttgccgcgcgggaactcgactcgcccggcgttgagacctcttcttcactcactaacccacaacaaatctccgccatttctctcttctctcctttcttatatagcacaaatacaaatttccgagtaaaatgaaaaaacttctcgaaaccttttgccccttaacaatgatcaaaatttaatttcattaaacactcatttcaattttaatttttatgaaatttttttagtcattatttacgtgacaaaagatctgaggaaacgctcgcgcgctcatgagaaaagtttttaaggactcgttccatggatacctttgtacgcaggtagagggagagtatctctcttttttggcattttgattgctacgggcagctacccgttctaggcttgggcagttgtacagatatgtgctatagtgcgtgaccgagtgctcttctgcctaaataacacatctccaccgttcatcaagttcttcatttcaacccaatcaaacacgtgtatctcctgcttcgggtcacggctgtgcgtggaccaatcatatttacagattaccaacagagtaaatttcctttatggacacgcatgtggtcctttgagttagtttccagttcaaattttgatcttcatggatttttttagtcttctccaccacgtgtcctcatcctcatagactgagccacgattttcaaaacaaaaatataaaaaaaaaattaaagtaccataatttattgaagaaaataaaaatacaatcattcaagggaaaaaaaaataaaattttaaactttattcccttctctagcattgtggtccaatcaaatgctacaacgtattggtttttcgattgagacgtatgggcccagttgtctactttgttgacgcatatagaatatctaaaaagagggcgtttcttctctcattcgagcttcttacacgtttcaaccttataatgatgttataaatttaatacagcctaaataaataaataaatagatatttatcaaaataaataaatgaaattaattaaaattgaagtttcaatttaaacagtaataaaaataatttctttcttacacgatacaaaaacagtcgaattataattaacagttaataaatcaggagtcttcacacgtggcgtatagatataggataacgtggggagtgacagaaaggaccgtacggtgatgtggggccacgtgcgaataattcatagaccgtaagaaggtctccacgtgtaaaatcttgctggcatgcaattgtactaaaaactgaagcgtgatgtagacaggaggagcaaagtcatgccacgtgaccacaacaccgaaactataattcaacctaaccatagttaagttactttttcaccctcggggtacatgtgtggttaacttaagccatcactctcttgtctaatgaaatgaagctaaaaggtttaacaatagtgctcattctattttaggctaccgaagcacagcgagccattccgaaaaaataaaaattgaaacctaccttttcctttctgaggaggccatcgtctaatcggtcgacacgtgagggcgaggtaggcttacgtgtccgtctgagaacgacacgttgagagaagctctactgtttggttgaccagaaaaaaatatcgtagggacctgggaaaattggagaggttacgtggtggaaggagaggcggtgagatcggcacgcgcgaaagatcgtggcgggcggaggcgaagggagtaatggcgcgtacttttcagagcttaaatacgacacattaaaaataataatatatagtatattgtagggggtgtgtttgtatattttctgctttcgaggctgtgtgatctggcgatttatttttcagatacattgttttcaaatattctgttattttgttctcggttatctgaatttcgggaatatatatatatttatggatatttatcgttttggaaatgaataatatacaattaattttggtgttgcttttttttttatcataatctttgtgaattttatacgacagattatgaatgttgtatatatgttaaattcat

SEQ ID NO: 2144 - DNA, 2641 bp, Cannabis sativa
aaataaaccaaaacaaattataatgattaacacacaactaaattacacatttttttcacacaataatatgtataataacaatgtgcaatttaaatgtgtatctaccattactccaaaacaaaacacatatacaagacaggatatttttcattaacaagtccttgaattacaccactcattacaatttggtccctaaaatttcaaataaaaccaactaaacctccttaatttttcttttcttccaaattttctcttttataatatgaaattttaagtaccaaatacaattcaaaatacccactaaagtaaaaaacacatttacttttttcttttttcttttcaaaattcataacaattttgaaaccaaattaaaaaaaaaaaaacttcgatattttatttatcttttgaattaattaattaattaaaagcgagcacagcaaccacctcgaatacttttccgaaacccgaaacaaagaggagaagtcggagacttattaccgccacagccaccgccgccattaccgtcaccaacacggccatattcatgatcttctcttccacctccggaatcgaaagatgaactcgaactcgagaatcggctagcagtagtggaccagatcgccgatgaattattattattaggcaaagaagaagaagaagaaaacggcgtcgttttgttgaggtaattgaatttggggaatagtgtgtttaagataagactagatctggatcgtttctgatgaatagtagatgaagatgaagaagaagaagaagaagaaatagttctgttgatgtaattattgttagttatggaatggtatgaaggaggaggagttagaggtggaattagggaatcgtactgttctgagaatcttgattttggagttcctggacatgtttcccataagaaaggtactgaaccaggtcgaccgccatagtaaagtactgaagctgttgatgatgatgatgatgatgatgatgatgatgatgttgagatttcttttgaagctttgggtggttgaatttggagcttcaatatcatcttcttcttctggcaactattctcatcatctcctgtgctcaacatcatgtatatatatatatgtgtatatatgtgtatgtataggttggttatgtatggagagagagatgaaggtaagagtaagctttttggtttgttgttggtgttataaataaaagtaaagagctttgctctgctgaaacagagtatataatatatatatatatatatataaaaattatatatgtatatgtatgaattgatgtatttaactatttatgctatgcatgtaatataatttgacttttttactctttttgcttgaaataaaaaactatggtaatttatttcaaaaaacaaagaagaaaaaacaactatgggtaagtgtatggtacacttctaaacaagtgttgctgtagactctaattttttggtttgattttttctatgcgatatattataattatttaagattacggtgtagttagggtcggtcttgagaatatatgggcctaaactataacattatataatatgttatacatttcaaccaactaaattatgtatatttgttgtttacaatacatttaattttactttaataaaagcttaataatttttttttttattttgagccccgaaaagagtggatccaaagtatcggtctagttcgcgtatgcctagggccagcccgggtgtagtttatgatgtcaaaaaataagatttaaatattatattatatgcgcgactatttttttatatatgtagtaaataattgtgtaaattttattttcaatattttaagttattcaaaaaattttataagagattttaaatgattacaacatatacaattacgaagaaaaaaaattaaattaaaaaacaattagaagctaaaatgaaaagaggtctactagatatccctttagaaagtatactgtaaaaatgtcttaaaattaccacttttaaattatgcttcttaaatttttattacatgtcgttaaaagttctctcgaagtatttttactactcgcttatgtttattttgttaattttagtcataaatggctaaaaaaatagctatgacattaccatatcaattatttacgtatacatgtataaatacaactaaatctaataaaataattgataaagaaaatttaattgaattatccatatgaaatttaacataccttactcacttaattgcattttgttagtcaaaatgattaaaactgagaaaagggcataattcaatactaggaataattgggtaaaaaatttaaaaaaacaagaaagttcgggtacataacttaaaaaatggtaataattcaagaaataaatcctatttattaattaataaaaatggaactcttaattaattaatttatatatattttaagaggaatattatcctattgtttaggatttgatttaatataaaattatgtatattttaattcaatagataatatagaaaaatattgagcattcataaaatgtcacttcttattatgtttgatatcttaagatgtttaaaaacacttgcaatagctattctaaaagagagtaaatctttaaaatgaagaagagaagtgtaaaatctatgctacatcaaac

SEQ ID NO: 2145 - DNA, 901 bp, Cannabis sativa
attgatatctcatattctactagttttggtgcactatttgaggtttaggtactgcggtatataaatatattaccatatactatgatgaaggagcccacacacgatcatttccaagggcttcaggtggtgaggcccacctctgcccattgccaaaacgagtgcgtacactcgctgactacattcttctcatacacttaaatttgactttttgcttcgctattttgataaaagtaattgtaatattatatttatttatactatacacacagttcttcataattcactatcgtaaaagaattaatgtgatactagcttaatttgcaatgcatgatctgtactggttattaatttaatttgttagtatatgaactttgtaaaatataataatttattaataaatgttttttttcatgtgtcgtcatttttgtatatattgtccattaaattaaactgtaccgtttcactttacaggcaatgcaagaggtgtacatgatatggatcatcattccggtcccatcaaggtcatgttattattattattatagtttataagataatgaatgtgattattgctttatacaattctattatatataattccagtgccctgctagctagtacaagatattgattatgattgcttttcttcatcttgataagattaactcaaatatatatgtttatttttccgtatttgatgaaattgaaatttaatatttctttttccatatatctgtgtatattatcgtgttagtaggtatttaatgtgttttgaaatttagtctttagttacatgatttcactaagttagttttagtcacaataagtattgtgattaaaaatatatttattcacaacaaattgtaagttttatgattaatacatttagtcacgaactttt

SEQ ID NO: 2146 - DNA, 1299 bp, Cannabis sativa
ttttattccggggaggctcattacgtataatattatggtgtcatttgaagtacttcactatctaaagaggaaaaggagaggaaaagaaggctttatggctttgaaactagacatgagcaaagcctatgacagaatagaatggagttacttggaagacattctcttgagacttggattcgattctggttggattgttttgatgatggagtgtgttcggtcagcctcctactttattgttcatggagggaaaacaatgggtcctatcattccgtagaggggtattcggcaaggtgatccactttcaccttacatttttatcttatgtgcggaaggtttctcagctttgatcaagaagtatgaactgagagggtggcttcatgggtgcaaagttgcaaatggcgctcttcgtgtgtctcatatgttgttcgcagatgacaattatctttattgtaaagccacaatggaggaggctggtaaagttcgcgagcttcttactctctttgagcaagcctcggatcaataagtaaatatgggcaaatcttctatttttttatagcactaacaccaattcggctttaagaaatagtatttgctcttctcttcaaatggtgattgctgatgagcatagtatgtatcttggtttaccaagcacaatgggaaggatcaagaatgcggttttgggttacttgaagcaaagagtcaggaaaagagttcaaaattgggactctaaattcttgtctaaagcaggaaaagaagtcttgattaaaacggtggctcaagctctgcctagctatgctatgagcgtgttccttcttcctctagatattagtcatgaaatggagcaacacatggcaaaattctagtggaaaacatccagttcgaaggagaaagggattcattggatgtcgtgggagaagctttgtcagcataaaagtgttggaggtttgagttttcacaacttgagagatcacaatcttgctcttttgggaaagcaaggatggagacttcttactaataacacctccctagtttcgagaattttcaaggctcggtattacccgaatggttcttatctctcggcttcaataggtaataacccgagtttcatatggcgaagtatttttgaagctcaaaaggtagtgaagatgggagctaggtggcggattggtattgatagtcaagtggctgtcaaaggtgagccgtggctttcattggatgagcatccatttatcacttccactcacccagctttagattcagctgtagttagtaatctaatggagattggagtagggacat

SEQ ID NO: 2147 - DNA, 3562 bp, Cannabis sativa
agagagagagttttaaatttttgatctaacggtgactgagaagtttggaccttaaagagtcactgaaggttatattctgagaagagagagagagagaggaagacattggagttggtgacatgtgtcggggtcttattgagggaataatcatgtgcgacgcgtatagtgtagtctcaaattttactgaataagatttgtttggacatttggtgacttgatcagagaccgttgattcgttatgatcttatggttactactcccagtgtatacgtcaatttatcaagtagggttgttgggattggtcgctgcttggtcggaaatataaaataataaattattataaaaggggttaagtcttgggggcggtatgggccacagataaacatcaaaattattcatcttttatgtttgttttattagaaacaaaccctaacttaatcccaagggagacttcttttatattgtatttatttgtttatttttagaaaaaagaaaattataatttattttttttaacttaggtttacacaatttccttatcagtcacctaacaatatatcgaaaaaaacgaaaatattcactggttacaaattatgtactattctgattaaatgaagtcaaaaacccagcttatcagttgcttgaattttagaatatttttagagaagaatcacttgcttggagttctgatttataaatttataatttaatcacgcgtaatttcatttgactttttaatactttgttgtgccctcaccaaatgggaatctccttttatttttatttttttttctttttttctatttttattttaataatgattatgaatattcgttcattgactcaatgaagtccatatcttcaacaggacagcaatggtgttttaagatggattgtatgtatgtagctagctttccatgacaaatacaaaagtggtaagttccaaatggttatggtaattattttctgaaaaaaatagtagttagagaataaagataatgtaacaattactcacatgaatgataacgatattaagtttttacttaataatcacttgtccaagagagcaatttgtcctaatgacatatgccatctatacatatattatatatactcagccgcatcatttttttggtacccttgaaagttatatattctaatttgatggcttagttttaagtgaaatgtatttgtctgtctcataccactgcatgaaaatgagactaaaagccattactttttttttgttcagacactgcataaggacattttttaaaaaggtagggaaggagactatttaatgatgaagtgagagctaaagtaataaagaatttccaacaacgttggtgttcttgcaattattgatacaatatacaatactaccaggtcggtgaaagttgtttttaaaaataaaatttattcatataaacaagcaacagaatacaagccccagaaaagttgttggaaagttattccctttgatatgatgatgctcagcagtaatgaaattaaaatctctaagaagaacattgcagacgagttttgatccatgactccagatactcaaactcttcactgattattgtatgagtaagaccaggataagcctgcaaataagtataccagaacaaagtttgtcacgggtcaaattttagtacaaaaaacaaatgtcaaatttatatattgaccagtaggatattaccttaaactcacaacttataccagcattttcaaggagaggggggccagctagtcctgccttaaacagtaccctttcgtcatccattccatgtaaccacaaaataggtgtctgaaacacaaaaacacacgaatggaacagaagttttaagtttacaactcaaaatatgtattaatgtattacaatataatcagtttccccatcaagttaaattcaacatgtacttaaattatttacaaaacagcaattaatttgcatatttcacatcgtatgattgcatgaaatggtacacagcagtgggaaagtgaggatgggccttactacatgtgcattttcttactactttcttcagaaaatgacaagggaaaaaaggaaaacatgcagaccaagactagacatatcgaaattatatcccaaggagtaccctcttggcgtctggtgaaatttgatcaatcaatgatggattaaaggggacccatccgctgattactgcacctccccccagagtttttgggtacagaagaacacttgccagtgtcagagcacctggtggagattgatcaacatacaaagttactagcaataaatgcagatcaataatgcagtgatgtgaactagtgagattaagagagaaggaaggagaaaggcaaacctccttgactaaatccacacacaaatatattattaggattagtgccagcagctatctctttgtcaatcatcttatgtacattctctacagctttaaccaagctaatttcatcttttggtgaatcctgaaaccaacagtaaagatgcagaagaaatcaaaataaaccagaaatgacgttataaatgagcttacatagcaccattttaagttttgttattgaaaatgaagtgaatgatgagaatttctacaacaaattaattcatgaaagcattttcagaactcttttcaaaattttccaatactaaggaaatgtataaggagccaggaatatctaacttagtgctggacaggttccaagacggaaatcatctcaaacacttcttaaatgcaccaaacaattcgccgtacaagccaacagtaaaatctattcagaacttattattgtgatcaaattaattactgcaacacttttacacttcagattccactcaattagttacatgaaatctgaaaaaggaaatttaaaaagtataaaacatgtcatacttacagcagtaatcggaacctcgtgaatgtcaaaccatgaaggacttatagctccatctacaagaaaaaggaaataacaaagataacattatatgaaataagattgtctgaaaattcaggggaaggaacatacccaaactatactagcccctatatattttgtaagaaacctaacactttaaatgtattttcctagtaaacccttgtaacctcaaaacaggtttagttttcttctactgaaattgtaaataacttgaatactatattcatctgatttataaagaacaccatatatataattgggaacataacaaaactaacattagtcttctccaaaaatttcaaaagaactaaaaagaacctgatgataacaacaaaaacacacacgaacaaaaacaatagaaaacccatgtgagttataaaaatttaagtcatcaaaacagacacagatataaaacaatcacaattatgaacgaagtgtatattgaaacaaaaagacacacacataattagtaattgcccaaaagattagaagtgaaaacgtactatagaaggtgactgggttcggaggcgcagaagggaaggaccagactgtgttcctgaactcgggtgaagtaaataacttcttaatgggttcgttcgcgggtccagagtcgccacggccg

SEQ ID NO: 2148 - DNA, 2637 bp, Cannabis sativa
caggaacatcaatatgatgtaccaccataaatacaaagaaccaactaaaatgtagcttatttgagaacaaaattcaattcacccctttgattttgcgaaaacttttctgtttttgtagctgaattaaccgaggaaattcgttggaaacaacagaagtacttgctggtgtgcctccctagcagcttggattattgtcaggagttgagtttgtaggacttgaaggggttaagtcagcagagcttgaaggggttaagtcagtagggcttgaagggcttgaagagctgccgttactatttccaggacattcattagcgaattgacagaaccgacatttccaacgctcttcctcgggagtgtaacttgcttcccgctttccatgccagaactcaagactaacatggatttgtttctgaagccaatctaagtcatacgcaaactcatcttcaccgagcagtgaattgtcttgctgggactcatatctgtaagaaaacaacaaaataagcaaactagtacataagaaaatcaatgaagctaaaaacccttttgggataagaataatcaaagattatagagaaacttatatgtaccttaataacatgttgtcataagcaagaggtaacacactacatgtatttgagtagtacttcatcacatcctctagggtctgcatagatagatgaatttaggcacacagacaaagtaaaatgtgtcagaaaatcttaagttcgagaagcgagaatcttttacctgcgcagggaatccaacatttcgtgttctgtcaacgatttcttcagacaaattgttatagggattcaagttatagaagtcaaaaaactttttggttgggaaattatcactcactaaactatcccacatacgcttgtaacacattaattgaaaccttccgtttcttcgctgtggttcggaaggaagtgtgcgtcgaacacgagtcttcgtgtcaacaagtaaaggatgtttatcagtttctgtaataggcattcgaatttcatcgatcactcccacaatccaaacaccttctacaaaacttactctgatatcacaaaacaaataatccttatcagtacatgaaaagggtaagaagataaatgcaagagagaacacacaacctagcaaaatgcatatcaaacttacaatgggagctcacgagttaacccttcaaataataattggtttacaccaattataaaatttaaaaacttcaaagcccatctatcttcaactgacttcacagtaaccttcacttttttaacaacctatccaaaaaaaatttacaataggctttaagattcatcaaatttacaaacaatacacttgaaaatttaaagtaaactaaagatttcaaagagttaaatacctcttcttcaagcttggcatggcgagcaataccctttttcatagccttattgacatatcgcttgccgagtagactgaactccttttgtttttcacaccattcctataataaaaacaagagaagattcagactcaattcacaaattttctcatctccaattacagaacaacaaaacaagccatcaatagttctcaactccatcatcataagtgctgatataatagtcaggagaaacttcattaatggattcattagatcaacagttaagaaatacttcaagaatgaaagtggctaaagaatcagcctttcccagaatatcctaacgatcaaaaattatatacaattggctcttttaatactattatttctaggccttaatatctctaagatcaataaacacatcgaattgaccaaaaatggaaataaatgaaatttccatatccaaatcattcccagattagcaaattcatcataaccataagagtttcaaagaaaaaagtcaacaattcagcaaaagaaataacaagatcataaatttttgtttattttaaagcaaaaacataaccatatatatccatatgagtttcaaataatagaaaaagaaataacaaaaatcaaatttttgttaatttattgtaacagaacaaagaaacgatcgatcacccagaaaaatttacagtaccgtgtcagtaaaatcagtaacgaacaagcctttattcttccgaaaccgaagataatacgagtcaagcaaccggcttttcttctgggtatttctgaaatcgcccaaatcctccatatccggctctttagagcccggaaaacccctttttgaaagagcagtaattgactgaatggacctaacatgggtatgaagatgagagtgacgaagaacagggatggccgaggaggagatgcaagagcgagcagaaaccatggcagcttcgagtagaaccatttcttcctcagtcacgatttcgattgggattttggagatatgggtacagtagtttttgtggtggtgttcttcgtcgtcgttatagagagctgactcggtcattttggttgatccggtgagtttggagaaatatgaccgttggagttgccacggtcagaagcaactcatattctattggtatgttttgtatttggtcccttgattatcttagttcttgctatttcatccctagacctttatcttttattatttaaacccatgaacttacattttgtttgcaactagctgaaattaattagactagagt

SEQ ID NO: 2149 - DNA, 1512 bp, Cannabis sativa
gtacggacgatccccaacaggtacggacgatcgagcctgtcatacaatagacaaggcgaaaaaccaatcaagcaaaatgaccaaaacgacgacgattatcaaagatatttttgggtggtttttatcaacaacagcagcgtctactacaactaccgtgggccgtaagattccaatgtcgtagactggcgtaaaatcgggcctgaaaagcccaaagtttctctcgcaagttgggccgggcttgagattctcattaaagagaccaaatatgtaagtctcgaaagtccgattcggcatgagaggcgtgcctgaaccagaggtcacgtgacgtaagagattcccgttgtactccgccgccgttgccggatcaactccgatttggggcaaatctccgtcggatggccaacccgtttcggcgatcacaatatcaagatctggaaaccccaaaattttcatggctgaatacaccgcgtccagctgagcatccaacatgttgttgtatttgagctctgtgttctggtcaacgacgccggcgttgactcggaacagagcgtaatcgatcgttagcggtgaagacccaaaaaatgggtatgggttcaccatgaaaggggaatcggtggagttgagaaaatcgagtaagggtttaagcacatggatgtcgtagccttgccggaactttcccgtcgacggcggactggaagaggcgagaatgccgagggaatgaggagtggagactttgattttgcggtcgagtcctgcgtcggcgagggcggcgtggagggtttccatggcggggacgagggaggcgattaggagtttgtttgcggtggctaatacttcgttgcccattaaaattcggacaatgtcggtggccggaaggtaaggttggaggttggttttgagccattgttgagctgaagcgagcttagtgagatgtgggatttgatcgttggggatagtaatggtgagtgagattccagtatgagcaaaagctttgatgatttctgggtttgtatcgaatagtctaattttgttgataatggtggatttaacaaggaatttggccacttgagttggtggtggaagatcatctgctacagttccatagttaaccccaataccttctcctccaactcctacttagcagaaaagcaaaccatttataaatatatatatatgtaatttgtaaatgtattgatatatagtgttgtatttgtacctgaatggagagaagagatggtgagaagaagcaaaagagcaaatcgaagaggagtttccatgacagattacagtgaagaagattacaatgtcagtggtggtagaagaagccattggtgaagaagaagaagaagaagatatgctttgctttggaaatgggggattttgatatcttgttggtaagggtttagtataatacacgattattaatttggcagagattcaatcactttgagtattacgtgatcttttccttcgaatattgttagttataattttatatgattgaaatttgat

SEQ ID NO: 2150 - DNA, 2206 bp, Cannabis sativa
tgtcttgagttaaaaaacagagagtgtttcgaaaaaaagaagaagaaaataaatgcatggttatgatctctgtgtaggtatttgtattgggctctgcgctattctttcaaacatgcatctttctgaacgatttaaaaaactttttatatataatatactttcttcattgtaattctcaaactgagtataaactttgtgcactatgagaactgcaatgtattttggaacaagctatattgatgacagcaataagttcttttttgtacttaatattgtttttactacccccttgatttactaataataaatacttgatttaatcatctgggggcaaatgatctaaatatttgtactttaattgtatgagatgtgtttattgttcttacctgtgtttccctttattcatgttaaatagattataattctttgcagagctgtgttgtgattgatcgatccattcaattgatatctagagactagaattgtgattaattgaaatagttggtctgattgtagcagtctcaatgttgtatttaagatattattttcagacataagtattcaaaattttaagtttataaaactataatttttctataattttctcattacagattttgttattgtcttaaataggtacatataagcctcacattctagattatagagtctagacaaaaatatataatatcatttatttccaaatatttttttaataaattcaaaatagaatctatattgacgaaactaaaaaaaaaaattacagttttacaaacttatgctactaaaaataaatattaaatttatgacccttacaattttaaaactttatgtaattatgtcactatttaacttattttcatcaacaataaaaactgtttatctggtaagtaatagtatccacaaccatttagcccatatttaatttggtgaaccgtaattagaatgtacttggagaaacttttttccattggtgattactatgttttcttagaccaatattacgattaattaagctccatcactaactagtgaactgccaatgtttaacaatttttcagaattcattcaatgcttaatcatatgctatttgaagtaaactttagttttatgacatactcgtatattaattactagacatgaccatacattctatttgtggtctatccttttttttcagcaatcaataacttgtttgagtggacagtgactttatttatatttgaactattcgatttaacgtaattttgctcgtcttctaatgcccacttataaatagaaaacttataaatcttttgcctcccaatttcttttttagtaaaataatcttcatgcaaaggaatcactcaggagaataaataataatttaggtgaagcagaaacttttaccagtaggcgatcaaccataacatgaaaaattttggcaagcaaataagtaactcgattaacaaaacgtttaacaataactaaatcaacaaattgtaaagacctaaaaagagccttacacttctcaataacaagatcaaagtaacatttttaacaaattaagaatagactcaacaatcactaaacaatctgattctattacagttaggatacactggtctttaactagcttaagcttccttaatgctcagagcctcaaccaacaatggatctactataccaatttgaacccgtgcccttgtctcgaccaatctaccactaccatatcgagccacaaatcggaagccaaacttcctatcctcaccaaaatagacgcatgcatatccacattaactttgatgcctctaattgctttaaatcaatatatttgaacattttcataattaaatcaattttacatacaaattacaaacataaactaaaagattttgcttggaaaagaaatataagcatgatcaatttctaaaaatgtatgcttagaaaataaataaccttaatatttaagtagtaatatgaacaaataatttagatagaaaaattaaattcttaacataaatgaaagctaaggatggaatgataaaacaaaaaaatattagtatataattatataaatttaataatattaagtatttatgtcacaaattctaaaaaaaaaatacatgaacatttgaaaattctgttaattttctgagacaaaatcaaactacatccaaatgcgaattaactttttttggtctttgacaaaactatttattcattt

SEQ ID NO: 2151 - DNA, 1335 bp, Cannabis sativa
agagagagagagagagtataaggggtgtgaagagagcacgtgcaacatcacgaggtgtgaatttagagaattatgacaaaacaaataaagaagaaaaaaagaaagcgttacatatttatatgaatatgtgtaatgaagatgaacatggaaaatgaaaatgatgatgaagaatattatagagagagttataagaaggaagaagaagagaaaggaaagttgtcattatttgaagaaaacaaagaataaaaacatgaaaatataacgtacacaaacttaacattaaatccccctcaaaccaaagagcatcttcttcttctatatattctcttacctcttaccatacttgaacaacaacaacaaatatatgtatatatatatatatgttacattattacattctctattcttatcacttcttcacattgtttttcttttactctctagactaatccgcctttcttctttctgatctctctctctttcatcgtcacagtgttattcaggtcatttctctctctctctttcctttttcatatcatggttttacaatatatgcctatgtttttctctctttgttaatgttattcttgttgttcttttttatatttttaacttgattcttagatcctttttccttgttgagtttttgagtggtgaaaaacccaccaagattgtttactatgaaaaacaaagaaagagaaggaaaatgttatgtttttttgtccatgtttgtttttgtacatagtacttcttcttttgtttgaatggtgaaaacaccacctaagatttactatgaaaaacaacgagaaggaaattgttttggtcttatttggtttgagaaagaaaagattagagaaagagagagttacatatagtacttcttctctatgtttgtatactttcaatctttcatgtagagtttgtttttattctaagtgttttgttgttccaactttgatgatttttttcctcaaaaattttagtctagggttacttgttatcactccttattactaacataaatgaagcattaggtttaaccatgttcgatttaaacttgtaacggtctagagatctagcttttcgcaagacattattcaaagcaacacccgcgaaatctttttttttttaatgattttacccaattagtttttacctttttaaacatgttgtacgaaaagagaaaggaatctgttattaactggcgattattttgtcgtctttcggttgatttttcttttagaatatgaatctaatgaatttatgaagaaaatggcggcgccggttacaaatttcacgaccattataatattactaaacaaaatttgttttgtt

SEQ ID NO: 2152 - DNA, 2648 bp, Cannabis sativa
atatatatatatataattaagaaaatgctacaacacaaataaaactaatgaaggcattaatagtggcaatcctgcagaaatagattctctttctcaaaagtttcttggtggaataagtgttgattttgtagcacataataagtaaaaaaaaaattcactcatgcaatgcactgcaacatacaaagaatatgagactacataaatgccacacagaatgattcgaactacaacttttttcttaattccaaagaatataaaggaataagacatggttcttgaaaggaatagcaagtaaaaatatcagatatataagaaagttctttaatctaaatgaaacgcaattggaaaaagtaaaagagtaagcatagtttaggtctatatttttacatgagagcataaatgacaactaaagaaaagaactttgatgaaactagtagtaagtgttaaaagtgcttgaaataagatactatggggtttattctttcataatgattataggatattgacaaattcttaaattaaaataaagtggagccgtaaaaagagcaagaattataccaaatcgtactaaatgtaatgacatttcttgagcttagaagtgcctagaagttataattgccaatagaaattgaatgaactactctagttcaaaatatagatctataagatgaagttaagaccccatataatcattggagttttttaaaatttgttcaatatctcacttagttgccaagcatcatatgcaatatattgacctattattaaggtactcaaattatgcatgaacaacaattaaaaaaaaaattacccactcaatactgtatattaagggagaataactaacaacagtgagttattaaaggcccaaacaaaatcaaaatatttcaaaagaaaacttaattgcagaaaagtgttattttgcttcagccacttccttatctccatatctttgatttttatctcataataattgattatctttaactccatgtaaacatacatatgtaagaaagatagttacaaaaccacttttttattattaagaagataaatataactagttaaagaaaatgattgatttgctactgttgaacctcttcgccattgatgaacaaccaagcaagcatgaacaataaacccagagaaaaatagagacaaagaggaagaagaaagagatggaaagatagagaaagagaagattgaaaacaaagagtaatcttactatttagtaaagaacattattggcattatattgccaatgattaaagctgtagtttgttgaagacaacagaattagttaagaaagagaataacaataataccgaacataattaactctctaaccaacaaactaactgaatagacactcctaacacggtcccttaaggttacaattggaagcatcttgagtaacagagatatcttcaatagtaagcttgtatcgaaatagaggaaacctttgagtggagattgcctttgtgagtccatcagccagccgatcttgagttgggacatgctttacttggaccagtttttgaatgatttttcttgcacaaattaaagataaaagctcaatgtgcttagtacgtgcatgaagtactgaagtcgttgtgagaaggacagtcctaaggttatcacaccatatgataggaggtttaatggtcttgatgtgcagttcagtgaataattaatgaatccaagtaagttcagcaactgtactagcaaggcttcgaaacttggcttgtgcttgaccttgatatagtgtgttactttttttattgccaagcaaccagattatccccataaaagattgtgaagccagaggttgaacgtcgatcatctatgttagtggcccaatcagcatcagaaaatgctaccacttccttcacatgtgactttttgagatgaaggccatgactaatggtgccactgagatatcgtaatattcttttcacagcaaactagttacttagttggggatttttcatgaactagcagactttattgacacagaatgaaatttcaagtcgtgttatcaagaagtattgaagtgcaccaataattgatcgatacaactgagggtcttgaaccggttcactgtcatatgctgagagtcaaaggctgcttgtcattggagtgggagctggtttagcatcacgcatttgtgctttgaaaagaaagtctctcatgtatttggcttgtgataagtgtaaaccaaatagtttgctgcacttcgatccctagaaagtagtgtaggtcaccaagatccttgagtgaaaacttactatcaagagcaacaattaaatctttgattgcagtgttgttgctggtagttataagtatgtcatcaacatacacaagcactaacctagtgtatgttgaaatgtgttgtatgaaaagagattgatcgagcttagatggaacaaagccaaggtcaaagagacaatggtgaagcttattaaaccaagcacgaggtgcttgttttagtccatatagagctttgtgcaacttgcatacaagattgggggctgaagaaatttcaaatcattggttttttagcatacactttatcattcgaagtgccatttagaaaggcattattgatgtcaagttgcttacttgaccatgttgggttttgtgcccta

SEQ ID NO: 2153 - DNA, 1896 bp, Cannabis sativa
aatattaaacaatatatataaatagagaaaaaataagataaataaattaaaatatatagaacacacaccgtacagtctccacatagatctgataatgaaatttgtatggatgagtctgcattatatattgttcttatctctccatactttgctcctctttttcatggtcccatataaatatatatataaatatatatataaatatatataaagaacataatcatgattgataccccatttgtgtgtccttttcaaataaatattatatctatttttgttgtccctctaatcccttaaaacgacattacaacacaaccccatctctcaaactcttcctatatattgtttggttcctcagaaaaataaaagaaggaaaaataaaagactttctctcttgaaatgttagtgactgtttttgtacatattcatgttttggatggattatatatataaacttttttttttctttttggtaaacagaaaatgatgggagattgaatctagatatattcatgtattagagaagtgctaccgtcaaccttctgttacaatctcttagtaaacttctacactcgaaaacacatatcggaatattttttttcatttttttttacggggttgttcgttatgctgacaacatcatccctgtaaatcatcatccctgtaaatttttaaatttttttgaatagtttacagtaccaaaaaatacgtttgaaattttttaaacaggcgtggtaaactggaatatcaggaactctgttttcagttgtaaactatttggaagttttcaaaaatttatactgtaaactacgaccactataaaaaaaattgaaaaaaaatatttcggcatgtaatttaggacgtgaagattgattaagagattataataagagattgtaattaacattcatctcatggactatacgaagtatctttttctttcagtaataaagataaataaataaataaatttgaataaaaatcaggagagaattatataataaatatctaaatcatgttttaagggattatatacgtgtcgtataattttggtaaatttgatgatgatatatcatgttgtgatatcaaaaagtacaaattggaaaaagttaacattatgaatttaattatgtaattttgtacaaaaatcaacaagtacaacaactaccatagactatgtagcaatatgctaatattaattaatgtgatcttcaacattttatactaattaacacaaatttaacgatgtaatgtcatgtccttttttgtgtgtagttattatatgatatgagggggacaactttacatttgaatttttttatttgacttttcttttttaatattgtatatatacatatgattatgcatataatcaatttgagatcaaaattaaagcactcatattaactttttctaagtggcatatacttaaaaattgaaaaaagaattattaaaatatgtcatacatcaaacaatgtattttacatttatttttaaagtaatggaaagtgtttcttcatatgtgagaagagttgattcctcaaaacttactttattaatattttatttattttatatgtatgtataaataaactaaattaatattacgtgcaatgcacgtatactcagttacagggccagtcttaaaatttagtgggccgagaaaaaaaaatatatttaggccctcatttagaaaaaaatgtaatatttttcaaaattaataaaaaaacaaatatgtaattttaaaaaggggataattttttttgggcccctgagctaggtgggccctaggcacaggcctagcccgtctatgctcagggccagccctgctcagttatatgattaactagggaattaagccgcgcttcacgtagtgttgtccaatttttataattt

SEQ ID NO: 2154 - DNA, 4095 bp, Cannabis sativa
gagattattgttgaataaagtattttttaaggtatatatttatatttatatatataattatatggctcaagtcaaaaattagcattctaattttcacaaaaacaaccccattaactttgttgaaaaacaaccattacctatcaccaatttggagctaaaacccacaaacctaaatgtaatctaatttctcataaatatacactagaactctcatgtcacaaagtgtaatcaaagctccaagctcatacatcgaaaatagatagtggacataactcataagtcaattctaagatcgaaccaccataactttttgtctatttgtacccttttaatcattttattacacatttttctttaaatcattgattacacgttgattacccatttcatacttaagtcaaactcatatattatatatattatgctttgagtatttgacgagttcgacgaaagaacgaatcaaaacaagcccaattggaacttcaatcaaaatggagcgagctttgtttcaataattgggcttaaggctattttgggtaacatatcaacttttggatgtgttgtacaattctaacaccaaaatattacattttgtaacatgacactattttttaaatacattacaattaatttcaaaacttttcataacactgtataaatttttagtacatattataaatagacttatcattacctttacagcattactcataaaaagataataataataacaataataataataataaggtgaagccacagccacagtgcaaagagtgagaaagaccctgttacatatgttatgcatgtaaacgtgtcatggtgcagcttcttattaagatttgattacagatgtgtggtgtgtggtagatgccgatggaggcaattaggatgagtcatgacttcccccattggataggagtgggtccaatctctttcatcctttccacttatagctgactaagcactaaccaaaacaaaaaagtaataaaaaaaacatcaaatactgatagagattagagatgacagacaaccagtagtttgggcctgagaacaacaggcccacaaaacccacgtgttgattgtaaccctgaagaaacgacccgccgcagttccactccacgcatgtgacttcccaattcgtacgtggcaaatctctaccaaaagtctcatcaattcatgattactacgcttcaatcccattctcctaggaaactttcaaaaaccttaaaacagatcctcattttagttttgtctttcccagaaaccaaaaccaaaattaaactcatctcttatttctctagttaagttatgatatataattgattctacatttccactaatatccatccatataaataaatcaaatataaaaccacattatatatttaatttttctgggtttgggtggaagaaatagtattactgattccactacttccgtgactgattttccttctttttcgctccaatctcttaccctttatatatatgatcgtattttctttttttccatgaaaacgtttttctcgttctctcctgataagcttttctttgtaattattttttaattaaataaactcttatctataaattaactctacttctactctagatcaatttgatcttctcttattatctcccagaagaaatctctaccatcttttctgagctacctctctctcttcgaaggtaacgtttttcatcacttaattaattaattctttattaataagatatgcatcggtttatctttaattcaaatttcaaattaaattaatacagtaatcagatcctaaatttctgattggtttgaaactatattatatttaagtacgtcgatcaagaaaaaaaaacaggaagattttcctaaatatatatcatcataacacagctatataactttatttgaatgaattcttattagaatctaaaatctcattattcgtggtcaaacatgcacatatcgttttctattagaaactacgttcgttctttttttagataatcatcaccacataattacgggtggtttttcctcttatcaaaaccagctattgctaactaatattaattgagaaatttctttaattaatataataataataataataattcaaaatagtaattatttaatcatgtgtcgtaatcattgcatataatttaaataataagatagacggctgtgatcacttatattttacaagtttacattttattatatatttttagttttataataaatatcaatttgccacatgtgatttaatattatttatttcatattataattattatatatatataaatatcgtatttgtgaatagtatcaagccaacattagcgatgttttctcctcaatatcgctggtgattaataaaagaggagaattcgactaagaatgagtaattcagagaagagagccatggagaccaatgtgatttatgagccttatattgatccagattatgaatttctcgatgaaagaatgtaccctccaaggtaaataatatctgatttattgtattctttctcaattattttaattcttagccttaaaacaaaagattcaattatgacgatatatatttgtttatctggattatttggttttgtgttcgtttcagggtttgtatagacaatgatacatgttcacattccacacttataaaggtatttcccttcttaataatttcttctatgtttttttattgctagatactttggtctgctggattttcttttttatttcaattcatcagaatatcgatgtttcctagatagtataatttcacttcaacaaataatttttatttttttaaaaaaaaaagttataattttacctaataaaattattaaaatatacatatacactactcacccagtggagaaccattagatatcaactcaattaaagaaattatgaagaaaacacaattaaataagagagaaaaaaaacaaagaagaatacgtctttttcagtaaatattttatcatgaatttattatagtgttatggagaagtttccttctttcttttacttttatttgataaaattaaaacttcttgtttcttctgtaacccagataatgacgtatcataataataataatagatattcaaaaggaaaaaaaattgttttttgaaataatagatatttacattgatattattataattatcattatttacaaattacctttctataaaaaaaaaactagaaaatagctgtctcaccaacaacctttacgatttctacgtacaacctttcaaaaacaaacagaagaggtttgtggaattcaattcttactgtaatgtatacatatatatatttcaggttgatagtgcaaacaaagatgggattttgctggagatggtccaagtgttgacagatctcgatcttgttatatctaaatcatacatttcatccgacggtggatggttcatggacggtcagtcttcatatttataccacaaataaatatatatatatatatatatatatattatcatctctgtcatcacatatacatcatacaacatcttccactgataactaaactaacatatatctaataagtgatattattatatgtattatgtattatgcgaaatgatatattcacacacaacacaagtctcatgtacacttatatttacggtattttatttttaaacaagttacatccatatacttatattaaataaagataatcagttatgttttgctacataaatctaaatgttaagtttgtgactttgtatagtgtgtgttgcacaaatcataaattactcatgtaattttatttattgtttgcattaatcagcatattgtaattaattttttgttttgtttcttttttttttttttgacaaaatgaattttatttaattaatacatttaaaatttagatagtacatttttttaagactattatatttgaaaagttcaaaaattttatggaagataataacttaaatttcttttaattaactagaaattttcaggagaatgtatacataaaaaaatataatgtagacgtagtcagttaaattttacaactctaaatgtttaaaattgattttttttttttt

SEQ ID NO: 2155 - DNA, 929 bp, Cannabis sativa
tggagtcttagtctttataacaatcatttcaatggtgaacttcctcattctttgatcaatacttcaattgggaatttagatattgagtttaacaacttctctggtgagttaccttatgaaattgttgggaatttgcctggtttaatgtaccttcatctgtcatataactcaatggaaagtcatgattcaaacaccaatctcacacctttctttgatgctcttgtgaagtgttctagcttggttgagttggagttagctggtatgaaactcggtggaagattgcctgattcagttggtgaacttggaccaaatttttcatctttacaacttcaagaaaatagattgtttggaacaattcctcccaacatttcaaaccttaaaatgcttaacattttgaacttgacatcaaatcttttgaatgaaactatttctgttgagattggaatgttccaaaacttagagcaacttttcttgtcacacaacaaattctcaactccaattccaaacatatttgacagatttcctgctctaggacttcttgatctttctcataacgaattcaatggcgaaatcccatcaactatagctaatttgacaagactaaattttcttttcctaaaccacaatcgcctttcggggaaaattcctcactcattaggacgatgctcagagctacacaagattgatttgtcatacaacagattatcaggaacaatcccatctgatatctcaagttggaatgaaattagaatctttatcaatttttctcataatcaacttgaagggtcattgccattagaactaagcaagctaaaagatgttcaagagattgatttgtcttcaaatcgcctcggtggaaccatctttcctctcatatcaagctgcattgctgttagactaatcaacttttcacacaattccatcacagg

SEQ ID NO: 2156 - DNA, 824 bp, Cannabis sativa
aaaaagatgtatatgcaaaacaaaacctgaacaggtacggagggtccagcctcatcaactcgctttccatcatcatcaaataaagctcgcacctgaccacgcatgacaaataatccttcaattagtaatagtgaaagttacactagtaaaaccactgggttggtcacaaacctttccgaaggcttctccacaaactacaacgtcaccccttttgagagttccattttgcacaataactgttgctagcggtccttttgatttatcaagacctgcctcaatgacggtgccctttgcagttctatggggattagcctttaactcttgcaactaaaacaaatatacaaattattagactacaaagttacaagtgtatcatagctaaattatcaacaccaacaagatttgaccaacctcagcaacaagcataacagtttccaagagctcatcaacattctcgcctttaagggcacttatctacaaaaatacattaataaataaaataagatttttttgaagaagaatagaataagaatttaagcagacagaaaatagagactcatttcattttcaaacaaagaaaaataataatgcaagaaattataacctggaccatcgggatgtcaccaccccaatcttctggcattaaaccaattgaagaaagctcttgcatcactcggtctggattagctccatctctatctatctgatgaataaaagagaatcaatgaagaaaatgagtaataagattatgcacataacaaacattaaacggaagtccttactcctcattataagaatatgatgacttcaatgccaagcactat

SEQ ID NO: 2157 - DNA, 1259 bp, Cannabis sativa
atggcttcagcagagtgctgcaaggcctaagcggaaagaaaaaatcctttcactaaattcctaaattaattttattataatagatattttttttatatatgttttataaaattcttaattaaatatacatccatacacatataaaacattaggattataacttctccattttttttttaatttttttgcaatgatataaagtttatttgataaattaatataatttatagttttttttttttttttttgagatgagatatactttgataaagaacatggtgtccccaatattgattcacatcacatggactctagaaaattgatagtattatctaccagctttattaattagtgtttttacttcaccaattatgtacatgcaattatgcatgataaagttaaaaaaatattgtgcttcaagagtgcactccaaaaataggcatatggatgtctaaataattattttatatatgatgatatatattataattatttatgatattttgtaatgtttttaaaaaatttaaataatttacaatatagaattaaggttcaaattatttgtttattttcacaagacttctaatatatattttaaaaaaaaattatatatatgataagtgattcaatgtgtgaatagtttataatatcaatttttagaatattatacaaagaagcaggtgaaaaaaatgaattactctatacaataagcttgtgactgcatctccaataaatcgacaaaaaatacttagaatgtagccataatttggaagcgatatagcttgtcaaagcataaattcgtaacttggttggcaacctggaatagattaagaacgggagatcatttgcagaatcaaggaatgcaaggaataggtacctgttacatttgtggatagaatcaggagactcatgagcatttatttttcagttgcatatacaaaacagtaagcaatgtctatcacaaattctttataggattggcatttgcaccaaacaatatagattcctgggtctcttgaattggatatgtatattatataaaaattaatacattaagttatatgagacttgatatttaattgtactaataaagttataatacgttagaatgtgttaaatacaggctcaaccctaagtataagcaggctagacctgtgcctagggcccacctagctcaagggcccaaaagaaaattcccttttgaaaatatataattttatcttactaattttttaaaatacaatttgtttttttttttt

SEQ ID NO: 2158 - DNA, 3208 bp, Cannabis sativa
tttttcgaacaccatccccgttggtacgactcgtcgttaaaatcggtatctgggtctgccgaaatgctctacacctacaacaatgtcgtccatgggtattccacaaagttaactgctcaagaagtcgaagctctaaaagcccaacccggagttctctccgtttggcctgagctcaaatacgagctccacacgactcggacgccggaatttcttggccttggcaagagcgattcaatatacccagagtccgattcgggtagtgatgtcataattggcgttctagacaccggagtttggccggagagtaagagcttcgacgacaccggtcttggaccagtacccagtggctggaaaggcgcgtgcgaaacgggcaccaatttcagtgcctctaattgtaaccggaaactgatcggagcgagattcttctctaaaggctacgaggccacactgggacccatcgatacatcacgggaatcgaagtctccgagagacgacgatggccacgggacccatacggcgagcacagcagctggttcggtagtggagggagctagtttgttcgggtatgcacagggatcggcgcgtgggatggcgacgcgggctagaattgctgcctacaaggtttgctgggtgggcggatgtttcagctccgatatcttgaaagccatagaccaggcggtggaggacaacgttaatgtcctttctatgtcgcttggtggtggaatgtcagactattacagggacagcgtagcggtcggagctttcgcggcaatggagaagggcattttcgtctcttgctctgccggaaacgctggacccagttcatttagcttatctaaccttgctccgtggatcacaacagttggtgccggcacactagatcgggatttcccagcttacgtcagcctcggcaatggtaaaaacttctctggtgtctcgctctacaaaggaaacactttgcccggaaccctgttgccgtttatttacgcagccaacgctagcaatgctaccaatggaaatttgtgcatgatgggcacattgatacctgagaaagtcgcaggaaaaattgttatctgcgatagaggtgtgaacgcaagggtccagaaaggatctgtagttaaagccgccggtgggttaggaatggtattggcaaacacagccgcaaacggcgaagagctagtagccgatgcccacctattacctgcaacatcggttggtcaaaaatccggcgacgacatcaagaagtacttgtcttcagacccaaaaccatcggtaaccattctcttcgaaggaacaaaggtaggagtacagccatcgccggtggttgcggcgttcagttcgagaggtccaaactcaataactccagagatactaaaacctgacatcattgctccaggtgtcaacatcctagcgggttggtcaggtgcattgggtcccacgggtcttcccatcgacgacaggcgcgtgcccttcaacatcatctccggtacttccatgtcatgccctcatgtgagtgggctcgcagctctgctcaaaggggcccaccctgattggagcccagccgcgattagatcggctcttatgaccacagcttacaccgtatacaaaaacggtcgaaacatacttgacatagctaccggaaagccttctacaccgttcgatcacggtgctggacacgtggatcccatcgcagcacatgatcccggtctagtctacgatctaacggtcgatgattacgtgaacttcctttgtgcattaaattatacagatgatcagatcagtggtctcaccaggaaagaaggaagttgtaaagcaaagaagtacagtgtcactgatttcaattacccatcgttcgctgttaattttcagtctacaggtgggtccaccgtagcaaaatacactcgaacactgaccaatgtgggtccagctggaacatataaggtgtcgttgaagtccgagacccaaatggttaaagtatctgttgtgcccgaaacgttgactttcagtcaacggaacgagaagaagagctatacggtgacgtttaatgctgtgggagcaatgaagcctaactcaaatagctttggtcacattgaatggtcagatgggaagcatacagtggggagtcctattgcatttagctggagctgaaaataactattaataagagttgggacaaatggttttaaacagatactaacgtcacccactcgaagaggggtttgatttgtttgaatcagaatttcaagctctttaaatataatataatatttataaataatataatgtcattgtttttaaggttaattattgtaatattagtgtttttagtattttaatgttggttacctgataaagtttgaaaaatagaaacagcacaacaagggaatgggtggtagtgtggggtgttttcttttttcagtgtacaatattgtctggtcaaatttatttgcccaagatttaaactcaagctttataatgatttgctttattgttcctctcatacaactatataacttttagtatcttaaaagatagatcacatatgctgtaaatatgcataaacggtttaatacaatgcaactccggatgacttttatctgctttatatgggattgggaaatcaccgttttagatattaaatcctttgattaaaaaaaaagattaaagcctttgtttttcctttcacgagcatttatgttgcttttcaatttgcaatggttttcatctgtcccttttttctaccaacttttttttttttttttgaatgggtactttcattaaaaagggtagaagttataacatcaccaaatttggattcattcacggaaagtgataagtttgctaaggaatgattcatcacatagttaggacgattagtcgtctagtaccaatccaaattcacatggttgttgttcaatgcttggcaagcaatcagtttaggcataaactttgcgatagataccgcagtctcaaatacacagcactagatccaaaattgtaactttacttgattatatattttgttgacactgaaaattagttcaacaataaaattatgactttacttagagttttttacataatatttaagcttgtcatacaatctctacttcattctttttttcttgcagtggcatagctcaacaacaaaattgtaattagatttggaattttcacactagattttaggggtgcacatttagacccg

SEQ ID NO: 2159 - DNA, 2018 bp, Cannabis sativa
aaaaaaaaaaaaaaaactgctataaaaataaaatcggcaacttcaaaggttgaagaagatataatcatttaccctaaagttcaatttatttggattgggccaacaaacaaatgggcttctgaaattggttttatattttgtatgttgtttgtgtcttgcttttaattttctttttatttttaccacctcgagggcaaggtgattttgaaaggtggaaaagtgttagactatgaaatagtgtaggagtttattaataatttaaaaaattgtgtagctattgttagacatgaaaataaaaaataaaactttggttcgattggagtttgacactcagtcgaagagtgcattttaggagatttgtcttgtctcgatgatgaatcatattatgatgaataagcagttgttactcgatttgttttatttgtttaggaaattaattcctatttcagtaaacttttaacaactacaactatgcagtcaaattcaatatcaaggcagtagctctctatttttatttacagaaagaaaaagatctttacaagctcttatgttaatgtgcaaaaatctttagtagtgaaggtggcaatcgaaaatcaattatctcattcaaaaattagcttttatttatttatttatttttaagaaaatatcattttattttatttaatattaccattcactaaattgaattgtaacatattagttacatatcatatttagccgaggaatgccactcttacctctggctaataagatggtcacactagttttttaggaattttgtattttcattcactgctaggcacaatggaattatggaatgacatttctatgattattattgggaggattcaaattttggaatggagagagagtgtttaacctcaaacgggactgagcaattctacaaaatcagcatatataataccaagctaagctagcctcatgatatgagaggaggactttgattagcttcctctcttggagagaagggttgagaaagcaaatgttgatattagctctaatcatctttggtgacatgattttgatatcttcaacaaatccaatttactatcactaaaacgggtagcttgaaagttaatgatttgaggcttattaagaagggaattttcccatggtagaactaaacactaaaaaaactagttcttatcacatcacatttctctctctgttttctttgtataaacattataaaccataaaaatatgttatgcaatgggcatagtgtcaataatattttgaaattgtacatcttatcaagtaaaacccgttattacctgacagcaaaaatacaaactatgtacgacgaggacgatcaaaatcttcatagtcgtattcatcttcatcttcatcggagggcggagaaggatccaggcgagcagcgtccttggcccacctaatcaacttctcaacctcatcatcttcatcctcctcttcatcttcatcaccaaggctctccaattttgtattggaacgaacgccaccagtgccggaaatggaagcagcaggcgactgagacaaggaggctctgagtttggcgaatcggacggagaggtcgtccccaagaacggcctggagttcgggatccggttgaggatctggggcttgattcggcaattgagggggaggatcggcggtggcggttgaaggaggggtaggtttggtattttggggagattttgagggtcgtgatttgagggctcggaatcgagtgtcgagatcggagtcgatgtagttaggagagacacgagcgaggtgggaattgagagagagattgagaagcatatcttcctggactgccttcaaaagctcatcaacctctgcttcagcttttgtggtcgtcgaagtcgtagctttcttcctgttcatttttcacccttctccacttacaaaatccaaactaaaagaaaagaaaaaaaactgaatcaacttagctttgttgtagcgtgctacgctttttctacaccttaattgaaaagaatttgctaccataccac

SEQ ID NO: 2160 - DNA, 3377 bp, Cannabis sativa
atgttatcactctatctccctctttccctgtttccaatttctacttgttcaaatggtagttatacatatatacacacacaacacggagagacacgagctaaaatgccgtttaaaaattcttgaatttcatggtgatctaaatttccaaaggaaaatattgacaatgaaatataagttgcatatggaagatgattttttttttcttactagttttgcgaaacatctataatggagattttcttgtttaacgaattagtagtgtgacctatggttattttcttgtttaaggaatagttaggaaaattgaaatgcattgcaaaatttgctaaatgatataataagagtgctttaacaggcatggcatggaaggcaaaggcaacgtgcaacacgggctgagaagttgaggtttcaagcattgaaagctgatgatcaagaagcatacatgagaatggtgaaggagagtaagaatgagcgattgacaattcttcttgaagaaacaaataagcttcttgttaatttaggagctgctgttcaacgtcagaaagataataaaacttcagatggaattgaatccttgcatggctctgaatctgattcacctgagttggatggtgaatttattgattctgatcggaatgatgaggccaacgacttacttgaaggtcagcggcagtataactcagcaattcactccattcaggaaaaggtaagttatacattcttttctcattgtattattgttcttatttatcatcttttatctaaaggtgtcattcagcctacccatattaattatccataggtgaaccctatatgttttattcctctatgtcatttgttattaaatgcaacctattggtgtgttccagattgtctaagcggccggtaatgtagtataatgccaattttctccaaagttcttgttcactaatatagattttcaaccaggggcattgcactttctctggcagttttactaacattttctgcttgtccaaattttccatgtcttgcaacttgatgagcataattatgtttcatgcttatcatgattactctgtgaactttgtacatggttttgcatatgccattaccaatgtttgatgggattcttatcaatttgtctttctgtactttgtgataacttcaaagatcttttattttttgttacttctcgtgtagtgcctttttgttgcgtttttgttaatgggaactgctttgtaaaagaggaccttactgtaacttaataataggtaacggagcaaccatccatgctacaaggtggagaattaaggccatatcaggtagaaggattacaatggatgctctcattgttcaataacaaccttaatggaattctggctgatgagatggggttaggaaaaacaattcaaaccatttctctgattgcttatctcatagaacacaagggtgtgcatggaccccacttgatagtggccccaaaagcagttctgcccaactgggttaatgaatttgcaacatgggctcctaggtatgttcaatgtattctttaataaatctctctcattaatatatcaaattaatagatgtagaaccttcaaaaaaattaatagatgtcaaattttcctttttaagttaccgaattttcttaatttctttttagagttgctgacttttcttattcattcagtattgcagccattctctacgacgggcgtctggatgaaagaaaggcaatgaaagaagagttagctggggaaggaaaatttaatgtgctgatcacacattatgacctaattatgagagataaaacatttttaaagaaaattccttggtgctacctgattgtagacgaaggccatagattgaaaaatcatgaatgtgctcttgcacagacacttgcagggtatataattctatgttcatcataaaggctgcatttctttgatgtttcaacatatgcctaattttttagtctttttttttttcctttcagaatttgaccatgctgtttccatggatgtatacaccatctcatttctagttatttgtggtctttgtgttgcattttatgcagttatgatatgcggcgaagactcctattgactggtactcctatacagaatagtttgcaggagctatggtccctgcttaattttcttcttccacacatttttaattcagttcagaacttcgaggattggttcaatgcaccatttgccgatcgaggagatatttctctaacagatgaggaacagctgttgattattcgtcgtcttcatcatgtcagtgtcttatcattgtttcctagtgtcttttttctatcatttatactatcttcttgggtccttatttgctatggatttacaggttataagaccatttatattgaggaggaaaaaggatgaagtggagaaataccttcctcagaaatctcaggtcatactgaaatgtgatatgtcagcgtggcagaaagtatattatcaacaagtcactgatgtgggtagagttggactagataatggtgagtaggtttcacttttagttttcacattctttatggcaaacactcttttcaaaatgtcttgtactcgtgtctttattccttcccaacaccgttgttagcaatttcaaatttccagcagatactatttataagacagattgcatctacacattcaataatgttttacttttacttatggttatttttttgcaggtagtgggaaatcgaagagtctacagaaccttacaatgcagctgagaaaatgttgtaaccacccatatctttttgtgggggagtataatatgtggcgcagggaagagatcatcagagcatctggaaaatttgaattgctggaccgtttactcccaaaactccaaagagctgggcatagggtcctgcttttttcacaaatgactcgtcttatggacattcttgaaatatatctacgccttcatgaaattaagtttcttagacttgatggttcaacaaaaactgaggaaagagggactctgctaaagcaattcaatgctccagactcccctttcttcatgtttctcctaagtactcgtgctggaggtcttggtttgaacttgcaaacagcagatacagtaattatttttgacagtgattggaatccacaaatggatcaacaggcagaggatcgagcgcatcgtataggacaaaagaaggaagtcagagtttttgtattggttagtgttggatctattgaagaggttatcttggaacgtgctaaacagaagatgggtatagatgccaaagtcatccaagccggtttattcaatacaacatcgacaggtttgttatactctactcatgttattcaatacatgtctgccatgccaacgatgtcttaaaatacgtattcatc

SEQ ID NO: 2161 - DNA, 1551 bp, Cannabis sativa
ttctcaaactagagatagaattttattgttatgattaaaaaaacaaaaaagaatattattagatcgaacctgttgaaaaccatggtgagagtttcgaaattattgggttcttctaagaaaaacttcaaatcagcggctcttctggcggtgttgaatctcaccacgggagctctggttatgccgtctttcaacaacacactgaaagatccaccggaaagatgaatggctttacagccccgattggtgctggctaccaaacaaccctcagtggtcgccatcggaacacaatactctcttccgtcaagcaacagaggtccggctatccccaccggaatctgaacatacccaactggcatctcacagcactgacccaaaatcgaatcgtaatcgaacccattcaatggcagaccggagagagattttccagtcaatctctgtaacgcttcacgacgaatcgaagccgctctatgacaatcacccaacttagtttcaagagaatacgacggcgttttcccatccaagacggatttaatgatctcttcgtcttcttcggtcgtcgccggaactgtgtcgattacctttggtaaagccgatttggaggaaacaacgactggtggtgcaatttggggaagtgggcattcgagtgcagctccacaagggacttttcgagtgtcgtctttgattaagattgattcttgttcttcttcttcatcgtcggcggcccatacgtcggtggttggtcggagaatcaaggactgaacgaaatcgattccgaaaaagcccaaaagataaatgaaggaagcgattaaagcaaagacggcggagatttcggaaaaagtgaggacatggagaggagttgaggtacggatcttctcgcgccaccgtgtaaggaggaaataaacgaccgagaaaaacagagtgaagaaaacgacgttggttacgtacagaggaagaggaagagcatctgaagcttttgggctttcttcattatgatgggccttttttaaggccttaatgggctcggccggcccagacttggttgatcgcctgcttctgacatccattttgatggtggtggtggttttagatcaaacggcggagaaaagaaaaacgatgatgattgattctgatgatgatgatgatgatggaccagaaacaaaaacagtgatccgaattcagaaacacgttttgagtttctgtttttcggttctggttttgtgggtggtggagctagtaataaggattgttctatatttatagtgttggtttgaggcaattaatcatattattattattattattatggtcttctcacgtgttgacacgtgctatgattgtcaatgtaatacacctcaatttcgatgtataattaccttacgttaaccctctcaacatagttttttgtcttactcactcatttcttgtttccttcctggcttatttttttttttatttttcttttttaatatttttggatacgtttttaaagagatgcacttattatttattttggttaattttttttttttcataatcttacattttgtaaaa

SEQ ID NO: 2162 - DNA, 1338 bp, Cannabis sativa
tctatcggaaatgaatttgatgaacccaaaccttagattttggggcgttttaatttgtgattttgatggacccatctctagatgtttaggctttttgattgggaaatttacatagtatatcaagttttgttatttttttacaaaaatactgtcagacggaattagttacttttttactgtgttttttataagtttcatactgcattatactgtgttaagtttcattggtgctctactggtattttttagttgttttactgttgttttgagttgttctgctttgtgttttactgctattttataaaaatactgtatttttgaaaaaaattccgtgtgacagtatttttgtaaatttcccttttgatttgtgttcaatagttttaattttttaattggaattctttatggttttatctcattattttatttgctgattgtgatttttgttgttataggtttgatcctaccatttcatttatgtatggatttttttggttttattgttttgattagatagtgatgacttttacaagaatatgtcatgagtttgttataactaaaatttgaaaaaaaaaattggtatttttgttatggaatattatcatttttttgtatagaattacttattaaatgaaatgatgtactatttttccgatccgcctgtgtgcttgatatcaatcaatgtaaagaccctcaaatcttacatgactattttggctagccatagattaatcaattttgtgttcatgtatttgttatcatgctaagatcaaggaaataattagtttgagattcaagctagagttatgcagaataataatatgtagattatacatattgattaatgcatttgatgtatatacaggttaagctacatgtttatctgtatatactgtattttgtatttcttatgtgtagcacactttaacactaccattaaattttgatgtactagcttctttaatttgccaactatctatatatttttatttattatatatatgttgatgcatcattatatgtaatattttttatattatttcacgccactttgaatttcttttgtacatttttaattttttcatgcgatatgatatatatgctatgcatttgtggctttatacacatattgtgttatttgtttgttatgttgcacttgatgttgaataggtttggacattagatacttttctatgtggcagtaatttttctatttgagatcttttttttctctcttgtggaacatgttttcgactaaataaccttgtgaaagaacatcattgcataggaattctctcttggatttaggtttttcttcttcttttaaggaatctgaca

SEQ ID NO: 2163 - DNA, 1960 bp, Cannabis sativa
tgtttaataagaaccattccatgaaaaataatatactctaatttgtttgttgtagattttgtttgtttatgtttttgctcatagcatttgggaatttgctgcgttttgttcatttgttgaggaaataatgtcaaggtctgtttagttgtcttgtttaagttcataaaatttacataatgtaaaggaaggagtacatggtgaccttttcagtggaattaatggacaatagtagaaaataatactctatacccttgagaatttaaaatgcatacatcacagaaagtaagtgtatgctataaatatacaatgtaaattaattgataagacattccacatcgcaagtgcttaatcttaataaactctatccatttcatttaaggctcgtttgataaactatatataagggtcgaattatattaaataacaagtaatattatgtttagaataaatattgtatagtattaattattaaatgttgtatagtattaattattacgatcataaattttaataaaatgtgaatcgtattatttaatatataacaaaagatttgtatttgcttgaattgggactctcgatttcgaacttcaaactcaatcccaaacccaaacccatacctgaactcggacgtgatcttggacccagactcgaaccccaatcccagacctagatcccaaatccaatctctgaactctgaacttggaccccgaacctagtcccgaattcggacccttgcttggtcctgaataggggtcagagttaggatcgagtttatggtaaagataatataattttacacatactattaatacaaatcaatatcaaatatagtattgtattaaataatattaatatagtccaacataatattatataatataatataatatgatgtaccgaatgagctcttataagctaaatttcaataatgatgactaattactagatataaactataagcaagtattttacatgagttgattaggttcagacttaatggtcttttacaacaagacaaagaacatttcagtgcagttattgtatttgtaggcaatatatctatttactaattctccatcaatttctatttctctaccacataatttacatataacatatagaaacaaaatattaactggggcatcatatattataagtagttttgatgaacaaaaatagactgttgctgttctttttatggtattcgcttatgccacttaattattaggattttgaattatattcaattctttatatgttattattattgtttgatcaattcgtttgttcaatcaactttctctgagagaattactatgctgatattttttttttcaattaatatatatgtataattgtatataaaatttcttaaaccgtctaaattaaataatttgttcaaatcaaattgaaaaaaatcgacaaaattataaatctcttaatctgttaattggacgagttaaaaaataggttcaacctacccaattaatttaagcaatatatccaatttttttttttttaaaaatcatatttgttttttttttttaatctgaaaaaaattatattttattattataatatctatatatataataaaaaatttatgtagtactccttaaatagttattttggtagattcttatatattacatacgttgtagttatttaagatcacttgtaaatttttagcatattcaaatagtttatagtgccagaaataaagtttaaatagtacttaccacgcatataagaaaaactatcgtacgtgcaacaaaatatgtaaaatcctatttttaacattgtaaactacttgaattttctaaaaatttacaaatagtcttaaataactataacgtatacgatcgtaaagaaaaataagactaaaaaactcatttgtatacaaaaatagataagaatctatcgaaacaccttatttaaaaaaaaataactatatacgaac

SEQ ID NO: 2164 - DNA, 1191 bp, Cannabis sativa
ccaaattggtgaaaaatttttttttttttttttttttttttttttgcgtcggtttttggcgttgattgacgtaaaaacacatttttgtagtagtggaattttaatgcctaccaaatcgtgcctcgaactttgatatgtaccaaatcgtacctcttgaatttttatctacgttaggattccattattaaaattagacaaaagtctttcagtccaacaatcttaatagtttaaggaaatttttcacaatctgaaaagtttagagaacattctttggtacatattaatatttaataggcaaaaatcttaattactcttattataattttgttaatttattttggaaataaagtttcataagtggtaattatttaattacaaattcgtactcatatatagtatagtataggtagcaaaaagcaaagagctttcaaaatataattttgggtccctttgttaaccggatgggaatggaataataactttattacaatagttattaatgtaattcatgcatggctctatatataactaaccaatcgaattaatatgctcgtgaacgttttgccaattcccaaccatcgtggatattggtataaaaagctcaccgccattaaatgtcacactcacactcctttaattatatacaagccactagcataagttataaatgcatatctactttaagattaatttgcatcaataacattatattattggacacaccatgaaagctataaatagaaatagagctgcacacatgcatgaaataaccaaacacaagacaaaccgggtttattattatactggaacaacaacaacctaataataaagtcttcctaacaagaaaattaaaactatatttagtgtgattaaatctattaaaaatagaaaagaaatttgtgtgtattaatttgtggagtttatattacttagtagtttataaattttaacttcataataaaattttagtaattaaataaaagttacatttagtttcactgctacaaaaagaattctttttgtatcggtcaacataacaatcaaacgctagagattgacgtaattaattataattatagttcaagaattttaagtttgttttgcaccaacactaccttgctctaatttaaaaccgacacttagctctttagtgttaaactggggttaggttgctgattttgatatatatat

SEQ ID NO: 2165 - DNA, 1711 bp, Cannabis sativa
tgatgcttatttcctatgcagagactgtgaagcttcacaggaagggagaacttgaacctttgctggtagaaatcaaaaataaaaaggcacaaagctagcttgctgaccaaatttttgtttagagatttcaatggccttgcaatatgactccaaacttgcacatttgtagctttatgtttcatataagaacacagttagaaccttattggcttgatttgttcataataaaatgataaatcccatttgatataatgagaaaatgtgtatttgtttacctttactcttgcagatgtttagcttgtgattatgtgaaactaacagaaagatgaagcaggcgaaaatctgttattattattatacaataaagcataagaccaagtagaaatacataaagataacactaacaatacattgtgatcattataattgtttatgatgtaggctctgaaagatacttctctctaaggcctttgagatactctaacaactgaggacgatcagggtgattttctttgatgacatcaacattgttgaagttttcaatccaagccattaaccgaggtaagctgttgtgttcaagtattttaacacctgctgcctcttccagtacttcaatccatatagctatcaacccaaaggctaagtcagccattcctatgtcgttgcccccgaaaaacttcttgtcaccaaggccattctcttccaagattcttagaacatttcggacgtctctggtagctttttcttgctcttctcctgttgtcttccaaaacctaagaaattgctctctctaaattacacaaagagttttttagtcagtcacagtcacaccagtcaagtctaataaaagcacacacacacacacacagagcttatacatacagtagtttacctgatcatctacatacttcatccaaaaccgggcgatggctctttcgttaggatcatccggtagcagcagaggattttgaggccacatctcatcaatatattcaagaataacaagagactctgcaaatgattttccaccatgaatgaaaactggaactttcttatgtaaagggttaagctgtagaagcaatttgctcttgttagataaatcttcttcgatatattcaaactcgattcccttaagttttagagcccagataaccctgtaaacatatggactaccccagaatcccactaccttcacttcctccatttttgatcagctttagctctctctcttccttcctattcaggtgagttttttaatgcttggttggtctgttttgctttgatttcaactactttcctagaagttacgtgagaaagaaaaatgcttattttaaattgcaaatcaaatttggctgctagtgtacaataattgcatgaatcatgatcacataaacatatcatatttttttccaaaactttgaccatgtctcaaaattgttgttggaacttggaattgtcttaatcctatgtttggtatggaagaaaaagttaaaggaaagaaattttagaagagaaaatagagagcaccaaaaattggatgtttggtaggaaaggaaataggaaagaagagaaaaatgaggggaaaatttttaagtgggacctctctaaaatgggaagagaagagttggaaaaggaaacgttttataattgtataggaatatgaaattactaaaattgtcatttcttacactaaatttatattattaacttg

SEQ ID NO: 2166 - DNA, 1788 bp, Cannabis sativa
cacagttttatagcatgggttgcaatccaggagagattgaaaacaaaggatcagttagcacgaattgggattgctcaagatacaacatgtgtctatgttgccaggatgtagaaacatgtcatcatttgttttttgactgtccaattgcagcagaatgtttaatagcagtgaaagcatggctgaattggcatgcttctgctacagagttaccccgactgctcagatggattgggagagcaaaaatgagcaagtttcggaagcttatctttgcagcgtgtattactggtctggtgtacatgatttggagtacacgaaatgctaaaatttggagtcaaaaccaggtgcatgccgatctgttgattcagcagatcaaattttcagtgaagcagcgagttacactttgttggccaaaacgggtcaatgaagaatacaaagaatggttttataagttgtagctatttgtaaataagaatttatagtcaactaatacatgtatagttattcctagcctttaaaaaggtgcaattagtttgtaaaaattttgttgtgagcaatacaaattctctgattcatcaaaaaaaaaattcaatttatcaaaaacaatattgtaccaaatttacgcacctgtacggctgaaacatttttgtgccacgtagatactatgatacaaatacaagaaggagaaagagtaacatatagctaataatgattgaacagaatttcattttctactactacttattttcgtgcatatatacaaagaaactctctctactccctttatgtatggttcagatggttgatgatgatggtcaaggtcaactttgaaaattcttgtgaaagctcaattttgaaacacggtaacgacagtggttttttcaaaataaagaaataaatatgaaaacaaattaataagtcttctatccttatataattactttcaaaaaaaaaaaagtcttctccttattaattacgaaaataataataagtctttgcgactttctttaaattggtaaaagatgaaatagagaaaaaaatattagtaaatggtaacacgttaatttcatattaattaggactttataattaaatttataaatttcaattataaacttatgttaattttattaatgaagtttatattttgggaaaattattttatataacattttttatttttatttttttcaatttacagtttgagttgttccggtagtttctacgtggattttagttagttgctatgtgagtttttatgtgaattttcgtaaaaaatacaaaataaaaaaatattttaaaatgtaaaaattaaaaaatcttctatattttatcaatatttgagtaatataaatatcaaaataaaattatatgttaaaatacagtaatataaaaattaatttttatatatattgtttatcaaatttttcgacaattaaaaatatatgaagcatttaaagctaggaaagaaataaataaaatggttgagagcatgatatttatgtagttcagacgttaatgagccttagtccacgaatcaatttggaccgaagctgaaaaaacaacgggaaacaatttctcgtgtgccaaataccgtcgtttaaagaaaaaaaaatacataatcttagccgtcggctctcaagtgacgacaaaagatttcccgtatgtgatccacaaccataaaggcttcatccgtcggttgtaaactgacagataagcctaaccccttccctaactaaactataccctaacataactcacactttcacaatatcaactgccccccccccc

SEQ ID NO: 2167 - DNA, 2833 bp, Cannabis sativa
agtccttttcgagtgtagactttagagatactgtcattcttgaactctaaaagtcttttagtgtatttaactaaatcttttaagtaatatatgtttttagataatgctaattaagatttttatcctgaaatttgacatgtaccaaatcattttctttaaattttactaatgattaaaaatttctcataagctttgacatgtatcaaatcatgcctttaaatttttgtccaattttattcaatttattaatttagtgattgttcatgtactaaattatgctcttcgaactttgatatctaccaaattatgttgctcgaactttgacatgtgtcaaatcatgccctcttgaattttcatttatattagattttttttactaaaattagaccaaagtctttaaattcaacaatctcaataattcaaggagaaataacagtttttaaagtttaagggacatgattaggtgcatgtcaaagtttagcaaaaatcctaaaatcccaattagcctttagattacttgaccatttttatatatatataatatatctttatgcacgcaaagtttcctactaaagtttcctactaaaagcttcacataccaagaagagaaactctgtttctcctttatgtgtataaagatcatgcatttttttttcaagaaaataaaagtggtactggcaaatatctgtcacattttgatataaatcaaagataattgtaatataagtacattttaatggattttattttaagtagtgttttgagagacatttttgttgtactagttcttttgctgggaggaagagtggcggcatcggcagctcggatctcgccagaggaggaaaggaaggcatggctaatgttagcatatgtgagcacagtaggagggaacctgtcattgctgggatcagcagcaaatttgatagtgtgtgaacaagcaggcagggcacaacttggatacaacttatcattttggaaccatatcaaatttggactcccttccactattattgttactgctgttggtttgactgtaattagataggttttctttcattcctaatttatatttatatatgtgagctctataatgttattgttaagattgtaaggttgagttccaacttctaataaccaccaattcaacaaatctcagttttagagttgatttagctacaaaaaaaaaaaatgctacaactccatagtcgctttcgtagttattttggtaaatcctattgttgttgcggagaccgattagcaagtactaatagcttattttatttcttatttggtaatcaaaatttgaatatttaaaattaaaaataataaataacgaaattgaatgaagaacaaaaaaaaaaaggtaaaaactcaaatatttatataaaggagaaattagggattctaattttcttaattatccactttattatttattaatgcaatcacaaaaataggacttctcactaagatgaaagacatacaaaagtgttaaatatttagattaagaaatataaaactcttgttaggattttgacaactcaatccctacaccaactcaatatacacattagatcatcaaggtccaagcttcacaatcatgacatactcaattacacacatacacgttcgaattccaatatttgaatgcgaactgaattgaacaacttttgaatattcaatttgcatacaaaccagttaggattagcaattcaaacatgaattaacaatgcaatcatagtaggaaacataaataataataaatctctataattaataaattacacttatttatccacttattacaaaattaaaatttatactgaagtagatgagtaggatcataatctcacttattacttgattatcccataatatatataaactctaattatttaccaatagtcttatcgagatattatagtactattcttcatattctaagtgataacctacatacatgtgcgagcattcaatgtgttctagctgaaaggtgctaatatttgaggtttatggtgggagggatgcgagtattcaacccttaggtaaaacaaattcagaatagttccctttcggcctattttttcctagaatgttactacccagaacctagcctatcgttttcatacgttcttaccctaaaaacccaaaagaacgattaaacctcaacttaaccaggcatttctttgaaagactaacctttgattttcgaaggagtttttgattataattctaacttcaagatctcttgaaacgcaagtttcggcgaagaacctgttagaaaagcttctgattcaatggatgttttttcaaatttttgagaggaaaatttttagaaaacttgaaaatgaaagggaactgagatttttatttcatattaggaaggcttatataagggtcaaacttatttgttaagattatgatacaaggcattcgaagaccaaaggtcatataatccaatggttatctcgagtcacacctacacgaaccccccgaagggtctagtgacaagacaaccaagagtcaccgcgatgtggcggaagcaacttgcttgtcccttaagaatagtttttctatttgacaaacaactatcattgcaaaactaagggcatgtattataatacaaattttccacctaaaaatatgagtacaatctcgtgaaaagtcgacatgtggacccatttttccaaaggaaaatagtgacgtgtcaataacatggctctcgaagagttaacctcgcatgactaaaacttgcgagaggaggcgatcgagacaagagtctagtcgcataatgtttaaagtccaaatctgacttccactagcagtggttgta

SEQ ID NO: 2168 - DNA, 2150 bp, Cannabis sativa
catctctatatggctcctgaatttgcccccacaaaaatattttacatatgttaaaactgaaaaaactaagtggcaatgtgccaaatagcaatgttcgaaaacacatagcacttatgcttatgtagaaataatctttttaaatacatttatatatatacttactgatgaaaagcatatgaatttctgtaaatggaacctgttggtataaaggtctcattcttatcagacttaaaattttttgaaacaatagcttgacgaattgcagctctagccttagccaaatcatactcaattctctccaatctactcttcttcttgatgatctgctcagagcaaattaaaatcacacaactaagattatctgcacttagcaaacattcaaatcataactaattgacaattaaataataagtacattattagtattatatacataattacttcatctaaatttacatataacataaaataaataaataaataaataaaagaatttcaatgatgctgacctttttaggagcaatctgatgatcattactaattatggttttgttaattttgtgcatcaaacttgagaggaaagagtctagtgaatgttttagtggaataattgtatcattggtgttggaaatattattattaatgataatgggaggaggagaagtggtggtggtattaaaggtaatactgaaagaagaagacgaagagtgaatgataagctggttttggctcaaggttatattatgagagaagaaaggaagaagcagaagaagcaaagttgaaaccaacaacaaaattgtggaacggcttaaggttgaagccatggctttgtctggtggccggaagcgaacgatttctgttgtgtttttcttcttcctaacactctttctaatactccattgtcatcaggaatatttacttgaaggtcaaggaaataacaacgttttaccatatatttgttgcatgatatttatagtatatgatagttattttgcatgctcaattaaaataacacttataaaacctatgctttttgttactataatactagttagtaagttatggtccatgcatctatattttacagagcaaataatatttatatatatatatatatatgcttgcatcattatattctttattcgtccaattaatatacttttgattagagaaataatgtgttaatattgctattggtccaactaagtattgggtctcgtataatttaatataataacttttagggagtatcgatagcgaatcgcaaggcgacaagcctaaaggtgctactaccaaggacgaatccactcatattagtaacaaaaatattgccttttaaaaaattaaatgtaattttttttatttgataattatggaccaaaatagaagaaaatttcctacaaaattaaataaatataataatagtgattataatgtaagtgtaaatattttttatgataaaataagccacacaaaataaaaattctgagttcgtcactagtgtacaataataatactccattaatatcatattcttttaataaattacaaaccacttgatctatataaatatatattcaaaattatattaatataatgttagttatttatgatagcatagcatgctgtttccgatatatatgtatgcccatgtatataatttgataaatgaataaattcaaacactaccttataaaatttgtaaaagggtctctacaatctactacaaaaagtgtattcgtaatgaaacaaataaatttatatattttaattgaaactgagagaactttgaagttgacatcacgttgtgcatacattaatatataatatgatattgaccaaattagctttatagccctttccgtgtaaatattgtgctcaaattaatattagaagttaaatataagtaaagttgaagatctcatggatcacaaacttcttgaacctaatgctctctttgattgaacaagaagcaataatactaataattattggagcgtgagaagcaatggagagaaaatcacatgatccgaaaaatgcacaaaatattatgcatgggatcgatgtgtcttggaaagtgttctaaattattgtaaaagttataatattataattacctatagttaccacatgtaaaatgcatggacctt

SEQ ID NO: 2169 - DNA, 1755 bp, Cannabis sativa
aattatttcagatagggcctaacttacaccaatggcatttcttattcggctggctatttacctatatgcctttgaaattgcaaaggtaagactacagccgtacagtcagacatgaatttcgcaccctgataagggtaatatagcacatgcatgtcactatagtaaaatagacactatactatcagtcagtcaagcatgttgcatgtccaggactaagaggtaccttaagatgtcaagtatcacaaaatgtggcagattgttattggtgcaattcactattggatctcacacattttgattaaataaaaaatatggaagactgctaaccacttacaacaagcaacatcggtatagtgttgggcactttaatgtgcctaatagcaatgctgatattcaaaagaccattatatcatacaataggaccgatgtagctaagcactaaagcattactaaccttaaaaccatcgacagagtcatttaactatacaaaacaaaatagatactcaaaggattaatatatattaattagccttcttaaactactcagcaaccgaaaatcatttcaacgatgcaaaaacacccacccactttagcttaacacacattagtaaagcttccaaacaaaatcttctcatttcctttttgaggaaaagcaagcatgtatcaaatttgttcaaataaattctttaacttctgataccttcccatccatagaatcagatcccagcattaaacactaaatatttaaataaacaccattaggaccatacacgaacatttccaaagagaccctcaaaacattttgctgaaaaggcaatcggtgaatagggattataactgtatcaaatatgaaatcgttttccagctcttttaaaattatctcatgaaattataatactaatcatgggtaaactaaattttaagcaccggtaatgcacccattacacatgacaagtttcatttcgctcttgattctcattctcttttttcactatacttaaccggacatgataaacaattcaatgattgattgccactgattctagatgcaacaaaacatagtccactttaatgtattccctccattcttatcaacagccaaacagaatatatatatatatacacagtacacacacgtacgtactagactagactagaaaaaggaaatataataacaatacctgccagatgatgactggattcgaagtctttccagtctcatgattctccacagccacaggaggaggaaccgccagatgagccttggggaacctcactatgtcaggcttcgaactctctccaccatcaacagcagcccttccttgtcttggttcaacttcagcaacagaagcggattctgtgttgggctttggcttgaaaaatgggaattgatggatgaatttggtaaatagtgagaaaatgtttacgggttggtttgggttgacttcattggtctgagtttgagtgttatctgccattgttgaggtggagagagaaagagggaattggaaggtgggagtgagttaatagatagaagaaaagaggcggagaatacagagcgaaaaatgtgcatgaatgaattgaattggttttggttagtttgggctttcttgtttcgtttagcgattttggttctttggaacgagagaagagaagtagtgaggtgtatcccgaagtttttagcattatcgcacttgtcttattctagccacgggtgacggccctctttcgtttatctaaatattttgttttttt

SEQ ID NO: 2170 - DNA, 880 bp, Cannabis sativa
aaattaaggggacctacttaagcatgagttattatgactatgatagatcattatcaggggagggattgattcaaggactgtacactatatacatacatggctttgcagtgctgcaactctctgtccaatgcgcatcatacaaaataatgttatcgtcttgtaaatccaaaatataaaaaaataataacaataatcattgtttatatatgatcatcaccacacacacacagagggagagaaagaaattatacatatattatgttcagataattcagaagagacctaataagatccgacgaacaaatgattgctattgtatataatgtcccctctggcctcaacactgtgtcgctttccttgggttgggtcccataaatatgtatatatgtattatatacatgtagttaccaagtgtacatgtatattatatacacaatgatgatattattattattatgattattatatatcgatcgatctcttagctcaccgccattattattattatttatggttgcgttttgtatttggttggcttctttaaagttcatttatttttattttttcttcttaaatttgtattatagtctttggttccaacattacgatctgcctcgcgcccataaccctagctatagctcatatacgacagtacaattcttacgtcaatcctctgactacgacttccatctcccatcttccatcattatcatactcacgctcctttcacgtgactttgtcccaccaccagcctcttctttaattattatttactattatctataatatatataatatacatctaagtacgtatagacgtacataacattgccctatctataattatacgatactgctttaaatagttttctactacaca

SEQ ID NO: 2171 - DNA, 2808 bp, Cannabis sativa
  modified_base (1056)..(1071): a, c, t, g, unknown or other
caaaaaaatagaaaaaaacttgtataagtatttaaggtagcaaaggtgatgtcatgtgttaagatttgtaattgatttatggcttttttggacttctaaatctaatcaactaatctcatctaccttaattaatagaatcacaaaagtaaatcattaaatattaatttaattaattaattagatattggaggggtgtgaatgtgattattcaaaagttagataacttaacaaccacattaattaaaaacattattaattaatattaccattaatctaataatcagtccccacactaaaaaatatattaattaccataaatcaaagtcggcttacttatatatacttttttatataggttctttattttgttacacctactattacttgaaaattttagctatatatataactttaatttaatttagttgacttttattctaaatctaataaataaactacaataaaataattcaatagttgatatcatattcgatattgtgttttgtaaaagttattaatttaattatttgttttgtacaatgataaattaaattctgtattttttaaaatgatacaaaatagtactcgaatttaatttttgataatatatttttttaatataactaacttgaagatgatttctagcacgaacatatgtagagaatgtaccatttgacaaaaaattaatttaagatactattttaaaaaaatataaaatttaatttgttatttaataaaacagatagtacaatcgataaatatatatatatataaaaataataatatggtatgagaaatgttaatgttcataatatgttacttgtatatcttgatgtagaaggagataaaaaaatattaccaccaaaagaacaactaataaaattatatatataaatattttaaaagaaatatatattactatataattaatataagaaaattttacaatgtatccttttaaaactgatgcactgattcatctttatttgtttcggtattcgaaataaatttatactcaatttttttttcatagtcatgtacgttatagttatttannnnnnnnnnnnnnnntttaagaaatttgaaaaaatttatcacgccgaaaaataagattcaaatagtgtgttacatgtatgactattttattttatacgcgtgtgaaatagattgtttgagcgttgctttttatactataaattattctgaatttatcaaattttatagaatatattaaataactataacgtacaagtagatggtgcattgtagaaacaccttataatatataataatagaaatatttactatgaaagtatttaaattatattgttgttaagtattcaagtgtattttttatcactacaaaactattttagattaacttttcctgttgaagcatatactcggggatgggtgcagggcagacgatttcaaagcggactccttattcattagatagagaaaatcaccaagattttgtgatccgatatatgttatcatgttaagcagatgtctatcgtccgtcattattaacaactaaactaaaaagaaatgtcgttattaattgattgcgaatggtctcattcaattgccgctaagcaatttgtctcaaaaaccaccattatccaacctttatcgttcatctaagaactcctaaatccccataaacatttaggaagtaatagtattagtgtgatcatataatcttctaacaagggtaataaatatcacaagctatcatttttttcttcatttttcaggggcgactgtcctgcttcgcttttatgtcgatcggtctctgatcacaaactatcattttccaactttgtggtatgacttatttgtccaaaatacaatgaaaggaatatttacatctaatttgcgtactaccgaaagcaattaaaatcttatatttgtcaaaaagaagtaaaaataataataaaaactatctttactattctctataatatttctagaatgagtctatatcaaaccacatagtttaatgcaaaacaactaattagaaactgtcacgtgttatttcttttattagtatatttaaattaatttttttataaaaaaataaaagaaataatgatttggaccaatcaaagactgttacgtaatcatttacttacacactatgaggtagctacaaaatttcaaaaatttaatttaaatattaataccatcaaaaattaaacttaaatatttatctacaatcagaagttaaacatatgtatttatgtcgtaaaacatattactctttatgtgtaatgtttctagaatgcaatctcaatcaaacatagtttaatgcaaatcaactaattcccatgaaaattagcaattttggtatattaataatatgtcaccttcaaacttttttgacattattcttaatttcttatgtttatgtttttattttattttatattattttgtgatgaaatatagtttagtactattcttaacttgattacctattgactctcatgatttttttttcttaatttttctcataatttaatccttttggtcttgtgtaatagactaatatattcttataattttctttttaattgacttttatggatgttttatctagaataaaattgaagaaaaaaattggcaataaataaaaccagatttttttaatttttggcggaaagtaactgattgaatgagtcaagaaattaataattgtcaatcaaatgttaatttcaaattattatatttagagaatgatgggtactagtggatagatattgtaataaatcaatttagtggatatgtttttttttttttttt

SEQ ID NO: 2172 - DNA, 694 bp, Cannabis sativa
aaaaaaatggaatttttttggctcagagtaaaatacttttagctcatacggaaaaaaaatggaatttcttggcacagagtagaatatataatctcttcatgaaaaagatacaaactgcaccctacaatgatttcactacaggttttttaaaataggcaacttctttttgaaaaggaaacccttaactagtttttcaggtttgcctcaaatgacagatgtgctctctttcacaccagttctctaagatgagcaataatttaagacattacaaataactaatgagtagacatgtttggaaaggatgcatttggatgacagaagggtagaacagtgtgaataaaggatgagaaagagcacaagattagtaatatataacctcaacaataagtgactgagtctccttgtcctctgcaatcatctcgaatgtttgattccaaacaggattcaagttgttatcgataacctttgttttaaccttaaacagaggtcgtatatgcacgaccacatatggatcagattttccaatcatttccatgtttttcaaattattagcttttactactgttaagctaagttttccctgcggtttcagctccaaatcgctgcataaaacaagacacattgcatagattagaaaagagtaaatgtgtaatcatgcacaaataagtcaaaccaaaaaatataaaagtgtata

SEQ ID NO: 2173 - DNA, 3927 bp, Cannabis sativa
ctaattgttctatacgagttaagaccaggctgagagaccaaagattcactaaactattctactggcttaagtttattttttccataaatatagatgttcgcaagtgcttaaatttgtcatgttcatagtcctaattcctatgagactttctccaagataatgttgaaaaaaatttagaatatatatatttctagaaattaactataagaagaaatttacacaagtggtttatttggtcgaaactcgaaagtattgccatgaaactctcaatgacaactttttatatatgtatactctttctcaataaatattcaaaggttatactatctcatgtagtacacacacattaattaacaatcaacatcaattatatattctacattacatatacttaaactataaatgtgtaatttttgtacacacttaaattatattagatttagctttagtttaggagctaatattgatttttaatattcttcatgacaatgttagctctcattcttagaactgtcgaactattacaagctcagctcacggcaagccaacttgcttacctgaatttgatttatctcacttaaattttgtcttgtaaaactttctctcgaagaaatgatagtgcattttcacgtatttagtttttgcaccaatcatcatctattagttggtattatcagttgtcttgcaacaccaagaaattgttcagatccaagtataaatttaaactatgtagttaatcagcatcataataacaaactagcttataattttcactttcctgtacgcaaggccatagtctattgttttcttttatatatcttagtagacgtcgaactacttccaagttccaaatatgctttcaaaaattttatgtacgacccatcacaccaattgtataagaaatattaagtagattaaactatctaccgattgtcagtaggttgtttgattttagaattgttttccttcatgtgcacatattttgcagtttggtttcattggtgttgaaatcagctgcatttatgcatttcaaactctttcaacagatttttggaatatttttgttgataaagaaatattccttctcgagaatgatcgattttgagccaaaaaaaattgtttcaattgactaaattccttcatttggatacatactatgaattctcttttgttcaagatatttccatgttgagttagcaaaaaaattttagtatgtttccaaataaaagaacttggccaactcaaataatgtcttggcctagagattgatctggcacaagaagaaatatttttctttataaataaaaatattctaaaaatttgttgaaatagtttggaatgcttgaatgctagccaatttaaacaccagttgaataaaactctaaaatatgtgtacatgaataaaattttttggaaaatccaacaatgtaccgataattagtaggtagtttaatttacttaaccttgactcgacttgatatttaaagaagtcacatttgaaaacagttcgacgaacagtaagataataaaagataaatacacaatggagttgtgtacaaaaatgttaaaaattgtaagctagttggctattgtgatgtgaaatatgtaaggaatcacaatactcgtagatcaactacaaagtataagtttatgcttggatctaaagtgatttattggtaacaaccgatagtgtctttattaataatggcaacttaaaaaagtatatagctaatacaactaatgaaaaatttgcaacaatcaatagattatgcaatctgttatgctgtgacaaccaatcaacaatacatttagcagaggatccaatctttcatggaagaactaaagcactatcattttctttaagagaattttgcaagaaagatttcaatgagacaaagattgagtatccaaaagtttgaaatcttttgcttaataatcaatatagctcttaattaaaactaaatctaaaataagtatgtatattaattaagcatatataacttaaatttaaataatatatataatatgtagatagtctccacttttatagttcttcttagagatataaaattattaacaatctacatcatttatatccacacacacactacatacatataatttttggttaatttatatacatacataatttgaatttagttttaatttaggagctaatattgatttttaaaagacagcatttcaattgctcaagatttgtcttttattaagactatcttcaatcaagatcaacaaaatcactaatccaagggaactagaaaagcaggcacagtagtggattacgtaaaaagagaagacaaatacagtagaccccctttcataatagttacaaagaaagcgattgctaaatgctttaaagtttgaacccaagaacactttgttgtgcctctttgtcatatcctacacctaatgattaaaggaatccaagttaaagcttttattcacttctgggaaatcttcctaaactgaaaaggtttaagcataatctgctattctttaatttgatgaatcttggtagcgacaactgttgtcatttcctccaccgtctgctatgcaaaggaaaagcctttcgtatgcggctgtcatcttcgtggctgtgaatacctgcaaacccttttgcctagctgcctgacctttctgctttaaagcttcttttccatcgtccagaactttagacaaggtattctttaacgaagctacagttggggagaaagtataacccatttcagtgcccactattacagaacctgtaatgctagcaaccctggttgccataactggtttaccagacagaattgcttctagtaaagtatgatccaatccctgagctcgaagagttgggttcacaaaaatgtctattgcactatagaaacccgacaactgagcttgatctaaaggccccaaaacaagtatattggctccaagatctctgtatctagaagcccaaggaccatcccctgcaaccagaacaacaattctttccctgaatttatcactttcagttattaactgtttcaaagcctcgaacattattggatgtcctttatccctcaccagccttccggccatccccaaaactattttcctcgatccagggataccgagctgtaatttaaactcctcccctttggcaatatctggtttaaaaatttcctcatccactccattaagaataatatgaactcgatcttccgggatcatgtaaatcctctttaggatatctccagcatggtcactggtggcaacgtggtgagcataaaatggaaagaatttcacctcattaacaacccttaaaattttctcagtcaaaacagttgcttggggttcctcagggtttcgcagaagctcctgaatgatgtccgaatgaattgtttcataggcaatcccgtgccaagaaacagccaggttggttagaagacgagatcgagtatgaaagagcccaacactttcagtatgcaccacatcgaaaggctttccagtagagttttcaattaggaactgcttccagatcgtagcttggtccaaatagcctccggctgttggttctgacaagtgaaaatataaattgcttattgtgtagctaggaaaggaagaatttacatgggaagtagtgaagacatggagctcatgaccacgttttgcaagctcaaggtgaagagtcagcgcatgacgttcaagccctcctgcatgcgatttatgaggccatttcttgacaaacagaccaatttttaacagttttctgggcggatataaggagaaagaaagataattccacgctgaaggatatgtaagaaggttaattggctggacttgcttcagctccagtttttggtgtaaaataaaacacgggccacaacaatcgcaccaaaacacaaatgatatgaatgagaatgaacaaaacaagaa

SEQ ID NO: 2174 - DNA, 1923 bp, Cannabis sativa
gcatggatgcgggcgttgccgcgcaggtagggtgtgagcatggggtccgcaggtgtggatgcttccaagagataattcaatttggctaaaaaatattcaaaaataaaggaggcgggggccgcattttgtcctttcttgtttgcatagaatatcttgtgttattcacctctctgtttgctatttaaagaaacattttacttattctatttttgtggttaacacttgcccacagtccaaaagattacttttaagtgatctttttaactttaagtgaactgccttccccatttttgcagtgtgcctcacccggtgttatggctagaataacgcaccaccacattgatgggattcttcaataagttaggtgggcacatgtgatctttcatggccatgcgtgtttgatcttaatcgttgatcttattttgatcctgcggtgacgaatcatcctatctcctataaatagccctctcttctttcatagcttggcttcaccttcatccttttatattcacttccaccttctagtttttatttcctctgagctctacttacgtccttaggctttcaatgcctattctctttgtgaattttgacgcaacaggcttacctttacctacatttattccgacaagtaccttctcaacccacacaccttgtttcatttcttatatctatatttttgctacgcttgcggttacttatttatcttatatagcctgcattcgagtcttgctagtagttagttccccactagagcatttttctttcctcctcctacttatggaaaatcatagatcaccttatgtccacgagggagttctttgtattgagctttagtctaattcggacgaggaaggtctagatccttgggcgtgatattaccaatcgatgtctgagcctctaaagtgcttagaagcaattaccaaatcccaagaacatttggctagacttaaaagagagattgagattttggagaatcaagggcatgtccacatgtatgcccgtctttcccagctcaagcagcttaatgctgacattgtgggtaacctttttcacttagatcgcatgtttccgcctgagccatcttcctcagttattcacccatacccttgagcgtgggtgccacccatctatcgggtaaagggcgaagttccaaccaggcctaagtcgagccgaaaggctcttgctcgttagatgaaaggcatgaagtgcactgtgtctcattctaactttccttgcgcttttgcagatatggacaaaccatgcaatcgagcaagcctagcgcgcctcttcccactcgcaacccatcactcctgtatgggatgggtgatgtcaagagtacaataacataatccaacattaagaggatagccaacgaatgtgctgtggagcgaggttttgaacccttatcgaaggactgtgccaactttccacccgtgaacatggtggctttcagtgagtctattctcaaagcgagtgtggcctggctgctccacccttttcttgtagaggttttggattactttggcatagctcccctttagttgatgcccaatgggtggatcatattgacctgcttcttcacagccttcaaggaggccactagcagggctcccacggtgagaaaggtgcaaaacttatacagtttccaacacaactcctcgtttaggggttgctattactttcataagaaagttccttctgatgcgtcggtagtgggagccctctctaatgcgaggaagcaatggaaagagaacttcttctttgtgtcaaagcaagatggagtacaggaggtttttcggatgcccagtaagtgattcctcgacttgtatcctcatcaattgtctaacattgagcttctcacaatgtccttttaaccccctatttttttcttttgtagcggcatgtccccccccccccccc

SEQ ID NO: 2175 - DNA, 2181 bp, Cannabis sativa
attgacactcacttttcagatcttatatcaaaatcataaaacatttaattagtgatcaggcaattaaaagtaattaagtacgattgaaataaactacatggaaatttagagaaaattaaatcatgttaaaaccttagtcaatagatgcaattgaaatcgaaaatcctaacttttattcattgttaattcttttgttaatttacttgcttcttactttcactatttttaattgtttcctagttttaatttatttagccaaatcgaagtaagaatttaattttaacgtacttaactacaatactcgtgggattgacttcactctttgtgagtattacttgttaaaacgatacgtatacttgcgtattgcaaaatataacaataagtttttggtgtcattgccagggattattaattaatattaataaaaattaaatcttgttgtaatttgatttctttttatttttactaatattttattgatgtgtttgacctccaagataaatccagatgatataacttgaggattttgtccatgagccatttttttttttttttgcttagaggagatttatagagttgggagagagatgttattccaatttctcaagttgttatttttttttattctttttaacggacttcatgattaaacaagaagctggattgattatgaatcaaagataactaacgatctctattaaggagagactatatgatgtaataaatatgttgaataatatgacaattttcttcgctttagttccagtattaggacgtgtaatttcattttctaagcacccttttgtaagtttagttaccccacaaataatactttccccaagtcgtgacaacataccaaaaagtaattagtaagtactgattagcgttagtgactcctagttaagtatatggactaattattagggctacattcctgttaataataaatattcagtaaagtaattatgttatgtgaatttagttttatcatgaggcagtcacgctaacctctatcaaatgtggtttttgtgactataatcgataataaggtgtctttcacctctttaataaatgtttagattatggttttcaaataaataattaaatgtttagaatatccgtggcaatatattaaggcatgatttgctttagatttagtggtctttgtacggaggattctcatattgttcttaaccatgtcttcggggttacttttgttattttttttttattattttaatatgactagttgtttatttttatgtaattttttattgaaagatatttggttaataaacattaattataagtattatttatcacatgtttatttaaattgaaaatttagaattctcagattgttttgatacttcagaacttaataagattattggtcatttatttaaacgtgttattagcattttttttcttaattattcttaacggtttgattaacttatttttgttgattgagcttgaaaagtaatatttttggacaattatatccgatctgcttatggaaatttttatttatctaataaaaaaactatattttcttaaagttaattttgaacaaaaatttaaatttagtgttagaaaatttacttttaaaatgcctttttgaaatattattttttagtttaaattttttaatagattggtaatctaaacaatttttgaaagatttttagaaattaacttaaaattctatgtttttgttggtgagtaaaattctctaacaagttagattgagttgctctagtattcatttctcttttctagattagtatgcccatcttatattctttaatcacaatattgtcgaaaaatagagtctaatttcttacataaagacactctaatacttaccaaatcaacaaagtaaagacaatcaaagcaattaattaaaatcgattgtctgaaatgggagatacagatgtgctatttatagaaaaaaaaataattaagtgagatggggcggaagaacaactatttcagttctctctgccatatgtcgcttttcatttttgtatatgagttcatgcttctatcgtcttaggggcttaatatttggatgcaccatgctctttagctcatcatctagaagatcaatgcctcttgtgattatgctaaagaaatagtgccacatcaatattaagtttgaggagaccaagataggcc

SEQ ID NO: 2176 - DNA, 953 bp, Cannabis sativa
aatagagagagagagagactagaagcacgtttacctgtaggtgttacttccagataattcatctccacttttaagaaaaagttctaaagcacgtattacttcagaagtagaataccaaagatgaggttggtcaaatgattcagtaattggttttagcattgatcttctggacacttggttttcatggtgggaatatttttcttgtggaatcgatattaatgatggatcaacatcgggaaatgccacaattacatccctatttttgtcctattttcatagatccagttacatattttagaatataaaatactaagataagaaggcaccaacttgtcattctttaaatcatgcttttagtaatgacacttgacaatacacttctggtggtataagcaatgtgataaaatgctaacccaagtaccatttataagttataatgcttggaaatggcatttatcaaaggattcacgatttcaagaatgacagcaatagaagcactcacattagcaccatcagtgcaattgtagatagtgtgatataaaatattccaagcatctttcacagaagcaactgattggccataacgccttgctggatagagatcaatccaggcctgaataaaagagtaacatattataccaaaaacaagacatgtaaagagaaacacgtccaattttatgaaattcttcactttagaatttgaaagaatatctttaagactagtaaagaaaaataattggaattgattccattgtgattaatgaatgacttaaacaatgtagaattcagctataacagctttcttggatgaattaatatgtttctggtctaaaaactctgtttaaaagtgttttcattctagctaacaaagtattactaaaaataaataatagagctcgagattaccttgacatcaactttcttgtgatggaaagccatttcagacatgagat

SEQ ID NO: 2177 - DNA, 2787 bp, Cannabis sativa
acacacacataaaaactgtggttttggtaaaataattgcatttattgcatattattttcagtttattttgtgtcaatacttttaagtgggttttgataaattttaaaaattggttgttggttttttttttctttaacttaaaatatttattgatccatcacatctatctttctttgtttcatttctcttacttcttgtttgtgtccagaatctgaaaatattaatatattaaactatatgttttgtttcaactgtttccctaagaataaacatgttactggcacaaacaaatgtgggtggggatgggtcactggggaactgagaacttatcttgatcttttgatggctttgattgattacagttctttatctattagttagtactaatgcatttttcttgttgttggagattttatgtgtgagagagcttaatagatgctacttgcataatacaaatggatttacaagtgctttgatttgaacaggtaaatggttagttaaatcaaggtgaaaaatttaacaagacaagaagagttttttctttttttgaaaaatggcttcagtgggggtagcacctactggcttaagagaacccagtggtcatgctggtgttgataagctacctgaggagatgaatgacatgaaaatcagagatgacaaagtatgtcttctattcattttagtttttctttttgtgttacatttggctgttttatgttcttgtgtttttcagttacaatgtttgtgccaggtgctcacgaaatttcctttcttctcatcttttgcaggagatggaagccaccgttgttgatggtaacgggaccgagacagggcatattattgtgaccactatcggtggtagaaatggtcagccaaagcaggtatggcactacagttagatgtttacatgactagttataacaatttttttttttctttacctttctatttgtatttttcctgtgttgattctggttgttgtgattgtgaaacttctgaaacttttattccaaaattaccatatttagaaactgcgcataatggtgatatgtgtatttttttatgatttcagactataagttacatggctgagcgtgttgttgggcacggatcatttggagttgtgttccaagtaaggctatgtacagtttcgattatttgtagctgtgggctcttttatttttaaatggattctactttttcctctcaaactaaatgcacttctccaattgtatgctcattttctttttgggtatctataggcaaagtgcttggagacttctgaaactgtggctataaagaaggttcttcaagacaagaggtataagaatcgtgagctgcaaacaatgcgccttcttgaccaccctaatgttgttgctttgaaacattgtttcttttcaacgactgaaaaggatgagctttatcttaatttggtacttgagtatgttcctgaaactgttcatcgtgtgattaaacactacaacaagttgaatcaaaggatgcctctgatatatgtaaaactttacacataccaggtatgctctaaaaagatttacagcatcttccaattctatttgtcattttacgtataatcatttaaacatgttcttctgttgaatgtacatgctgatattgtatgtcatctctttttgatcatgttcgtattgtattacttgtggtttaacagatcttcagagcgttatcttatattcatcgatgtattggagtttgtcaccgagacattaagcctcaaaatcttttggtatgttaatatttctttcacatacaacgtaactatgttggaaacagcacagctattagtggacacgagttatttagaaccgaaaagttctttttggaaagtattttaaagttgaaccttttctgtgtttttctcaggttaatccacatacccaccaagttaaattatgtgattttggaagtgcaaaagttttggtaagctttgttttttttttttttttttgtttttctgtttgttcatacgaagctccttttattttatctaacatgtttattatgttcttaggtaaaaggagagccaaatatatcctacatctgctctagatattatagagcacccgagcttatatttggagcaactgagtacacttctgcaattgacatttggtctgctggttgtgttcttgcagaactactacttggacaggtaaatagtttttgtgaattacagtttataaataccctattgattttatgccgctcacagtgaatcttttttttcttattctaccagcctctgtttcctggagagagcggagttgaccagcttgttgaaatcatcaaggtacctttttatgtagctttgttgtgaaaccacctagcgaaattgctatcagcagaaatgctgttgtgattttcgagagtctatatttgtttgatgaggctacaacagatgaatgttttgctgaacaaaatacttcttcacatcttttgtgtaggttttgggcactcccacaagggaggagataaaatgcatgaatcctaactacacagagttcaaattcccccaaattaaagctcatccatggcacaaggtaatatatcaggatatacatctatggttgatccttcaggattccagactttaatatatgcttatttctctttcagatattccacaagcgtatgcccccagaagctgtcgatctggtttcaagactactgcaatactctccaaatcttcgatgctcggctgtgagtagtagtactttgcagttgtagtgcttaatattttattgtgaccat

SEQ ID NO: 2178 - DNA, 1982 bp, Cannabis sativa
ggtgatcttgaatcagctgaagaattatttggtggtatggtgaataaaactattgtctcatggactacaatgatagggggttatgccaaatttgggttttttgatattgctcgaaagcttttgcttgaaatgccagagaagaatgttgtgccatggaatgcactaattactggatatgtccaagctaagcgtggtaaagaggcactagccctgttccatgagatgcaggctagtaacataaagcctgacgagattaccatggttggttgcttatcagcatgctcacaacttggagctcttgatatcggaatatggattcatcatttcgttgaaaaacatctcatttcttcttatgtttccttcggaactgctctagttgacatgtatgccaaatgtggaaacatcacaaaggcacttcaggtgtttcagaatatgccagaaagaaactccttgacatggacggctatcatttgtggtttggctgctcatggccaagcacatgatgccatttcttactttgaaaatatgattgatacagggttgatgcctgatgaaataacatttattggggtcttatccgcctgttgtcatggaggtttggttgacaagggccgcaaatacttttcccaaattagctccagatttcatctttccccgagccgtaaacactactcctgtatggttgatcttcttggtagagcttgccttttggaagaggctgaagagcttatcaagaacatgccaatcaaggcagatgctgtagtttggggtgcattgtttttcgcttgtcgtatgcataaaaatattctaataggagaaagagcagcttataagcttcttgagttggatccttatgatagtgggaattacatcctgcttgcaagtatgtatgtggaagcaaatatgtgggatgaggcagcaaaggtacggaaaatgatgaaggacagaggagtggagaagactcctggttgtagctcaattgaggttaatggcattgttcatgagttcacagttggcgataacttacatcctcaatctaaactaatatatgactccctagttttgttaacaacagaaatagagactctaagttctgaaccagaatttcatacattcagggatagctttatgcttgctttagatttcggctagtggtttgtgcaagaagctcattttaccatattagcagatggaaaatgtaagaagaaagaagagtgttgaaggaggaagtgattaaaatggtgaagaggtgttcagtgagtgcacttcaaaggaacattgttaatttctctttccattatgactacgaaatcatccattatttcgtacgagtaagtaattacataacagtatgatgttgttttgatatttttaaataaactctcacaagttttagcaacataatttgcctttttttttcgactgaaattgttttgccatttgtgtagtgcaggtgtttaacaggtaacctataaataatcccttaaaaacatttttcgaaaggaattcttcaggcccaaggtgctggggaaagtcagcatgcatgctcgtggagtcgctgtctacaatcttagccatcccatctcagccatgtctgaggtgccattagtttcagtgtcttctatcaatgtgtctaggaaattattaactatttcaaccttcattcatcataatttgaagtaggaaagttctaaatggatgagcttagaaatgtcaatatttcggaaacttaaacaatgcttaaacttgcccatatcaacaaggctctcctgtcttcagaactttttcaagctgaacaatctgctctcttatatataatctaacatctatgtgtttgtgttcttttcattatatactggatttcaatataaatgaattgaaaattggttatctgacaaaattttaccttttcttctttaataatttcagctattgtagaataatgccttggaagtcatattgcttctttgaaagcctcagca

SEQ ID NO: 2179 - DNA, 2650 bp, Cannabis sativa
ttttttttttttttggctatttattatgtatgactatgagtagttgtagttgtagttttctgctagtgtggattattcatggtcaatttccatgaacccatcaaacacactcacacatatataatatattatatatatttatacatctctctttctctctcacagtcaagagtcctactgtcttcagtgccagtttttggtcttaattaattatctttctcgtctttctcaaacccttttcttcgttttcaattaatttgcttttttaatgtttaattgagaaaaaaagaaactgcctttcttcatattcttcaaaaaattgtttttgggattgtcaggtaagaggaggtactactagctgtaaagctttatactaactctttgcaattaattttgcggcctcaaatgggaaaagggttatcaacaaaatccacaggaattaactggtttctttcacctcgtatgtctcaaaacttaatcactcttccttcttttctttaatgctgctgggatctgaaactgagaaactcccacttgttaaagtttttgcctttaatgtccttcttctgaaactttgtgaattaccatgtttggaacccaatgctggtcactcagagctcaatggagctctaatggttgctcttgagcttattcactcggctcctctttcgttcccaggtacccattttcagtaaagttgctatttgactttgttgctcattaggcttgtagatctgagtctttatgaagagtgttcttcaattttaacttaatgttaggaattttttggttgaaacccatttctttttctactcactttaaaactattacgtgaagagtgtcaaagactaatataaacccatttagattggtgaatgtgctagtagaaaatgtgtaaatttcatttcgtgcaagaacaatttttcgtgttaggttcatttagagtgaaagatttaagactcttagctgagtagttgggtttttgcaaaagttctataactgtggttgttaaaccactcttgacttcgtctaacagtttccttctttaggtatgatttgaggatagttatgaagttttttccatatggttaaagtcctaggatctattttctcttgtttagaactttgaactctgaatgcaattgtacaaatccatgtttctatggcctttgaaacttacaaaagtggatttaagtatatatcatataacaatataccagtatgctttgttttccattgtgtggaaagggaattgaattgctttgctttaccacactgactaaaggaataagaatgtgtctgttgttgttttagctagctaatattgttaaattttctgttccaggagcaaagtgaggcctttggatctaacattctgcttatctaacttgatattgtttggcgaataactcctcatgaagttcaattacacagcagtgttctctttccttgtttacattttcattgttcttccttttgcaattgctgatcttaactcagataagcaagcccttcttaagtttgctgctgctgttcctcatcttaggaacttcaggtggaaccttgctaatcctgtttgtacatcatgggttggggtcacttgcaccaaagacgggactcgtgtgttagccgtccggcttcccggggttggtcttgttggctctatcccacccaacacccttggtaagctagatgccctcagtattctcagccttagatcaaatcttctcagtggtaatcttccttctgatattacctctcttccttcacttaactacctctatcttcaacacaataacttcactggtgagattcctgcttcattgtccccacaactcaatgtcttggacctatctgttaattccttcactggtgaaattccccaaacaatacagaatttgactcaactgacaggattgaacctccagaacaacacattatctggacccatacctgatctcaagcaaactgggctcaagcatttaaacttgagctacaatagccttaatggatctataccatcttcccttaaagggtttccaaattcatcatttcttggaaattctcttttgtgtggacctcctcttgaaacatgctcctccattcttcctccacctccgtcttaccctccactaccggctattcccatgaagaaacagagctctaaaaagaaattgccaatgtgggctatcattgccattgctgttggaggatctgtgctgctgcttcttttagctgcagttattgttctttggtgttgcaagaaaaaggatgatggaggtgcaagggcactcaaaggaaaggcgcctagcgttggaaggaccgagaaacctaaggaagagttcgggagtggggtgcaagagcctgaaaagaacaagctggtattctttgaaggctcttcttacaacttcgatctcgaagatttgttgagagcttcagctgaagtactgggaaaaggcagttatggtacggcgtacaaggctatattagaggaagcaacaacagtggtggtaaaaaggttaaaggaagtggttgttgggaagagggactttgaacagcaaatggataccgttggaagagttggacagcatccaaatgtaatgccactacgtgcttattattactcaaaggatgagaagcttctggttta

SEQ ID NO: 2180 - DNA, 1972 bp, Cannabis sativa
cctggatcagaaagctttctcttaattgatatttgacagacattaatatagaaacgatggaggttaatcagttagtcaacataatacacattattttatagctgctaacaagaacaatattctggttttcccaactaaggggattcaatgatttatcatcaatctacttatagaactatattaatttattttactatttgaaaattccatttagtccaactggtcaattttacaggctaagaaagagttatcaattaggattacagagtgagctgttaattagtattaaaaacaaataatgaaaatttacaatcttttctctctacccagcttggaatgacaaggttattttaagtttatcaatgagagaaattatcaaatcaattaacttgatgattaaattacatgaccaccctatcaaattgtgtaatcataattttctctaatgcagcattccaaatatgaaatcagagtcaaatgcaaaaaccagaatcaaatgtcaaagcatcatacctttgtgtttcttgaagcagataagtgaacaactgcaacaatgaatattacaaaaacaatgttaacaaaacaaaaattgggaccaaagatcaaagacttcaaaggtttctggtttagaggttagcttactatggggttaaacaagagggacacttgtacttggaaactgcttcattgcaaacttggcattgcttagggccagccattcaattctttttgctttataatccctcaaaaaagttctaattataaaacaaacaaacaaacacacccaaattatcaattgaaataaaaagaatatgataatacagttcaataatatcccagaaaattgtgattatagataatcttattactctttaggaaaccaactctacctaaaattgatttcattatcattacatttctaaagtttctgaccatgacataggttgtagaagtgaaacttttataaggagctaaggatacctgatagcgccgaagggcagagaaccagcaacgtgggttgggcggcagagactgagagtttagggtttaaccggaggaagcactgccctggaccgacgaggaattggaaagcgtgagaagaagaagaagaagaaaattggattttatttttatttatttaaatgcattttccacgtttgtaataataataagaataagaataagtgttaattaaattatcaagtgctttaagttttttaatttttttttttttaagtagaattagtttaaatatactaataacatatgatattaacgactattaggtacttaaaagactagaaatataacttaagtattactattatcataaattaaacttaacttaagtatttatactacaaattactctaataataattattaattttaaagtaatttgtggcttaaagatttaagtttaacttttagttgcagataaatatttaaattatatttttaaaattttcgtaaaaaccaaaaatctccttttcttttttttttttttaactaaaaaactaggaagttgttgctcaaaaagatattaagagaagtttagcctgatttataatgtctcaattgagttaggccaactccaatacaacatgtattgttgtggcccatctgttagaaggtaagctacaatggagtgttgttaatgcattagagaactttaattagacaattgtgatgcttgtcaagagcaactgtagtatctatcattttttactttattttagaaaaataataaaagttaaaaactaaacataaatatcttatttttgagtaatattagggttgcttgcattggagtattttttttagtaaaaagtggcaaaaaatgatgtaaatgatagagaagataaaatattatattttaaagtgatgtaaagttttatggcaactttaagcattaattgcattagagatgctcttatatgatgttggctttaagtatgagatcttatcaaat

SEQ ID NO: 2181 - DNA, 1920 bp, Cannabis sativa
cttccattcttcttcttcgaagcagcaagcatgaccaatcctttggggcataaagtctaacattgaccttatctctgttggattaggtacctataaccactaagtacgaaaaaaaagttagttaaggcaatttcaacatagcatttacaagcattagaaagataaaagcacctctccacagtgaagggttatacaaagaccttgttctcttgcaaattttaatgctggcaaaaacgtactcctgccacacatacacgaatttaatttaggatgtaaatattaatggtcagcgctaaaactttggcaaacttaccattctcccacaatgggatttccagacaggtcaataccaacaacccctagatgtctcatttcaagagcaagcttcacctacaaaagtgaaaggcaattatattcaatttatggaaacacaaatttctaaatcaaatctcactttcatacttactgtctccatcgcagcctcagtagtctctcttcggtcaatgctcaacagaagtctgatatatattttctttctttcagtcccattacatgtatcacttctaagtacaggatccatgccactaccagcatcaccatcaccatcacggggcataaaatcaacatcaacagcagtaacagcctttagaccatctattacagcttccatgtatgagagttttgtcattcctattgaatcatttttctggataagaacaaaaacccaaacacatcaatctcttcacccacaaaagaaacagacttataagagcacacagttcacttaatacaaacctaatgtttttgtaccttgggggttgttcttagctccagatacacaacattatcagaagcaaagtcttcaacaacctgttttgcaatgaaacagaatattcaatattgacattaaaataaaacaaaattgaggggaaggtttttaaaaataaataattgaaaagttcccttacttctttggtgattcttgtaataattttgtgatcagtggtaagaatgtggatcaagtcaaacaatttgaacacttcatgtaaggtcctctcacctgaatcagacataacatacataatttatagcttaagattcatcaagctaacattattgtgagttactaaaacaaaaatccacatgcaaagttaactaaaaataccaataaaattaagtaaattaaaattcctttcttctcaagtttctgtctcaagaaacaaacagacaacaataagaaaaaagatcaagagaggaaaatttaaagcttactcttcattataacatgctcaacatctgagaaagctatgacacctttgtcacccaaacctctagcaagttcactgcaatcaaacactaaataaataagaacaaaaaaaaaagcagaaaattatagcaataataaactgagaatatttagtgtgtatggaaaaagaaagaaagaaaaactgacaaaagagtggagtctctggcggatccattgagatgagcgtgaagctcaaccttgggtatggagtggtacgtctccattttcgttgttcgtcttcttcgtcttggttcttcttggctttcgtccttatcttttttttctccgctgaaatatattatttattagtaattatcgtactgttctctgtgcagtgcagcttagtatcgcctgttgtgatgttacttgtcactattttttgggcccattctgattttagactcctctgtgggcccaaacactttttctttttctttttaatatatttggatttattttaatgaataagttatcttcctaaaataaattactcttcttaaaaaaaaaaaaaaatcttctaatttttaatttgatagatatggtttactaaaaaaaattatatacaatttttgattaagttaggatctcattacacaaatatataaaaaaaaaaa

SEQ ID NO: 2182 - DNA, 1061 bp, Cannabis sativa
tatatatatttataaaactaacacagttaaattgaataaaatattcttatatttcattaaataatcaaattttatatataaaattatgtagtaccataatgcataattgcgtatcatgatcaaggacaattttaattggaccattaaagaaaaaaaagcaaaggaacaaaaagcgactaattgatcaggataaaaattcattgaacatcagtctctatctttgatatcttgcgtgttggaatggaattccattctattataaaagtaatgttgaaaataataataatataaaaaatttactaaatcaatgaaaatagatatgtgtatatcatatcacatgcgagttcatgacccaattaatttgataactacaaacaagttcgtaatatataattaagaaatcattcaaaaaaaaaattatgaacataaatgttaaaaatagccagagccataaatgacaggaaattaattatatatgtatggactggagattaattaattaagctcatactactttgaccataataaagtttttaagcaagatattaaccatatacttttccattaatgtatagaaagtgatcggccactttcaaaacgcaatactaatcaaaattgaaaacctttgtttaatcatggccacaatactccttaacaaatatatataaatttagtttagttaattagttaggtaaaattcagtaatccaaattccttctcacgttttccaaatgtcataattgatcagcagtcagagaagatattgcatcatatatatggttcactacgtacctcttactctttagtgatgaaatgtgttaggtgttatagtttcgtcatgatcacttttctcatttctccttttttttttttcaaatactttcatatacaagtatttttttttcactttctaattacaattatcaactaaaacaaagtttaaataactgaaaagaaaacttatgattatttggcttttcattttttcaaatttaaacggatgctttgcgcgcagtcgcatttctaacctgcatatgtatatatctcttttaataataaat

SEQ ID NO: 2183 - DNA, 1304 bp, Cannabis sativa
taacaaattgtaaacaccacttattaaaaaaaatacttaaagctcaataataatattcttaaataaacatcaccataattatcatcattaaagaagaataagagtcacacacattaaaatattaatttttgaaatcgaactacccaaagtaaaaaagaaaacattaaatccggagcgcacgtggataactactgatgacatggcaagatatcgaccgttaaattattgggctcaaagatcaagaaaaggcaaacccgccgactctacatggatcccgaggaccgacttgcagacgggtccaaatcagatgacgtaagcagtgacaaaacaaacccatgtgctacgtcgacacgcagtcactacattccacgcttgccacgtgtcccacgggagctcacctgcacgaaccccattaatatcaattttttttttttaattttaattattttatctctcacgtgtattctagaaaaccactgtattgacatgccacgtggcgccttcatttttctataaatacctctctctccctttcgttctaagtttcaagccccgtcgtagcttaaatccactagaacagagctacgagtcagaagataatatttattatattaaattcaaaaaaaaaaaaaattgtgtgaagataagaatgacaggcgagttggagttaccgccgggattcagatttcatccgacggatgaggagctcgtgatgcactatctttgccggaaatgtgcgtcgcagccgatctctgttccgattattgccgagatcgatctctataagtacgatccatgggatctcccaggtgattttttcattccgtgtataatttaatattaattattttttaattgattttattaattaatttgtgttaatgattttaggtttggctacttacggtgagaaagagtggtatttcttttcgccgcgtgatcggaaatacccgaacggttcgagaccgaatcgggcagctggaaccgggtactggaaggcaaccggagcggataaaccgatcgggaatccgaaaccggttgggattaagaaggctctggttttttacgccggaaaagctccgaaaggagagaaaacaaattggattatgcatgagtaccggcttgctgacgtggacagatcagctcgtaaaaaaaacagcttaagggtacattttctaattaaactccatgatattagcaggggtagtttcgtcatttcacagcatgtccaagctgtggtggtagtaaatgggtcccacgtgtgctatctgacacgtggcggcttatagcgctagattaacgcc

SEQ ID NO: 2184 - DNA, 1995 bp, Cannabis sativa
caatccctaccataataatatatattcatattttaatcaatgtattattaaataatataacacattccacttctagtaatgctatatatgtgtggctttaattacatgattatcacacaacatgtgaaattcaaataatatttatatcatccatccagatggccaaaaaattcataagtttgaaatacaaaatttctttcaattatcatcataaccaattctcgaaattggaaccacttcatcaataactaataatacctataatttagaaataagctatgaaactaactaacaatgagaaaaaaatagtgtcataataataattaataattccttcacatagtgacatgttataaaattaaaatatatatattatatattacaatgtaaagaaaagagataaaaaatgagaaaaatggagagaattgttcttttatttatttatttattcattcattcatttcttaaccaatacactccataaatacactcttaataaaactaggcctgcaatttcaataaactaataaaaggtatatatcacaaccctaaaatacataaataataatctgtaattacaatacatgtactttacaatttattgatattaaaatatatataaattaattatgcaatataaacctcacactaacttaattatactacaagcaaattttctttttcactttcataattgaattaattggtcaataactaacaataaaataatataaatatttctcaaaataaataaataaaattaatagaatgaaatttatagaagaaagtaacaacacaaacctttttattcctcacaattacattatttacatctaaaatagagggataaaaatagaaaggtgtatataacaaataacaaataacaaaacagatgttgactaattcaattatgaattaataatccatagaattattctttgacctaaagcataaacattattgattaatatgaaaacactacatatatataaattggaaaatatgattacaaacctttaattaaaatctgtcaacctgaaaatatgaagacggggatcgagagaagatcccatggaaattcaaccaattagtgtttcattatcacacttccattaattacaaggtgattacatttcaaattaatactttaaaccttctcatcacatcacctattaattgttttttttttatagatataaacttgttatgtatatctttaatggcttttgttaagttattaatctagattattgtgaacatataaatatcattgttgttatatattacttctattcattcatcgacaattttgttttaggaaaaaaaaaatgaatatgtactatatagacacctattaattcttcaattctttttcttcagattttcatatataaacatggtgtgtttttggagatttattggctattattaaaacattaaatattgattattgtaagcatgcaacatttgctatatgtattacttatataatctcatgaacaattttttttttataaaaatggtgaatatatagctttgatttgttttttaagatgagtttgagttattataggatgatcaaattcacacaaaaaaaaaaaccctaaatataaaagattgaaagatcattttctgaagcatcataaaaaaattattattatttgatttttgtgcttctgagtttggatttctcacttaattagatcttatttaaaaacttaatattattaattaacattttttaacataattgtgtttatgtgaatattatgtgtaaccattactatctatactaatattacttagttgcttaataatgttacatttcatttttttccagagaacctgaatttgttcttttgaattgtcgagttcaaggtaaaatatcttaaattataatatagtatgaatataataagcttgtgacaataacaattccacacaagatcaggctatgtttattttaatccattagcaataaaaattaaggttata

SEQ ID NO: 2185 - DNA, 913 bp, Cannabis sativa
tattctcttgttaagaggtaggatgtgctattattttgagataattgtatcactttatatttaattctattgggcatttcttatattttttttttgacgcgataaacataatcacacatgattaataatgtaacaaattatacacgtagttttaccaaacttaaactacaaaatttttattactacctcactttttctctattttacatttcacaccatacaatagttctttttaattaatgtgtcatcaaaacttcatttttttttaaattttaatatatttattcatttcaagtatataatattaataacacataaattataaatctaaaacaattaaaaaaatatatttaatattttataaatatagatcatgatagtaattttttaaaaatatatattaaaattcgctgacaccttttttttttaaaaaaaaaatgaagaataaatttagaatcttttgttcaattttttaaatatttttaagaaattatatttttagagaatataagtgctttaacttacttaaaattttccaacacacctaaaatactattatagaagtgtcccatctcaatatactatttatagcttcgttattggtgttctcaaaaaaatcacatttgaaaccaatgaccgaattaaaatataactagtaagcttaagttagattaccaaaataataaataagttatttatgtatagagatcagagattagagattgcagattgggtgtggtacgagagaagaagcttctaccaaaacacatgaccagaaagaaatagaatccaccaaaaagtaattaacttgcttaattacagcaactccaatggaaaccatttaataagcttgaacatatttttggtactttttaaatgttaaaaggttctattagtgtctaacatcttcttt

SEQ ID NO: 2186 - DNA, 4015 bp, Cannabis sativa
tatgtatatagcagagacgtcatttttatagattcattttatttttccctttctagggatgcaactttcaactggttcttgggggaaatggcaggatcctcttgacaaatatatcctttcaggacctatcaagaacttcgttttttatcaaaatataattcattaatacttaataaaatcaagttggaattgaagaaaaacatgcataacatgctggagaggttgttgtcagtgaactgggttgagagattctcggaaaccagttaggacggtacccttccccgcgggcacggtttaggatgtcatcatgccgatcttcatacagttgagctttcgccattgcgtctgctagatcaattggattcgataacaacagttctcatcgaatttcggttagtcagaccccatacaaagtaattgaggaaatactgctcaggaactcgagaaattctagtcatgagctactcaaattcctcccgaaatgccgaaacacgtcccgtctataccaactttgcaattttgcccaacggatcttcataaatggaagtcccgaaccgcaatcgcagtgctgtcaaaaaggattcccaatctgaaaaccctcctcccttttccatccattgataccaaatggacgatgccccctcgagatggaaggcgaccatcgacaacctcatagctggcgcaacaccgtggagatcgaaaaatttattcatctggtaaatccaatcctctactctcccactccttcgaatctagccaccttcacccgcataattttgaggatcgaattcacctcgcgtgaatctgtgtgagaagtcaaacggtgtggtgttactgattcagttgaccgactagaattgccaatttccccttgcgacttggttgtagatgattgtaattaatccactcgagtatctaaacgagcgacctgttcttccaatttcgcagagaatttggtgaattgttgtttggcatgcatctgaaaatttgcttccaaggcctggattattgctgccagttcctcgttcttcatgctgaaaaacaatgaaagcaccagtgttagatgatagagtctttttcgagacaagacaagtctcccaaatgcaattaaattgcagttttcatttcataaacgtatatcttcaaaatttatacccagcttacatttcagaaaatcagcaaaatgtaaaaattggcaaacaacaattctggtttcgcacccttcaacgagactccatcctaacaaaatcttgcaaccacttgggcttcacacgcacacgggttccacgcactcgcatacttccctcctctatatcttcttgcgccatgctcgagctcgactcacattctagtggcttttcgaatggaggttcctcgtccaaatgtgtttaactcaatctaaatcttctttcaaaagaaaaaaattaatcaatccaaatcattccggatctgttgattgtattggattgaaaattttaaaattaacatttgtgtatattggatatacttttataagtaattaatgtacgtacaattggaaaaaaaaaaatcatatatgtaaaaaaaaaaattataaattctagaagaagaagccccaaaaagtaggcatatacaaaagaagtgcatcagaggctcaattaaaacaaacaaactagcaaataaacattggtgaaactaaatagtgtatagcatacataaaacacaatggacccctgtctggtggccctgcaactgcaagatcaccaacttcaaaagcatccactgggatatcaccttctaccatagtatttagtgcccattttgctagaaaatgcgcaatcagagtagcactcccttggaactcaatgtacttccattttggaaattactaaaacgaaagagaacttgttttgttgttatgtttgagaatgaagcttgtttatttttgttaagaatttaaatttaaaacaacttacaaaattggcattgcccttcaaagaaccaaaatgacggttcatcagatttacaaatgtaagaaaaaaaaaacatattgtttgatgaatgatatgtacaaaacatgataatattgcagtggccaataagaccatggacgccattgaaagagcttaatattttcacaaaattaagcgttttcaactctggaatagttgatgcacaaaaataaaataaactaatttaccaaataaaatttgggttgagtcgtgtactaagttgctctctttaagacattcgcggcattgtctagaattgtgcaagactgcaagcagactatcagtctcatcgtccttggaataaaacagcccaatcgaaataacactgtatcggaactctactgcacgataaagaattgtcgaaataccacacacccaaaaatgtactctacttcagaatacatgtttgtaatataatcgtataaactgtctctaattttttctatgagaagaagatgtatttctccagttggttttgatgcattatagaggaaatgcacagaaagtggcaacaggaagaaagacgtttctgatcatgggatcgtgggaacaatcatgaaaatacgtctctgtttaccaattatttaaacacatttaaaaattattttaattaattaaataaaaaataataatttaataaatcaattttctcaaaaaaaaaataaataaataagatgcacacaccagctcagctcagtcggacgaccgcgcacgtgatgttcaggtgagcctttgtgttactcctccctcgtcatccttaggataaaacagtcctgtagaaataatattgtatcgaagctctactacacgatagagaaccgtcgaaataccacacccaataaaacactactgctcagagtaatatttgtaatataatcgtataaactgtctctaattttttctatgagaaaaagatatatttctctcgttggttctgatgcattatatagagaatgtaccaaaggtggttacaggaaaaaagacatttctgatcatggtaatgttaaaacaagggatcataggaacaatattgaaaatcaagacaagaaaataccaattaattaaacacgtttaaaaaatatttaattaaatatttaattaattaaattaaataaaaaaataataatttaataaataaatttttccaaaaataaggtgcacaccataccaactcagctcagttggaaggtggcgcacgtggtgtttaggtgaccatttgtgtgactccttcctcatcgtcctcaagataaaacaactcaatcaaaataacattgtatcggtgctaattacacgataaagaaccatcaaaataccacactcaataaaatattattgctcaatacatgtttgtaatataatcaaatcaattgtctctaatttttttctgtgagaataagatgtatttctcacgttggttctgatgtgttatatagagaatgcacagaaggtggtgacgagaagaaagacgtttctaatcatgggaacattaaaatgtgagatcgtgggaacaatgctaaaaatcaggacgagaaaatgtctatgtttaccaattaattaagcacatcttaaatattattttaattaattaaataataaataataatctaataaataaattttttccaaaaaaaaagaaggtgcacaccacactagctcagctcggtcggacaacggtgcacgtgttgttcaggttagtctttgtgtgactcctccatcttcgtcctcaagataaaatagcccagtcaaaataacactatatcggagctctactgcacgataaagaaccattgaaataccacactcaaacaaacactactcctcagaatacatatttgtaatataatcgtaaaaactgtctctaatttttctatgagaagaagatgtatttttcctgttggttctgatgcattatatagagaatgcacaaaaggtggtaacaggaagaaatatgtttctaatcatgagaacattaaaatgtgagatcgtgagaacaatactgaaaatcaagacaagaaaatatctct

SEQ ID NO: 2187 - DNA, 2978 bp, Cannabis sativa
tattgattcttgccctttttatcttggtatcagagctagaaaagctccgtgattctcgccaatggagactccaacttcaaccgaaaaatcctccacaaatgagccagctgtgaccatgacagctcttccttctgaacctgtcattcctgtaccaaacactatttcttcaccttttcaaagccttgcacccctcactattaaacttgacagaactaactatccctattggaaatcgcaagtgctccctactcttagagcatatgatcttgaaggatatatactaggcactaaactctgccctccacagtttgtcgacaacaccattggaggctccgttcccggtgaatcacggcaaatcaaccttgggtacgctatgtggcgacgcacagaccaatcgatcctaagctggttactaaactccatctctgaatctatgtttggacatgttgttggctgccaatcgtctcatgaactctgggtcatccttgaccgactttacaccaccagctccaaagcaagaatcctacaacttcgtttccaacttcagtctctaaaaaatggaagtctcactatacatgactatattctcaaaatgaaaaatatttctgacggtctctctgctgcaggacaacttctttcagatgatgacttgattctgtacatcttgggaggactaggtcatgaatatgaatctgtggtggtcaatttaacctctagacatgactccatcacattgcaggaagtacaatatatgctacaaagccatgaaattcgtctggaacaacacaacagcaccaatggtgactttaatcccactgccaatcttgccgctcaaatgcgaaggaatctcacacttggaggtcaacccgctgctcccaatcagttctcaaaccgctctttctccaaccgtggaagaggacgtgggagaggaagaaccaacaacaatcgacctacctgtcaactgtgcaacaaaataggtcatacagttgctaaatgttaccatcggtttgatcccaactttcaatcacaaacaaccaatcagcagcagcaatcataccagcagggaaataacaatcaaaacaactcttccaacgatcaacaagcttacttcacagcaactgagaacaacagtgacaatgcgtggtacatcgacagtggtgccaccaaccatgtcacagctgagccttcaaatctgcaacaaaaatcagatcggaaaggtatcacacacttactcattggcaatggttttcctcttcctgttactcacgttgaatctagtttcatacacaattccaataaacacttgaacttgaaaaatattctttgtgttccagctatcactaaaaatttgttatctatctctcaattaaccaaagacaatgctgtatctgttgaattttatgctgatcgctgtgttgtgaaggatctaaccacgaaggcggagctgctgcagggaatgcttagtaatggtttgtatcggctaagacttggtgtgccactgtcatcatttaagtccaaacctcctttcaattcatgttgtttattttcctccaagagcagcaaatctgccaagcttcctcagtctagttcagacaaagttaaatcgagtcctgtgtccagtccaaaacttgttcagtcactgtttgccgagtcttcttttaattatgatatcaatgtatggcacatgaggttgggccacccaaatatcaatgtaatgaaacacatgttaacaaatgaaaaagtctctcttcaatctaatccaaaattttgcaatgcttgtcacataggaaaatccaaatacaaacactacagtgcatccaactcagtcagtcactcaccgcttgaactcattcattccgatgtttggggtccatctccaatcgaatcaagagagggttataggtactatgttcacttcatagatgaccatagcaactttacatggatttttcctttaaaattaaagtctgatgtcaaacaaaccttcatcaactttcaaaaattcgttgaaaggaagtttgatgccaaaattaaaacccttcagtccgattggggaggagagtataggagtttagctccttttcttcagtctataggagttcactttcgtcatccttgtccacacacacacccccaaaatggtaaatctgaacggaagcaccgtcacgtcattgaaatgggactcacactactagcacaagcctccatgcctcttagattttggtgtgatgccttcaccacagccacttttctaattaatcacctctccacaccaactttagctcaccaatctcctctagaaaaattgtttaaagtgactccgaatctgaaatttttgaaagtgtttggttgtgcttgctttcctcatctccgtgactacaacaatcacaaatttgcttttcggtcagccaagtgtgtcttcctaggctacagccccaatcacaaaggctatcgttgccttcatccaagtggtcgaatttacatcgcccacagtgtgtcattcaatgaaatggaatttccattcgctactggttttggcctaaaccagtccacaacatctcagttcacatattctcactctaactttaattataatcattggttaccttttgttacagctagctcttatgatgacagcacaccaaggctcaccaccgatactcctcattgctcaacaagtcctgcaccaaatccttcatcaccatcttcgggttcagcatcctcctccgatcagcctacaagtccacaagcagtaagttctttctccactatcccatcagaaatccacctaccacctctgcctctttcccctccctcacctcacctaccctcccctgctgcccctgccccgagtcaccccatgatcacacgatccaaggcgggaatatacaaacccaaaacttaccttgcctcacttctcaaagaacctcaacttcctgctctcaccctcaccatacccaactctgtggctgctgccc

SEQ ID NO: 2188 - DNA, 2371 bp, Cannabis sativa
tgattatttcagatatacagataccatctgctggagattatgtttatgtagacattacaactagtgttttaggtatcgtacagcctcaaaaaagtccatttggtataatttcttttttattaatttcggtatttataagaattttttagtttataattgtgtgtattttatttatttaagactacttttacatttttaattttttttaaatagttaatcttactttaggtacaaacaattacttactacgtatataaaaaataataattatttgtacaataaaatattttaattttatttttcgatattgtaaactatttaaaattttaaaaattttaaataactacaatatatacgattacgaacaaaaatttgattagaaatttaaaatgcaaaaatagttatgaggtgttcctaacctctcattttacaagagtaaactatttatgtactaatattggtctttgcaggccaattgcttcgcgtggcttcttttctcaacattttaggtaatattataacatttttaataaaattggagcgaaatttttttatgttttattttttatcaatttaccttcttattttcttgacaatattcctttaattttacttttctttataaatttaaagtgtcaattaaattttgactgtaaaatgttaactggtattgccactgtgtacacctaactgtaaaacctcgaagttagagtgtacactgtgaaaatttaattagctagtatatatttaatgatgggattaaatgacaccacaaatttacaaagaaacgtaaagttaagggagtattaaggagtttcgctgtaaattacccttacttaattacatatttgtacaattaaataacaacacttttttttttgtaattatttagatatgaaaggtttatatgaaacaaagcttgggtacacacaatgtgatgaacttcaaaatttgatgtgtatagagattgagaaaatgatgagtgaaaaggagattagaaatgcaagagtgtgtgatgctgtagaaaaggctgcaaagaatggtaatgtagagtttattactaaaataacaagagcaaatccagaactgatttggagtagtgaggtagcaacaaatgtgtttgagaatgcaattgaaagtcgtgaacccaaagttttcagccttatatatggtcttcatgacaaagaagcactagcacattttgttcataagaggtctagattcaccatgttgcacatggtggcacaagaggcaccttcacaagtaagaaaccttataccaggatcagctttacaaatgcagaaagagttgcaatggtttaaggtaataatatatatttatataaatacaaaacttcttaagtgaaggcatcactcttgcttctactataagagaattatatctcaatttgtttttatatgacatttgttgcacaagtccctattggttcagcaccgttgcacactcaagaatagaattctgaaatgatacggacacacgcacacaaacgaacacagaacacaattttgaattgagtctaagatttggtattgaaaatggtaattttgtcaatatggcaacttacatgaactaaagtcacgtgtccttttatataaaggaacaatgacattacaagaaactttaactaactataacggttagttgtgagttgatcgtgactaatcaaacagtgacacttaagctaattactaattgctaactatctctttaactgtcatgacatgtcattagttaggcaaaatagttttataacaattttgcactttgactactattgtacatatgccctgacagttttacaaaactgaggtagatagttagttcaagcaatgcttgaacttgtcactagggagagcctttatcaacatgtcttatggattttctgtaataggaactttgagaagtttaacttttccttcattgattatgtctctgatgaaatggagtctaacatcaatgtgtttgatcctctcgtggaagacttgctttctactcatatgtaatgtactttgacatcaatgtgtttggtcctctcatggaagacttggttcctactcagatgtaatgccctctggctgtcacaaaatattagtattgatctttgatcactgccaagttcttttgtaattcccttaagccagggtgcttcctttacaacttcagttcaagctatatattctgcctttgtagttgataatactacaacagactggagatttgccttccaacttatggtgcagcttttcatttgaaaagtgtatcctgtttgagaccttcttgagtcaatatcccctgcataatatgagtcaacaaatcccactacatcagtattgttgttgttgttgttgtt

SEQ ID NO: 2189 - DNA, 2103 bp, Cannabis sativa
atattaattaaataaataagcattattaattaaggcatcaattgttaattcggtttgagaacttatttttcattaatggttgtttcctatttaaacagacctagattaaacgtacacgaatttttataactagtttttgatatcaaatggagctaacttgaatgcactgatctcaagatattaaacaaacagattgagaaatcgaaagtagtatggttaattaacttaagatgtaaacattagtttttatttctttaatatcaaatatgaaacattaactatagattatggtttgagctagtttaagaggtttagccaatctcatgactggaattaatactgctttgaatctttagtgtacatttttagttgatgaaccaatttacatgcacagaccacaatctttgctcactactccataccataccattaccatgtcaatcaccacagttaaggatttacatcttaaattaatacatgacaaccgaagaaatatttgctcaaacgaatcaaataataatattattattattaataaagaaagaaatgtattcgtacttacaatagataaaagatattagacctagttctgttttactatgaatttattgcaaagaacccatacattttgttcccttaatattctctaagtcaaagagccccagtcagttttcatttcatttatatgcaagaagccctttctcagccaattcaggttagccttctccaacctgcaacttcaaaagcaaacgaaatcgatataagaaaaaaattctgattaagatttactcattcaacatagttaattgtgttatgaaaagagaactacgttataacatgactcttccaccaaacaaaaagacgtgaaactttccactagtttttctacacaagttcacattgcacaatgttttttagttatgaatcaatacaacttgctttttcatacatttggtttatgtgtgcgccagcagaagtttcaattgtaagagaataaagttttaaggatgaccattgaccataaaagcaaagctgaataaggaatcaattttgcctcaaaaagcattgaatcacaaaggaatggggtcttttagtactgacatttgatcagtaggagagagtcaaaattacaatagaagttctatggtggagtaaagatgaacatgtccctcttcatcaagataaaaagcaatttgggtcacgttgctgttaattttgacaaagttcttttattataattagacacagtagtcaaacttatctgctaatacacagaagggttataaaattaagaattaattagtatataacatattatttcgggacagatgcttcaataaagttagaacaatatagaaaaagagtgaagattataatccatttcccatttacctttttccttttcttttgtctaaaaccatttggaccagctaaaagaaattcattcctgatctttatttggcaatgaaaattcacctctttgtcataatgaaagcttttatcctagaacatgacaaaattagaatcatcatcaactaaatatttacaaactataatatctattattatagttattattataattaattagtgaaagcaaagacaggaccttggtggctttcaccatcagtatcagtattagacacattcagctcccttgcaagacgctttatccgattcaaacgtagtccagcagttaatctacctgaatcattgtctccaactccaagttgcactatcaatccaacaaatctcatataatttattcaacaaacatagattcatacaactaaagtatcataattcaaaagtagactaggtgtagtgttatagtgcgcataaatttttttgacaaactccactaatagtttatatatatttaggtagtgcgggtggtattgaaaatcttaggcattaaagaaacttacatttagtatcaccaccaaccccacctcctaaacgattcaacgaccgagcaaggcttcttacatgactcaatcgtatcttctttattacattatcagatttatgagccagaatttcaagaccacctaaagcaagaaacaatgaatgaacaatctttaaagggtcaatgagtttcaa

SEQ ID NO: 2190 - DNA, 892 bp, Cannabis sativa
attattacacgtcaatggtcagaaatgttggctctaaactcatacatacctcttctctatatgtatataaacacatatatcaaatcctcttctcttattattaacaaactctcttattaatgaaatttaagtttgatttgaagtccgtaaaagaattttagataaaatcatgagcccagcaaattcaatcaacggtcaagatcgagatcatataatcaacggtccacgtccatcgccattgaagatcaacagagaatctcattcgattcagaaacgtcaacctgtgataatctacactcattctccaaagattatccatactcaaccttgcgatttcatggctcttgttcagaaactcaccggaaaatccagatccgatgacgacgacaatgacgaccaaaatgacgacgatgacgatgatcaatcttttggatctaaacgacattatgattctgctaattcttcttcttcaaacgacgttaaattagaggattcttcttctacttcggttattacgacggaggagaattatattggaaaatcagtaggcgaagcttcggtggcggcgatttcgagtagtggtaatattaattctggtccttattttggtgatgttcctttgtttactccgaccggcggcggagatttcttctgctcacctcggcagcctggttatcgattttccgatacgacgtcgtctttgtcgtttccgtctccgaatttgggagcttcgcttaattcgccgtcgtttcttgagttcataaaaggattacctgaatattaatgattatgattattattattattattattattattattatcggtaattaagcttaatataattttataattaatgtttggttaattgtaattttaggttctcttaatt

SEQ ID NO: 2191 - DNA, 595 bp, Cannabis sativa
aagaacaaaggaagtgctggtaaatagtgtagtctagcctagtcttttaatactacaaaaaaagcaagtacaagtaacacaagtagtcttagcagatcaacaaaagaggaagaatgggtttaagatcaaaacaatccaatcccaccccttttggtagaaggattaaggaaagcaaagtacaacaatggaaatggacaaagtacgtacgttatattctcatcaaccacttgtgacaatatgtgatcagagatgaaagagaaaaacgcttccatacctgtgagactactcttgcacctcaattctatcaacatttcaaatatgccgaggtaactaacatacgcggtgaaagaaataatcatattctgatactcctgatggatcctttcccatgtatactgaacaaatatataaatatatgcttataatagtatactgtgattgagtggtttccacaatttacctccctgtatctgctgttgcctcaccttgtaacaatttggattctaaactttccacttcgaaaattgaagctccgtttgaatcagtatctgtattagtatcagtatctatttttgactcattattaggatctacc

SEQ ID NO: 2192 - DNA, 1726 bp, Cannabis sativa
tattttatgaacacccctaggtagttgagagaagtgtaagttatcaattatgatagtgtgtggatgggaattgattattgttgttgtggtatagtttatttaaatataaaaatctcaaaaagttatttttggaaagttacctgtttttcaaaagttgattctcggacaactttcttggtctcctggaagaaatctcgcggaatgatagttgtcctcctgaaaggttgttcccgaatgactatcatgtctactctgggtgtatcttcaggaaagctagtactcctccgaaaaggaattccaggtggctagctgttcctcctggaagatagtcccggatagttaactccagctggctcgttcctatcctggaaggaccttcagcgagtgccttgaactgtgactccagaagctctcatactcgctcccggatgcactcttacttaggctgacagggaggcctctctcataggagagttggttaagttacttatttcctaactaacttaacaacctcaattcttccagctacggactttaggattttgatcgtaagcttatatataaccacccacacttattatttcaagaagacgattagattaagaatgaaaaatagagagaaaagattgagaggtaaagagagaggtacagagaaaagagagattggattgtataagaagtcttttatagatgatgaaaatatttggataagagggtgagaattgaaacactttgagaaaacttattagagaatcgatctcgactgtaatgtacatgttcttaaatcaataaagaagatttggtggtattttaaaattagagtagagtcatagattcattgatctatcagacttgaaccaatatatatcttagtgtttatttttattattttactgctttaattatttctagtttctcactgttcatttctatttttcctaattattgtttgtgatttggtaaaaccctcgtgtaaaatattaatatatagttataccacattatagtattagtggaagacatttataattatatatagtaccacataatataataagatattatatatgttacactaaaattacacatgcaatgtgtggtaatatcttatacaaagatcattattcactttgaaaaaaaaaaaacactttatatattgagagtttgagaatacacttaatttgggcgaactttgaaaaatgtcataggcacatatgtcttttttcaaagagtattgttattgaatactaatatttttataggtgtcgtcttacaattagtaaataatattttttacaaataattttcttaaataacatgagacctgatatttaattttatacaaataacagtatgataccgagtaagatgttactaatattactttttaacaattttctttttcaaattaacacggttcattcacaatataattagtctttttttttttgtagtttctccgtcaataactatttaaaaattcaataagtatgtttagaaatgtttctctcttgtttgtaaggcgattaattaatgtagtggttcaaaattttgctaaaattattattttgtattggatattcattttctgaattattatattgtttgataatcgagattaagggttaattaaattgattttctattgaaaaaaaaaaaagtaaactacagaatatatctaaactgcaatcaattaattatcaagaagatggaggaagcttccctt

SEQ ID NO: 2193 - DNA, 5371 bp, Cannabis sativa
tttttctaagaatattcatatgtttcatatgcttgtattgtagtttgatgctgatttttttggacttcttgatttaagtgccatgtgctttacggttcggatgctgaaggagatctccagaatttgcttgaaagagatgaattggcggtggttctgaattcaaaacatcggcctcgcagcattattcagttcatctcacagagcttgcaaatgctgaagttggaagaagcaaagagaattacgttggtaatttttcttgaattagcaagacattgagaaatttttgtcagtttcatttcccaagttttattaaacatcttaataggctataatttctgtttagattttgtaattaagatatcatcaggtggaaatcattgattctttattaagactataatttagtagttcagagaagtggacacttcaaattagcaaccaccatatcatggtaacccttaaactcaacttgtgcaggaatcaaaaatctcttgttttcacgaaggaattggtgtttgtgaacagctcattggcactccaatccctttatcatacactcgcttgacttcaagatttcttgtcctttggcatctaactctccctatcatactttgggatgattgccactggattgtggttcctgctactttcgttagtgctgcttctttgttctgcatagaagaagtatgttttctctctctaatactcagttttggacttgtgttagtcttcttttgcctgacagttagatcatctaaagattgggaggcaagtagtgagtgctgcttttatggttttgataattagggagctattgaggttaatgaaacagtttatgtcaatgtcggttgaatgggagattttctagccaaattaggtagtggaaaatctcaaacctttctttctgaagagaaaatagataggatatcagattatgggagtcaagttgtggaatttgtagaagtgtggtttaatttagatgactttatttaccattcatcttatctactgcaggttggtgttcttattgaagaaccatttccggtgcttgccctagatgatctctgcaacttggttagggagaacattcaggaagccgtggcaagtgaaaaacgaattcgggctgtgctaaatgctaaaagaaatatatactcggagcaacattcttccaatgggcatcctaatttgtagttgggtggtatgatcatacagaaatttttgcacaacttcacggcgtatgcttatgtgtttttgagtattacactcgggcaaagcttgtgaataatgatcatttgatccatttaacaaaacacaaatattatctgagttttatcaattgaatgtggtagatacattacataaacgaacaagaaatcctgtgtatatactgtattttctctgtacataaatggttatatgctaaatgaaattataacctcgtttgatattatggcataccttgtgttattgtcaaatttattcttaaatgtgtgaaatgagtggactctgtaagagaagatgtaaatgaatcgagcctcttaagaaatgaagtaataatcagaatccagcatctagaagggttatatctagaaaatggatggtggagtggtataagaaaaaagtgtctgagcccgggttcgaaccggggacctctagtgtgtgagactagcttgataaccaactacagtacgaagacaattgataggttgggtatttttaccataaggtgaacgtgaatgaacgagtaaaaataagtatttctcttttctttgttagtaccggtaggaaccacatttgcatatcgattagcaaaatatttacgtgttcggtagaacatttatacgcctatgtagtcattgaataaaattctgacaaacaaactaaacaatatgcttatgaaaatctgagattcacagtaccacacatgaactaaaccatttttttttttttttttgaaagccacatgagctagggacaattattattggtaaattgtcttccttcattgtccttggcagcttcttattggtaaattgtcttgagtacgtagggacaattcgaaattgctcccttttatgacaaaattgagtaaggtgttattctcctctacttaacttactcatttattctctttagctcttctttttttaagtttggtatgttgagttgctagatatgcgttttatataacatgatttagttgctagatatgtcttttttcaatttgtgtttgtgatattaattattagttaattatgatttaaagtacaaaatgcatataagtaataatatgcagcttcaaggaagaagattatgaagaagtgtctgaagataaggaagttggaaaaaaagttgacttagtcaacaatttttttgaatgaaaaagaagtggattttagtcccacatttgtttagtagtaaatttgacaaacctgaaaagctataaatgcagcctgaagcatatatattttaattacatggaaattctacttttgaacaaattgtatgctacaaaactgtgaaacaaattccaagagtaagtcaaaattttcaaatataaggaattcaaaactttgtacgcgttttatatgtaataaaatttttaaaaacatattacgttttaatcttgttcggatgacgtgacgtgattttcacatgtaattatcataattttgaaaaggttactaatttcctattttatgccttaataacttttagaaactattttattgtaattattctatataaatagtggagtcattctattatttgaggatccaaaatcatattttcaagagagctattacgctgctcaaatctctgtaaaaacattcgagagagatcaagttgttcttgcttctcttctcataagtaaaatataactaaaacggagtagactattaccacaaaaataggattgaagctttataaaatttcgtgttcttagtttatgctcttattatatatattctttttgaattaagttagttctgaatcgctttcaagattcggtgttgttggctagaagcgaggttaatattttggtgctttcattgagagttgaactcaagacaagcaaggatggttgtacaaacacgaaggggtaacctaaatgaaacaacggaccctatggtgactaatctgaatgtttaaactcctgcaaatccaagagatcctcaagcaaatgattcgaacaacacttttctagttctcctaaaactggtgccactctaagcactcagaacactgaaacaactagtacccactatgctggggaaactgggtcgggcaacggagagccattaattggcgagccttgggtgacccttgatgatgataccgagttgcgtaacttgagggaggaagtgtcttaaattcagaatcacacgaacacccttcatcacgatcaggcacatacctgagcaaccatgaacgaagcattcacccaacaaaaaaagatttttcaggaatggatggatagacatactgaaagtttaaggcccagcaggaagcaattgacaatcggtcacgtgagactactgagatgataagacaatttaatcagcgaaatggacaacagtcgcaagaaaacatcccccctcattagtgatccccacaggggaaaagacacctatatcccacctggaaatcaacacggaccggaggttcctccaatgacttacacccaaaaccctctgcatgtcggaccgtcaaatccaaggccataaaatacaaatatggaccctacggtggatagccaggtattgtcagggcatcaccttgggcaaaatagtcaaacttttgcccccatgtggatacaccaaacaagcctagtggagaattttgtggacccatagccatttatgatcagaacggtcaagttcagtatttccagtatgtcccatacaccactcgacaacaagatcaggctacaactgctcatagtcaatcattctcgagtaataatgaaaatggggcggatagtgcgacccacgcccaaagacgtcgagaccgacatgcttagagggatactccactgactgatgttgatactacgaggaggccaccaggtcagttagtctttgaaagaattagaactcagctggttgatctcaaaaccactttaaaccagcgaagagaacaaagggatagaggaatccctcctaacgtacaaccaattaatttggacacttatgttccagtcaaaactctgaggggacaacaggtgacatgagtcggacaataggcaggccaagttgatccaggggtgcaagcccaaatagatcaccttaagagcctattttagagcctgactgatccaaaactcactgacctagaactcgatcgagcacgaggttcaccattcattgctcgtataaatgcactccacttgtcgcccaagttcaaaatgccaacatggaaagtatatcaggtaaagaggatcctttatcccacatcaagtactttgaaatgcataggacttgcaggcagcgcaaggagatgtatgctgtagtttttccagctacattggcggaagtcgcccagcagtggtatttcaagctgactctgggaaattttgattcatgggacactttcatattagaactccatgtgaaattctcttcttctaggcaacttcctgttcacttagaggacttggtcggaattaaacaactgcgtgatgaacctctcagggattatatcagtaggtttatgaccgaggctacaagggtaaagggcttaaccgaagaagaaagactagcagccatactcggaggaattttaccattggaggatttatggaaagatatcaagagactaacaataggatccatgacagattttttgaaccgggtagatagatttataaagctagaagaggaaattcgaacaactgctcgaagagtagatgttttcggctagaaacagattagcctaattcctactgccactagtacgtccattccgtacacttcaagccaagctggaaatagccagagcaaaaaaaggtcaaattgtgaaaacaatcaggggaatggtaagaaggaaaagttcaacaacaatcctgaacatcaacatcctcgtgagaaggtcccaaagttttagctttcactatcttaaccgagctgatagaatttatccttagggcaacagagtccgcagtgtcatacaaaatatctccaccaatgaagaaagatataagtaaaaatgatcagtccaagtattgtcgctttcacaaggattacggccgcgatactaatgagtacacgaatctaaaaaaagagattgaatttctcataagaaaaaacaatccgcacatacgaaggtatgtgaaggccgatcaagatcaaagggccgcccagatagataa

SEQ ID NO: 2194 - DNA, 561 bp, Cannabis sativa
ttttttttttttttaaaagaaagacatttttttcatttccagtttaggtaagtggtccaataattgggacaaactgaagtgtctctatccctgtaaaataatttagcaccagatgtaacttataaggttattattgattttaaaaaaaatgccattcttgtccacacaatattttagctaagtgattggatgtgttcaatgttgtccccattcctcattaataaaatctattttgggtacctacgaaacaagtaacataaaacgaagaagacgttgacgctgattacatttacattcgaacagggaatttgacttttaaagattcaatattttcaaggtatctttccacaccacaagagtccatgagtccatgacaatgcttgggcttcattacagtttcaaacctcatggaagcattctggcccatttattatagtaagtagttggttagtagttgtattctttctagtactactactttcaatcaagactagtcaaatcaatttcagttacaatgtgaaatcaacgatgagattcaaattaacactagacaaaacgttc

SEQ ID NO: 2195 - DNA, 1372 bp, Cannabis sativa
aaaagagagaaaacccattattaattaccaagtagctctctttttcacaatgtaaaaactggatttttcctatatgggagttgtttttctttcccattttcattagagggacaaacccttttgaagccattttttttcaagtctaattgggtttatgtgattatcagggtaaacccaatcttctcttaaagaaaattgaatacaaaacttcattttacaatcaatgatattagtttccttacacattacaaaaactcccaattgaacagaagacattagagttttgagaaacatacgtttttgtttggatcagacctatatacataatgacaccatgaaaagaacaggagcaggattaaagatgagcttaggaaagtaacaaatataaacaagctaacagtgataaatattatatactctttctgtcgtctgtagtcagcgggaatttggagaaaatatgagtagcgttgctacacgttttcacccccgcagtaaaccttccaatatcatcactgctcgtctttaatttgtattcggtgcattagacttttcactcgagttcaatccatactgcagcacaaatttaaaaaacacacattcatgaggatcataactagtttctataataacacaggagcagaagtaggaccaaaaatcggtttctttattttgaagtcaaaaactatttctctgcaataactaatctaaaatagagcaatgagtttgctggatagaaagattttcttgcaacaagaagaattttattatatgtactcatctttttaattgctacacattaaacctcaatttccatccaacaaccattatgcaaataagtggggtagaaacctgtgtcatcgactcaacctattagaatacaagacgtaccgaatgctacaaaatgaattgaaagtatgttatgtctaaattccttaagtctgtaggtttcattcatagctcaaaataggatgaaaatgcaagtggactgcaaaggcttcctcacagttcagtgttttttctttgtttcttttctatatgggggtggggattcaggcttgggaaaagcatgtcagccaatgatatataaaactctacaactcttgtgtaaataaaattcaagcatatgaaagaaatatcacatgcattttgttttcacatgaggacatgactgcaactagtttaagaaaagggaaaagaaagcaaacaacatagataagatggaccaagaaataaataggggataggattcagatattattggggtgagtcacaagacaagttcaagatagcctttagttagttattatttgctatgtcataaactgttgcatcacatgtgccaactactttacttagttagctgtcatttttc

SEQ ID NO: 2196 - DNA, 2575 bp, Cannabis sativa
  modified_base (1966)..(1971): a, c, t, g, unknown or other
gtcttcaaacaaacctcaaaccaggttgtaaaatccatcgcacctggtgcaacagatggtacatgacatcggctccaacaactttgagcaaagctacaccgaacaagagcaggcaaaattgtttctggtgccgccaaacagaagggacaccaatgatcaattggcatatttttcgttgaaagttggaactttgttggtagaccgtttgtagagactctccataagaaatttaacaccttggggggaagtttcaaaaacataattacactaaagcatgtatatgcggaaatagaaacaaaaacatgtattaaaattacactaaagcataattacatataaaaaaacttataataacttgagtaaattaagctttatggttataattgtatattcatagtcaaatttttaacggttagagcattttactaaatatttgaaaatgaggacatttatttacttagttttgagatataatttaatttcataataatattatcttattatatgcacaaattattatagttaattaggtattatatgcttatgtaaagattacattttattgaaatgtacgaatgcaaataaaacaaaagaatggcttaattatttatttattataaattttgagaaaataatagagacatttgtggttatgtaattattataagtatttttttcttgaacggtcaaaatattagattgtaaacatcaattattgttgagtttatgaattctctaactttttgaaaatttagaattaattaaacccactaaaattaaaagaaaaattctctaaattcaataaaaattacatttataaagccctttcaactaaaacataaaattgaaaaattgaagaaaaaaaaatacattaagtacacatcctttaaaaaataaaaaaccaagcaacacccacacacaccataaatcctagtcgtagtatttattcttgctcaagtctaacccataatattcagccataactaaatgccccgaaaggatggaggaatgataaaaaaaaatagttatgaggagtaatttctatatagtcagattaattcgatcctgaatgaagacgcaaataataaatattaagtttaaaaattaaatattgatttcctttatctccattaacttcttcaacttcaaattgtggtggaggattattttcgcaataaggataataataagtaaccatgataattatgatgattaatcatcatggttacttggtgtaatataaatcccacaaatcactcacatatgagcaatgaacaatgtgggataaacacataatttttttgattgatttaatcactccaaaataatatttaatctatcaaaaaacttattcatcttactttataatttctattttataataattctccaacaaattagttaatctaatatatggtcacacaacctttttcatttaatataaaaaaaaatgatatttgaataaaagtatgtgagtgttcttatgattaaattgtaggaggattttatggtaattaaaggaaaatcaaagatatatttttgtaatttaataatattagaaggccaaaatgagcattctcacttttatataggttatatagatttgaacatatttgaataaagttttgatcttggccttaataaaaaaaaatatcattttttttaataaaacgacaacaattttaacaaaccaaacaattcattgtgtttgttctaaagtatattaaaaaaatagtttaaaactttcgattttctctctctaaattatagtataattagttatgaataatttcaggcgtaattaatacttaaatttaactctcgattgtagataaatacttaaatttaattttagattgtaataataattaacttatatttttagaacttttttagatacttagtcattaaatgtcaaatcattattcacatattatttttttattaatatatttaaattaatttnnnnnnaaaaataaaaatttaatgatttatatcaattaggaattgtcatgtggttattgatttgacacttaacagtcacgtacttatagaagttacgaaaatataacttaagtattattaccataaaaaattaaaattaaatatttatctgtaacggtaagttacttaaatatttatgctataaattaatctttaatagtttttatttatttataattagttaaataaattattcataattcaatctatatattaataattaggacgaaattcatacctagctatattaataactgtcaaagaaactaactatcctaactatcctatactcttaacagagaagcacaagtgtttctgtagaaaatagaattaagcagacaacggttctctcttatgattatggtatttttgcaaaaatttacaaaatgtggtatatatatattggaagataaagcaggttgatgaaagatattttagatttaatgaaattctattacatgtatatattttaagatattttgttagattttaatttttaaaagacaaaacggtaatcctaaattgggtaggattaggatttgattgggtaggttagaaattctatataaat

SEQ ID NO: 2197 - DNA, 1731 bp, Cannabis sativa
aatcttataataaatatacttgtatatattaattttggtgtgaaacaattgaagtttgaaactctcattttaaaaatttcttactcttacaattttacaatacatttttaagaatttttacaaaatatgccataactactttaagtttagtagcacaaatgaatcaattaattaaaaagagagagagcgaaattccaaaagcatttaaaataaaagggccagatggtaatttcagatagagaagaggttcaaagctaggcgttgattttttatgtttttgtttggaccaaaccaaagaagactttctcctcatttgaagaagcaataataagtacacatattttgatctctcatcttcttctttcaaaatccagaaaattcaggaccaaaaacctttattacactttgacccctgaacttctactaatttactttctaaaacccttgatacttgcaacaccccgtggaaaatattcaacatttctcaacaattgcaacccataacttgtgcttaattctgttttgacccctaattctcactcttctcccaccaatgtccaattctggaggtttctccttgactcgatatcggggcaccgaacggttctacaatccaccggcggttcggagatatcatgagttgcaaaagaagcttcagccatcgccgcggagtcagttctctaagtcgttgaagtatgaaacccaactcgactcgtctgatgctgagactcggactgactccgatgagtcgacattgtcgaggcctaactcagtttctttgccttcttcttcgtcttcttcttcttcaccagacgttgcttcgtctaatttggatcgtatcattgaatcggtaactccatatgttaaagctcaaatcttctctgaggtaagcttaaatcttatggttgttgaagaaaaataatcaaaaaaatgttcttattttgacttcaatttcagtaatctaataggaaagtatgtgggtgtaaagaattatgctttaattgcagtttagaattgcttgtttgctgggaacatcaatacaagaaaaaaaactcaaagtttgataattgaattgagtaaagtaattttaagtgaagcccattagttagtattagtaataaccatatagattaaggtataagaagatgtaaagaagttgttagtttgaatatgtatccaattctttcttatgaattcaggaatattccatatagatgacttggttcatttctgagttcacaggcaagaatgagaggatggagagctcaagaagcattttactgtcttggggatctgtgggaagcgtttagggaatggagtgtatatggggtgggtgtgcctttgttactgaatggatgtgattcagttaagcaatactatgttccatatttatcagggatacaattgtatgtggatccacaaaggttgaggtgagcctatttgtaacctctttctttgcattgttaaagtcacatgataatactgagatgtaaaatctggtttatgtactctctaatagtaaattttgctgttgttgtgtcacctctttatgggaattgattctgcttcttactcttgtggtgacaagataatatgttattgtttctctacaatgtgatctgactgtgttgttactaggctcttgactctgtcatttgtttggtgaaatgtttgaattgatatactgacatgatgcgtgatgctcatagtgatgctggaagtggcaaccgt

SEQ ID NO: 2198 - DNA, 1114 bp, Cannabis sativa
ttatattattggtgtgcccatcttattagtacataacaaaagaatagtaattaatactttcaagataataatcctcacagtagacaaacgtacatcttgggattcttacataagaaaattaacaaagaaatcatcatataatatattgcatatattactatgagagaccaaggtgagacatacgtacggccttcacatacctaaaaccataataaaaaaggatcaattattacaacaagatcatgatatcaatatcataatttataattaactacacattttctttcttagggtttacctaacaatgagtattaggaggaattggaatgcgacacagagcgggtagttgcatggcaagattgcgatcgacaccaagaacgcccattaggaaagagttgttcaagtagttgcaaaaacataccaagttagcgccccttagcgcatcacaacattttttggtgaggggcgcaggttgattcttcactacggctggtcgacatgcattgaggccatcctcactcatgttgcatacccccaatgccccttctaacatgcacccaacaattattgtagccataattactactttcacacctaccaatttcattcctttcatcattttttgataattataattagtactttgttattaatgtatttaaaaaaaccaatatgcaagctaaattttaatgtttgggatatggaaatatcgtatgcttatatactagtgacaagactcacaaccaaaactagattaaacccacaattttgagattatgtaacctattttatctatttatagcacactcatttttatttatgattttttttattatttattagtcaaaatttcgggtataatatggtctcattgattactaatataggttaatgatgaacttaaatttgtcaataattagttattaggtaatgggttgtttaataccagagtttgatttacttttcttcggttgttataattatgttaattgatgacgtgaaatcaattaatttttataaatagtgtttttgttcttgtaattagttttataattttttgaacaagttattagttttgcaaatacctaattgtaatctatctaattaagaagaa

SEQ ID NO: 2199 - DNA, 641 bp, Cannabis sativa
atccaatcctgaaaatatagcatttcttttttttttactactcatggctttgatgcgtttcaaaattgagaaatttctactagagcaggtgctattagagaacaactagcagatctggatttggaaattattctcgattattcattagcagaatagaaagaattagggaaagatgggcccacgagtaatgaatagaaagatcgaaaagttcgaagaagaaatgatttgatgaagaaactagttttcataatagaatacatttaacttctctagtttatgtttcaaacaaaacaaggagagaaactttaaaattataacattaagtataggatttagaaaaatatttacaatattatggaaaacttaaacccataaaaagctcaaaaaacaagtcataaaaaatagacaaaattaaatttgccatattaaaataaaaagcttttaaaatctcatattaaatgcaatttccaaccttgtaaaaatattctataaaagttattataaattatataagatactatacttaattggatcagtgctatagcctataataccacaaaatgtactaggtagctctgttgccttttggcatttctcaaagataactagcaaactttgcccaacatacaacatggtcaaac

SEQ ID NO: 2200 - DNA, 873 bp, Cannabis sativa
gagattacagggatcgattccccttaggttttgatgggtgatctcaatatggttatgtgtcaagatgacaagtttgaaggtaatctggtggaagaggctgaccataaatgtttgcttgattttcttagtatctttggtggagtggatttaggttgtgttgaaaatcatttcacctggtccagcagtcaacaagtttttgatctcattagggagcgccttaatttgtggttagagattcagactagctgatttcctttcctagagctagggttcggatgcttgctattaaagactcagaccatgcccctattgttcttgatcttcttctcaattgtgagcactttcacactccttttcggtatcttgatgcttgatcgagggatgcaagctataaagaagttattaaaaaggcctgggagcttgaaataattggtgttaaaagcttttagctgatggggagactggcttatactcatcgctttttattaaaatagaatcgagaagtttttggtttctttaatgagaaacttaagtttaacaatttgttacttcagatctaagctcagatcccgtctccaagtaatcttcaaatggaggcggacaatgttttggaaattgatgaggtggaatcgtgtcaatatgagatatggaagcagaaatcttgggaatgttggtttcgtgagggggacaacaataccaagtattttcatgctactactcttagtaaaaggagaagaaattttattaggcagtgtctgatgatgatgtccgtggacaaaaggaaggatagaagtcaaaaattatttcaagtcaaagaagttttcgcttcttctttcccttcagatcctaatcaccattctcttatttaacctc

SEQ ID NO: 2201 - DNA, 2102 bp, Cannabis sativa
ggtatggagatagagcaaatgcttacagttccattgctttctggactccgaggcagtggaggcaacttcccattttgagcaggtgctacagaacagaagcagcttgtaagtaacatacaactattccaaaagccgaatacaactacatccaattatcataaaatgacagatattccactcaccatctaccacctcgttcggttgcaagctatttaacaaattcatgataagctcctggcattgtaaaatcaagaataacatcactcggtagttttcagaagtttgagttgtctactttagagaaaaaaaaaattcaaaacacgaaaaaaagtctctccaagtttccccttttacctgctgtattgaagtctgttgaaaaagattctgaaggtgaggcatgagaagtgttgcaggtactatgctgctgctattcgactccttaggagacagattgacaggctgaaaagtgagtataatgtcatcaaatacttttaccgatgcttctctaacaataaatgtatggaatcaaatatcttattcaattccaagaggttagcgcacaaaccacttgtttggaatcaaatatccaatcaccaacactagcggactttctcaacggggatccctggattcacaaatcagaacataaagtaagaagcagaaatctaagtataatttattccagaatatttaagtacagcaggctgcctacctgtgaagatcgacgtggaactgtacttaatggaatatcctagggcaaagttttaagttagttaaactgaaataatagacaaagagatcataagaatagaatactcaccttcacaagatctaggttttctgatgttacagagaatcgccccttaatctgcaccaggttggcttttgatttatcatccaaagaatccctaaaacctattagaagtgaaaaattggtgcaataagctctctgagccagtagataataacagtaggcattgtagcacaagtagtaattagttttgtggtacacttgcttacccccagaagactttatgggagctgataaactatttgctgaagctcggtttggaagcatcaatggaccactaaagcttggtgttctccgtacttcactatgaaatttgtcacttggagctttatcattctcatacctagacatttaattagcaaaccatcaaacatttatcgacacagagcgaggttagcataaggaatacaagacagcaagggtgggagggacatgcatctttggggttctaattacttttgacaactctattacaagtttatgcaatggaagtacttctaattgatttttgatagatctatcacaagtttatgcaatgcaagtttatgaaggaacaaagcactttgaccgacaataaaacaaaaaatagatctgttactaaataacatcacaacaatcacaaaagagtaattcatgatgaacctttcagagacgcgtaacttctcggatactgaatgagtaagcacagaaccaggcatcagcggaccactgtgtgtttggcgaactttcactgtttgaactctagtcttgtttataactgattctttttctgatgtagatgtggctaactcaatgcttgatccatttttgttcaacccaattttctctgggctactagactcctgtacagattccagaatttgacctctgttgtttgaattgtcaaacagctctaatctatcaccgcttgtttgtccttcgcaaggtgcttctttgtgtgaactaaattttcctggtatggattgggaataaggtgcatcctgattgatagaccaaaattagatgtgttatgattaagatattaagtagcaaggattattagaataaccactgtagttgcaaataagagaagaaaatatgtgtaatttgcaacactatcgtgaggtaaaaacaaaaggccaaccttatcaatatatacggattttaacttttcatcttcttcttgcatctcttgcaaatcctcatcatcatcccgcacctacaaatttaaaacgaaagtttatttatcaagttaacaagctaaagtatagtgacattataaattaaagctagaacacagcaattactatat

SEQ ID NO: 2202 - DNA, 2513 bp, Cannabis sativa
tagtgtaaaaagccccttctctattctttgggtgtacatacgtaacatccaatcaaaatttaggatgaggggcaaatgtgtctttttatttacctttagaattccaaaacagtccctttgctgaaataatctgggcatcgggcttgctctggtcttctatctactaaccaaccgagttctcagctacactatcggtagtactgctctccttcacattccttctatggcgaatcagactcatttctgaatctttctactaaggtacgttacttatgtatatttcttccttcttttccgaattattttattggaatttccttgaaacaaaactggttatgctgatatatgtgtatatataattctaaaaagattttggcttttgaattttgagtccttagattatggatttattccattgggtttgatattccttgtcgtttttgcagattttggtacagtagtataaacccttttaaacatgaagataagctatagtgctatcacaaaacccagctttttgcttgtacatcctgagttgccagcgattatatatcccaaacctcacttaacttcaaatcctgttcttcaaatacctcgtagacatgagaggtttattgggttggtcacaaagtctcagtattcttcttatacttctgatagaaggactagaaataggaataattctagggattcatctgttcctaaggtagacaataaacccattggcttgggcaggaaacaaggtggttcctcatctctttatagtcgtcctagtttgctagagatgaagaatgagagggtagaaaaccgagccagggtttatgagttcttaagaggacttggtattgtccctgatgagcttgatgggttagagcttcctgtgacagttgaagtcatgagggaacgtgtggaatttcttatcagcttggggcttacagttgaagatattaataactatccacttgttttaggctgtagtgtgaagaagaacatgattcctgtgctggattatcttggtaaattaggtgtgaggaaatctactttcactgatttcttgagaagataccctcaagtacttcatgctagtgttgtaattgaccttgctccagtggtcaagtatcttcaaggaatggatatcaagcccggtgatattcctcgggttcttgagaggtatccagaagttttggggtttaagcttgaggggacaatgagtacatcagtggcttacttggttggaattggggttgcaagaagagaaattggaagtatttttactagataccctgagattttaggaatgcgagtgggccgtgtgatcaaaccctttgtcgagtatcttgagagcttgggaattccaaggttagctgtggctagattgatagagaaacggcctcatatacttggatttggattggaggataggatcaaaccaaatgttgaatctcttttggagtttcatgttcgggaagcatcaatggcgtcagtagtggctcaatatcctgagattataggacttgacttgaagtctaaacttcgtagtcaacaaggtttgctcaaatcggttattgatttggatattgaggactttggcaggattgttgagaagatgccacaggttgttagcctcagtaaggcacctatgattaaacatgtggattttctcaaggattgtggattatccttggaccaacttaggcaaatgatcatggggtgtccccaattgcttgccttgaatgttgacatcatgaaacttagctttaacttttttataacagagatgggaaggcctttggatgacttggttgctttcccagcattctttacttatggccttgaatctaccataaaacctagacataggatggttgcgagaaaagggttggaatgttcgcttgcttggatgcttaattgctcagacgaaaagtttaagcaacggatggattatgatactattgagctggatgagatggagccagagccactattcgatatgaacacattgatggaagcaagaagtgatgactcaggttctgaatatgaagatagtgatgacgattatgaagactagtgacagtgagttttgtggagagtgaatttattcagtattgtagaggtggactttttcagtctaagatcttggagtcatcttgtataatctaaatcctttctttgcataatgaagagtagaagtatgatttccatgatgggtgattttcatgtggtccggatgatttatggggagaaacgtgagctcttctgtgccaaagcactggttattttacaatttttcactgtgctatagttttatagccttggatctattagaagaattagaagaattacaatctcttgggacttcactactttcttcttctgtttactttttttttttcttttgctcaagtgtatgaggtaatgtataatgacacctatgtagcaacaagttgcttaaactttgaattaacatgaatgtaaatctgcatggtcgcaaactttgaattaacatgaatgta

SEQ ID NO: 2203 - DNA, 2359 bp, Cannabis sativa
aagattggtgtaatctgtgagaataatgtatgaatttgggttaaggaaggatttatattaatattgtttgtaatttgcggaagtgttttcagtccctttcaatttgcgatgccaatttggttcgaaaaatttatgaatagaaatggaagaatttttttttccttttcaaaatttaaattagtttgtggggagatggaagaaatggaaattgattaagaaaacaatgtattatgagcaaagcaattgtctgtatagaacccaattcttttttgctgtttcattttaatttcgtgtattcattgtaaatcctagtcattattatgtttacatctattttcactcaagttttctatttttgataaataattgaaagtaatgcatatcatttgataatttgattagttttctgttttggtgtttatattttggtaatctaatttaatggtctcactctcacttgtattgtctatatttcaaggttctcaagctcaaatcaaggtttcaactcttctgaagtgatcagtctaagctgagtgaatccttccataattgtttaaatggcagattctgaggaaaagccaccaactgaacaaggtattttttttgcataagctgtatggtactttttgtctggtatctgtttttgtttatttcttgtttgccatttttctaacagtatatgttcattacattttcagtctgcaatttttttcggaagccaacaaagaacaaaaacatcagaaagcgaacagttaccgatgatgatgaggaatcaaataaagatagcacatttttgcatagtcagaaaaaggccccaaaagtggacaataagctttatttttcttctggaccgtctaaaagcactacacttgcggagtcaaatgtagcacccgacactaccgtctttcagttcgagtcttcgaaggaaattcaagtccaacacgacagcagagcaacagcaacactagaaaccgagactgatttcactaaagatgcacgagctatacgtgagagagttctaaagcaggcagaggaagctttgaagggaaagaacaagagcggtggggatgataagctgtacaaaggagttaatgcctatactgattttaaggctgggtttcgaagggagcaaacagtttccagcgagaaagctggagggtcacatgggccactcagggcttctgctcacattagagctacaacaagatttgattatcagccggacatctgcaaggattataaagaaaccggttattgtggatatggtgattcctgcaagtttatgcacgatcgaggggattacaagtccggatggcagatggagagggagtgggaagacgcagagaaaataagaaagagaaatttagctttaagagaagcaggtgatggagatgacattgttggtgacgagagtgatgaagatgatgaaaatgcattgccctttgcctgtttcatttgccggcagccttttgttgatcccgtcgtaactaaatgcaaacactatttctgtgagcattgcgcgttgagggtaatttctcgtccaggccttctgaatttgtttttgtttttctcttcttacaaatttacctagtctaactttgggtcttataactttgcagcatcatacaaagaacaagaagtgcttcgtctgcaacacgcctacgcttggcatttttaataccgcgcatgagatacggaaaaagatggccgaagagggcaaaaagacggacacttgatcttttaaccaacagatattagtatgtgtgtgaattatgaagaatgggcatctgaaaatggttgtaagctttgaaaattgtagaattggtcgctcaactttaaaaagtaacttaatgtaacaagtaacattttattttctctttaaattacatagatttttttttttaatctgaaaaattacatagaaattactaattagttgtatgcatttgtttatcgtaaacatacaatttaatttgttgttttggcttattttcgagtagcctagtggttaacgtgttggaatattgtgttagaatggagttcttgggatttaggttatgtttggtaggtaggaaagagagtagaatggatggaaagtttagaaatgaagagtaggagagatggagatgatagttgctttcttttgtgtttggtatgagagtaagaatgtatttggcaaagtaagtaagaagaatagtgaatttataaggatagagcctttacaagggggaatgaatttttaaaattggagggagattttctacctccacctctcttctccattcctttttctctcttaccaaacaaggaattcttcctcttctctcaacttttttactcgaccgattcattattctta

SEQ ID NO: 2204 - DNA, 1812 bp, Cannabis sativa
aaaaaaaaaaaaaaaaaaaaaaaaaaaaaaaaaaaaaaaaaaacctttgaaaattgaatgtcttgggcaatcaagttagttgcctttacctctgggtcttgggaggcaaagttaactggtgttgcaacatggaagacaaggtcacaacctgctattggggcatcaaagctcccctcctcagttagatcagcaccaaaaatctttagctcacccaaacttttgagctgcaaaaggtgtgctatctttttctgattttctgcaccatataatatgtacatcatttactattactataccaaattagagtttgatttccaatcactgtgctaagttggtaatagtcttaacactatactatgttcatatcctcatgtgcatgtatacagagactggactaattatgacatgtcaagacgtactaaatcatttctgtccaataataattgccaataaagcgcctctctaacctaaagtcctaatcacaaatcattactattgtcaatagagagggagactaaccagggtctctgacagtggtgtttaccctatagcccttctgaagaagaagcttgaccagcaaagacgccacgtatccactgccgccgaccacacaggctgtcttcttggcaatgtgtttggtgtccatggctgattagattgtgtgagtgattggaagccaataaacttggaaaaaaggtgtctggtagtcagtgttctaggcaggggatacaataatgaccagcaagttcggcttataaatagaagtttttctttggagtttgtagtacttgtcatgatgaagaaggtgagcacgtgtaaggtgaattctccaccaacaaatcaaaccttggtttggacatgtcatgttccatagctaattatagtatgagtattccttaatcaagaaaagagtagaatatacaattataattaattttcctgggatggatatattgggaagaaaataataacaatagtttcatgccactctcttcatagttcataacatgtactactttgggaaaattaggtagaacaaaaacataaatggaatctttaaaaaagtaaacataaatggaaggaagctgaatgctgtattactgtaaaaccagatcattcattccttttttttttcttttcaataaataaaaaataataataattcttgtgcatgattcagtttcacgcatatgcatttaatttactcgatcttattataaggaaataatttctccaatgcactcttgtataaatgttaaaaatggttaaagtataccaattgttatttgtcataaatccatctaattattagtttggacaaaacttttgacaactgaaaaagtttgagaggaataatttaaaagtgatcacaagagataaattaatcttattttttttaattattatgctaatagttatcatattctttttgaatggatagttactgtttcctcttttcccgaaatgggtgaagtaaaccaatgttaaaagacctcgtgcttatcctatttgaaggaatttaaagagcagaagcattacctaatacaaatatttgaagtggaattaaaaaggttaccccaattttatctcctttccactttgtctttttaaacataaaataatagaaaggaaaaaaaaaaaacactccaatcctatcaaccaaatcaatcaaattaatgtaaatttactattgagatattcaggaatagtggccctactacaatcctataatccaaattcatcaacctcacatttaaaataaaagataattgttaaaatgtactaataatacccaacatcatctttcttact

SEQ ID NO: 2205 - DNA, 1154 bp, Cannabis sativa
tatttatttatttatattttaaaactattttttcaatatttaaataattaatattatgtgcaccactagaaattctacacgtgtacgtgtacgcttttgtatatgtatttttgaatttgaattttagttcttggcttttgtacatgtattagttgattgtattataaaattaaattctttgtgtagttattgcttttgctattttacatatttggttgtaagatttattttttaatttggttaatatatataacttgtttctcaatgttatatttttaattagttgataaatttcagtctcaaattccaatgctcaactttggcgacaactctaacatccaatactggtgacaactccaatgtttaactccggtgactctacggtaacagtggcaatcccgacgatttttctgacaatgacaacaactttgacagatatttttattttatttttttgtcttaatggatagtgactatttaggtagtgagttgatggtcgaatcttagagcttcttacaagtttgcaactggttttaatttggttattgtgttggttttatctttattagtgggttgatagttaagttaagcatgtaaaatttatatataagttttggtatccgtaactagttttgttattaagaaaccagttttaattatatgtaattaaataatttattaatttgttgcattaataaaattgtttttaatattgctttaaattctctaatttggttttaattactaaaaaaaacttttgtagttgctatctagtaaaaaaacatgattttttaaatttttttaataatatttctttttatttataattgatttattttatattttttaagttttattttaaaaaaaaaaaaatagcatatttaatgaaattaaatttacatctcttatatattaaaacttttttttttccatatctttataaataacttaatatatttctttctaagggaaagcattatataaaaagttcatgatctcatatagatagacattgaaatttatattatcctcggataggtaactgcagggacctactttaatggggtgggtcagattctccgtttttgtggttaatgggacaatggcaaaagagactattttaatacttgaagcggggatggggcgggggacaa

SEQ ID NO: 2206 - DNA, 706 bp, Cannabis sativa
agagagagagagaacagatcacaagaggtggaacggtcttttgtttaggcaacttgtataatcaggaccgttgattgattgacacactccaccggaatcgatttatgaaaggggcactgtaaacgaggcactactatctcaaaccatctcaaaattggcagagtcagatattcgctgaaagtaaagctaagattaacaaatatatatataatatttagaattatacagatttcgaagtgttcctttctttctatttcttcttcttctaacttttatttaacaaataaagaaataaaaagaaccttgtgtcggaaataatggcggtggtggcggtggttgaggtggtggtggtgagtgaggagtgaggaagggtttttgagtggagaaacgtaaggttttgtctgtattattgtttttgggtcgctaattggattggctataataatggtggggttccaattctccgcttctctccttttatttttgtttttaatttttttttagtgaagtgtgacagtggacagtggagagtggaattttaatttccatgagtttacctgctaacggctatttaccggggaaaaaacgtacggacactctcaatagtgacatgttcacttgattttcgttaacattgaaatataaggggcgttcctcgtgctacacatgctccaaagaggggatttctatgatgttttatgttttt

SEQ ID NO: 2207 - DNA, 1309 bp, Cannabis sativa
ttataaaatattaattccaatgtaagtggtagttatgccaggtctatcaacggtcatgatgtacttttttttctttacgtacaacgtctgcacggtccattaataataaatgatatgaaacaatgatagattgattcaaaaagaaaaagtacatagaaaagattccatatgaacaccaatggaaaaccgtttcttattactgtcaaagaaatacaatacttgtgatattctaactatgaattcctcatttctatattacatacatttcggcagtggtacaaaaatgcatagccactaacaacacaaatttgcagcccaagaaggcaaaaagaatcaaactttacaaggtattcctagttttcctaaccaatctaacatatgctacagtactgtacataatcatctagcaactataagatcagggaatcaaaattctgaaggaatccctgaccattaagctatataggtagcccttcacacttcacagccaaccactagtttcatgtgaggtttttatttatgcttttattgcttttactgctgttactctttgcctccaaccgggctgtgaaaccaactgttgtgggtcctaacgatctctgtcgaaccattttgtagtactcaggatcatttgattgcccaccatgcctaatccattgtatcaatccatgatacatggggaagaagcgcatctgaatcgcagagaatgtaaagtaaggaattagagctgagatcaccacaaagagtgtgacaaaccagtaggacggagttggggcaagagtttcgatgaagattttgtatgcagtggtggcgaagttgggagacatggctccatatataaggaggaaaatgtaccaaaaagctatagaaccccatatgaaaatatgttgtatcatggtgaagtaagatatagccactgccatctgcaaattcaccacccagacaatgcacgtgtaaattgttgcccctaatatatctctcccggcagtcattccttcctcgttaaacgcttgcaggtccaatgatttggtacagaagtagaaaataatcacggcacttactaacccattcaatatccaggtcagtattcgacgccagctgaagaggacattctgcaccccttcttggtataatagaggaaactgcaagatgaaacaagaagcaagcgtcacaagatgcatttaagaataaaatgaaacttaacacatcattacagctgatattatatacatgccctatttttattgtgattttattattttaaatttaaacaagtggcattctgttaacaatttttttctcaatggta

SEQ ID NO: 2208 - DNA, 2932 bp, Cannabis sativa
tcaaaacagttagttagttaacaaatctaaacattaaaagtcataactttaatagattataggctaaactatatacaagcaatgtctgttgccttggcagtagcagtattaacactgtaaattaagagtggtttgatgaagcaccaactgtatcaatatttctattaatacttgattttaatcctttggccaacaattgaatcgtctttttttctttttcccgattgttcttgtaggctgtagagttcaagcttctgttctaattcaatacagcgctgacccagttggtagaatttgacttttgggaacacagattcgagattgcaatcttgaatgcaattcttcactgctttcaatatagctatctctttgttagcagctttaatctgcatacatacaaagaaaaagaacagagataagagaatgagaaactatgattaagttgcagtgtttgagaggtttggtttactataacattaccttgtctttatttgatctctttcctctacaaacaatggaggtttgattctcagaattcttgatgtaatcaagcagtagtgacacaggtgaaaacttgttagttagtttcagctgacaaatgagcttaacagcatgaataacttcctctatttcgatgaggttttgaatacttacttcaacatctgaagagaccaacaaacaatgacaattagattatttgttaagtttggcaaatactcaaaaactagtacaaactagagaaatttattacctggtagtggtcctttactccttgtttcttgttgttgttcaatctttacaacaacaccaaccattttgtttttttcagccaaccatgctgatttttcaagctcaaactgttgcagccttcgttgaaattcatcaacttttatctcaaactccaactctttttgttggtgttgatctatatttttttgggcttcagcaacaaactttctagcagaagaagcactcttttctttcaactgtgcctctttaaggatatcttggacatgtttctccatcagttcaagctccttcaatctggactccatttcttcttcctgcaattgtataatgctttccaattccacctttttcttctccaaagcaaccattgttttcttgagtgaggcaagattgttctctttgaatgctttaacatactcaagttccttcttttccgattccaattgacaagagcattccttcacagaattctgaatcgcctcgagtctttgctcctctagttttgttttactagcaacaacattgaactcctcttcttttaaactaagttccttcaagcaattatgaatagatgcttccacctttttcaattggctttctttcagctcagaaattcttccatactctatcttaaacttcagttcttgatctttcatacgcttttcctcagtgaggatttctttctcacgctctacaagctcgttaaagatggattgtaggtcctcaagtgtctttcctatatcaccccgttgctgctcaaaggatctcaaagattgtgttaacttctccatttgcaagaccaagaggctgagaaaatattcctacaactacaatagcacacaaaataaagaaagagaaatctcgatagatagatatagcttagcttgaacaactcttgttgtgccatttcaatacagtctaaaatggatattgaagtctctaaacttacaaaaaagcatcaaatcatgcatacacaacacaagcaaaggaaggtgatcattcatgacaaacaaaaatgaactaaaacaagttgtcactgataagaaccagattctgatatgaaacccagttacaagaacagtagcagaaatacagtagaacagcaagaattaagttgtagtgaaagagagatagggatctaacactcactgtctcacaacctccattctactataattcctcacataagtgagatttttgcatgtagatattgttacatggtgaaatttggtttttcattatttatgcaacttattttgagttctacaaggagaagacatatcaataccagctgtaaacatgtatagcttaagaaagaagatggtttgatgatatgaatagttcagttatagaagataagaagactaaactcaaaccatatgccaatgtgtgtatacatataggaatcatgacaaaattatgaagaataaagcagcatactttaaactaaatgtgatgaatcttacaaacttattagtgcacacaacaagaagcagcttgaagatagcaacctttcccctctttctgcccaatttaaaacagagacgcatgaaataaacccacatccacaagaaaaacaatgaactaaaaaatgttctcactgcctccacatggtccattcaggtattataattcctcacataagtgagtatatttgcatcaagatattgtttcatggtgaaagaaaaaggacaacttattcaaagtatttaccatgaaacaatgcaagtaagtcaccctcaagtatctaagaactaaagcaaccaaaaaagtaaacagaactaaaccttccaaataatactactacaagtctacaatcactaaacacatacttctttcttcttcttcttcttcttcttcttcttctgggttctcagagtataagacaagaagactgagctaatcaaacaaggagaggagtagttatgggttctttccctaaacctttctaaatcaatgcaagaaaaaggaaaagaaaaaggtttaaactttaaaggcactctaaattgagacatattagacaaaatcataatgattacacaagcaaaaggaagatgatcatacataccttgtagtactatttatctctttgatctcttttacttcaggctagaaattatgatcaccaaagcacctaacattccaagtatatcaaatcagagagatatatatatatatatat

SEQ ID NO: 2209 - DNA, 1899 bp, Cannabis sativa
agagagagaaagatagaaagcgtgattgggttagagaaattgttgaaggttatggtgcatttttaggggttttgacaatgaaaaatgaaaattgaaaattgaaaattgaaaaaatgaaaatgaaaatatatggatctttctttactttccccagaaaaaaaaaaataaaataaaataaacaaaaaaaaaacaaaatggccaaaaaatgagaaattatttctcttaacaaataatattaatattaattaattttgatattggaagtaaaaaacggtatactgtgtcacttacggagcgaggccgataagcagggataaacgtacggttgttgagaaaggccctaattataggccctcccattttaattttattttcaattccaaccctaagcccacatttcccttttattaatgtcccatctccaaccatttatacaatgtttttttttttttttgagtgtatttatacaatgtttttaaaagaacaaacatcctaccttctttctattcacaccaaaattgctaatagcttcaccaacactattctttcccttattaatctaagaatttaggttaaaagttgaagattcccttacatctgaatacccactcttcaagttattccagtaaacaaataatggtttgatttacaaagttatatattaattgacaaattaattttgcaagattattgttattatttttgtgagaatgattttattttaacaatgaacatttcatttaaaataataatcacaatgtatgtcagcatgattaatatacaacaattattacttgaatatcaatttttttttagtaaatactgttaggtaactaggttttgggtgccgtcacttcatttactttctatagacggcaattattttggtttcttgcacttaaacgcttaattgttcactacaatgtttttatagaatttatttgttggtctatccatcaagcctattacattttaaatgcaatttcttccaaatagatttgcaaaagaccaaatactctacatctcaatcaaccccttttaggtggttgaatattaaactatccctactttcttcacgttctaccttgattaaattaaatgagttataaattatgatgtgggcatctaaaatttgtactcgagcattatggtagcttctattttaaacaaattataattagttgaaatatgcctatgtgtagtagaggagctaggaggagggtgatagtgatgaagacttgattgaaattgaatcccaaaaggaaaaaagtgcacaaaaagtagtactagtagaatatatattattgtgttaggaagtattaacaagtgttagtgaaatctaacatagatacatatataagtgtatttagatatattttcatatgggaaaagatgtacacaacacaaagctaacagataaatactaagctccaaattcaaactccggacatgatctcctttttcaacctattctccatattgttactttcatggctccaagagtgtggagatggtgaagtgagtaatggccacaaaagattcctctcctttctcactttccgaacaaccatcttagtgtgttgccttaacaccccatttaccgcctttaggtagttactcgaatcgtggtctcttagaattgtgccttcagaaccataagctgtaggatcacttaaggtttctaaagggtgagggttgttaaggaaggcccttaaaactcttgaagagaatcctcgttgggttttgtccaagaaatatagcgcacaacccggaggcagtagagggtgtggaggcgatgacctttcgtctggttggagaataaatagtttgcccattggagagtacaacagtttctgcattaagcaaatgaaacaataaacatgatgacattagaagagt

SEQ ID NO: 2210 - DNA, 2392 bp, Cannabis sativa
ttaacataacactgttttataacacagtttattagatgaagaataatgtagtgctacattagcaatattattaattttaattaagtaatatatttgatgaaaagaaaacaaaaaataataaaaaggaaaagaaaaaggaaatatcattgtctgtacagacttctgcaaaagtaaatgtgcaagggtagtatgcaaggaagagcaaagacttagcaacagagaaaaagaccagagaagaggtcccatgatcagcctttgcagtttcaatattttgatcatttaaagttggccaatactagtatagctagtacctaaaccttcagaagggaaatttgaaactttaaaaaataaaatataaaaagacttatcaaaaagtaaagaacttccttggaccttgacgacgaaagaagaagaagaagaagaagaagaagaagaaaatgaaagctacacagcaaataaaactttttgggaaaaaaaaaaaaaaatcacagctatgatgaaatcacacattggtatgaatgaagaaccaatcaaccaaaaggatctttgttcttaattattatataagtatataaaaagaaaaaggaagaatagaagaaaagaaacgggccaattaataaattaaactagagctatatttatatatagacagtctatatgtatatagctatagctcattgaatgcaatgatatccatatataatacatccaaaacaacagaaacaaagtgatgtcttacttggattgaaacgagaaagatcagttagaagaagtaaatgttcagtgacacagacacatataggagatcgaacacgtaggagcagatgcattaaacggaaaatgcagcttcgcacacgtttgcttaacaattcacaaacttacaaaacttaataaataattaatgagtcatgtataatgaagtcaagttctatacatacatatatatatatttatatatatctagtacaagtatatactgtaacgtataaatataaatctacctcagtactcaaaaaataaaacatttttcaggctcattcatctgtaaacacatgatatatatgaactagttgcatctgatgatcaatttatatttgttttgcaaaaaaaaaaaaaaaacaatatttgagtgagggattttccatgcactgaaatatagaaagagagatggaagatgaaaatgttatcgaatattaatttaactagctatcagcagcaataatctaagtctgaatcaggatgtgataaaatgttccattcatttaaactacaaaactccaccaataagaagataaaaaaaaaccctaaaaactaaataaaatctcgagaaaactagtagaatttctcgacaagtgatcacactgatcagtcagcagcagcagcagcaacaacttgaacccgtaccatcaacgttaattctttctttcagtgcaaagggtagagagagagagagaaagagatagctagagagaataataacttaaataattagaagaaaagagaaaacagcaacaacaacaacactctctcattccgtttttactactaaaactacacctaaacctacttaataagagtttttttgggggatggaccaagaataataacaacataatattaatacccacgacgatcaataacagtttcatatatgatgatcaattttttttttctccttcataattctcttcttgggcttataatgcatttttctttttgttgggtttctagttatgaagataatgatctcattgcatctctttctagggtttcttaccaagagtgtgcttgttgttatgcatccaaaccttgagcacctgacgccgcactccggtctcgttacagaactgctgaaccaccgcctcatcttgcttctgaatcctccaacccaacctctctgctaatgccaacatcctatccttctgttcctggctgaacttggtccgaaagcgctttttactggacgacccagacccgaatccgaacccgcttccccctcctccgctcgggttcgaaacgtcctcctggtcttcacggctgtgactgcctgctcctccgccagatgtagaaggtagagccagcggcctatggtgtggcgccacgtggaggtacccggtgggcgtacggtagtaaggcgacaattgtggatgtgggtagtggtggggcacgaggggaccaccgtatgggtctgccgttattccgccggaatcggtctccttgcggtggaagttgcggtggcagctgcacgcggcgcattttagcccgtccagtgagccttcggcgccggctgctaggaactcgccacagccgtcgagtgcgtaaccgcccatacccacggcgtggttcttttggcactctctgtacctcggcttcctcggctggctcgccgact

SEQ ID NO: 2211 - DNA, 676 bp, Cannabis sativa
tatatgtacctgagagtccatcttcatacaccctttgctttcttttccatctcttatagagcagtattgagatgacaatctttgatataacaaaggcgacgacagagatcgttatgtagaatgctatcagtactggaggatttcccatctgttttctatcaaactgagatggaaatttggacaagtttggtatgaaaagagctaaatgtagtgcactttctgtccagttgtttaatataaaacacatggagaagttgaaaattgattaacttgaattacttgataattaaactcctattgcatctatagatataagaatagtaattaagaaagacatcatcaatcactacttgaaatctccatattttctggaaatgaaacaatatatacatatatatttaaaaaggaaaaaaaaagataaagtagagttgaaaacagatcactaacctttaaattagttgaagaaaggagatgaatcagatgaggaagaaactaaagagagaaagttgctaaagccaaaggtattgataagtggtgtctcagaaaaatcaaattaggtggcgggtcattattagtttatcttatgtagctgtccacattttgttggcatgtttttttttttcattaattttcatccgagttcaactgactcacatgagatagtgaccccagagat

SEQ ID NO: 2212 - DNA, 841 bp, Cannabis sativa
gttggtaatctgtatatggagaaagttgttttcaagttcttggactctgaaagtgataagtttgtgttgttgacaatccatgtttctggaaaattagctacattcaaatctggggataagcgttggactattatccctgatatgccttctccctatgatgatgtgatattgtacaaaggaaatttctacgctgttgatagcactgggcgtaccgtacttgttgggtgttcattaaatgtggttttggttgcaaatcctgtatttggtggagacaagaagtttttggttgagtcacgtggtgaactccttatggttgatatgtatctaagtttgtctcctccagaagaggatttagttagtgatgaagattttgagcaatttgacgcatatttaggtgagaaaacagttagtttcagagttcatcagctggataaaaaggaaaagatgtggaaagtggtgaaaagcttgggggatcaagtgttatttttgggcgatgattgcacgttttctgcttctgcttctgagttatctggctgcaacaattgtataatttttaataattatgtcttttacaatggtggtcaagaagatggtgtgttcgggggtcgtgatataagcgtttatgatgtgggaagtggtaatattgtacccttagctaactatccagagtattcaaagctgttttggccacctccacaatggattaccacaaatgaagtgagtttgagtctattttattgtgctttaaagttttgatttgattctagtttctcttagtaatattgccgagcttggtagatatgcagaattgaaatgaatggtttagttatgtgattgaaga

SEQ ID NO: 2213 - DNA, 1457 bp, Cannabis sativa
tgaaatccatgctttataaaacagaacagacagaaacaacaatatttgaagaaatcttcatcacaattccattccttttccgaattcttcaatagtttttgtggcgaggataaggacatcaacaaacgcgctatatgatgctcgaagaaatcttgcttcgactgcctcaaaatgcctgtatcatacagaatatcgaagatgtgaactacttttttttcgggttggtacaaaagtaggagacaaactcgacaaataccaaaacaccatctaagtaaatgattatgaatggtcacatgaaatcctaaatttggtgacaaactctttgttattatacgaacaaaacatgctagattttcgctacaagttaactaatcgaaacattctaaacctctccctgaaagttatattaaagcagacaacatcatgtattagttaagaatggtgtgaaacttttttcttttctaaattcactacagaagttgcttacactgaaagctttccatcagataccgacatctgccttttgactttgtccggctgcaactgcaatcagccaaagagttcaatcaaaggtcaaattactgtctcaaagatgaaatgaacactaaaatgaattacctccttatcaactgctattgtagcatagactattgaagcattctcctcagacccgaaatcaacttctaggtcactgcaaattaagtttatttcataacaaaagcaaaactcaatgcaaatattcaaccagaatggaaaatgagaacaactaacatgaactactcatttgaaataacaaagaaaattcaaattacaatcaattttagaatttagctaagtaattatttcaaattactcctaaatgcttgataaaagatgaactaaccaaataaattcccaagcatttggggctatagccattgtacaccaatcctaaacaaaaaaatgaaaaaaagttaattattcgaaataacttataataattaaaccaacccaacaaacatcaatggcgattctataaaataaataagttggaagaacaagatttggggcggaaaattgcctccaaatgaatactgacactgaaataaatctgttagagaaaggatttaattatggaaatgaagtttaagttgatatgggcaatgaagtaacaagtaagtctttggtaatcttattaatgaagccatggccactcaactcaatcttctgtttccagtaatcttcatacagacatttcatcgaacaccatatatctattaactaaaacgaattcatacaataaaaatgaaaagaaaaagtatagaggagagatatttaccgcagtggaagattggaagaacggcgagttggggagtgaggcgcacggtgggggacggtgagttaaggagatgagagaatggaagtttgagttcagtcagaggaaagtagggctgagcatttaacccggtgggccgacc

SEQ ID NO: 2214 - DNA, 987 bp, Cannabis sativa
taatgaaaccacacgcactaggcaaaaaggcaacatgtgcgccccaagatgaatttgtttaccgtctgagagcatttgtatcttcatatttgatgaaaaagaaaatgctcgagaaaaatctttaaaaaaaatagttcagaagcatcccaagtcgtcatacatttacctgggcgcccatgtttgggaaaatggcaatctgggcatccattatgaaaatatgctccttctaggcacaggttgcaaaaactcaagtcctcacgtcattctttattgtatttaaggaatcgaggtcaaaatgtagtactattaggctatgattattaccacaatttatttatttatatatctaatttattttttagcatttgaaagaataagacctaaaaatttaaatgaataaataaataattacaaaagtaaagcaattgctgttgatctaatgtgtaagacaaattattaaaacataaataactaaaaacatatccaatagtatacatatatcatagtacataaaaaaaaaaacatactctaatatttttctttttttttgaaaatgtaataaagcacataaaaatagtaataactaatgattaccaaacagatttagtacaatctctcttgattgaatagttgtcttactcaatgctcaaaagtccaatgcggccgccatttgcaataattaagagcataacgactaaatgcttaaacatgaaacttggtaaagagcttgctacatagcctacatttacacaaaatctaagcacactccagacccagcagcatctatactcacttttattttgagggagcagctgagaacaactggggaacccttaaaaattacaaccaagaaccatggggcatgaatcgatttttttgaccctatttcctgcaatgtatatccccgaagagcatttatatttgtcaaggagcagatttgcgacggctccttgttctactaccacttgttttgttagtgtctactac

SEQ ID NO: 2215 - DNA, 2836 bp, Cannabis sativa
tcccataatctcaaacctgacacgagttgatatttgtgtaaactgtgtcgtctgagataaagatttggtaagaaggaaattgtggctggatgaggtaatggcaagtttaactcttctaaactctacatgagcacatgagttcagactaaagtgaactattacaaggctgtttggagtactttgaacatgcctaagcatagatttttactttggcaagttgtgaattctcaacttttaactcatactaacttgctaaagtttcacttgtctttggatttggtgttctgtccagtttgtggtgttgaaaatgaatcccatgaacatctctatttctcttgtttattttctcaagggtgaacaatcaaatttttaactagatgggttggagagcttggttgatgaaatttgtaggttggctcagctggttgagtttgactaaaatagggattgtgcagagaattagtgtgttgatcctggctacaatttgttacagcatctggcgaaataggaatgggtgctttttggagggttattccaagtcaattgttctaattgttaatgatataaagtgtagtgtgaaatatagaatacaagttataaaaaataggaacttgactagggaagaaaggaggtatattcagcatttattatataactagtgcaagttgtttttgttgttgttgccagttgagttgcagcgtttgtgctattggtttgtatgattttgtatagctttgtgattaatgaagtgtttattcttcttaatcaaataaaataattcaaattaaattaattaattatcttttaattattaaattaaatataatattggatagtttatttaattagaaagataataatataataaaaagatttaatagatttttgttaattacttatataatatttatatttgattttaaattttgaatttgaattaaattaaatattatcttttattttaaatgattaaataaagtatttgtttatatacttatatatatatatgatatatatcattatattaaacaaggtgaataaccaagaaaataagagaatagagcgatactttttagagagaaattagggattaattttcactctctgtttttctctctctcccaatcgcacctctctccctctctctctctctcattttagggttttccataatttttctttgcaatcttgttaatagatctgtgtataaatgttccttttgggtattattgtaatttttattttttagatctgtggaaagataatgctggagaaataaatttagggttttaaggtttgagtttttggactgaaattttatgtatatatatatgtgtgtgtttgtttgttgaatttagatttatttaaatatggtttaagtttggtttgagctttgtttaattttttgtgcgatatgaatttaaaaaataggttgtggtggtagtttcggtaatggtgggtggtggtgtttacttttgttatggatgatggtggtttcggtagtggtgggtagagtggttatatttaaaaataaataaacttatgtatttatttgcaattgagagttaaatttaagtatttatccacaaattattcttaataatactgttaggagaacgaatgaacaatatggatataataaagatactctgtttaagtaattaatcaaatatctatagtcattaataattaaaccaaaaagaaaattcattattaattgattgtaaatgaccttaaccgtcactaaataatttgtctaggatcatggttggctattttttattattaatctaattgagagtctcctgaatgtctataactttagctaatttaggtatcatatcgccaaaacaacatacaggcttcaacaagaccgcccaagtttatttggcttcaacaaatactacgaattctgtattttgaataatatttatttggtagtttaattttgaaattgtaaaacttaaatttgatcaatacaatcttcaattatatgattcctccatatcagctaaaatatgcaaacatcacctggctgaagatttgtctttcccaaaggcacaccatccacctctgatccattagtactaacagttaaatttccatgccaatattcctcaccaacccaaatagttattatagtttatgcctactttttcttggaataatgacttgcaaaagccactggactatacacttatacagtacagagaggaatattactctttgtcatgacatgcattgtattttctacatgccactgtatgtctacccattgaagttgtcttgtctgcataagatttataaacagagactaaatgtatgtaaagttgacttctcatgggaatgttttgacattgttcaatggataacagactgatttcctagttcgagagcacactaattatactaatcaaagttagagacttttttaagattataaacaatataaacttaaacttgaatagttttaaactatgagaatgaaaaacaaaactaaggtggcgtttggttagaaggaatgaaaatataggaataagaataataagaaaagaaatagaaatagaattaaatcaaatttttcatgcataaaaatattattaaattgtattgaagtggttttttttttcaacaacaacaacatttgtatctccaatagttattacagcttggccaacgagtgaatattagtcggtttagttgaattcaatatatttacaatcaactcaatataaatgtcaggttaaaaaaatttaatgcaatcataatgagaccacggtcatttgcacaacggtttctcaacaattattaacctataattaaacaaaatgtaaac

SEQ ID NO: 2216 - DNA, 971 bp, Cannabis sativa
aaggtccaagttccatttctttttaagggatagtatttagtgtccatatctttgctccatctgggagactttagggcctgcttaacacttgtaggttcacaaaaatcatcattagtggtagttagttcagctgctaatacttttactttcgttataccacttttggatcaagccttcatggggtgcattgaaataaattatggaggaggtgcaaatgaagagggaacattttgaggagtaggttctatgatggattgataagcactggtggactctgaactagaactggtaggactgttgtgttcaggaaagggagaatatattggatgtggaaaactagggggaggagattgagagtacgaggtagtggctagatgagttgtggacatagaggattgaggagtaagttgtggtacaactagatgaggagctagagatggagtgtgcattaaggatagaattgaggtaaggaagtaggtgttttaggaacatgtgtagaagaggcaaataatgtcttgtatggaaaataatgctcaccaaaggtcacactcatggctatgtataacctacctgagggatgcagacatttgtaccctttgtgagcgggactataacctaagaaaagacaggcataagttttgaaatcaaacttgtgagattgatatggtcttagggagtcgattaatgagatatgctgcaaaacttacaccaaaacttgagagataaactagcttgagctaacaaggtgagagccatctcagtgagatgcctgtgtttcctttcagctttacattgttgttggtgtgtgtgtggcaaggatgtctaaaaacaaacccaagtttgagaagaataggtttaaagggtcggtattcatcaccccagtaagcttgaagagttttaattttgcagccaaatttcctttcaacgtaagcattaaattgcaggaatatatttggtgtttcaaacatgag

SEQ ID NO: 2217 - DNA, 1664 bp, Cannabis sativa
cccccccgcaaaaaaaaaaataaaacctttaatttatttatttttctttgtatttttccataatttatattttagccccttaatttttttttctctcttttggcccccctaaatccaatctctgcctctctgtccttgaagctaccaaagggaccactacaaaaaatcttacttttagtcacaacaaatcttgtaaataaaagtaaaaaaattgtgactaattataaatcatcattgctatgttgtgactaaaatgtctgtggttaaaaatattagtcacaaaaattccaatttattgtgactaaatattttttgtcacaatgcttgttgtgactaaaactaaattagtgacaacttgtattgaaatactatgttatagtcacaagtaactttttattgtgactaaaagtcacatttattcacaaaaattttatgttgtgactaaaaagttgtcactaaaagtaactgttttttgtaatgggtggagaagtgatctgtaccacataattccttttctgcatgtttatcttttataataattcacaaactttttaaaaatgataaatttggcctaattctaaaacaaataatatattttggcccctcctcatttctaaaataatttaagtactaaaattaagatttatgtacagaaacttccatgcatgaatttttgctttttataggatgtacccaaaacaagttgtttgaattatgatttcaacatcctaaattaaattatccattatatataaacatatatatgtatatttatattattacttaccatgtaaggagaagagagtagagaaggccaaccaaaataggattccaatttgatctagaattgaggagtttttgatttgagggcaatgatttcgttcaatgagccatacaacaaaaccattgtagatattgacaagtactataagaagccacattgacattgtaaaaggctttaaaaataaccatgccctatttgatgtttttgatcgaagaggaacaatcatcaccaacccactttgtgtgtatggaagtgtgaattcagcatattcatatcgatttgctaccattgatacatcaccaactacagcatcaaattcctgcataaacttttattagtatcatgcatgcatgcatacaaagattttcaatccggcccataatggtacttatacacataatggtacttttgttaaaaagaactattaaaaactttttaggtataaagataatatattttttttttttcaaaaaaaagtcgtctttatgtgagccctaggcaggctcacttagcatgtttatgactaagattggcgcactttgttggtgccttttattttattatttttcttttctaatactggtttgaataattacaaacgagactctttgttttgtaaaattgaatcaatataaagatatattatgtacctttaattgaatcttctccactagttcatcatatgtgacattgaaggggatgaaagtatatggcaaatgatagggaagcttttgtactatctcatcaaagacattgattacaaatccactaaaagtaatgttattgaagatttttgctgagtccaagctatgatcctcaccctctttcacattcacaagcttatcaaataatgatatacttggtacaccaattttcaaag

SEQ ID NO: 2218 - DNA, 3151 bp, Cannabis sativa
gggggacttgcgtggacactcgacgctcactcactgactaatgcattttccttggcaattcccttatctcctagaagtaaaaaaaaaaaatcctactatctcttgctcttttgtcgaggctcagtatcgcgtaatggccaacgccacttctgaggtcacttggttattagctttcttgaaagactttgttgttcatcactagctccctaaaagattatattgtggcaatgcagttgtcattcacatttcagagatcttagtgtattacgagctcacaaaacatgtcaaaatcaactgccatatcattctagaaaaaatccaaactgcaggagtgctcaaaatatgttaatacaaatcatttattatgtattaaataatacaattctcattgcattaaaatatataatcgtaatcattaataaaatatacaaagttttatacaaatatagtatttcttattatttaatacaatgcaactcttctacgtcctacctaagccgcaaagttcaaaaattaatttataaaaacgtatctagtgtaaattgtcattttatccactgcgaaatataaaaagattaattcgtaaagggcattattatttgataagcatatgaagtcaaattagttttattacagaacaatgttgctaacaaattagaagttcaagtggattatagataatcgaatatctcaaatgaatagctaaggtaaacaatatgaactattttgggagcaaatatgaaaacaaaacttctgaatatcagcaaactaaaagctcttactctttccgtagagagtcctcattatttcataatcaacataaggaaagtgtggaaaagggatgaggtcttctacctctctcgtttcctctggtccgtggcatgtctttgccgtgttgttatcttcctttgacctcgtttccctttattcactattggacttttccctgtgttgtggtaaacctgtgaaattcattttcttttttagtcgtgcccctactgtttgtcattccaccttcttttgttagcctttgacttcttctttcctttcttcttttcttccttttcactgtgtttgttccctccccttttttcttgtcccgtgttagctttggttgtgggcttttgattattcttttttactgtggttagtggtgtggtattcatttattgtttgttatggagttggttggaaactctgtttcagtggttggtagaaatatgtcccatgatgaggctactttgacattaactccctgtgattccactgtcaaaagcttatctaatctgtgtctctttggtaaagtgttatcccatgtgcacgtggaggaaagcttcattattgaccttgtgaaaaacgtctggaagcgccttgctcttgtggtcccggctcatccaaccaccaccaacaacaactgctttgaattgatttttgaaaaggtgcatgataggaactgggcccttctcaaaagcccgtggaatgtccgtggtgagctacttttgctcaaatcctgggaaccgagtgtgcagaatggtttttcgttcacccatacccgcctttgggtccagattcatcagctccctgtggaatttttctcagtcaccaatggtaataaactgggagctcgagtgggtaacgtagttgttgtggatttggacgagaaaaatccaacttcgtgggcgaaatggctaagagtgttggtggagattgacattgagaaaccacttttctctggttgcttcatcaacgtcggcaatgaagcgaaagtgcgggttcaatataaatatgaaaaagttggggctttttgttacttttgtggacgtttgggtcaccaacgcacggggtgtagtctgtcagcaccaaacattgtttcggatgctcagggttgaaccttccccttatttggaccttggttaaacactgattctctatatttggactgttttactggaaaatcaaagaaacctactgctccgttgaggttttcttcttccacggcccgtggtctacggttggcgcatcgtgctccgcccttgatcgtacaccctgccgtcggagaggacactgtaacaggggcttcatcgccggtcgtggctctgagaaagatgaaaacgactactcgaggccctcggtctacgcactacaacggtactgttgccgtttgggtccccaaggcagtggctggtgtgaaagagaagggtcgggctgtgaagggtaaggttgcaggggtgttttcctctgagttggaaaaaggctctgtgcaccaacctattttggtaaaggaggctaataatactgataaaaagagagttttttaagaataaatttgaaaattttaggttgaaagagggtggtgagctggcggttaaggagggagtggagagtagtgggcccgtgagtcattcaaaggagttgggtgttgggcctttgtgtttgggctctttaaagaactctgggcctttaattcataacacttgcttggaggaggctaacttttttactgggccgaagaaccaatctgctactgggtcgtccctttttatttctggtgggccgtgtggattgtgtgaagggcctaaggtactattaaattaagtggtgaaaagcatgaagggcctaagggagattttaacttaggtgccactaaacattatggagaaactagccaacctttggtggatgtgggccgtgtggagaatgccgtgaatgacaatcctaaggcaaaatttagccttgcacaagcatgcgttcttcaggagctggcggcttttgagattaatggcaataataagaggaaagcttgcttgattgatatcggagtccaacccacttccgagaccaatgaaagaactactccggttaaaaagaggaagatgggtgcggactctcgcttgcctaaagttgcattaagaagagtgaagaaggtggtacgggactaccctagaggtgttggcccttgcattgctccctcggatgttagtaaggagctagtggactcttgggaatcggaggagccccagacttgcgatgatagcgactctattagcaagtcctcagctcactttgtgaatcaacaggccaagccgatctcgaacgaacaatctagtagactctcggcgtggaaggaaaaatctcgagtgtttgatattga

SEQ ID NO: 2219 - DNA, 2432 bp, Cannabis sativa
aacatggagtgtagtagtggtggtagtactaattcaccatcggatcatgatcaatcagaagaatgtgagttgatttcatctcataattatcataatattagtaataataataataatcttcatcatcactctttgcaccattcttcttcttcttcttcttcaccatctcaaaatgctaattctctcagtcacggccaccagttaaggctctataatggcaccccaattccagggatttcaactgttgatttcctcaacaaagggaaagccttcaattttgacatctgactagtactcttcttcactcactactacccttattaccaccacccaaaaaaaaatttcctatatatatacatatatagttggaagagaaagaatccaaatttgggtaggcttttggtaacttggaaatcatataatttgatgtattttttttctttctttttttaccaaacacactctcctactattagtactacttccactaccccatctagctctctatctctttttctccatcgttcggtattttccatcctttttaagactacttttgggttctgatcaattataagggaattcgagaagtgggttttcagtataatgggtcagaatgaatattgggtatacaaaggttattatttgaggctgttaatttcagaataatttttttttttttaatttcgtttgtttttatatatatattgttggggttgggaatcaaggttgaagatagagaagaggaagaattagataaaaaggaaaaaagaaagaccatatatatcgaactcttcatgtcttctttttttttttttaatattttattagtttttaactctcatgtgtacaaataattttattataatacaattgatgatatagatagaagagaactcttgtattcaattatattattattatcctatcgatgatatgaaccatatggttatatagattaatccatcatttcccataatatactattatttttctcatatacatttttttatatgtcgattacattttattgtatatagatattatattatattttaaaccaaaaaaaaaacaagaaagaattgaaggaaaatggagatcatgaggaaaggagaatagagtaaatattggaagaagcttgggtgactggtaaggcaaagtatatagttagttagtttagtggtagaaagagctatggtatatgaatatgatgttttatggcaattttgtattttactttgttaggttgttgttcttgtcgctgcttccttgggcacacccccgcaggttttgcagtacgtttcagaccaaaaattaaataaattaattaattaaaaaaaaaaagtatatacatatcatatttatcttaaatgccacttttataccatttaaaaaacaaaaaaaaaaaaaaattgctatattgtgttcattttctctttctcatttaaaattaaaattggtactactccaggttattttactatttcattgaacgttttgttttcttttttcttggttcattctaattatactatttggtttttaataatgtgtacgtagtccgggacagagaaaatgccttctaattaacgaaaaccaatctttgtaattaatataattaattaccttatatttattatatgtattagtctctttattaattaatgtcgttctgtatttactactgctgttgttacattaatagaatagaatagtgtacactgtatagtagtatatatatctatatacatatatatctgtaattagcacagataactacatatgtagtacttgattttttgtcatcccattcccagaacatgaatttttatagcgtacaagataaatttaaatgttatatatatgtatagttatatatatattaataattaaatattcgtggtcgaggatacctaactctattttattatgttcctataatttttatttgttaataaaattagcttgatcttttgtgtatacacctagctaaaataatatttgctagtaataacttaattaattattattattatatatatttacatatgattatactagtgctgctgtcgaagattttcacagcttaaaaattaatataaactgtatgtcatgaagcatgaatatataaaatatatagccttttgttacagttatatatatagttaatacaacaaatatactccatggcttagcgcctctatatatgttggtcgttcttcataattatttcactactttaagatttttctcgaaatgttattgtacattacttatcatacgaacttaaaatcaaatgttatttaaatattaatcatgaaaaatctgccatatttaagtttctcctatatgaaatctttataaagatcatttgtatatattataatggcctacaagatccaatgataagcatttttcttttattataatta

SEQ ID NO: 2220 - DNA, 1723 bp, Cannabis sativa
aatagtccactggattgcgatttaaagtaagaacagttaaactactcccgcagtataatgattctagagacacaatccaagggggaaaaaataggagggtagtcgcataaaaaaaaaaaaaacaggagggcagaattcttacttctataaatgccccttctgattctgtcagcataccggtgcttttccaccggccaccaacaagctttgtcaactcatcagagggaagagctcttaaatgttgaccattcatccaccttagttgcagaagaagaaattataagaaaattattcaataaaacaatgcttcatggattaaaaactgcaccacatcagtcaccgatttgacattaaaaattgtaaagataagcactttgtttgtccaaaatatgttaatgcacaagcaaataaaccataaaatagagaccattgtttctctgaaaataaacaaacaaataaaataataacagttactcaccttaatttggtggaatcaaaaattgcaccactcttgttaactcgatcaattgagaaactttcaactgcaaatatcaattaaaaattcagagatgataaataatatattaaagcatttatctccgcagattcataccacagtttctgagaatgtgagacaaaaacagacaaccaaaaacagaaaagatatgttccaagagatcactaaccaagttgctcaagggtgaaaaattcattttcagttccatcaccccaacctaatagtgcaaggtagttaaccattccttggggaagataccccatctccctgaactgttagacggaatcagctattcataatcattaccaaaaactcaatataaagaagttttctatttgaaaaaataaagaaaaaataagttccagaaaagagagactaaatgatacttaatctaagcacaaaagtaacatacaagggaactatacctggccaactgaagttgcaccatgtcgttttgacagtttactccgatcaggggcaaggataagggaaacatgagcgaagtttggcattggaaatcctagagactgtaataatgattataaactgaagtcagaatcactcaaagacttcaaaagggaagaaaattaaaattactttgtttgaaaattaccttatatatcaaggcctgccttaaagtatttggtaagtgctcttctgctctgaaatagtatgtcaaaaataagagggcatacaacagaggaaacattatgaactggagggaaatatatacaatagtaacaagtgagtgaagaaaccagaggtggccacaataacatagaatattcctaaatatattaaagtacctgataacgtgtgatatggccatggtagcatcatctactgtgacacaaaaattgtacacgggttgtccattgctcctcattatgacaaaatctccaagtgtgttcaaattccaactgaccttcataatactatgtcaaagttaacagcctatacagcttgtgcacaattcaacaaggtatgaacttaaaattacaagaacaacatgtaaataaacctgcccaaattccaactgaccttcataaaatgatgacaaagttaacaaccctttgcaatttgttcataatttaaaatggaacaatgtataaatataaggccaattgtgtaattaaacttagcagctagctaatcttattcttgagcaagtacattaaggtggagtttggttgagaggaatcaaaa

SEQ ID NO: 2221 - DNA, 1242 bp, Cannabis sativa
tttgttattggaactagagatggcatcaagatatatgattcgaatactggacggcttttcttcgaacgaggcaagtcatgattgagtatattgttaggtttggttttacttacttttaagtgcttatagagaattgcgaccttgtgcagagttattcaagcttttctttccttttaactttttttttttaattctcaaaaattatgaaattaagtgttgtgttttcagctttggataatgaataaatcttaaatgtgaaaaatttggaaaagaaggagaagaaatatacaattgagttattactatctaattttactaactatttaagccaaagaattgtgtttgaaattgaaagtaagcatgtgaatggatagagaaagggagatactttattgattttcattaggcccaccactgattaaataatgtggtgtaagtgttcttctctaattggataatgttggaataattttaagctctgttttatcagacctgattgaagtattgtttaggcattgctgagttctcatttgaggctgtaagtatcactatgcttcataatgtataaaatattgtttgaatcaatgaatgaaaagcttgagaatgtttataaaagattgcattctgttttcagctattggagcttttactattgccgaaatgctgtttacctctagtctacttgccattgttggagctggtgaacaggtgcttatagtgcaccatcttattcttatctggagatgtttgtttctgtacttatagtacaagttgcctttttcttgctacagccatctttatcgccccgtcgtctatgtttattcaatacgatgactggaactgccctccgagaattgaatttcttaacatcaattctagctgttcgcatgaataagaaaaggtgtgatatctttatcatgttgaagttgaacatcaaatatgtcttattctgttctttttcatttttccccctctatgggatgggaatacatacatttaaataaaatgtgtcaaaatttgagttacatattgagaaacattgagaaaattgattagatgaaaaatatggattttagaccaagggtgataagggtattgaattgtaagcaccagtaatgacagactgcccattgtctggtatcttgatagtagctccaaactgtgactgcggatattagtactgatgacttttgtgacattgggctctttcttgaattgaaaaccaatttcaaatctatgctt

SEQ ID NO: 2222 - DNA, 1343 bp, Cannabis sativa
ttagacacaaaatataagagtagcacacaatgacgaatggataattaaattttaataagacaaattaagtcttaagacttaaaattgaagaaaaatattatgagtgtttagatgcaggataaattatttatttatttttaaaaaataggatataataaaattaaaaaaaaaaaatgaatggacacaattgactagcctttttaggagaacacaataaatttcttatatttaaatatatttgtatgaaaatatatataataaaaatttagaagaccatgactatccaagtcttcttatcattgcttagtgtaatataaaagacatcttatagacacaaaatgtaccccctaacacacttcattccttattttatttttggagaaaaaaatggaaatttaccccttaacgcacttcattccttctcttgataattacaatacaataataaaaaattaaaatgaaagtgatcttatttcaaatagttaattaaccctatattatttagtaattttggtttaaatgtttttgcttaataatttggtttgctttgccaattaggctacattaatctcaaacaaacaaactagacagtgactcctaacgactcaagctggataaagacaatcgaatatgttttaattttttggaaaaaaaaaagaaaatattttattttaattaattgtatttataattataaattaattatttaaaaaggaaaaaaaaaaaaaagaaaaagacaagctggcctgcgaccacaaaacgggggcacgtttagcgtcgttgagtttttaagtcttttgggccaatttaaaggccttttatcatacacgtgggggcccactaaatgagattaaaaaccggaaattcaactaaactacttgtaattttcaaattaagcccccaaactatttcaaatttatgccgttttcgtaattttaaagaatcattttcaaaagaataatatataaaaattatcgagagacaaccagataaaatttaaaaaataattaaaataaaattgaacgaacaaccggaataatcagagagaagcaaagagagaaagaagaaaagaactctgttacagtagagagagaaagagaggagagagagagagagagagctctctgagtggtgatgacgatggacagagagaaggagagagagatagagctcgagagtgcaatgtacactaactgtttgctcttagggttggatccggccgtaatcggagtcggaggttccaacggtacacctcgggttggactctttcgtcactctaaccctaagttgggagaacagcttctttacttcattctatcatcgcttagaggaccaattcaatc

SEQ ID NO: 2223 - DNA, 1092 bp, Cannabis sativa
gggacagcctctgcttcggcggtgcagcccgagccaattaaggtagagaacagcctcgtatcagagtcgaagctggtttctgataaattagagaatcgggatttgggagtgaacaaagaagaacctcaatcgcccaagaaggaattttctgggcacagattggacgataagcgcgagacttcaacagctactaaaccgtaagcatactcttatctttatctatctctccccccaaaagaaaaagattcgaattttcatcttctgaataaaaaaaatctcgtcttaacttttcacctggggttgtttattttcaggaattcaacaacttccgatgttgagagacagcgagaagaaaaattccagatagatctgatggtgcggatcttgttcttgctgcaagattttttttttattctttttcaaaaaaaaaaaaaaactcataaatatttctatattaattttttaatatgaattatatattaatttttcgcaggcaccacctccgtctagatcgtctccggaaagagatagtgagattgattttgtggctgtagatgctaaagctatggcagtagatacagaaatggtgcgtgtggggcccactctctttctgccagttgcaatcagatagctttcctttgttttactgttctagtctgatgataatgcgcctagaaattaattagaatggggtctctcattcattcactcactccttctctctctccctctatgtatttatttcttttaacaggaaacaaagcctgtgataaaagaagatgccaaggcattgaaaaccagtagagaagaggcttcaaatgtggaacctgataagtcgaaagctattactcctattcttacttctattcccccagttgatgaagaatccaagaagcaccagccgcctacaactgttggcaaggagaggaatattgatttgcgtcttgatttggaaaaggttgatagagatacagccgctgctgccctcgtccccggcaataagcaacaacatattacgagacagcagcagcagcagcagttacacgccagtgacaaaaatggtagctaaatttgaatgttcttttttttttt

SEQ ID NO: 2224 - DNA, 5350 bp, Cannabis sativa
gccctgccgccgccgtttctaggacctttaacacgtctatttcgctcacgtcgtaaacctcccggtggcaaagcaatggctctttgttctccacgcatttcactcgctgcctgaagttgttccatataggcggtgcgtgagcccttttcctgaccaccttcaggcactccaccacctcaaccatcgacggacgcttctccgccgttgaccgaacacacctcgccgctagaacagccagttgtcggatcagggctgggttagctgggggaccgattcttcggtcgcagattccagcgtagtcgccgcgctttattacgggaacagcccagtcaacgatcgaaggagggctgtaattaacgtcgatagcgttcctcccgctgatgatctcgagtaggagaattccaaagctgaagacgtcgctcttggccgttagatcacccggagcaagatagcccgggtcgaggtaacccaatgttcccgctggaggagtgcactgcactagaacgtcctccacgtgtcccctcaaggagagtccgaaatcgcccagcctggcgtccccgtcatggtcgatcagaacgttggaagattttatatcccggtggattacaggcgggttcgacgtgtgaagcgcgtgaaccgccttcgcgacctggtacccgaatctcacccgtcgggtccaacccggaggtctcgaagatcctgagtgtaacagatcgtataaagacccgttaggcatgtactcgaccacgatcagtttcctatccatggagtcagtacaaaacccgaggagattcaccagccttggatgctgaaccctcgagagtatttcgatctcgttctccgccggggttgtacaatttccggggcaggaggcggcgttgaacttgaagtggtgcagagtagtcggcgtggagttggagggctgtttcgtcttcttaacggcggcaataagtttcccatcgtcgaggacggctctatggacgcttccatggctgcctttgccgagaaagctctcagcggagaaaccgtcggtggcagcggcgagctcgtcgtaagaaaactctctgatcttcttaataagttgcttattgggtcttctacgtatcttattagctttgttttttagttcaggccagttgtatgtatcgcaggtggctacggcggactccgcattacaggaaagataacccatatgaaagaattaacgataaaactaaagaagatcgagaggaaaggccaaatggttttatgaagagtagttggttagtcgaactttactttttaatttttaaattttacttaagacgagtcaaaagagaataaaaagggtgtttgagattgctgtaaaggtggtagagaaggatgaggaagaagatgaagaaggagttgataatggttgtggttgtggtggtcatggtggggaaagccgagagcggcaaaggccataactacaaaataaaaaataaataaataaacaaaaattaaaaaaaaaaggagttgtgttgtggcgtttaaagtcgtgcgtgttattgttttacagctctttgtgtcgttttaaaagaaaggaaagagggtgtgaatgtgaatttgatgtgaaaatgggagcttttcaactctcatcttccttcccctaatattttattattacattttattttaaccatggaaatgaaagcctttttgtgagagcatttcttgggcttgggcgtcttgtgggcccttctttcttttttctcaactaagtggttacttttagttcaatttttcttatctctaatttaataatatttaagtatctcattaagtattgaaattacaaatattgaagaatatttatgcacaattaatgaagaagaagaaagatgtacaatacattggacttggagttagacaatggcttcctttcttgagttaggacatttacacgcctacttttgtaccattttgtgtaggagtaatgaagagcttttgagtttgcaacatatggtaattaacaaggtaggccctcataatgattattttctacttttctcgtagcatggagcatgcttggggaaataaggaaatcaaattacactccaatcttctatctaaaattttgtctcaactagatgtctaacttattaaaagttgacacttataatacgaatataatgcattattttttacttttttttaaaagaaaagccattataaattaataccacaaattagattttatggtcattacataaaatgttatttggtatatcgacaagattgaccataccagttacacttctaacaaaagcccacttattcacgttatgggccgtaaaattacactgtctaaaaataaaagaaaaattacaagattgagagatgcttacaacttttttttgtctcttatttataaaaatatatataccatttctctccactcaaattaggtaacttttttttttctaatcaacttttttcctctcttcaaaaaaagaaaatttataagtagtttttttttcttataaaaaaattacaaaagtttatataataaattaaaagtttgaaaaaaattataaatagtctttatctcattcttttacccgtgcaaattttaacttttctttacgcaactcaacttgaagatggcctacacttactcccgagcaaagtccacaaccttaaaagccataacaaccaccaccaacttgaagaaggaggtggacgaagccaaggaggccaagaaaaagagtttgaagttgggcgaggttaataaacaacttttggctgccaacaagcgagttgagaaactgtagcaggagattaaggatataccgtccactgtttaacttgaagcggacattgaggcactgaccaaggatcttaatgctttgaaagttgagagggaaggtctccaggctcttctctctaacttaaccaaggagaaaagggatttggaagagaatctcaacttcgggcaggaagagcgggaggcacttcagaaggagatggaaaacttggagatgactgccctgaatgttttctatgagttttgaaaggcaaaccaagaagaaaactttaattacctcaatgaaaacaaggaggcatatattagtttctgtgagacccaaaaagagaaagaagaatatgaggcagtcaaccccgaagctccgactagccaaagtaccgacaccccgaccactgaggatatcatcgacccgtacaaagagcgaaggactccagtcgtatgaattttttctctcctctttttttttttaatttcagtttggcccatgagccttttttcagtacaatgtggctgaccaagcgacctttaaacttggtaatatttcattttgttttaacacaactagctggtctggcagccgttaattctagatttattgttctttgttatcttttgaaatgaatattttcccttaagtttaagtaattgcacatgaaattgttgtgtttttttgagcttgttatttacctataatttgtacgagtatagttgcccccaatcaatcgagcagacttatgactcctggtcacttgtattgcacaagttcaatttttgtgtgttcggcaattggattcaagcagaccctttgtacacatttttaacgttaaattcataaattgctatagtaagaaaagtaattgacacaattagaatgataattaatatctttattcatttattggtctgaatgattttgttaccgtagtaacttacatttattgaattatgaaagctacgacatgatatgactaatctttagctaattaaaacataaagcaattttttttcttttttagattgcattttatagatggtcatccaatctaagcaccagcgttttatctaaaccttagagcgaggtccacccaaaaggccatctacttaaaagtagatgttcgagtattgtgtaccttaagggggggcatcagaccttgtacacttacttctagtatttccttaaatgttctccattccaataccttggtactagaacaagtttcatgtttttattataccgagcaagtttgtatgctccagaatccgtgacttctattacttgatatggtcctcccagttaggtcctagtacgccagacatgctatgttttgcgtttaagaatactcttctaaggaccatatctcccacaaagaatttccttgccctcactcacttgttgaagtactgagccaccttttgttgatgagctactagctttcggtctgttgaggcacttttttacttcaatttcatcaagtgattctaccaggagggtgtgattagcttcttgattataggtcagtctcctgtgggacggaggtgctaactctacaggcaatatggcttcataaccataagccatagccaattgtgtttatccagttgctgctctttttgttgttcggtacgaccacaatacctcaggtagctcctccagccaattccctttagcttcttcaagccatattttctttgtgtctttgagtgtcttgttgactactttgacctggccatttgtttgagggtgtgccactacggagaaactttttatgattccatgtgtcgtatagaaatttatgaacatctggctatcaaactgtttgccattatttgagacaattttgtgcagaagtccaaacaaacatataatgttttttactgttaaatccagcactttcttagatgttatcattgccaagggctcagcctctatccacttcgtgaagtaatccactgcgactactgcatattgtactctacccttacctttgggaaattgtccaatcaagtctattcttgtactggctctgggttatcctttgtattgttctcttatttgcttgtacattccaccacgaagtctgctaaggccatttcaacctagtcactaccctcaatggttgccttatatttctaatgtgactttagattatgatgctcgtgtgaataatgaagacattgtctctgttgtcccaacagaaaatccttcctcggactctactaccgcttcaccacacaaaaatacctcatcataccagaccccttcaccatctaaacacacatccctctcccataaatcaatcccctcctactccaccattccactacatgtccatattccaatctcacctctcactcagctcacacaatcgcctcaaactattatctccaccccaccccatacaactccaccaaatccaccacctatgcaacgccaaccttctcaccctatgattacacgggcaaaagctggcatttgcaaacctcacaccttcaatgtcttctcaccatcacccatggcctttatgaccgagtttgaacccaataatgtgttgggttttatgc

SEQ ID NO: 2225 - DNA, 1975 bp, Cannabis sativa
acaccagcaccagcatctgtgagccaaccgaatttcagtagtgttgttagtcttgcacctaatacgacattgaagaatgtggcagaacagccggcttctctgcctactatgttccaagcacaaactccaacgtctgggattgtcagcactgctaatgctaacaataatgaagatgacatggacgaggaggctccagagttgagcaatgctgctcaacttagtttgggaggctttggtgggttcggtcttggctcttctcctactccctctgctcctaaacctaataatccatttggtgcttcattcggtaacacaacaacaaacgttgcaagttctcctttctccatgaatgttcctagtggagagctttttcgccctgcctcatttagctttcaatctccacaacctgcacaagcatctccgcctgctaactcaggtgcattctctggtggtggatttggcagcgggacaactgctcaacctcccgcaagtgggtttggacaggcatctcaaatcggacaagggcagcaagcattgggatcagttcttggctctttcgggcagtcaagacagattaacactggcttaccaggagctagctttggatccccaagtggtcttggtggtggatttgctgcagctgctggttcttctggtgggttctcaagtgctgttagtggcggtgggtttgctaatatctctcctgctgctggtggatttgctaatttggcttcaagtggtagcgggttttctagcttggcttcaggtgctagcggaggatttggcaatgcagtagcttcgggaggtggtggatttgctgctgcagcttctgctggtaggggattttccccggcagctacaccaagtgttggttttggaggagcacctccaagcggtaggcttcctacgctgatttgttgattaaataatttcttgtttttgcttcggcctaatagtatttgctgatattccccggtacaaatgttgtattttatgtgttaggtggcggatttggagctttcggcaacaaacaaacaagtggtttttcggcttttggtaacaatgcagcagcagctactggaaaaccccctgagcttttcacacaaatgagaaaataaattgctatttaaactcaattttgagcatttcacccaaatgagaaagtaaattgtagttagttagctagttcataacaatcatatttagattgaattttgtttaatctaatatatatatattaatagaggtgattatttctccccaatttccaggccttgttaatttctctttattctttaaatgaataatcataagaataatgttggtactttttaatggtaaagcttaactaaaaccactcatgtttagctaaaataaacagaatagtaatgatgtgtgcactcagcaaattacacttacaataatgttgtgtctttttttacttcaaatacactaaatatgagcatctctattagagtgctatgtagcgtatattttgtatgttttttaaccctcgggtcacagattagggatgtatgattctcgaattacgaaccaaaatagaagaacttgtctttattttacctttagcacatttagaatacaattataaaatttggatcaaatgtaatattaacatattttcgagttaaatttaacacaaaatttacactttaaaatcaatgttctctaatatgaataatttagtctatttggctttccatcaattttattacttcaacaaacaataatgttggtcatacagtcaacctgttcttttaagttgaaacaattactactttccacatttaatcaatcaaagaaaatatgagtaacctcaatattattaagctaacaaatgctgaaatatctcattccatctttgctttataaaaattgtttaagatattcgtatttttttttttaatttgaactctcatagctcaagttgtataacttggcaacttgcaagaaa

SEQ ID NO: 2226 - DNA, 1353 bp, Cannabis sativa
tccattattattattttgaaaaaactgcattaattatacaaatacgttgaaactcagcagactactaacgttttttcaaaacattaattatagaaaactactcgttaaatgaataaaagtcgttatacttatgactaaattatttattattgattagtgtatatcattaagaaattaatgaattattcattttctttttttaaattaattattcgtttgcatcttcaatgaaattcgatctctaataatataataatgatgatgaaattcgatctcatcttagtaaagtgcatttttccctttctttgtaaggatatgaccacacacctttgatgttgcatttttatttttatttatttgcttataacacgatcttgtagtttttcactatttgaattctgatatctcaataaatatgttaatatgtttcaatgcctctacatcgatctttatatttacattgattaatacacatatatatatatatatatacactagcaaaaaactaaccgtggaagactagatttgaagtgacactttaagagaaaatgaggtgtgggctttgtgtcaattggggatcacatgatccccaaaaggatgaaaaggcatggtacctattttcgttgtcttttagatcaagttgtatttgtatgtgcacatgagcggtgagcctctcattcagtgaaaaaggcactctttttgtatttgctttttctttctttaattccatgattagagcacctttaattaaagttaaaatgttatattaagtttattctatatgggataaattagaggtttgtcacccaagagttgagagttgagaccacgtgtatggaatacaataatgcatgccatcatttccattttgtgtgaacttaattatattatatatttgttaaaaaaaatatattatatatatttataagaaatggaaagatattattcactaaaaaaaagaaatagaaagatattaattcaattattgttgaacagctgagaaagtgggattgccaagttcgccaccatatctatctctcctcaaatccgaagagaacactgttttgttgatgaacggaactagctttgcctcagggggagcaggaatttttaatggtacagacgaagtttatgtaagtcaacaatcacaatcctctctctctctctctttttatatgtcattatatatatatataattgagaaaaaatatataaaagttaaaaatgcggtgagcgtggatcgaacacgcgaccttcagatcttcagtctgacgctctcccaactgagatatccccgcagatgaaataactttaaaaataatgtgtatggaacgttttatttcagagacagtc

SEQ ID NO: 2227 - DNA, 1867 bp, Cannabis sativa
aatctaaactggctatgtatttgatgacattcataatccatacaagatactctataattttcatccaccagttggtgaaacaagaacaatggaattatcccagaaaataactttcaataattcattgggaatcgtaaattatttctcaaacattagacaatctaagattttaaatccaagttttactcaaacgagaatcagctaaatgaagactcaatcacgctcgcttatagctgtcaggtgttcgtcaatttcctctgtggacaacactctaaataccggattgtcctgcttcacaactccaacctacatttttaatcgtcacaatcaattcaaactttatttccatcaaaagtcaaaagcatagatcccgaatgttattttgaacccctcaaaaaaataaactcccaaaattgaattgccctcgcgaagatagattaacagtgtaaaacaacagtgttggacaccatgagaataaaaacacgacaagcagacagaacatcgaagaaatgcaaacaaggactagaatttttcatgtcaaatatactaaccgcagtattgactatgggaatgacagaagacagtattatgaaaaaaggtgcaaaagttggttagtgattaaatattccaaggtaatctcagcaatgttcggaatttagactatattgccttgacgtcaagcttatacacagaagatttcaattatatgtgagacttccaagttcatcactaccatatcaagccaatataaaatctaaatggaaattttgatgagaaaacattgaatgaaaaatcaaaagttgcaagcaatatttagtttcaacttagctgctgtaatccatcataatgcatttcaagttaccaatcccgtcacaataaaacaatgaaatatttagcaaaatgaactttactacctcaatctcggtggccttgaaatcctcctgaagaactgattgcagggcagaaattgcagtctacaaaatttcagtagttagaaacaatacaattctacaaaataataagaacaagctaaatttttcaacaaacttcataatcaaagttgcactgccctccattcaaaaacaaaaagttgctaaatgccctacagaaaacactacgtctaccatggactgagcagtttggaaaagaataaagaattcacaactttttataaccaacattgcgctatagtcctaaaattagaatctaaatatctccattgtgaaattttttaatagcaataatagctgaaatggtcagcatgtgttttgctcccacaaagtaaatgttaggccaagaattattatacacatgtagagttaggctaggaccaatgtttaaaattgcaaatttaagcctcaaggcgttttgcttttgttaggcgaggcgtaaggcttgaggcgtatacctcaattatttaataaaaataatattttagagtaactaaaaatatcaaagataaataatgtcttagtcatggctaggttggttctgttctaacatctaaccctataatagaaagagaaaattacactctacccacttttcatttcgtattttaatttttacctttattttgttattttttaatttatacccaattttataggtcatatccccgttatgtgcattacgaactctaattttgataagttatgcgaggttatattgatactttgattataagagagggtatttaacaattaaaattatttgagttataattgattaatgtgtaacaaaaaaaggtagttttcaacttatcccgaatagaaaagtgttgttttttccttttaaattatgcatgtttagctgggcttttttataaaattgtttgttcgagttttatgggataagttgaggaata

SEQ ID NO: 2228 - DNA, 817 bp, Cannabis sativa
aaaagaacagagttaatccaatatgaacaatataaaaaaatacaggtcattttaatatttctcttattttttatttgaataatagaattattaataattttttatttgaagatcattaactggtaacctttgatgggtttaatttgtcaaatgattaattagttaatttggaaacctagtaatcttaacacttctttgatacttaatactagttagtggtttattagactttttgttagggttgttgttagttaattttattcttttttattgtaaatgacttggaaatctaatttttttctctgacctatatatttatgtaatggattttcactacgaaaaatttcaattttagtcctaacaaaacttataactaagtaaaaaagctatgactaattataaataataattcatatgtgtgactaaaaagtctgtgaggtacgctaataagttgtaaatgaattattagaaagaatactacaactctctaatttttttaactttattttccacaatgctcagtgctaatttttttgatattaacaaaaaattgagaaaaactctaaactataattacaacattaaaagtaaaatagtatactccaaattttaatatttataattatatatagataatttataaatatatatatagatatacaactagaatgaatagcaaagtttagacagaatatcctatgatatgtttttcaacttattgattatttttttattggaatataatctaaattttgattctcttgatatcttcataatttgaatcaaaattttcctacaatttcaaggataaaatatt

SEQ ID NO: 2229 - DNA, 1793 bp, Cannabis sativa
aaaaaaatactctaatatataatttaaagggcaaaaataaaataaaaaataatttggtaaaattttatcacttttacgatcaaataatttattttatttttaaatttttacaagcaatcaaaaaaaaaaaatcaattttatggttttttttatttttttaattataattttttaatatcttataaaaataacaaaaaaaaccacatgaaaaatagcatcaaaactacatataaataacaaaaaaaaaaaataaaaaattaaaagattacaatacaaaaataacgtaaaaacatcaatagtccgtatttttttaaataaaaacttacaaactgtaaataatattgaaatttctgtacaacatatttttgtaattttgtttggtatttatgaaaatatgtcttactaatgagcgcagtttagtgggtccaattttatatacggcccaacttaggcccaacaagatacatgggtcttcctcagtcaaaacgcaccgttttaagaagtaaaacacacgaacactacccggacagtcgacagtgcagtgtagtgattacgatcagaggaagaaaatggaggccgttggaggtggtaatggtgtacgagttccaacaccatctttcctcttcaggggtattgcaattgaaatcaatggagccttaggtgtagaattaagtgcatgatttgggcaagctagggttttacatcataaccaaattctccgtcatttcttacttgccaggatgccacttcctgccaattccatctgtaaagtctctctctttctctctctctatctctctgacaaagcaataatttattttgttagtattaattgaattgaagtttctgaattttgagtaattgaaagaaatgtggggaaagtaaaatgattacttttaaaattaaagtgctactgaatactgatggactgaaatattagatgttatcaatggttggtattaggactgaacttagggcaatctttatctattttgatttcataaaaatgtttggaccagcattgttcaaaaagacctccaacccctataaattgtcggaaccactctatttcgggttggtattgattgtatttttgtcaaattgtgctgtactattctgtatttgaaccatatttctaaaatttcaacaacaattttgattagatcgctagactgtagtctgtactgaaccccacatatatgtatttatgtcattattctctacagtttttcaattttatctcgagctcgaaccttaattacatttactcctttaaactcttgttttctctcttaagccttatgtaagaatttatttagtggtgtttcaagttatttaagtaaaaggcttgttctgttttagttaatatttctaaatcttatcatagaatatagtttttcattgtgattagatttgaatttgtgagccagtacttttgattaattaatagattgaactattttatttatattttaagtatacattagtctaaattttttaaaaaggctcatactgtccacttctcactgcaaaattacggtttgagtgttggagtaacaagttcaaactgcacacttgctgcaatctcgtacatatatatatgtatatatatatatatatattttacagactgactgtgtgtattttgtatcacattttaatggcacaattagttattgaagcccttttcaatgccagaagaaaaaaaaatacaattagcctaaactaattctgagttggattcattggctacttcaacttgtatgcaattttatgttgtttgctagaaaagg

SEQ ID NO: 2230 - DNA, 1046 bp, Cannabis sativa
atccaagagggagattcctccccttgaaagttcagcgaaccctgaacaacaacaacagaataaggggtagttttccttactatcaagatcgaatttgtcattagtagggagaacatttgaagccttgtctaggatgaatctttttgtcctagaaccacttccagatatccttcacattagaaattctattccttcagtcttccaaataagcacccttgatagaaaaacacccttagtagagcctttctaaataaccaaattagaatcaagatggatgtcaatttgtacaaagccacttttactacccaaatcctttccaaaataaaaatcaagaaaactttgattccaagttctcgaccttctatactatagatcggccacacatcgcaatgcaaagagggagctttatgttgaatggactccatggtctctctgaatccatacgtcattgttaagacagttaaaagttagttaggattgttagtttcattgctgtcagctcagtgtgtttgttgcaattctgttgtaaagttgttgtaagtttgtgagctgtcagttagtagctaacttctcattgttttaatcttgtataaatactaagctctcgtgcttagctgtcaatgaatcattttcttttgctgattcaatgtttctcttctctcttttctacctttcttcttgttctttgttctgttttacattttatcttttgcaataatttcaaggaggaatttcaacatggccatcagagaactttccaccattaatggcgaatgtcatcaccagcaactcgagcaatcaacatacaactggtcctacagttgtcaatggcagaggaaaggaatcgaacgaatcatccactgtgttctctaatcatagtctctcggtgaagctcaatgatcacaacttcctattgtggaagcaacaagtcatggcagccataagaggaaatagattactgcatctcatccaaggagctgcacctccacctaagtttctatcggatgcagatcaagcctcgaatactttaaatccagcttatgttg

SEQ ID NO: 2231 - DNA, 945 bp, Cannabis sativa
taattttatatattgatatcaaagcaattaaaaatggagagaagaagaagatattagagataagaataaaaatatcacaaaagataatttagttgattgtcatgaaaaaccaactctaaaagagactagtggtacatggagatgtggaacccacctctcagcaaaccccatctgggtcaacatagcacaaagataagaccattcaactctattgtatgctttattcaagttgagcttcaaagccataaactcttccttacccgtctgcttcggcttcaaataatgaagtacttcaaactataccatgatgttatcagtaactgagcgccctggaatgaacacactttgactttcaaaaatcacatcctcgaacaataccttcaacttattcgctaaaaccttcgagacaactttagcaatgacattgcacaacgaaatcggcctcaactcattcatctactcatgacatttctttttaggaatcaaaaccgtctccactacatcgttccccacaatccccaaaacttttaatagaaagttgggccctcagtgatttatccaaatgcacctgaaagattagatgctttacttcatccatactaaccggtcgaagtagcatgtcattctgctctgccccaatcaccgtagggatacacgagagcacctcaccccactctgatgcttctaatgtgaaaatagcctaaaaataatttaccataacatcacccaagtcattttctcacgtgatcgaaaccccatcaccatttttcaaacaagagattaaattagtgcgccttctagcattagtttttgagtggaaaaacttactattttgatctcccgcttgtaattagagttgttttgatcgctgacgctaaaagatctctcgttgattcaacacttcgaacaattaaatattggcatcagggccggccctaggcatag

SEQ ID NO: 2232 - DNA, 1348 bp, Cannabis sativa
aacaaaaccctatcatggagttatggtttggtaccaagcatgagttttagtacagcagtttattaagttttagtctttgttttagttgattttggctgagctgttctttttgttttgggttagaaacttttaattaagttgccgatgtgacaagttttattctctataaatagaaacttagagctcagtttcagttatgcggaaagagtttagaattgagagaaatatcttggaagagatctagccctcttgaaaggttagaataggagagaaagcctctcaaagaactattttgtgtagttctttgatgattaatgaaagcattctggtggaaaatcaatatttgtgtctgaattctttgcaagttagattatttctaatctaacaaaagtcttatcaatttggtgctgtgagctacagatacaatgcagaagaaaccaagagataagagcagttcagattcaacccttgacggcaaagttgcaatgttgaagatgaaggtgctggctattacagacactgtcaatgactcagtcaatgagtctattctagagatggggcgccagatgcaactgttgcagcaacagctccggtgtcttctaaaggctcatgaacaagcaagaacaatcaagtgctcgaaggccattcaagaatcatccaagaaccgactgcatttaagtttccaatgtccagcaaccaggagccatctgcaactaggattccagggcctttaatgggggcaagaagcagcggacagcggctgaaacagggtactaaagctgctgaagtgccaccagcaggaggattccgaagaaagagtctttgagggtcgttctttggatagaggaaagtcgagctcacatttcagacacaaacagcaattgaagaaattgaaaatgcccacttttcatggggggacaatttagatggatggattatgcaagctgaaaggtttttcacttgtcataattacgatgaggaagagaagatagaggcagcctttatttcattttctggtgatcctctgctttggtactgatatgaaaacaagaaaagaaaaattgtgttgagaagaaataaaacgatggtattgaagcactttcatgacacataaatggagtccctctatgaccaatttctctcagtaaaacaataactgtgtgggagattacaaaaaaaaaattcaacagaatcttagctccacttgacaacatagcactcgaaattcagctaggtacattcttgaatggaataacaccttcgatcagggctgaattaagagtacattgaccaaagaatgcggataaagcaacagaaatcacccaagacatagaagaaatgttgcgga

SEQ ID NO: 2233 - DNA, 629 bp, Cannabis sativa
tgcttcaaggactcaaattgttttctcaaacttctagattgcaaccaagtgaagcaaagtctgaaattttctgcagcaatatggatgagaatgaagttcaaagagtagtagaaacatccgactttcgaagaagtcatttgccgtttagataccttgggcttccgatttgtgcaaaaaaaattcccatctctgaatgtgatactctaattgagaagatggtgcaacgcatcaaagactggagctccaggaatttgtcttatgcaggtagaattacattgatagactatgttctaatggctatccatacttactggtcccagctaatgattattcctaagaaagttctacaaaaagtaaactcaatttgtagaagcttcctttggaaagggctcgattcatgtggtcctggattggtagcttgggatgaattatgcaaagcaaagaatgagggtggtcttggtctaaggagaatattagaatggaatgaggctgccattgggaagtatgtttgggcgatagaatctaaacaagataccttgtgggttaaatgggtacacacagtgtacttaggagaagcaaattggagagactatgaagctcctatcacaagtagttggtattggaaacag

SEQ ID NO: 2234 - DNA, 2599 bp, Cannabis sativa
taaattatataattgtcccaattttcttactaatgatatggtaaggctcaccatatgtaactcaaaagactgcatatcatttgcatatcatttcgtgttgtgcttaataaaaatgagcaaacaaaaaacactcaaatctcaacatgaaatacttgagcaaatttattttattatgctcatataacaataaagattacctaaatttacatttttcactttttttttattatagataagaattaggataacgacaacaacaatagttctacttctgtataaaaagagcaatatataaccactaaacattttagtgtctttataactgtaagtattgtaattgaattgttcagatttgcatttcatagtgtctttgtaagatttgcaaattgtattaaatacaattaaaaattctttggtgtgtgtgtgcaacaattttacttttacactgtagaagtattttttgtttttgatatattgagaaatcataactatttttgttttagaaaaattacggcataagtctttaaaaaattcactttgatgcagataagtcagattgcggtgaaaatatccaagcttgccaaaatttaatcccatgttttctttttcaaattattgtaaaaactaaaactaataactaaaataaattaaaagctaaaattaataaataaaatataattaatcatactatttcgagagagaaaaattataaaagttaaaagctagaaaagattaacacatagaaactttttctctcatcaaatttctaaaaccacaaagtagcttaatcccctaaatgttgaagacgacaactgtgtaggtaccaaaaccattcgagtttgtccatattagcccctattgatcctaattcctaagctaaattcctaaatcttgaagagacaacggtagaggtgcctagaaactagtcgaaaaatggagcccgacgatgttgtacagtttgatttctcttcttcttgattttcgatactttatttgtaatttcaatgaaagaaaatggtttttactctattttttttcctttctattttaataaaaatggtttttactctattttttttttctattttgataaaaatggtttttacttttttttctttctatttaatgaaaatagtttttgtgttttcactgtctctttatctttttatctctctttgattgaatgaaaattgtttttacttttggagttttataattatattggattgaatgtactgtggtagttgtacacatttatttgatctcttgagattgttggggcatgacaaagttactatttcttttgaggtataggctttgactggcatgtgagaatctttgcacatagttttaagctttatgacaattactttcattattttattgtaaatttttgttatttttgttgttgacatgtttatattttagtataaatatgcaccatgggggttaatggctcaataaaaataacttaaaacaatatgagggtggcactgtgatcgagttcgacaggtgccacagtgatatgtttaatctgatggaactgaaaggatttttgttggagattcagtggtgccatggttttgttcatttttagtttaagcctaaagacaaacaactaaataatgggtttgagcttaagactgacaatgacttgttggctatgtttaaggacatgagaaggaagatatataagagggttgaggtctatgttgatttatctggtacttttagagtaaacaatgttgaattatcaattgttggtggtcgagttcctaagataacagtagacaatacaccagttggatctaagttgaaaagatgcataatagaggagttaccagatgatacaaatgtaagtgttgatgctcgagtaagtgtcaaaccagaagactatgttatgagcaaggtagcaattagggatcttgaggaggaattgatagattacttagaacatgatagtggtcattcagatgagtttattatgtacatgtcagatgttgacatgccaaatgttgaacgctacttagtgatagtgattcaagtgttcaaattttagagaatgttgaggatattgaagatgtctttgggggcctagatgttgattttgatcatgaagaagaaggcccaacagatacacataatgaatcaacctaaaccactttgagtaaggcccattcataaccaatatacaaccaacggaagcccaaacacaaccccacacaatagcccaaaacagattacgaactccatccaaaaccaaagaaaagagaggccaaacagtagtccaaaaccggtcccatacacatttcaaaactcaactccaaactagatcccaaactctttccaaaatgcaatccaaaaccacagaaaaaaaatcaagccaaacagtagccaaaaacaaatcccatacaccttccaaaactcaaccctaaaccagatcccaaactccttccaaaacataatccaaaactacagaataaacaacccaaacagtatcccaatcaactccccaaacaagaaaaataacaggccaaaaagtagctaaaacaccacctcaaagcaaaagaaaaataagccaaacacaatgtaaaacacc

SEQ ID NO: 2235 - DNA, 1686 bp, Cannabis sativa
tttttggtttgagaaattctcataccttacaacttcgtcttgatcaagatccgctgcttcaagatctgactcagtcaactttcgattaagaacccatttgatcaatgacttttgtcttgtttcggtgtaaagttcagcaaggtagataaagaattgagctaagcaaattgtactgctcaatatccaaaaaaccccaaatacacgaccacctttacttgaaaaactctcatccccatatcctagagtggtaatagtggaacaaacacagtaaaaagcatctatcaactcaagattttcaattaagtgtaagaatacagtccctactatgatgagaaccaaaatctgagccatggctgtaaaaaacttatatttcactttgttagtttccatgtcctttaaaagctcaactggaccaattttttcagacacatgaatagctttgaccaaaagtatttcctgtttttctactatgtaatcagccaccttaccaattattagaccaccaagaaataaaccaatgaacacataaattgaagcaagtagctttgctagtatactatttggaacaaggtcaccatatccaacggtggtcattgtcaccacacaaaagtacattgaatcgagaaacccatttgttttttgacccttgatttggtctctgatgaggaagaaacaaagggttcctccacctaagtaagtagccaaaacgacaagcacttgaactatattaaattgtcgttttgcataatcagatccatatatttgctgatctgagcagtttgcgtccacaaaaggtgtacatgcaatagtgttataactattattatattgaacttgaagacggcttcttattcttggaaaggaaggaaactcatattttttagattccgaaagcaaagcttcttcaacttcttcggtattagtactcattgatcaatattaactataaccaaagggtatggttgcctcggtttgatgatatacctgcagaattcgaattcaattcaattaataattaagaattaattataccataagatcaagatctattgtgcaatcatcaatgagtactgttataaggctatcgattatatctttaatttcccctgtataatccatgacaatataattgtaaccgtttcaatagaaaagtggcatatgcatgtcattgccaataatatttaatatgaaatgtgactagaatatgacgtatagattaatcgaccaattagcttctacactatcaaatataagtcgaactggaatatctattaatatctgtctattagcatatacatttttatacatagtatatacgtaattaatgaagaaaaattaaaatagaatataaaattaaaaattgtaccgtcgttatggaagatgaaagcagaagcggaagatggtaaagcttggaagaaaatgtagagacagagagaaaagcaaaagaagaaattaatgtgtaaaaaaaaacaggattatgtggctaacaaattggccaatactcctccacgtctaaaagcttcttaatttgtttcaaatgaaaggatatacgtgcatgcagctgactgttcaaacattaattcggaattaattttattaatcaactttccatattaattggggatttaatttgattaaataaggatacaaaaaattacgacacgtacgtaataactagttgaaata

SEQ ID NO: 2236 - DNA, 1948 bp, Cannabis sativa
taaaaaaattacgtagtgctcacaataatattttattaagaaaaaaaccacagttaattgtacattaatgaaagatatgaataagaattgaaagtatctgtcattgaatttgagacaatataactgggactacaaaaacaatacaacacatatctattcgtacattaaagctttcaaatgattctaaacctaaactgtccataaaccaagtttacaggtgataaactggacagcctaataaaatattttacatttagattgggcatccacatctttattcaaagtacactggaatagggatgcccctccctcccctggccaataaattaccaaacaccttccttggacattcttaaaaaatgtgaaagatgaatacttgggatttcaacatcaccccttttcttctttgttatcctggttgtcttagaagactctgcatcttctgactttttcaccgtcaccgattccaaattgtagaactgttaacagtaaatttacaggtattagataggaagaaaatacttcagtgtaatttctttgtaagtaattctactctgttttatcttctaggtggctgcaaaatgtcatataaaatcaactgttacccttcaaaacaataaccacaagcagaaacaataaccccccaggaagttgtttttgaagctagttacacaatacagtatgggatagattttccgaagaccgggaggaaagtaatgagaaaattaacctcacaaacaccatgcagcaacaacctatggaaagggtcttggacccgaagggtgaggacatcctcctctccactatctgcaatgtaagtccgtatgcagtcctggaaaaaatgagaaacaaacaaaaaaaaagcatattcagtggtcttaaacaacagatgagccactaatgaaacccagaacaatgcacaagatggtatacctcatagccctcaataagtacccaaagggaactacgccgaagtgcatctctggtacgacaatcaattctacgccaagcatttaagacagccatcttatcaggatcaacttggcctttgctctttgcaggagaaccctttagagaatcaataaaattagcctgccaaaaaaggagtgcaggcgtgtaaccattaccgacaaacaaactgagtcaaatcacataaaaatgtaactttggaatgtaaaaaatggatatttggaaattaaaaaaggaacatataatggtgaaaaaccataacctcaacacaatagttgcattcttaatgatagtaaaagcactctatgtaagttaagtcataaatagctaagttattgctgctccggttctctatggccaaataaattttatatgcagtttatgcttaagtttataaatgcaaataaatttcataggatgaaccttggagatgttaaatttagatttgatggatataaattcaaacatacctctttgtccatgtctatattcctaaatttgtcccactctaccgcattagtcatagaaaatggtgactctggtacatcattacctgtaacagaagatatagaacctaagtacgctaaaacatatatctactgccaaaattacagcagcaattggacaatcaaacaaggaaacataacaggagctaattaatcccaatcacaatcaacttcgggataatacttcattcttaccgttctctctttacattttcttttttattctaacgggatcgttgtgttttataaaacaaacaaagtggtagttttagtttgcatctgtatcagagtcaagatttggaaactaaaaatgagataacagccattgttgaaaatcataaacatatctacggtgtttgtttgaatatgattaccccacggtggtggagaaaacaggcctctaatttcttctgcattcaaacgtgggacaagttccatcaaaaggcggtcatttaaccacctacgagatcttc

SEQ ID NO: 2237 - DNA, 988 bp, Cannabis sativa
aaagaaaaagacagaagcatttgaagaaagaaaaaccaacaaatatcaaaaccaaataaaaggttctcagtatattttatatatttttaatacatacttttatttatatgagacatgtaaatgtgtgaataatgactaatgacttggtgagataaatatcaaacaatctgtctccaacgttcatttacaaacatgcaatcttgattcttgaacacttatttcagatctatcaatcctaaaatcacaactccattgcttatcgatagtaaattgatatgagagggacgtcaacatcattgtcatcgtcgtcttcacaagccacaacaacatcaaaatgtcggcgataagaaggcaactcgacctttgccacatcccttgccagatccaccatcttcttgtccattcgctccttatgacgtggaaacatactattataaagcaagcaacttccgcatgagatgctgtaagcattaagtcctttgttcctcagccattcaataagttcccttagcgtagggttgtctttcacaatccacctatcccaaacagtccacttcatgcccccatgttcaatgacctttggcggaaccggctcggccatggagaacaatggtagtgctagatttgcaaatgtgttccggtagtcctctaccttgtgtcctccatccaaaaccttgtacagctccaagcatactagacctgttgccatagccgtggaagtggcaattgcagggataatccttccagctataaacttagccttaagcttgtcaacctcaggaatgctgtaatttctagccctcatattggcaagaccagctatcatgtccatatggtaattggtatcgtcatcctgtgtgtcagaagtaggtttagtaaatcatgaagatctgtaaaaagaactcaaaatcaaaatctacatggaacagaccttttcaaactgaattggtttcatcctgaatccaggtggcaagtttgcatgacaatg

SEQ ID NO: 2238 - DNA, 5708 bp, Cannabis sativa
aaaaaaaaaaaaaaaagatagaatttgaattaagcaaaatccatatgtattagaaatatttgagatagatacattatttataatactttaattaattattataaaaagaaagtatagtttgaattattatttatttttttacttaacaaataattttactatttttttgttattatagcactaaaaattttagttttattaattttagtatttcaatatttataaaaaaaaatatattgaataaggtaatgaataaaagttgaaattaagatttataatattgtttttaataaaaaaaaaagtacagtaaaatgtattatgtaatcaacataatttgataaattattaaaaggtacagtgtatcatcaaagtcttatatcaatcatgtcatgtcacatttttattatctttttaaaaaagtaccaaacaattaatattttattaatctcgcataactagttgccaatttaataaaaataaatattcctacaaaagcttactctacaaattaataagagccatttgatcaatgaccattctcaatctaacggctacagtacaatcacaaattatatacccaaaatacaataacagaataaaatcatccctatatatatatatttaactaagtcaaaaaattaattattattgttgacaaaattgagtcaacaaacattaaaaatttatatttaaaacaactccaaaacaattattctatcccttcctctctcatttctaacttttcctctctaagcattcattgtttctcagccactctcacaaatttaaagcaaatccaatccattttaatgatggtgccatttccatcaccattgaagcacccatggagaggaaaccattactctttttgtgtgattgaaaatttaattctaaactgaaaatatatttacttaagacacaaattcatagatttcaaacacttacgtatggaattttgtattttatcttaattttttcatagattttctattacaattgctgcatttgaaatggtgctatgaaaagttgattgtttagacaaaaatgatgtttaatgatgcatttgtgatagcgtcgtgaaaatttaactttcgacgcaaaaaataatactgtaatagtatcatgaaacttaatatttgacgcaaaaaaataatactttgcaatcatgccataaaaacttagaacatgtttggtattgttttttgtcttcaaaaaagtgtttttagaaatgataacaaaaaatagtttttgaagtttagtgttttctaaaaacaatattgaccaaaagtgaattgttttttaaaacagaaaacaacattctgttgttttcaaaattcttcttttttgtaactttgtttttttaaaattgttttcaaaaaataaagccaaacaagcttaattattttcagaaaacaattttctgtttctaaaaacaaaaaatagttttttaattataatgtcaaatatgcacttaatttttgacgcaaaaaatagttttctaattataatgtcaaacatgcacttgataaaaactttggtaagacaacttgttacttgaatgtgagtttgtcttttttttttcttaatttgttgttgttgaatctacatgtgtaaaatgcttagaaatcctaacttggaatgtagaacacaaaattctaattatttcgaaggttaattaggattttttttccctctaaattttgacatgtatcaaatcatgctccctaaacttttaaggtcgttaaaaataccccttgaactattgagattattgaattgaaggacttttgtccaattttagtaaaaaagtctaacatggataaaagttcatggggcatgatttagtacatgtcgaaattcgaaggacgtaatttggtagatatcaaagtctgggaagaatgatttagtatataaacaatcaataaattaataaaattgaatgaaattagacaaaagttcttaaatctaacaatttcaatagttcagacgaaatttttaacggccagaaaaaattaggggcatgatttagtacatattaaaatttaaggagcaaaaatcctaattagcattatttagaatgtataccataatagagtttaggcttacataattaaaaacacaaactttaagttctacacattaataaaaatatcacattaaacaaacttttgaataaaaaattctcgccaaattatatcgcagactattacaaatgtatcgttgaatatcattttgcatcaaaaaccaattttttgtggtgccagccccaataggtcattattatttgccaaaaagatcaagttttcataacattatcgcaaatacgttaattttaatgattaggagaagaaaaaaaagacatcaacaaaaaatcttatgcgtaaaagttcgaaacccatgagttaatattttctacagtttttaactaaaactgtttttaactaaaactgtagaaaatattttgaaaaaaaaaaaaaaaaacaaatacatgggttcttccattggtgcttcaatgatgtatcaatggtgatgggtgattaagaaaagaatggatgaatacggggcacctttattcaacatatctttattctaagcacatcttatattttgttaaggttcaaaaactttatttactcttcacctaaatcttatgcactgattcgtgtgtattatctcactttgacaagtgactagttttagtccaaaaattgcttcaaaaactcttacatgctttacacatactatacacacaaacagattagaaatataaggaggaagaaaaggaaatgaagtaagtaaacaacaaaatgagaaaagcagtcttaaaaggagtagcctgcaaagttgaaaagaaacgaagaaagctaaaccaacagttgaagaagcaaagcatatatattaatcacagaattaagaaaatgcaagaaatgggttacatagatagtttattgtccgaaacaactaatggctttagcctttaatacacttgcaagttctaaacaaacaatattaagtacaccacaagatgcatctctcatctcatgaaggcccctgccctgacatgtaacattttacactattatactaacttactcccctttccctaataacccccacaatttctgacaagtaaagaaaatcaataacagctagacctgtagatgcactttatatgaaagaattttacaccaattctacccaactataaagtttttcctggtgcctgtctgcctgcctattgaaacaataatgagtcgaaaagaaagaaaaattgatagctatacctgaaacaatacatattaattatgaaatgactgagggcgctgaagttgagatggttgtatgtatgagatattggaagtccccacgagttggcgagatccttagcctcagatagtcaggcagactccatcttctacaacccaataacaaaatttccatctcataagtaaggcaacctcaaagaatggaatggataacataacatttggaagaagtaaaaacttttgtggcccagtttctacaatcaacagatagtgtttatacgcaccccaccctccctgaggatgaacttatatacaaagtgaaaggctcatcattcattcagataaaaaaaagtcatagctctggcattattatagtcacatgactgcagatgtagttcgacgatgctctggttgcactccgttattgaacttcccacttggtgatctacctttgaagctgttgtatctccctggtctgggctggtagagagacattagcattttctccaaggtttgcactgaatatttagcatacttgctggagcttgcatcttgctcaaccaaggggccgtagttctgcatgtagcttcggtacacgggcacaactgcctgcactatatgttggcatgttttctccctcagatctttatctgggataacccaatttgactgcttcttgtacatttcatcaaaagattcgttgaaagttttcaaccttttcttgacaaggtcacgagcggtggcacggccgccagaaaacaaaattaggccctccctacttaaatgacttggtagcttaccccagctatctcttaaaaagactgctgcataatactccttgaattgttcatgttctttgaaccagtggtcccccaaaagatccccaagttgagttcccctcagctgcttgaacagatgccaatgattgttcattgcaaacaggtttgataaggtggtatcttcataagcctttatccatgtctccaagtttagctcaatggccttaactatattcaacacctcgttgataaggagcctctcttgaaacttttcatgcttccaacttcggtgaatgacaagaacctgggttaggattggcttatagccatccccaagcagcttattacagtaatcagtaatgaaactgaccaatttgggaacatttccatcttgaggaggtggattcttcctttgcaactccacctgaacaaagagctcccagaaaatttcagccgctccatcaattaccctcttgatgagatcccttgtgaggttctggatttccatgcatgccgctccaccaaaaagacggttgaagtccagtctcaatttgttcaaagatgcaaatatatccaacaacttcagcagctttatgggatctttcttactctctgtgacagtcttcccaaattgaagaaatgcaagtatcccagcctgagcagctatctttgagaaacagcccatccaaacatccactccaatcctctcaaaaacatcattacagagcttatactctgcctcaaacaagtgtttcacagcaaactccaaatgttttccccactgtgctatgtaaacctcgatgctttgcacattattgaattctgagattgacatgtcaagataatccaaattgagagccttcaagcttgcccttacatttgaactacggacttcaacataaatagatatgcacttgtcaagcctatcattagaaatcaacctccatagaatggcctgcaacttttggatgacagcaacaggcaacggtgaaggtgcaatgcaggcttgttccccagtcgatgatgacattggaagtggcacactatgttcagtaaggaggcgtttgaattcattttccaatttgtccagtgcagcttctaaaagcccaccatccaaccgagattttccctcagcattttcgaattctctcagacttttcagcgatttcttcaggctagaaaggtagccactgtccgcaagtgcattatcctccatgtactccactatgtcatccaaccattgaattgccaaggcacaattgtcactcagaaacctcaaagcctcttccaaacgtttcaacacagataagtaaccaggaagatcatttcgagggtcggacaacaacgacttttcaagcccatgaacagcatcaaaaaccttaagcaccgccgctgcaggtccaacggcacggttaatatgaccacccaccgccacaagggcatccttatcagcacgaatgggtctcaccgcagcttgcaagacaggtaatcgttggttaatctcttccaatctaggtcctgtcttctgtagagctaaccctagggactttgatttctctaagctaaccctcaatgacttgcttgcagctaacaatttctcaacgccatcgttattcacctgggaagccattaaaaccctgatagctctaatatccaaaagctt

SEQ ID NO: 2239 - DNA, 1300 bp, Cannabis sativa
agcatatagatattttattcaatttaaatataaagtttttttttaaaaaaagaaatatatatattcaaatatcaacaagttttaaaattaaggaattttagtttgaactatcatttatattttgaaatcggtcgtagtaatgcattttaattaaattagtgtataaaatttaatgatagatggtatatctttggcaaattaaataaattacttttatatatagtagtactgttatattaattaagaatatggatattaattttgttaaaaacaaataaataaggattaattgttacacaatatatatatatatataatgtttgaaaaaattatttcaatatctatagattaaaaaaacttaaatcaatttaaagttattttttctcaaacataagtcatttttttaccaaaaaataaaagggaaaattaacttaatttcttttgattttccactaaacaaatttaaatatagtatttatttacctaaaattaaagttaactaaaagaattagctatatagtaattaatgagtaatttatctctaaacagattattatctttataaagccactttaataaagttcacggctatgatagtgaaattattgctgaatgatttattttctctatcatatatatataaatatatttccatcaaactcaattaattcatctatatttatttcattatattttttaaattaatatattgcattaataattcattattacaattagctagatattgcccttgaagtagggtactgtctggaattgagaacattccaacaatcccttcttgctagtatttgctctaggttttaattaagatcatcactatataaatatatatattaattatcaagtgggggattttttttatattttttcaaattaattaattaattttatcatgtctttcaattcctaaaaccctaaatttattgttgtcttttgaattatatgtcaccttttctttttctttctataattgctactttaatcttttctatatattatcttgatgttaattatttgggagttagtttataattattacatatatttatataggtgtgttgttaaagagagaagaaaaaaacttttaaatggtctcacattgcatcaagtcagttatgatctttatcaaacacatcaattccattattaaatcaaattatttttcaattaaattttacgaccacttttaatttggccagagatggttaatttttgtgaaaagtaataatatataataattaaccttatatataaatgtataactttaatttatatttct

SEQ ID NO: 2240 - DNA, 2082 bp, Cannabis sativa
ttttcaatcacattagccacagaacagaatagtcttgaatccaaggctaaagaacaaaccactgactctatggatatgagttcttcatgaaacccgggatgcaacaccagagccgaaaagttcccatccaacactaaaccgagacatctcgcaacatcttcgagcttaggaacccaatcacaagccttcaaaccgaacaaggttgatgccttctggcaaggaacagcttgaggaaacctttcgtacttcttcagccactttcccaaataccgaatcaagctcttcatctctttcccattcaacttgctaaaggctgaagataagacaacatcatcgatattcactgatgccaatagataatgcaaacacagctcttgagaagagaaattatcatatgccaccatgagcaaaaccgcagcctcctttgcgaggatagaattttctaccgagagagttttgtcggtcgctttctccatagcaaacagtgcttgtttctcccattcgtttcgaacatttagcatggtattatcactagcagcttttttggaaaaactaaggaaatacttcaagatggcgagcaactctgatgagccgagatcagatgcctgtttaatgcaatgacaaagtaggtctgatctctcacttgctacgagtttaggaaccaaactaggataacaagaatttacaacaaggccatatgaaatcaaggtctctaccaattcccaaatctcaaaaacaatgcaggcttccaaaaccaaagcagcaacatctttgcccatacagaaccctactttctcaactaagaccttagtatacccactgttggaagaagcaaccctaatcgaaagtccaagtttctcattaacattctcaaggaacgacttcagaatctccaaaaattcctctttagcaaaagtagttggatttttgagctttccctgaagcttagtaaagaaatgcttgcacaagtcaataatctcagcatctaattgagagattttccatccggtaaccggaacagcaagatttgaggcacacaattcactatcttctagattcaaattggggaaaatggaatccgggtcaagaacaactgggtaatctggtggagtagtgggtgtttgggcactgactgtggcctttgttatcagttcaagcaaagtcattgcagcttaaaatggccaaatcttaaactttccaaaatctgtattcattcaataaaagaaatgtatgaagtcaaattaccattcaaaccaaaaaatttaaaggcctcatttgggatcagtaattggataaattaccttattgaaaaactgtagaaatagaaaaactaacaatagacaacaatgaagaacatggcaagatttaaccacttttaaccttaatccctagtaaattatttcaacattgaagcatatctctcttattccttatctcttacctattaacaaatgtatatctaaccttattttgttttgcttttaacagattcttgtgtaaaagagaatatacccaatgaaaaagttaactttaacagtattctatattactaatttactaaagacaatcttaacagcattaggcatgcacagcacaagttacaaaatttacaacatttccatgaacttttcagaaccattctcaaatggaagaaatctgaaattcaaattaactgaaagtgtccaattacctttatacagatactttaattactaaaaatatgactacaacagtacaagcacatttcaaaaacacttactatttttcatcttgtgaagaatttttcgaaaaaatattgacactctcaaataaattttcaagcataaaactgtatacaccacaaaacaaatcattattcttaagaataggaatcaatcagagaatgtctttgaaatttagaaaacatcgtattcaagctaactaatcagattggagataaacagtagcactattcgaaattcaaagctaattcaatacgaatcaacaaaaaaataacataataaaacaaatatcgaaggaaaaagaaattcatacctatgagtgaagtagtgattatagattttcagtaactgagagagagag

SEQ ID NO: 2241 - DNA, 2390 bp, Cannabis sativa
atgactttctgcacactcctagtttagacttttaaaatgagtgaaccttagacatggacttaatttgccttaacctagagttgacattgagtgtaacaaagtttgaaactcgtataatttaattatgaaacatgacttttacttccatctcgtaaaacaatcttgtatagacttgaatagagtaggctaataaaatgccataattttcctgaatgagtaggggttatcgctcaacctcctaaaaccttagtaatagtggtaacatatcaatcttgagtggattaacaattggtgactatgaatttgttaagcaaactatgttggcctctcctaccctttagtagttattcaaaaataattgcgtggaaagggacatagaattaatgctttcacttgatctctactccactcatttatgattaagactaggtagttcactaagaccaaaggtgaggcaagacatgcacctattgtagtgatagagtgtgttatttgaggctaagatttcattgggatcaattctcaagttgtacttataaatttagtttttttacatatattaaaagggtgcattaggatcaaggattgaattttgaactttaaagtcttaaaaacttttacaattacatcagaatagcgttcctaaatctttagaaggtagaggttgtcttttttctccgactagactcgctgaccccacgggcttatgcgtagcttggtcattgaggtttttttatttaatttgctactacaattaggttactgtatttagattttgctattgtagttagtcttgtttttctaatatgattttgagtgtctttagtttaggttactacattagtcttgtctctgtgatacaattttattttattttgattcgttgttggttcatcttctttgttcttcgactgctcacataacagatcgttgttagtggctgagaataataagttctctgtggctgattgggtagttagtggtgtcgttacgtatcttccacaatatagttcagtgttcaaacttcaagctaagggactgaatgaacatgcttgaacaatttttatgattgtgctttctaagtggtggaaaaaactgagtataagtgaacttaaaattaattataataatacaattttttaccaatgctttggtcaacgtgtgaacatgcaacgacttaaatgcccacatcagcaccaaaagagaaaaataaacagtaaaaaaaattggataatgtcatattggatgtgcttttacaatgagaaatgctaaaagagatcactggtgcttaacacctcttcggtatcatactactattaatgtagttaagtatatatggagtcttacataacttaagaaaatacattttaagaaatatggtaaccaagacagtgcgggagaaaatgggagcccaagacaataatagaattatgagacccttcatagttaaataaaatcgtgcacatataatgtcattaaataaaatagattttgtggcaaagtgtttactcttaccttaaaatgtgtacttgatccaccttttatctctttggacatttagaaaaaatttactccaattttcttatagtgttatagttgtttatgatatttttcaaaattttaaaaaattcagaataatttacaatataaaaaataatttcaaacaatttatttcacacgcatataaaataaaagagtcacgcgtgcaacagacaacttaaatcatatttccagtgtattaaatttttttgaatttctcaaaattttatacgatatcttaaataactataatgtacacaaccataacaaataaacaaaaaaaagtctctcaaataccaaaacaaatagaattgcattgttgagttgtccaatcaaattaaacaaaaaaatggataattaatgtcaatttaaaacacgtttctattgtccatgtattttttacatggctcattaatccccatatatcacttttcctaattacctcctacgtacgtatatggaaaccttccttaccatataattaataattaatccatattatatataaacctatatcacttctcatttcttctctctctctaaattatataataatgaaatgtttctctctctctctctctaattgtacttctacctataatgagtacactacaactacgactactactactactttcgttattgccatgcttattacaatgttattcttgttactactcaaatatttgtttatcaagaacaagttaactactactactaatcttcctcctggcccaactccatggccaatacttggaagctttgttagcatgatactaaacaaaccgacgtttaagtggctccatcgtgtgatggaggagttgaatacagacattgcatgtatccgtcta

SEQ ID NO: 2242 - DNA, 2085 bp, Cannabis sativa
atagactatggggaaacattcagtctagttgtaaaagcttgaaccatcagaatcattctgactatagctgttgcaaaatcttgggaagttagacaactaaattggagcacttcaatacctcacacacaccagacctggcattagtttctctgtaaataacttaagtcattctcaaagctccaactaatgtctgctggtctgcagtaaagaaaatcttaagatatttgaaggacactcaagatcatggcttgcatatcaaatataatgacacattgactcatatagaattttctgatgtagattcggcctgctatcccgatgatagaaaatcagtagctggttactgtgtctattttggaggctctttagtttcatggtcatcaaagaaacaagcttttatcttcaagtcgagcactgaatccgaatacagagctcttgcttaagtagctgctgaaattttttggattcaatctctgcttcaagaagtgcaatttcctcttcaacacactccaattatctggtgtgataatatgagagctagtgcattagcttcaaatccagtctatcacactagaacaaagcacattgatttagatgtgcactttgttagagacaaagttcttgctaaagctcttgacatcagatacattcattctcacgaccaagttacagattgcttaacaaagagtttgtccaattctagatttcattttttagttgacaaactatgtgtggtttgcaccccacttaatttgagaggaggtgttagaaaatgataccattactagtacattttgtcaattatttgtacaatcattatttgcatgatttgctaatcattgccaactatattttctttcttttcggttataggtgtcaaagtatattctttttgctttttgtgtattccaacctttttggaggtctcttttctaaattgtaccattttgttgccctagtggctatttaatgaaagatagaggataattaaggctatttctgtggctttatattggtgtaaacatctcctcctacttatcatctcagattgtaacagacacaatcgtcaagaaatacacatcatccttgtttaattgatgcacttgatattacgttttcactttcttctttccctctcgatcaactactttgtagagaaagtaaattggtgtggaatggttctgcagttccatacctcttaaattcttgtactatatatataaataatatatgtaaactaaagtaagattgtttttctttatttttttcgccatgtttctggactatggcgcttactcacattggcctttttattatcacaaattaatattgtccaacttatatatatttgcaaatcgaatttgtaagtttcgtgggagcatgcttttgttgtagtcataaattatatagtaccaaatccattagtataaattctttaaaataataacaattaatacaaaatttatggtagatacaatagatatgtttggtaaatataagttatatatataaaaatagctgagaaataactggggaatctaaacttaataataaaatattttagtgttcacattagcagctttactcgccaacatgtagaaagagatcaattgaggaatctaaaggttgttccaaagtaattgtttatgtttgttttataatattttatgtactgaaattggatagggtcaacaaaaagaatgtgaagagttcatatattatattgagaaagagcataaagaaaagagtgttcatggcacacgaagctgaagttttccacacgcacgttgggcctaaactcataatggccacgtgttttcgagggtcaccacgggcaaactcaatttccaagctttttgtagatgagttctgtctacatagcacactcattattgataaacaagtttattagttaaaataatataagaagaaacatgacatcaactttctttggataatgacccatttcactaatttattaatagtgacgattaatttattatttagttcagaattagagacatcttcagttacagtggtcgattaaatcctacgttctttaaatagttatttgacttaatatta

SEQ ID NO: 2243 - DNA, 607 bp, Cannabis sativa
tagcaattaagtctttttagttaatttttaacaaaatttaaaaactttttttgatagataatccagaaattttttggatatcatacatctccagctacttttacacatcatattgtattgaataatataaagacattcattaaaaaaactgaaaaaattaactaaaaggacttaattgctacttttttaaatcaaggacttgatagtcgaaaaaaattcatgtactgaattgccaaacaaagtaaactctaaaggggtgtttgttatgtgagttgaacttgaagggagtcgagctagaggatgcttaaattaaggaaatatgaaactgaaggaagggggtttaatattatattaccatcaattaaacttacaaagcatcaatcccaataaccctgaaattgcattttgagattttgagaggagcacccattggaaacataaaccccccctgcttattaaatttttaagaaaaatgagttgggtttgatattctcattcccactaagtctaaccccatgccaaacgccgtataaggtatttttgctaaaagcccaataattgatacgcttcatgattattatatttatatgtgtgtgtatgcagagta

SEQ ID NO: 2244 - DNA, 1380 bp, Cannabis sativa
ccagctccattgacctataaattgatcagacaattaaaccacttagtagtcaatctacaagagaagacttgttattacaggggaacatcggttgtgaagagtaaggagtaaaaaccttccaagatgggcactcgaaagcagaaatgatggcctctttgagttgatctttatagcgtagaagtgcagggcctccataactgatagcaactgataataccttcagctgataatcaatcgccgtttcaagagctggagatattgagggtttggcctggaaagcgacaaatataaccattataacaagaatttcggtgcttataactgtattagacagtaatattatctccacaagagtgtaccttggttgaaacagacgaatcaggagtccctctacctccaaatccagtcgatggtattccttttaaagaggatataacagacaataaagttggctcaacaagttgagttactgcatcttctgggttcgtgtgaacacaagcacagcaaagcaatccaacctctgcaattgccccgggaagaatattggttctcacaaacttggaaactttctttaacgcctattataatacaaggaaaagtttacaataatgtctttttgatacgttagaccacggaaaaaaatgaaagcgaacaggcgggaacaagaagtgaaacctgattaaacaagggttgagaaagtcttccaaacaaaatctcgagcatgcagaagtagtatggaccatcctcgaccagaaatgttccggatgttgatgatgaatgtaaaccttcatttctgcatcacaatcaacagttaattcgtgacaaagcgaaacttaactccaacgaaactaacaaagaacagaaccaaaacatgacttacacaacactgcttggttccaagtgtaagagcaacgaaaatagtcggcataggaattcatcgagccattcagaaaatcgaatcattgtcatgactggaagctcatctatgtcatcgctcaacaaagccagctgagaaattcgaggggataagttaagtataacatgaatagatggacagagagcttatgaagagaagtttgtgttacttacattagaaaatatggaaccaattaattgcatggttgccaaggttttcggaggatcattggcatccataccaagcaatgcattggacaatgaaagcatcataagttcaatgaattcatcaccaccatcagtatcaacaggttttactgcagaagctgatagggacgtcagaaatagtgaacgcccgacaaaagctactgacatcacagcaatttttaattgatgggtggcagtcatctgactagacataaaaagttggtaaaagagtagttattccagtgaaacaagttccat

SEQ ID NO: 2245 - DNA, 785 bp, Cannabis sativa
tggtatgaattagaacaaaataagatattaatcaaggactagttaacacttacataaatactagcctcacatcgatcaatcactgggacagagttgaaataacattctgtgacatttttcttacatccttggcggtagccaaattgattgagcacaggtccggcactccacaaaagttgtctacgtgtagagtatgcaaagagtccctgacccctaatgttgacaaacatagaggaactcaatgtgctaactgagaatccaataatctcaccttttccttctctatctgctggttgaaaacttaggacaacttctgcatttggttcagaagttccaatctttaacaagttaatttctacaactctattctctgcagccacatatatctgccaatattcgaaaggtttttccttttcatgggtcataatgactaataatgatactagagaaagctatgctatcaaataaggcacttgaaaaccccatatagtatattttgcttttcttttcttaattggtaataataaacatagacagagagagaatatatgaacatgaactagaaggaagaactcaaggaaaatggtgtaccttttcatttccaccataaactggagccatatcagcataacatgtgtaattcaaacgaattgtccatgcattagaaccattactctcaaatgcaaacaaatctttctcagaacaaatataaatcctcccatcatttccaattagaggtttcgaaagtctacgtgcaaattttcttgacactgcttcagctgtaa

SEQ ID NO: 2246 - DNA, 1429 bp, Cannabis sativa
gatttcttacagttgttcattgatctagagagtgtagttggacaaagtttgagtagaagttaaaacaatggtagttagtgagttcagtgcttcagtttgatgatgatttattttaactcagttgttcattattaagtttagacaacatttgcaaaacttgtggactgtttattagacaagaagtgagtttcagttcttcagcatgatgatctcttacaagtgagttgttagatatatgtagtttgctttccttttgtatatactcagaagggttgaatagttcattaacagcattataggtcgtttttcttccacctgagttgaaatggtctaaaagtagtggagaaattcattgataagatttgagttcagatcttcagcttgatgatttcttactagtgagttgttaatgtgtgatttggtttgctttgctcttgtatgtactcacaagggttcaatagtttatgttagttaatggcattataggcccgttgttcttcgaaccgagttaaaagtgtctaaaagtagtggagggattcattgataagattatgagttcagttcttatgatttcttacaagtgagttcttatgatgtgtgttttggtttagtttgcacttgtatttactcacaagggtcgaatagttcatgttagttaacagcattataggccattgtccttcgacccgagttaaaagggtctaaattagtggagaggttcattgataacgatataaaaaccgtccctgcctttaattcaaacattggttttccaaatttcgaacttatatgcatacaaacttaataaattgacttgctttcttctgctttacagtaaaaacgcaattctactcgaggagaaggagaatagggaaaaggaaatgagaaacaaaatcctcgaagaagctgaagaattcataatatctttctacgagaaaaggaagcttaacgtcgaaactaacaaaaccaacaaccgagaaaaggagaaggtaaaatgctgaaaaccgatttcttcaacaactctcaaactttaaacaccattctatttactagtacaaaacatgtgttttggaacagttattcttggctaatcaagagaatttccacaaaagtgctgacaagcaatattggaaagcaatagccgagcttattcctcacgaggttccaaacatcgagaagaagagaagcaagaaagatcaagacaagagaccctcgatcacaatcgtccaaggtccaaaacccgggaaaccaactgatctttcacgaatgagacaaatactcgtgaagctgaaacacacacccccacctcacatgattccacccccacctcctccggccaaagaccccaaagacaccaaagatggaaaaacaggtaaaaccatatcggttgctgcaaaagacgccaaggatggtaaaaccgacgccaaag

SEQ ID NO: 2247 - DNA, 2395 bp, Cannabis sativa
cttcaatggccaataggcttaacatggtatcagagcaccattttcctccgctgactgctaacatggccactcttggcagcaataacaccgttcctgcagctaacaacagcagaaccacttcccctgccatacaagccgaaaacagagctcgttcgaaccaagagccagtcttcttcaatcatagtctttcagtgaccataaacttcctcctgtggaagcagcaggttcttgctgccattaaaggaaatcggttgctgagattcatcaaagaaccaccacctgaagagtttctgagtaatgatgatcgtgttcagaacagagtaaatccgatctttgctgattgggaagtgcaagatcagctcctagtctcttggcttctgtcctcgatgactgaaagtctcctcactcgaatggtaggctgcaatacagctcgacaaatttgggaatccttggaaaaacactttactttgcaagtttcttccaagattcttgaatttctaacggagcttcagaatctgaagaaaggaaatttgagtctgaatgattacttgttgaaggttaaacaagctgtcgatcttcttgcttctgttggagaagtcatgatcagtgatcgagaccatgttgctgctattttcaagggattacctagtgagtatgacacctttgtcatttcgacgaatactcggatcgagtcttattctgttggagatatcgaagctcttcttctgacttcggaatcaagaattgaaaaatctaggaaggatatcgaaaaaagttctcatttgacagaaaaggatcaagatcccaatttggaagttaatcttgcctttaggaggttcaggcagcaacaaatggctgggagaggaaatggacagttcaatggtggttcaggtcagtttggttacagaactcctaatcgaggtaatgactttgctcaattctttaatcctaattttgggggtagaggtagtgtcagtacctctagaggaggcagatctggtatgacagtgaacaaccatgtccaatgtcaactctaaataaggtttggtcatactgcctatgattgtttctatagatttgataaagctttcacagggccttctcaagttgcaggcagtagcactcaaacttcacagggttcacagcaacctcaggccaatatagcaacaacaaaaagtatccatgacaataattggtatcctgattcaggagctaccaatcattgtacacctcaagctcaaaatcttgccaattgctatgactacactggacaggatcaaatgcatgttggtaatggttcaggtttgtctataaaacatgttggtcaatcctttattttttgtaggcattcttctcatcttgttcttaataacctgctgcatgtcccagaaataacaaaaaacctcataagtgtgtctaagtttgctaaagacaacaatgtttattttgagtttcatgctgatttttgttttgttaaggaggagatgacccattctactttgttgatggggatgcacaagaatgggttgtattcgtttgatgtcacacacataggacctgccttccctaatcctgagacaaagcaaagtgtcccagatcacctacctaaaaccagcactacagactgtcaaatcgagacaaaaagcacctacacagtgactctcaacaactccacagtcacaatttcgagttgtatcaagtgtaattctagtgtgcaaaatgattttactttgtggcataataggttaggacacccggctgagaaaattgttcaaaatgtcctacaatcttgtaatatgcctataagcaataaaaatactcatttttcagtttgcacaacttgttgtcttggtaaaatacatcaatttcccttccctaaagcttctactactgtcatttcagaacctttgcaattagtggtgtctgatctttggggtccttctcatgtaaactcctttaatggatacaaatattacattcactttgtggatgcttattctaggtttacatggatctatcttttgaaacaaaagccaaatgctttcaaaaccttcttacacttcaaatctgaagttgagttgcaacttggaaagtctcttaagactctccaaacttactggggaggggagtttagatcctttacaaaattcttaactgataatggggttcatcacaggcatccttgtcctaccacgcatcaacaaaatggccttgctgagagaaagcacaggcatattgttgaaaatggtttgacactcttagctcaagcctctctccctcttaagttttgggatgaagcctttcgaacaactatttacattcataataggttgcctacatccatcctcaatcacaaatcaccattagaagtgttattcaacacaaaacctgatta

SEQ ID NO: 2248 - DNA, 1678 bp, Cannabis sativa
agtatgtattatcttaagcattaagaagagcttcagcatgtagaattatagagcaacacaggcgaatattactgaaggataaggctcagtgtcaaaatcacttgatatgttggtacttcatgagattttatgtacccattcaaatttgaaagtttgagctttaagcatcattcaagcatataaatattaggatttggatataagaaagtaagttacagtatgattcgttgtttaatgagcttcatttgctctggctcctaggattaaattttccaaatcagtacgacactacagctggaagttttcatctttttattagctaaaacccgttgcgcttatgctcttagtttgtttttgtgtgtgtatatatgctctttaaatatagattactgagggaattttagtgcccttgtaacatttaattgtaagatgttaatagccagatgaaggagtccatgagcatcaggagctcatgtgttatgtgtacatcttacttttcaccatatgtttaaacttaatttattggtttctggctgcttagctgagcttttacttaatagcacagtcacgaattgccatatactcgcttctttatagacgtgaactaatagagaatcgcatgcgtttcaggtttgagagagaaaggacttgtcctctatgcagggcaatggttaaacctcctgatttacgaactttcggggacggatcaacgaatttgctgtttcagctattctgaaaatcaaaggtctctgttttgttttacaagcagccgccttcaattaaaggagccatttcgtctcatcagcaagtggtatatatgtatacttggttacacaatctcaccattaagttgcctccaaaatattctatggaaggtactatcaaagtccaatacgaacagatagtccatgttttcctagtcatactcaaaaagaaaaaaaaaactgatgagatggttaaatactgtatcctcatccacacagattttgaattattttttctataatacgaatcccataccaatcttttgtatatacattatatagaaaacttcattcctctgctccaaaatttgcctaaattaaaatcttccggccactttacttctgcttttttctgcctgttgagatcaaatgggtttttgcttttatttaggttgacgtttcttcttctacaatgggtctgggtgtttattattattattattattactatggattgattatttggttactcactcactggtatgtttatagtttattattattattcaaatggttatggtggtgaagtttgtgttactgtacaaatatttttccagagtttcttttggaaacgaacgagagtttctctttggggattgagaattggtaaaggccaccaatggtatttttttttttttgaaacagggccacctatatggtatttagtaccatcctaaaatgatatattgttattgaagcaatttaattgaatagctagtgtaaaaatttgttaagctctttgtaaggcgacacatgatagtgctagttactactagagtaatagtgtctaataacaatgttttttggaatttctgtggtaggagtaggagtgcataaatttgaaatcaataacagaaaagaaaacaacaaatttgcatatttatttgtatatttatgttttgaaagactttatc

SEQ ID NO: 2249 - DNA, 664 bp, Cannabis sativa
atttggggggggggggggagaaacccaaatgttgaaacttaggattaccaaattaccccttccgtaaactatagaaaggggtttgggtttcctttccactcttttcgcattttcaaactcaagaaccagagaaaaaatcttcagtgtttccaagcttttccaccgaggctttgaagaacactgaagcaatttcaagagatcaattcgaatcataacccaaaaactacaatagtgagtaagttttctaaccttttttacactttctttaaatttctacattttatttttcacttgaatttgttctatgaaatctgggcttgaaatgaactatgcttcgacattagaagttaggatttctaatcctaagtctgaatgtatgttgtgacttataattcctatttttttgttaattccaaaccattttgttggaaaacacttaaaaatacttgctcaacatttttgggaatttctcgagttcttcccgtgttcttaaacttgtttgctctggaaattttgtcatttggatagaaattttgtcctttgatccttaaatttatctgattagaacatcggtgatgtttttcctttggaaaagacattatatctatttggctcttacctctctctccttcattttctaaatgaaccctagcgattttgtggg

SEQ ID NO: 2250 - DNA, 3621 bp, Cannabis sativa
tcaagatcaagccaatttttacaatgagtacttgggccaacaaaatgctttagctcaccaacaagtccgtgatttaaattcatcttttgcgatatggaaaatgaatgatgacacaccagatcattttttgagcccactgtcatgttcgccatactagccaccacctcctccactgccatattgatatggcgctcaggtaatttctcttctctatcctttagtgtcacattaaaaacaatgcgacaatttaattttgggggcgaactttttttttttaattttgtattgttagttttgtcttttagtttatgttagtgtcatggtaaaccttagtgattgaatatatcccatccattgttacttattttattaaacttattaatacagtgtgcttgatttgattgtttttgtacttaacttttacgcttgttggaaaattaaatatgatttgtaaatgtaattatttggaccttattatacatgcttgataggttagaggattgataagttggattggattgaacttgcattacttggcctttgaggcaaaatcattgatgatgtgtgctttgaaaaatgatttaggtaatttttttaaaaaaatgtttgtgcctttcaagccaccattgtaatctttattctagttcaccctttttgagtattgacttgttattctttatttttacacatattttgagctaaaaataaatctattattatcctctcttgtccctaacaatatcataagcgtatcttaagtttgggggattgtaatgtaaaaaagtttatgttatgcggcaaataaaggtactattgaaagaatttcaagacacaaagttatttgcaacaacttgaaagaaagaaaaaaaaattggcaatgtgtagtgtcacattgtggaaaaaaaaagagaaaaaagaggaaaaaaattaaaagagagttgttgcgaggttatcaaagaagaggttctctcatgtacttagaagtaaaagaggatattgggatcatacgtgaaaaattatagggtgattagattggaaaaagcttatggtataggtgagcctaaatgaaaattgtcatctactattacctaagcctaacgttaaacctcatttaagtctatttgattttcaaagcatatgttgttgacattagcggataagtttaaataatgcaagcttattgataatcgatttgtggatgtgttggattgagttaagcatgtatattaatttctaatagttatttttgacatttgcaagttatatttttcttttctaatttgagtgctaaagttagtattgggaacgattggattgaaaatccagttatataacagctgaatcttgtgagtagcggtggtgtggtgtgaattgaagttaaggcttgctttgggtcgtttgttttagtttagtattgatctttactcgagggcaggtaaagtttaagtttggggaagttgttagcttctaatttgtgctacatttaagtatgtttttaaagtgtttgtaattagttttagtttcattttatgcaattttatactttagtttgttaatatttttaagtttagtaataaagagaaaagtgaacaagttgaagaaaagtagtgtaaaaattaattaattgtattgtcgctagtgcaccaaaggaaccgttcatggaataatttagaagatttggtgtactcaaagcccttaaagttgaagaaatgaagaaagtagagtagcgccatggcattaaaattcaatgtcagggcgctcttgtgctaaaaatagatagagaggttgagtttcaaaggaaagagtcaggcctcaacactggagaagctacgttgatgcatgaggagagagattacaatttacctaaaaaagggccaattgggctgtgacattgggaagggtatgttgcggcccgctatgacgaaatcaacatagtctttttggacttttaggacacgggtcgcgacatgcactggaccatgctgggacccgctacagtgaggttgtgtcaggtgggtttttaaatcctaatttcagagggtggtaacttttgacctttttaaattttttgggtatacgaatttgaagaggagaagtgactggagagactatcaccattgttcatcgatgagttcttctccttctcttttaatttcatgtttctaattagcttaattcaattattcacaaagataatgagtatctaaacgtttaattaaggtgttaatggagattgtttgatatttttatatagtttaatgcaattttagttcttcctcaatttcttatatgtatctattttatttgcgcttaattcttataattgcttaatcgcaaattatatgtttatgatttcaatgcaaaatctgaaaagtgagtgttgattattctctagtaaaatagacatagattttgatattagacgaaagtacttgtatatattaattatgattttttttatataatgtaaattatatatataatttaccaagaagtgtaggactttaccatacaatttaaattctatatatcccaataagaatatagattgaagtagttaatctactatcacatacgaattggaataaaattaaaatttgcattagaccataaaaaattgatacaatcaaaattaattattctaaatttttatcattcctatttgtccttcttttattgctttcaatttaatttttaatttcaatacttcttaaaaattattgccatcaaatagaattaggaatgtaactgtttagtacttaactgtagtccttgtaggaaagatacaaaacttccactgttattacttgtaaatgatgtgtgcacttgcgtcttagaaaaatccacaacaatggtggttgtggtgttggttttgttattatgctcgatttgtgattgaaaaaaaaaatgtttccgtggtattggtggttgtggatggtggtagtggtggaagaatgaagaagaagaaaaaaagatctggaaaaaattgtaggaaagaaagaaagaaagaaagaaagaattgtttttatgatttatttttattttttaaattattttatttttaaatatttatttatgtgcaccaataaatttgtaccatgtgtatacatagacaatccaacatgacagttaacaataaaaaatagatgtgaatagtatattgctaataaaatactggttttgaaagttttaccgccaaaatttagatttgggggattaattgctagcaaagtaaaacttttaaaggttttactgcaatttactctttatttaaatacaagtttagtattttatatttcaataatatttatttggtatcctatatttaaaaattctacatatatttgatcaataaaatgttattaatacgataaaactatcttcaattatataattttaaattcaaattttataatttaattacatataattgtgattaatttggtcaaattgataaaatttattcatcaaattttacttgaaggttataaatatgcacaattcaaaatataatgtagtaaatgaacactattacaaacacatgataccaaacttatttttattaaataccaaatgagtatattcccattttatatttagtaatatagttattttatattt

SEQ ID NO: 2251 - DNA, 2520 bp, Cannabis sativa
agagagagagagagagaatgattcctgcaagtgtgcaagtttttagaaaggaaaaaattaggaaaattatatggttcactatttacttttaaacataagtgtactaacgtactttttatttcttattttaattttgtttttatttttcaatgtcaagatatatagttttagttttaatttgtgtatgttagagctagggatatattcgtactatatagcactttgtctttcaaattatgacttatctattattgtgtcccataatttttttaaccaattaaaaatggtcatcgaacttttaattatgttgtaaagtgaatattcttttgttaagttttgtcacacgttacaaaaaaatgatgatgtgactgtttaaactattagcacgtcaatgccacgtgttggcaatctggatcacgatgaataatgggtcattgtggagaaagtgcactccccgtccatcttcctccgtgaatgttatcgagctgctctctcctctagaactttttggtggcctttgttttaggctccagactcagggctcttgtttcgcctcacgtggatacctctctctcccctaacacgtgttgcccctaaatcctggtcctccgatgacagtctgaatgtctcccacaaattctggggcctcctcttgaccctctcgctggcgcagctcatttggcctttgattctccttccagtattctcctagatacccccgttgtatcaaaccttcaatttcgaccttaaggtgcttgcactcttccgtgaggtgccccacatctttgtggaagcggcagtacttgtttggatctctcctgactatctttccctcttcaagggtggcggtctcttgaagggtacttggggttcattgatgaagtagatgtgttctcttgagcaggttagttttttgtagtgggtgtactctcgaggtagtagttctaactccttcttggctttcttgtcttaccggtcatccttatacacgaatcctcgctttttgtgcgacccctcagcccgggtcttcccaggttgttcgtctttcccaacttccaaattttcatgtccatcttctaccaagatgtacctattggccctctcatataagtcctcaaggtcatccaggtccctcttgagcatgttgtttcaaagcttgcttcttggtctaactccggcggcgatcgatggccattttgtgctcatccttagaaagtctccccactttagctgcttcggcgttgaagcgctggatgtaactttttaagctttcagtttctccttatttgatatttgccagactcgtcctcaggacgacgtaatctcaggaagcgtgatgttgggacaagaactcatcggtgaattatttctagaaagttatggatccaggagctaacctcttatatcatttgtatgatgcgcctcggagtgtcaccgtgaagcattggcatctcgctttacttgtgactcttttcattttcataatctcgttgaaagcgtctaagtgatacttcagatttggggattcccccatagggcgatatgtttggctctttaaaattagggggtaactgttcagattggatttccttagaaaaaggagattcatcatcgaaatcttcttcatcccaacttcccccctctgaagcggctgaggctatccttctgcggaggtctcccatctccttgtcaagttgttgtcttttcttattcaacttagctcgaaggtcctacggtgtgcgtcttgggccttctttgtggtggtgcattgttgatgacggcactttcttttcgacagtcgttttctagttgagtttttccctcaggtcccccgcttttgagtcagttctcttctgttggagcgatggctccaggtccttccagggtctcgcctttgacggagacgcctctgttgtgttactggtggaatactttgatagtccttcaacttccagcctgtctttgtccttcctgataacttcgggttcccttcgttggaataaaggtgcatcggaatgccccttcaagagctcatacaatacattttgcatgtttgctacggtctcctccaactgtaagttgtttatcttcaacttgttcatttcgtcgttatgcatgcgactgcgggagcttgacgtgacaaagtagactcgtttctccttccctgcattgggacgcgaggtccctagatcttttggtgtttggagtggaggatgcctgattgaatgaaccctctgtccctgcatcacaccttctccggtagtggttatggaggctgtcactccatcgcactggtcgccgatcgggcctcctcacaacaatgcccttcttgttctgcatgaggtccaaggatgtccacgccccccctcgagctgctaagatccgtgattaatggcagcctcttccccagcaacgaggggtggctgatctctccttacagcgaccaactgatcgttgtcaaaacggattttaatgtctcgaaggcggcgtgattgtctagggatttttgaaatgattgct

SEQ ID NO: 2252 - DNA, 2250 bp, Cannabis sativa
ctattggatgagttgggtcatgctaaggtcttttctaagttggatcttagggcttgctatcctcaaattagaatggatccgcgggatattcataaaacggcatttcggacacatgaagggcactatgagttcgttgtaatgccgtttgggcttaccaacgctccgtcaacctttcaagcggccatgaatcacctattccgaccgtatttgcgccgttttgtcacagtatttttcaacgatatactggtgtatagtagcagttcggcagagcacgtgggacatttgaggacggtattacagttgttacgatcccacagtttctatgctaaagcaagtaagtgccaattctttcaagagaccattgaatacttgggccatattgtttcggcagaaggagtaaaagctgatccggcaaagatagcagcaatggtggaatggccaattcctaaaacgctgaaacaactacgtggatttcttggtttgacgggatactatcgtcgtttcgtttcacagtatgctagtttggctgccccacttaccgaattgttgaagaaggataactttcaatggaacccgaaggccgcagctgcgtttgaaacactcaaaacaactatgatttccacttccgttttgcacttacctgatttctctaaaacttttattgtggagacagatgcttctaatgtgggtattggtggtgtactcatgcaggaaggccatcccttggcttatttcagcaagaaaatgggtcctaaatttgctagcacgtcagcctacagtaaggagatacgggctattgtagaagctgtcaacaagtggcgacaatacctgcttggccgacatttcattattagaacagaccataaaagccttcgagaattactcacacaagtggtccaaacacccgagcaacaacagttcctacacaaattaatggggttccaattctccattgaatacaagcgaggcactcaaaacaacgcggctgatgcattgtcacgtttaccagctgaaactcattcgtctttgcatcttgcaatgagcacgggctcttttgaatttttggaggaacttcgtcaagagaatataacttgcccagacttacgggagttacacaaccaacttcagcaggggattctagacaattcgatatattcggctcgggagggcttgttgtatcaccgtcatcgcctgctgctgagtagaaactctaacttaaagagtcagctacttaatgagttccattcatctagacttggtggtcacgcaggggttgacagaacgtacataagattaacgacaaattttttctggccgggcgttcgtcaagatgtcaagtcttttgtccgtgcttgtccgacatgtcaaacaattaaatattcgccgacagcaccttatggtctcttacagccacttccaattccggaacgtgtatgggaagacttatcaatggacttcattgtgggactgcctaattcagcggggttgacaaacattttagtggtggtggacagattcactaaatatgcacattttggggcacttccaaatcattattcagcaacaaaggtggctgaactattctctacaatggtaattaagttacatgggctaccaagaatgattgtttcggatcgcgatcccatcttcacaagtgagttttggcggaagttatttgagttcatgggcaccactctcaaaatgagttcggcttaccatcctcaaacggatgggcaaacggaggtcaccaaccggtacttggaacaatacttgagagcctttacagcggacaacacgaaacaatggagtaagtatctattgtgggcagagtatcattataatactagtcatcattcggctattgggatgacaccttttcaagcggtttatggtcgtataccgcccactatcccagcttatacaaggggagcaacgtccattcaggctgtggaagctgacttgttgaccagagatgacatattacagcatttaaaagaccacttagcgcgggcccaacaccgtatgcagcaacaagcagataaaaagaggaaggatattgaattcaaagctggtgaaatagtactggtcaagctccagccttatcgtcagtcgacggtggccaagcgactgaactccaagttatgccgtcgatatttcaggccttttcctgttgtaactcgtgtggggaatgttgcttacaagctgcagttgccacaagagagtcgcatccacccggtttttcatgtgtcc

SEQ ID NO: 2253 - DNA, 1068 bp, Cannabis sativa
tcaaaatcaaaatcaaaagtactttaaccggtaagtttaggtaaaaagtagataaaaataccatttagattcaaccatactacaagcttaacattccaagccacccccaatatacattacattactatctcaatcccttttctttttgaaacaaagatgagaaaactaattaatactcacattagtgaaacaactctaaacacaatttttttttctttgtttgaagatgttgtaactcaactcattcaacacattatttatattctctcaatttgtcttactttaattttttccacatatcacatctaaattatccaattacaatttttcctaaacttatgttataattaaggataagggaagacaataattgagtaatttttaacttaaaaaaatgtggaaaataaaaataaacaagtcaaagctccaaaagggtaaactagaaaaaaattatgaaatagtaggcttgaagtgcacaaacattccaaaaattgtctaaattatttttcaaagcacaagtcctcaaggagttctatccaatttaaattaacaaactcctaaccctagtcaagcatataaaaaatctaaaatattgcatttgcaaagtatattatcaatttttcataaactttgcaattaaactctaaaacagttttttagtttgtagtgcgggtgcggtttgggaaattagaaaaaccagatgtgcatgttggtttaaaaaaatagtcaaaaactgcaccacccgtaccacgaataaccttagttgtagcttccacccatttagatacatagtctacttctagaagaatgtattcatcattataagattgtggaaaaggccccacgaaatcaatgctccaaatattaaaaagtttcacttcaagaattctatgtataaaggcattttatttcttcttgagatattactagttcgttgacaacaatcacaagccttgacaaaaatattcgtatctttaaacaaagaaggcttgtagaaaccactttgcaatactttagttttcgtcctagaagcaccaaaatgcccaccacactgttgagtgtgacaat

SEQ ID NO: 2254 - DNA, 1158 bp, Cannabis sativa
tgtaacaaatggcttttatttcttttctacttaccaattgcgatagcatttgatgcacattgcgtgacagcaattgggcaagactattttggtgcaaggctccaagcaaattccacactcatcttctctttccatgtcaatattggcaagattaacttctgacttgacccttttcttcttggctgaaacctcaatgcttagacgcccttttttagcatcatccaaatcccccaagtcagcgtggagccgctgaagatatggcaatataacagctgaagttcagttttttttaatgaaacaatgtcagaatcacttcatcaaactaaacattatagatataaatgagaattttcagaaaaagaagataacttgacataccatagaagtctttaatactagcttttcttccatgtgctgatatttttggccttccatctgtatatacctgtttagcataaatacccaaaatcaatgacaatccaactttctagaaacagtcaatatgatataccaacaagttattaaagagactgaactaaccttgtaaacaagaatgtggtaaaaatttagatatcttggcaataaacatgtgcaagagcaatctagccattgtaacaaaaatagaaagaggggtgcccagttattatagaccaatttcatttgtagacatacaccacccttggctcttggaattgaagcagcactgtacataagacaaactaaaattcattaataacactacaacaaaaaaattcaaactagtatccatcttttcaattacagcaaagaagaatacttcaattgatgacccactaaagaaaaattacttttttccccctcttccactagaaaaggggaaagaaaggaatccaatttaagaatggtatgaatgaagtcctcaattgggtttctattctttcatgtaattttcacaaaacgaacagattttaagtaaacaaattactgattatcaaacaaacacgcaaatgggttgtctttttctttccttttttttcctctaaaaaaaaactgcttcaaaaagcagattatgatgctattaaaactgatcatgatcaaaaactgtagaaaagaaaaaacccacaagacaaaaatcaaagcagataagaaagcgaccaaaaaattaattttttttttttt

SEQ ID NO: 2255 - DNA, 1259 bp, Cannabis sativa
caaaagccttgtcatttcaaaagataaacagcatactttatcccatattttgcctaggacattgttcattccttcttcttgataggacccatctcggtctacccaatagtgaatatttccctcacaaggcacacctgccaactgcaatgaaaaccccaaaacgagatcattaatgcaatggctaaagatgttgataatccaatttaggcagcaatgatattttgtggatgaacgaccatacctgcagtattcggcgctctattttggtaatctctctattgtttatcataatattggtgttcccattgctagcatttttgttaatatgacccccaatgttaagctggggactaataatttggttatacactcgtccttgctgttccataaagacacgtaatgtgagcccatcacaacaatcaaaaactcagaaaacaggacaaatataccaaacaatttttttccttttcttttttccattctcacctttccccaaaagcctgacacattatcgtaccaataagaaccgggttttaactttcttggtgggtttgagcaactctgcaaccgaaccaactcttcttgactaagaggctcgccattaacaaagaccaaatttgaaggaagctgattggctttactcaacaactccgatttcattatctgctctacctctaaatcagtgagtaatctcttaagcaaccttgaacgctttcccagtgtccatcttcttgattcatcaatcctataaccaatacaggtaacgcattttcttccttcaggcattgaccccatagctctgagcacacaactggcacagtacttagctccacacacaatgcaaacctctttctcagtgaatcgattccctgtatggcatctataacaggacccctttttccctgttctcacggctacaggcctctgttccacagcctgaacctcaccatactcactccactctgtattctcaacgacgtcgttcgagtccggatcgcggaacgtcaccactgaaatccttctcacatggtgaggagtctcacctccgcagtcttcgtcttccgccttgtgagagaaaacctcagacgagagactccgcgagcttaaaccagattccgtcgattcccagttcgtggggttcatgtaatcctcaaaaccttcattagcttcctctccagcgccgagaatgtcatcggatatttgtaggttgccagaaaatctgagactactctctgttaaccttgggtctttgtttgagt

SEQ ID NO: 2256 - DNA, 1664 bp, Cannabis sativa
tttaaatattagagtgtaactattattgtggatgtccaaatataactcccatcaaattttggacaacacggagttgccaccatgtagaggccatgcttacgttgtttgccacgtcattctaatatctaatatcaaatagagtttttcagtcagcctacttttcagaaaatccactctcaatggcttcatcctcaccgtccgttcactcggctactgttatcgacggcaaatccatcgcccagacagtccgatccgaaatcgccgttgaagttcgtcaactctctgagcagtatggcaaggtctttttctatctctcaaaaatggcgtaattgcatagtaacaattacgaatctgaaaaaccttttattttgtggagaacaaacggaaaattgaaatttgggaattttcaatttctatgttttctttttcaggtaccgggacttgcagtggtaatagttgggaacaggaaagattcgcagagctatgtgggcatgaagaggaaagcttgcgctgaagttgggattaagtccttagatttggaccttcccgaggacgtttctcaaaccgaactcattgctaaggtccacgaactcaacgccaatccggatgtacacggttctaattcttacttaacctttttcttttccctcagaattctatattttgctaattcattattgatagattgaaatgggattgtatcaatttgagcgtaatgacatcacattatacagtgcaactaagctaaaatatgcttaaacacttattaatgttttttcttttcttgaaaatttctgttgattttgctgatctgaaggagaatgtagtttagtgccaataggagtaggaacatgttatttgacttggttttcgtttttgtatttatatatttaataaataaacaaagaagagaagaactaagctaaaaaaaagtggctggatttcaataagtgaagcagcagcatacgcaaagttaaagtgtgatgtgtgaaatgtgttgtttgattgattaggaaaagaagagggtggcaagatagtaaaaacaaaaagttgcttttttgtatatttgttttgttttatgtactgtttctgactgagaaaagctatggtggatctgttagactgttttaagtgtttgagagtagagtttgttgactgacaggaattctggttcagctcccactgcccaagcatataaatgaagagaaagtgttgagtgaaattagcattgagaaggatgtagatggctttcacccgctcaacattggcaagcttgcaatgaaaggcagagatcctctatttcttccttgtactcctaaggtgagacggttttcttgtactatgtgtatgttgccgtgtaacatgcttgtgcattttcttcacgtggaaatgtactttttgagagtctgaaagagcaagaaaccatcatgaatgcgtatttgtgaatgcatatacatctgctctgtaggaacaatccatgcttatttcttggtcattctatgcagggatgcattgagcttctctcacgaagtggtataactataaaaggtaagagggcagttgtggtgggtcgaagtaacatagtcgggttgcctgtttctttacttcttttgaaggaagatgcaactgttactgttgtccattcacgtactcctgagccagag

SEQ ID NO: 2257 - DNA, 1026 bp, Cannabis sativa
catgtccttcagggtaataatatcaaagaagtttattcttgatgttgtcattttttttcattagtcttctcaggcaatttactaaaattttccttttggattctgttgcatggttaacttggtggttctgaagagaaaccggctgcagcttgtaagtagtgtgtagtttttcggcttaagtagtatgcattgtcttcaatgattattagtcttaactcaaagttgctaacaatttggatttaaatacagctacaagccagcttgaagctgctattgcaggctataactcggtttgtgccaatatctcgagtaaacccatttgggctgtggcggaaaactatagattcgaacctgcttttgttgaggtatgtattattcctgctgaagtgacataccctctcatttttctagcctgaaagacactcatttttgcttacacagtgtaagaagctagtagctgatattggagatatgatgaatgtccaagtgattattgaaggatctatgaacagttcgaatccttacttctcaagctcttggaggcgcgattttactgtaagtgttcatacataatcttgttctctcgcaatcatgagtcccatgagatatttagtttgttgttcaatgcctacttttcccacttcagttgtactatttctattaaagattcaatgtctttgaggtgtgaattactacaattcctcatgaaagtgtaagggagttattggtacataatccttgatttcactgtctcttaagctaaccagttcatatatttttctatgacagggtggctttattctagacatgggggtgcattatatcgccgggttgaggatggtaatgttacgtttaaaagttcattattagtaaagggatagttgcggcatgactacccaaaatttacatttgtaaccggcatgtacccaataatttttttttagcagcaaaactacccaaagtttctaaaactgtaattttgtcactttgaaccgttaacttccgttagctagtgtctaggatgac

SEQ ID NO: 2258 - DNA, 1414 bp, Cannabis sativa
gaaggtacccttggtaggtattggcggtgttattgagttttgcattgacacctgcaaactcccatatggtattgcaacatctactggtgcgattagccatccagtatgagagacaacaacaactgattttatcttaagagagcggctctagctttcaaccagttctactatgcagaatgcacagtaattcaatccttgttgtaggcgccttccttgactagaagcctccttctatatagcattctcgctcatacaatcacccagtgctctcggaacaatgtttatcgtgccatcagttcactggacaaaacacaccaccgttcgatgcacacgtatgtgcttaagagttacattttttttttttactctcttcgaaggagaccattctactcgagaatctcttagtgagaaattcatcgtcatgtaaacttgagataacatttgttgtcggagaaatttcgataacactaaatctacgggagtaatcacttagaatagcgagtactcaaaaaaatagtaaaattatatgtgcgagtatgtaaataatataaaataaccatagaaaattatagtagttcaatagaatttcaatttgtctagtccacttttaaaagagtacttttactttgtctttttattctgatcaaccccatttgaatggaaatagattcacctatttataaagtagtaagtaaacattacgaattgtgaccatgagattgttacaatcataataaacctattaattgtactaactagagaggtataacagttataaaatttcagaatttatgacacttgaatgcttgaccgttatctttgttaatttttgttgataccataatttttacttaacattgcgaggtctctttttttttctaataccgcaagatctctttaacagaatccttctctcaaggggagaggaaatttatcccattgacaacacctaaattgtaacatgaaataggctacgagcctccaagttcaatattagccgaaggaaggagtctaaaattcaaagaccaatgtattggtatttctatcgatactcatttacacaagtaaaacgaattacaacaccaacaatcctcacttaatattaagaactatttttctatggcaaaatgggtaaattatatcatgtgtgacatatattaatttttagatttgttacctaagaaatatttttttttaatatcttctttagaaatgagtggagaaagaaaaaataaggatgtaaacggaaggagtaggaaagaaaatgcaattaaatgtgattgaaaatgttcatttttgagtgggaaaagttagataagaaagttgctttctgtcgtgggatggatcatgggaatagaaatttcaataaagatcataatagaaatagagaatgggctattgatttctcttcaat

SEQ ID NO: 2259 - DNA, 2728 bp, Cannabis sativa
ggggggggggggggggaatgcttttgtgagtatcaaatgcgatatgtccaaggcttacgatagattggaatggaatttcatccttaaggtccttcatgcctttggtttcaataatcacttctgcaatctggttagacattgtatttcttcagtcagtttccaagtgcttctcaatggaggtatcacaaagaagttcttcccaaagagaggggtcagacaaggcgatcccctttcgccgttgctttttattctttgtggggaggttctctcaagaatgcttcttgccaaagaaattgggggagagttgactggatatctgattggtggggatggacaagctctaactcacttaatgtatgccgatgacttagttgtcttcctcaaggcggatcgggaaaatgttgcctccttcatggaggttatgaataaatattgtaggtggtctggccaggctttaaatgagcgaaaatcaaaattgtttttctcgaaaaattgttttgcttctgtccgtgatgagatcttggattacttggggtttgatgaaatgtctagaggagagaaatttttgggcaatgcattcatcactggtggcaggggtacttcggagtttgagtttattgtagagaagattagctctcggctagaaggctggagagctaagctgctttctcaggtggctcgaactactttgattaagaatgtcctgacttcgattcctgtttataacatgtcagttttcttgcttcctcgcaagcttactgatcgaatcgatggtattttgcgtaggtggaaaggagacactaacaagggcagatttatggctctaaaagcttgggacaccttatgcaaaccgaagtcatgtggcggtttggggctgaggagatcggctgatattaatttttgcctgattgcgaagcttggatgggttatggcgggagagtcctggactctatggaaaactgttctgacagagaaatattgttcaagcttggattttctcaattcttctttacctagctctgcttcccttgtggctaaaggtatatgggctaccaaagcttttattgctgataagagtgtctgggcaataggaagagagtctcaagttaatatctggggagggaattggtcttctttggatggtctggtttgtggcccaagagatatcaacccgagacaattcgaatataagcctattggtgagcttatgcatcactcaggggaagcctgggatgaacaactgttaacagagtggttcaatcctgataaggtctcctttttggctagaacggatttcctgtctctttcgaatgaagataaactgttgtggaagtttgctgcagatggagattttagcattaaaagggcgtattgggatctaaacgagcatcgttttgtgagccgtgatctcacctgcagtaggatttggaagtttaaactccaagaaagagttaaactctttctctggaagctctatcaggatgctctgcctttcgagtgtaaattgagtgctattttcagatccactccggggaaatgtgtgttgtgtgatgaagattatggtgatacgattgaccactttatctctaattgcaatattataaggaggttgtggtttgctagtccatggaatatccgcatcgaagcgtttcatttgagtaatgggaaagaggtggtgaattggctctttaatcctcctctctctcattcggatttggaggaatttattctttatggtgctatcttgtactataaattgtggagctttaggaatgttatctttcataataacactccgattgcttttgaggaaattgagaatttgattgcgagatgtgttgaggaacatagggtgttgttgaaccagtacgtgggggcacatgaggcagatggtggtattaaggagactcgctggggcctaccgagacctgggagaatgaaatgcttcgtggattttgcatcagatggaatccaaggtgcggttgctgcggttatttttgatgctgaaggatcagttaggagctttggggccaagaagataggtgctgtaatggcgcttcagggggagatggaggctctgatttttggtgtcaatttggccaggcagttttctgaagtgggagttgatttcctctccgatagccttctccttgtgacaggtttgttggagggtcgaagtcctcactggagttttcgttttgcttttaataaattatgttctgagtttgatatttctaggcaatctgttgcttggatctctcgtgtttgtaatgacgcggctcacactctcgcaaggtgggggttgactcataattgtaatggtgctcttcgcttttgggaggtgagtccccatgtgctcaccaagtttttcagtttagcttaatgaatttctttttcagcaaaaaaaaaaccccacattcaataccaaaacgtatcgctatggccagaatggggaaagaaatctcaattggtgtgagactgagacaaattttaaattctcttccaatcttatctaattaattaattattgaaaaattttagtattggattaactttctttctactacttaagctatgcattatgcatataaccattaaaaaataaaaaataaatagttttttttggtaagaaaaaataaaaaatagtttaaacggcagtatttttttttttttttttggaacaattcaaacgtcaatagtttactgattgaaaatgtcatgaaaattg

SEQ ID NO: 2260 - DNA, 719 bp, Cannabis sativa
taccgaatttataacattgcttgatgtgaaaaagattagaacaattgttttgtcgggtcaatcaaggagtagatatggagggttacatgttaacagattttttgataaaatctgtagtcagtttaaatacttgagggcgctagacatgcatgattcggggattgaggttgtgtcagattctatcagcaagttgaagcttttggaatatctggatctttctgaaaatgaggacatcacagagcttcctaattctatcactctacttttgaatctgcaaacattgagactctcttcttgtttcaagctcaagagattgccggaagattttagtaatcttattaatttacaacatcttgagattgatgggtgtaataacttgaccaatcttcctagaggaatcagtaaagtacaggatcttgaggctttatcacaacttgtagtgagtgaaggctccttaatgcccaatgttgtggagaaaaaattgcaagaattgagcaaacttccaatcagaaacttgagacttgttttaagacatgaaaagcatgttattccttatttgcaggcagtaccacaaggaattcgatcgttgtcattagaaactgaaggttataatctggaatcagtatccgaggaggaaacacacatcaacaaaaaccttagttcagatcttgaagaattgtctataaatgcattcaagagccccaccctgttttgtccaa

SEQ ID NO: 2261 - DNA, 813 bp, Cannabis sativa
ttacttaaggtaatatgtttaatattcttcttgttaaaattgatcacaggtttatcctatgtacaaggcatttattgagccagatctgcaaacagcacatataaagatcatcaacaaatttaatcctttcagtggttttcagaatcccacttatattttaaaggttattctacatttgtccttgtccaggtcatttatcatcttccttttgttctataaatctccatgtatctatgttaactgcgaacttatttttctaactgaatctctgtatggctcctctatttgcagtcaactaaagttgtaactaatgatgaaatcaaggctgttatttctgtggatcacaaagaaattacagaggaaacatatgacatttttcttcttcctcctggtgaagatcctgaagcatgtcagtcgtatctgaggatgaggaacagagatggaaaatacaatctcatgtttgaggtggaccattgtagaataaactatcattaagctagtatcaagctctatatatagtgctcgttatgtactgcaatatatccatgcttttagatctatgcttttacttgaaatctgtctacgtcatccacaatttattcctgaagtgaatgatgtttttttttgttgctctttactgatttgagtcagtcctgaagttttgcgcttgactgctagttcttcctttctagccattttttctgctgatccaactttgctagagtttaaagtaggctaaaatttgacttcctctgttcttagctcttatatatgttcaagtatctctactttaagaacgtctgtacatgtcaa

SEQ ID NO: 2262 - DNA, 1733 bp, Cannabis sativa
atgatagcagctaaccccgcctcctcattcatccaagacgcatctgtcatcaaaattatattggccactcccgtcgatctctgaactaccctaaggttcgacatagcagactccacaaccccattagatctagaaaactccttataagaatcatctatctttttaagaagcagaggaaagaaccacttcctgcctttgaacagattgtcattcctgatactccacacattatggaataaacaccccatgtaatttataagagagtacctgtcacttgtagggaaaatagacaacaagttctctatatattccttcatactgttaccgggtatgttggtacaatataaaggaaaattccccagcagccacacatttcgcaccacgctgcactccctgaagatgtgcagacagctttccaaaccttaaccacaaagtagacattccttatctatagaaaatggcaatttatctcttgtaggaatggctccagtaagaactctccacataaacattgcatttctcgaatgcacctccgaattccatatctaagtccaaattgcactcttagtatcaaatctggaacattgatccgtgcaatacacacttttcactgagaagacaccatttaaattatttctccagaccacctgatcagggtgatgtgaagaaattctcggtatttcaaagatattttgacccatgtcttctccaaaaatttgaataactagctctctgttccaatcaccatcagtagaaatatcagcaattgaccttgcaataatcaatcgtctattcaatccctccattacatctcgaaactcagcatagttcaaccatggaatccacgattgagtccacatatcaaccgaatctttgctagctgccaccaccatagagccctgaatcactacactcctggcttccaaaagattcttccataaaaatgagtcactgcttttggttgacactgcccaaaagttttccctgttacaatatttgttcaacaaacactgaacccacagtttattttcagttcgacccaaagaccacaccagtttggtaagcaaagctttgttcatatcctcaaaacgacgtaaaccaagcccccagaagactttggttgacaaatcttatcccaagccctcaaggccaaaaaccgattcttttccatgtgacccaaccaccaatatcttctaactagagcatccgaatcccgacaaacagaaatcggaaccttattggtagacatgttataaacaggaagggaagctgccaccgatttgattaaaacaagcctccccgcatacgataaaagtttcattttccaccctgccaaccgctgctgcatattgtccttgagacgttggtagtcttcctttttccttctactaaagacaaaaggatttcctaaatgacgctcatctcccttgctctttgtaattcccaaggcagctaaagtgtcttccaatcgatcctttgacatattgctagaaaataaaacactagatttcattttactgcaacactgacctgaccaagtttcgtataatgtaagacaagataagagctcctttgcttccttaacattagctcttgtaaagaggatggcatcatctgcaaacatcaggtgagaaatagacggagcctctcttgaaattttaattccatggatccgcccttcctgttcagcacggagaataaggtttgataaaacttcttggcataagaggaaa

SEQ ID NO: 2263 - DNA, 1391 bp, Cannabis sativa
ctggagtcagggacagggatttgggtagcagtttcaaaacttaattgcatgcagatacaatccttgttatatatacacaaatagattaccgtattgatgctaaagaaaatagagaaaaatttaatgttgctcgtcagtggaaaacataggaagggctaaattctttgatataaattaatgtatcctcactcagttacagtgttcccaatgaaaagggaaacatgaaaggataacccttaatacttcaacatctgcattgttggattatattcttaaattatcatatcaatctaatgctggggattttgaagtttggcattgaaaattgcttgcatctggatacccctttttgagtatacttttcaataaggtcactagttgatgccaaagaatcgcaaagtggtattgctcctgttttaaagctcaagcatggaaagtacttaatgctttgcaacatattcaatgctatgccaatccccttgggaaatttcccagtccatggagtttttttgatgtaaatcaatgtctcctcactcatttccactattcccaacaataaaaaaaagtaaagaaacatgaaaagataatcctcaatactccaacaagtgcattgttgggttatattactaaatcatcataccattctaatgttggggattttgaaggtcgacactgaaagttgcttgcatctggataccccttattgaaaatacttttcaataaggtcactaattgatgccaaagtagaagagcaaagttggtactactcttgtttgaagcacaatatgggaaatactaaatgctttgcaacatatttaatgctatgccgaccctctgggaaatttcccaatattccacaccatcattccagtccatggagttccaaacaaggaaataaaatttccattcaaagtccttggaattccagcctgtaggaaataaaatctaagtcattatcatgttcacttgttgattactcttttttaaatatttgtttcaagatcattttcaaaatatattgggagtttatattgtgagggtgtgccttttgcccctattataggagcatctttgttttggcacatggtgaaattaacttttttattttgtttatatgacagcatatatagtagttagttatttaagatctcggtcagttttttgtgaaattctggataatttaatgtgccaaaacataaacaagcttcaaaacaatttatcactcatataaaacaagtttcacaacattttcttttgttttttcagtgccatacagaatttctcaaatttttatggtaagttctaaatatctatattattgtatatcatcatataaaaaaaattaagattgtaattcattcatgtgctgaataaactaaatagattgtttt

SEQ ID NO: 2264 - DNA, 2138 bp, Cannabis sativa
cgaggaatatgtgagtatcccaaattgcactgattcggttgcaacaaaagcactcatgcaaggattactgcaccactcagaattaaagaaagcgataatagtagaaccaggtctttccttaaccagagctttgaccatggcacgaggatatgtgacacaagaagtcaaagaaagtcaacatgcagaggaggtgtggaggtaaacttcgatgctagtaaattattttctttttaaagaaaaggattgagtgtcgttagcatgatcacatcacagaaacaaggcctggtaggtcaacaacaaaaacaaaagaggagtcataatgacacacatggctcagacaaggcaacgtgggaactagcggagcgaagaggagccaccttggatgaccatcacgctgaccgagctgatgaggcgactaaggggaatgaaagaaacaaggtggcccgcaaaaatgactaccgacccagagaagagggataaaagtcgatattgtgccttccacggggaacacagccatgcaacttatgaatgcaggcagttaaagattgaggtaaatatgttagttaaggagggatttttttgagattatttggccttggattcaacactgcatgtccaacaagggcatgacaagagtgaagatcaatccccttcactatacatcaaaaaaactataaatgtgatttttggaaggtcagacctaagcagaacttccatctgagctttagtggctcattcccgccagatgcactctgttagggcaatgacggtgatagacaacgagggacctgatgtacagataatgtttaaccaaggggaggcctagcaattggaacacccacatgacgatggcttgattatcaccctagacgtggcccacgttcgtatgaagcgaatgctccttgaaggaaaaggaaattgaggatttaaagacccaagaaacgcaagtcactttggtaagattctcaggggaaagcaccgttgcccgaagttttgtctaattactcgtttatgccaataggatgaaaaagtcgatgaaatttctgattgtagactacccgtcagcctacaatgctatcttgggttggccatggatccacgctatgaaggaggttgcatcctcttatcatcaggtaattaagtttccatgcaaaggcgaagtaagtgaaatctggggggaccacttgggtgcccgggagtgttacacctcatcactgagttgtaagaacaagttatagaaattaattagctcctcatccctcgccaaaaagtagcccccaacagtcgaggagttataagaagtgtccatccacccgacagatccatccaagactacctacattggcatgggactcacaagacaacgaaaggatcaaattgtgaagctactgagagattattttcaagtttttgcatgggaacatttggccatgccgagattagatcctagagtaataactcgcaagctgaatatgaacccaaactatattccagtcaaacaagagaggaggaagatgggagtagatcggaataaagctgtaaacgacaaggtcgagaaaatgctaaaaaaatgatactgttatggaggtacaataccctacttggcttgccaacccagtggtggtcccaaaaaagaatggaaaatggagagtttgcatagaatttattgacgtgaaaaaagactgcccaaaggatagcttcccgctaccccacattgatttgataatcgacgccaccgccagacatgagctgatgagcttcatcgatgctttctcagggtataacaagataatgatgcaccctcccgacacggaaaagacatccttcatcattgagagaggaacgtactgttacaaggtaatacccttcgggcttaagaatgctggggcgacctatcagcgaattgtgaacaaaatgttctctcagcagctgggtctaaccatgaaggcctacatcaacgacatgttagtaacatacaaggatgggtcggaccacatcgaccatctgcgagaatgtttccaaatcctccttgtccattcaatgagactcaatctggacaagtgcgctttcgccattagctcagggaagttcttgggccacctagtaactcaacgaggagtgtaagtaaacccagaaca

SEQ ID NO: 2265 - DNA, 1883 bp, Cannabis sativa
aaaggtttgttgctgcttaccggatgaaggtgcccccgggaggcagtactttcagaagaggtaataggccattttgtgtgttttgtaccccccagcctctgtcacatgtcttggagggaccaaaggggattgatagttactttttaagtttagacaatcttaagtaccccatgaaaacatatattgatagggtaaatgagatctttaggagtttaagtaacctaaagtcatctccaaatatagttagaatggatcctttcttgactatgtccttcccaaacttcagagagtacgattgcttcattggtcgggaggacattagcttctttgcttagggggaaccatttgactgctcactgaatggttgcacccatgataaaacctttagctcatgttgtcacatgttaataattgtttagttgtgctattggatgtttgctaattgtgtcgttgattgtcgtgttgtagaaactccaaaatcgaagatgatgaagtcagtgatggataggatcgctaagatagagggagacaaagggaaagggaaggccaaagctagggccaacaagtctcgcaagcccatgcttcccaattccacttcttcttcagggacttatggagcacctcctccagcaaaggcttcaggtgttgaagctcctgttggggtagagaaaacccaggttacaactagggaggcctcttgggacctagtagtttccgtagcgatgaggcacaagtggttcaaacccaacagccagctccgacaaaggctttatccgtgatagccgttgaggagacaacccaaggggttctagagattgttaccgtgtctaatgacagcttagacggtctagtatttccaaagaaggttgctactgtagtcgttaaatgtcccagccttcctccttcaatttgagagggaggccaagaaagctagactagcttcgaagaggcagcggtccccaagaagagagggagatctgtggggatctgatttagtccaattaggggggaaacttgccttgtgactatttaaagcggtacttctcttttcatgtcacatatcttcaattcaaaaatatggataatatttatatattactttctcctgccgtaattgatttttatcattgagttcttaatattattttagttttgattcatattatttgagtcattttgatcttttatttctcttgaatatcaaaactgcattataacaatttttgttttttttttctttttagacatagaagtagatatcttcatatacatacccaatgagccaagacacttttttttatgaatcatattatgttatattccaccaaatattttacaacatccaaccatattacaagcccaacaaccccgaatttacatgcacaacaatccctcaaaaaaactggccagtaatccaatgatcaatccccaacaaaaaaaaaaatgtgagactcaaatcactctacatccacttgaactattttcccttttctaacatttacaattttatttttaacaatgaatttaattctttgtacacacctgtagtttgcattttttgattccatatgcagtcatttctattgctccaaatctggtaaaccagtctcatggcatagctgagaaaactttcttcctaaactttgacatcttacttcttgagatccatcttaaaagctttttcaatgaatatgtaactctttaagttgatcaagacatttcttgttaaaatcacattcaaagaatatgtgatccacctattcagggctatcatcgcagagaaggtaagtttcttcattacaaattctatatataactcatcaacctattttttgtttagagacagttgagaacagccaagccaagacactttctatttaagt

SEQ ID NO: 2266 - DNA, 1792 bp, Cannabis sativa
agaattaattacctatgttctaatgcagaatttctaacattttgataaatatattccttgtattcacggtaaacacgtctgagttcgcgtacatcgctagtttccttcctcttcataagtgtagttatctcatcctattaattaataccaataatgacattaacattatgagtcataattcagaaattgtcatagaactgataacaattgttctgatattctgagatcaataagtaaatttccattactatatgtactagaactttgcacatgtgtaaaaatacaggggaaaaaacagagtattttaccgactcaaggcgcttgagaagagaagttttgaattgtcgaacacctcttccacttgaatttttgtccatgttatgtgctatttcaaaggcatgtacacggcctgttcaaaaaaattgaagaacatgaatactccaccatggattttgtcttgtactttaagtacatcaaggatacgaatgcagacgcagtaatatcccttgaacataatatacattgcttggtccccaagaaaatttaagctaatgaaacatattataataagcttataaattcttactctctaaaacagaaaggcagaggaaagcccacgttgaaaattgaaattcttactaatttgttcgttaattatcttgttctaatataaattattatattgctctaaaaataataaggaaaaacacaaatcacagttagaatatcatgcatactcatgggttaacaattaaagcttgtaactaatcaaaagtaacaacaagcaagcaagctaaacctcacaacttttaaacaattaaataaaacaaacccagtacttcactaaatcccacaaacttacataaaaaagcaatacgtggctcctcaatttcaaccaagttggccacacgaaggaatctctggatttcagtagccaaagtaggaggcaacctctcactctcaaatggctcaggaacactgttttggtcatcaatgggagaactaatagtaattgaactggagctgggtccggcttcatcttgttcgcagtcatagaaaatggggtcagcaacaacaatctcatggtgagccatttgtgaagtgagctcgaaagggttgttagtggaaatgagagagggtacttataaggaaacataattgatatagatgggattccagagtatatagagtggatcttctcttggtaagtatagctttgttgtttgcttaacgtggtcagctttcgagttacgtggaatgcttttctttatttctttttgggtttttggagcctttttggtcgattataaagaaggtcttcctcatttttttttttaatttttaatttttctctttcttttttgcttttgcttttttaattggagctctgttttgggttctgcttttctatctttctttccctatgaactgttaatgaaggtgaagaagaagaagaaatcaatgtgtattggagaagaattttctttgagatcgcgtacgtgaagaagaatgagtttatttttagagtaaataatattgaaaaaatagggtggtttttgctcccaacgaagccatgcaaatgcaactctccccaacgtgtgagaaaacaattattatatgttttttttttctttcttttattccttattattacttatctgaagttgtcacttgtatcgatcccacactgttcttttcttctttttctttttgttatattataatatatttatgtttctgtgtaaaaatatatctattaataataataaaccaattacctaattaccttatt

SEQ ID NO: 2267 - DNA, 1250 bp, Cannabis sativa
attgaggagaccaagtattgtcaagacaaaaacatcactattgtatagttaagacaattataacgcctgacactatgtaataacagagtaataggcgtttatggataagatgagtctcattaaatttgtttttagattaattaattaatttaaaagataaatatttatttaaatttaaaaaatagagatataatagagatatttaatataatagagatatcttctccaagtaaatgagatatttcctcaagtagctgtaaatatagttgtacttatatatattatgttagttgtgtatttttattttatttttgatatcataatatgtatacatttgatcaggtaacacaaaatcctaataaaattattataacctaaaaatatattaattgattttgaaatgtaagagcacccacaacaactcatgtaaaatagctataaagctaagaatataattaaataattaaaaaatatttaaaataatacatataataaatgtgctattatatctaaaaaaaatttatcttataggtaatgtttggctaaatgtaactacaatacttttgagttttagtgcataagtcattattatctttatagtttacttttgagtgttgaattaaatatataaaagatagtatatgatatttcattatttgtgtatcataaatatacactatttaaatgatattgaaaaaaatataaagaatatatagagtaatgtaaatttgtgtgataaaatatacatataaaaaaaaaattggtaaaatattttaaagaataaataaaataaagaagttgataagatttttcaagtaacttcaactacaacttttaaccaataatgaaaagattacgattagagagaataaaataaagagaaaaaatttaaaagaagacaagggtatgatagagaaattacttgaattattttaatatttgagttaattagatttaaacattatgcaaaatcagtatcctaaaataaaaagataattctcaaagttaggatcccttaaagagtataactctttatattttcatgtaacacataaattgtctatttatttttcttttctaaattaacaataataatgcagaaaaaaattgaatttttttttttttatgtcttcaatcaatttttacaattattttttatttataaacttataatcaacttttatatatgcaggtggcattaaaattatcaattacaatagacttttaaaaaaatattttaggcacataca

SEQ ID NO: 2268 - DNA, 594 bp, Cannabis sativa
ctgaataggaggtgttcgtggagtgggggcaactgagatggctcggttctggcgataaggagttatgggacttacagtaggcttgttggaccgaacaggttgccccgacggaaacaactggtgcccatcctcaatcctttgggctgtgtccataatttgggccaatcccacgggttgtaggatgtgtaatgaccctttgatgttgtctttgagccctttaacaaaactcccttccagtatatgctccggtacccccggtaccctcgacgccagggcctcccatcgtaggcggtaatcccgaacagtggtcgtttgtgctacaaataagaattcctccgaaaatgatccaaccggagccgctcggaatcggtgcaacattaattgcttcaatgttgcccaagaggtgatcggccttcgctggttctcccattgaaaccaggtaagagcatctccttccaacccgacaatggccgcctccaacattagtggctccgtgagacgggatatgagaaaataacgctctgcccgatatacccatccttcgggattatccccagaaaacagtggcagctccattcgagggggacggtagtc

SEQ ID NO: 2269 - DNA, 3002 bp, Cannabis sativa
tgctttcaagcttcaagacgaattgagatagagatggagagatcaacaatgtagtctctgattatatttataacggtctcataataacaaaacacaaggatgagattgagaaaataaaatgaaaaagagaaaagatttttcaaattataaaaatagaaaatatttagaagtgttttaaaaataaataaaaaaaaagatgtataatcgttaaaaacttagttttgtaacacatcgaaattttcattgtagttaattatctgaaatttaacaaaaaaatttaaaagatactgtgtaaaagagagaaattcaaaacaaaaagtttttttctataaatatatattcttcatatttaaaattaagtatatgtatattcaggtggctagagcattggattgcgaaggagaaatgtctgatctgtctaatggagtaaagtatggacaaagcactatatacgagtcaggacaatacaaccaagacattatgaggtttagaaaaatggcacttggtggtggagacagttcagaatatgacacatacagtggagagtttaactctaaagaattttctggtcaacaaaagtcaacatggagagatgggtccagtggagagtctgaaactagagccttcactgaacaaagatatagtgctccaccaaccaactttggcaaccgtcagtactaaatagttattcaaatttaccacattatttttaatgatttgatttatatcattttgtcactttaatctttttttttttgggtacataactcttttgaagaagtttggttgcccataaaatattatacatgcatacatgcatgatgcatatttgagagaaagtattgccacatatggactaatctgacctattaattgtaaagctttttgtttttgctttaatgttattcttattgtcatctattgttattctgtgttggagaaacttgtaaatgctaggcattcttaagggacacctaatactctattttgttcaagcactttctctaacctgttagctcaatcattgaatatatcatatcaattttgaaataaattattattatttaaacaaaaagaaatagattcaaatcaatgagataaaatggaattattatatctctgtttttctttcaattaaaataaaacaaaaattatcagattcttgttaggtctcataaaaatattgtaagccagttttagagaatatcatttagtaaattcacattagcatcttataataatgtctttttactaaacatttatgttatttcaatatctttgtggttcacgaaaacatttcgttaacaattgatacttacatagcaagtttagtttcaatctaaaaatacacaagtgaacttcaaaagaccatatatatgtaaaagaaaattaagaataataaaataaaaaagaataaaagacaaggattttgagatattaatccagccagctaatcctaaagagttgatcaatatggtgcatatatatatatgatttatgggcccatgtgccctccatgaccatgaccatgaccatggtacttcacttccccatgttcgtacggcttgtggcctctgctactgtctctgttaccattttgttttccatggtttggatttttcttatcgaacccaaactcgaaatccccatctttggaccgagtgctacggttcccaaacgtttcaacataaccttctctgggcccaagtgcaggcccaggcccaggcccatagctattcttcataaactcagtctctccttgtttgggctgaaaatgtggattcccaaactcgggatctctgtctccatctttggacctaaagctacggtttccgaacgattcgacgtatccttctttgggcccaaagctacttttaccaaactcaatatcaccttgtttgggctgaaaatgtggatctccatctttgggctgaaagttccgattcctggagtcaggctccccacctttgggccgagacttttgagacttatggggctttgttgggctatgtttatgggctttacgattgcaaagcctgccaagacagcaagcaatacctgatatgacaacaatcacggctaagacaatgaagactgtcccaaatgacccacttgaatggtgagtggactcaggcacaggttgctttgtgactggataaaccaaaactggttgttgttgttgttgttgaggctgaggaacttgctgcacttggggttgcaaagtggccatcttttgagaattgggttttgggatttggagaagagaggataagggattttggtttagtactagtggttttgggggttggttctttgagtgagaacaaagggagacttgggtttactcatggaacaagcaagacttatttccttgtaagaagtggttatgtataatggaattgaggtgtttaaattatattgggtatttgtgaaaattaaaaataaaaaacaaaagaattactttagttaagtttctttattaaagagagacaactaaagatattccttgtgttttattcactgcggaaggagcttctgctaattagattgctttgtatggagagaaagtgacattttggagcctttagacaacactaatattccctaaaagccattaaagagttgcatttgttgacagataatctcattctcattataataagtgcatattaatatattgcactagtgcatactgtaatgcatatacgaattatggatgattagtattatcttgtggccaatatcttggcaaactattatattagaacccattaagaagataaaaatactaataaataaataaatatttataatttataaatatgtaatagaatcttttaaagcttaaatcaaagaaacaaagtttggggaagttcttaaagcaaacgatcgcttcacttaatccgtttaaaaccaattatcccttggtttcaactttcaatagtgtaataactttaattatagtaataaatttgaagtgtgtacaactcacctaagtcatt

SEQ ID NO: 2270 - DNA, 3046 bp, Cannabis sativa
tttgattagcctctatttctgtagccttgcagtataaatagctatcatcagcgaataacatgtgagaaatcctcggagcaccattagcaactttacaaccatgaagccactctctttgttcatacttgcgaagcaatgaaaagagaccctcagcacagagaataaaaagatatgtgaaagaggatccccttggcggatccctattgagggagtaatcggtccaacttcatgatttccatgaagaaccttgtacctcaccgatgtaacacatttcaaaaccagtcaaacccagctttcgtagcatcgcttcaagaaaaggccattaactctatcgtatgccttgctcatatcgagcttgagatccatgtaaccttccttacatttgcgttttcttttaaagtaatgaagaatttcaaacgaaaccaaaacattattagaaattaaacgacctgagataaacgcactttgattttctgaaatgatggaatcaataaacggcttcatcctattaaccatggcctttgtgataatcttgtacatgacattacaaagggcaattggacgaagatcgaacataagctctgaattctttttctttgggataagcatgacattggcctcactccaaccatcctccaaagtgcactaatcaaagaaataaagaacacattgcacaaacattgtgtcgcactatagagcaacaccattggtaaaaaagttagggtcattccatttggacccgagcttttatcaggatgcatctaaaataaggctttcttgaattcttcttcatcaatgggttgggataattccatgttaacactgtcaggcactaccttagtaacacaatcaatcacctcagtgcaacaagtgtttgcagaaacaaacaaaccatggaaatactcggacacaacatcacataatcctgattcccaaattacccaattgtcgtgatcatccttcaactgctcaatctgattgttcttttttctactacttgttgccttatgaagtaactactgttttggtcaccttcgtgcaaccaaaattgttttgctctctatttccagtagctctctctctgatcaagggccttgaatagctttttcttgacctcattgtaacattgaaccgaggtcacatcccgttttccatggagaacctttaactcctttttgtactcttttatacggtgattaagcgtaccagttatctcttttccccactccttgagtttttcagcacacaaactcaacttatcaccaaagttattagcttgaccattttcccaacaatctttctatatgtcaatacataacggttccttcaaccaggtattttcaaagcgaaaacgaagatttggagaaaaattattacaaaccatgggttcaagataaataggcgaatggtttgaagttgaaaaatctaaatttaaaagagtagctgaaggaaagacatgcagccaagataaagtgaccagagctctatccaaacgaatttcaatccagtgattcgtgcctcttcctttctcccacgtgaacggatgtccttgcaactctaaaccagtcaaaccacactgctttaaaacaccattaaagcccgtgagtagtcgctgtgggtatggtcgacccccctcttatcctcctatctgactatattgttcacgcctctgcttacacaccacgataactccgaacaagaaaaaagtacgaatcagattctatgtgtcccgccttctattatgatttggatccccgtatagacccgtaagtctccaattaccaaactgagttgagttaattacaaggtctatatgatgattagagtagcccaacaaaataacatcctctgtatttttccataaaagagcaagcccaccagccaaacccattgcatccacagtaaacgcaacctcaaagcccaaaagtctatcaaacccatcaacttttgctttttgatatttttgacatttgtcatgcatatctaaataaaccatacactttaattatttttgacagttgtccagccttgaggaagttgtaagctatccgatctagctcagccaggttgtaggctgtctgaccttgcacaggtagggtgctcaaccttctgtaggcaagctataggctatttgaccttgcgcaggtaggctacctgaccttttacaggcaggctataggttgtccgacctactagtcatcctaccagggtcttgtcaatacttgtgtatctttatctttgtcaatcttaaatccattcagatgtgcttgttatcctcacttgttcccttataacagacacaaaatggagtacatgtctcaaatgttccttttttctggggtattcctcaattcataaaggaaatttatgtgaaaaaaagatggtcgactgtatatagctcaaaatgttgtgtttgatgagcactcatttcctgcgttgacttcaacacctccacaacaggtacactatgtatcacatttacattttactactgcaactttttctacttctaagtgtcaacaatagcacactaatgctcattttatgcctgttgtttctaagaaaactataccctcacatttggccacttcacctaggaccaatcccattatatctaccattcctactccatccatatcccttcatatatctccatcttaacctcctgctactgtcacatcaccacaccaattgacctcagtttacaaccctcttcttcctaagttaattcactcccacactctcccctaatacagatacctatacctaatgtttcagagcatgctacctccactcaaccacaatttgtattacctcaaccctcccataaccagtctacacaagagacaacattacctgtcccgggcacaagtaaacatggcatggaaacaaggtcacaaagtggcataacaaagccaaaattttacttggcaactaggtatcctttacttgaatctatcttgcatactgaaccaaaatctttcaatgcggcaatggctaaatcctcactagaatggtgctatgaacaaagaaatcattgcccttg

SEQ ID NO: 2271 - DNA, 766 bp, Cannabis sativa
gcttaggtcaaaacaatggcgggaaatcataaaaggggttgacgctgttgctgtggttttgggctgcaaacttggtttctgctaatcattcattcatgatcctacccaactgttcgttagagaatccagtgctttgctcggtgactttgatctcatttctcattgaatatacaattggattggcctctttgcttcgtttcctggttttttagaatatcaggcaaaaggaaaagaggcctgtaaatttgagaggatttcattccctccggaaatttgttggtcttcttccccgcttccccttatttttattgacctcatttgtgctgctgatgtagatggaaatgttaccggctagccagggacttgtattagtcttttgtcaccatgaaggcaaaaaagggaaaaaaaaaagtataaaaaaaaggatgtggtaaaattgtttggggaaggaagaacattgaaccattgaaattattgtgttatgctcacttgttaacctgtaattggcttttggttatatttcacctttttttttgcagttcaatcctttcgaagatggcttattattaagtgtgggcaaggtgagatgctattaatgaagggcaatgttttaggcattagaaaactagagtgttaaatggatggattctagtattaattaattcttttccctaatgaaactaatataagataatgaaattcttaacaaaataaatcgatctgggatgattctatgttggacttttatttctttctttctttcttt

SEQ ID NO: 2272 - DNA, 3413 bp, Cannabis sativa
gtgtgacacttttaacatttcttatatagatataatagttaacataatgcatgttataatacttacatatatataaatacatgggtgcaggttattaaaatttatagaataaaatttaaattaactctcctatcataggacaaataattaaatgcctccagtgaataatttgctcagtcatgtttttacttttattctgtttgcattgcatgtcttcacatacatatatatttatataaaagctacctctttctcaccctctctctttattttctttttattttttatttttttggtgaaaaagaaaaaggaaaaatcagctttttccatgaaaaacttttctgagtacaaaaaagtcttcatagcaataagaaagaaagcatagggagagagagagaaaataattatctactctatttgtcttagctctccaataatacagttaatatatatacacacatatatgtatatattggtacatgagtacagaagtgcagtcacgaggggaaactcttttaatttttagagagagagagagagagagagagtagttataataattgttctttacaaaataaaaattgttacagaagagaacaacaacatataaaacaatccaaatgatgatgaataataatgatgttgccccccctcctctcatctgctactactgatcaaatatttattctcatccaaaataatactattcaaattaataatatttgtttttctttatatatataacttattacaacatttattttttattttttatttttttatttttctcccactaaaaataatatttttttatatatatattttttttgatttaagcgtttacaacatattttacttgaaattcgaacctaggacctccaacactcacacacccacctatggccacttgagctagccccaagtgattatatatttatatattctatctagctaaaaatttattagtaatttaacttatatttattttaaaatatttagggcaaaattacttaatatttacaattattacataaataactctaataaaaagatagcaataaaagtattttattttataattttgttattttttttttaattattaagtatcagtaaaaaatacatgataatatatttttttaatttatttaatacgtagttcaataatatattgtcaggtatttctgacttgacatttaataacaaaaaaaaagtacaaatacaacaaaattataaaataaaatacttttactactattttttttattaaaattatatatgtaataattataaatattaaaaaaaaaattacggcacatatatatttatttttatatttaattcatgtcaaacaattttactcaataattagtaatacaattctattagcttagctcaaggaccaacaccaaccatatattataaaactttaatttatatatatttattacatagtatttagtgttggaaaaatccttatatctagctacaagaagaattaataaataaaataaataaactaattaagttcttcagtctgcagcctcttgcacaaaggggataatgaaataagctttgaaaaacagcctatttttctacttaataagttttagggaaaagctcaggagggatagacaaggaaggagaagttgagttggttggaaatcgggagaaaatataacacaactttatatcaacatatgttaatataaagcgtgttatgggagaataaagaaagaaagaaaactggagacggggtcttacaaggtcaagaaaaggtcttacaaggtcaagaagattcaaaacgaggaaagaaaaagaaaacaatagattgaacgaagaaagagtagaaagaagctcaggtaggatagcaccagattaagattaagatgtaatcaaattaatggaattaataacactaatctcacttccaattccaaatcggttgtacccagatgggatttgatgatcatgatctgtctctaggattctgaacataatcatcatatcactgtcttgatgatctgcacaaaaaaagtggtgattataattaataaattattgaaatattattattaaaatgaaaataataagtactatatatataccaaatactagtgagaattattatgaggttaaaggagaataagtacaatacatccaaaaaatttgtgactagaaaaagaaatttacttcaaaaatagtaaaagtaaaagtttgagagtaagatatggtgtaatacagttgcctaaatatacatattatcagttatggtacggtacaaagattttgccatgaaaatgttaaaaatatcatcatcatcatcatcatcatcatcatatgaagaaatatatatatatatatatatacctctgagaagggtgtgtgtttttctgatcctccaaagtttttctggctcctccattctaagttagtgtttttttctttttgggttttagagaaagaaagaaaaaaatggtggaaaaagtggtgtgaggggcgaggtatatatggagttacagaggcagtgggcttgtcctgatggacctgacaatgacagcttcaaggcccagaaagaagaataaatgtaaaacggacccgatgacgtcacctcacgcccgctgcccgaccctaaatcacactctccgtacgatcaattacctataactgtatctctacgcgtggcgctatcagggccgttcgtcaattggcaactcagatttctttctttctttcctgcccacatctctatttgtaatatgaagtgttatgaaattttgaactgagttgaaaaataaattaaattttaataatttgtttaaattttttaaaaataactagaacgtacatatgtatattagtgcatcttatataacattttttttttttctaacaaaccttcatagacattttattttataggattaattaaacaacctaataataatattcaaaatatatataccaaaagatccttttttttgataggatgtggagaattattattttgactattcttcgtgacaaagaaatatcatgaagatcgattactttaaagtgaagcaatagtatatatatatatatatatagatagtaggcgaagatatattgatagcttggtaggcacctaaggtttacacgtaaatatatgtaagagttttaaaaatatagacaaaaataattaagtatatttaattattataatattatagtttgtattaataatatattaatttataacctaaggtgtttttgtttgcatggaatatatataaatatataatgaaaatgtgtttgaatagagtaggtagcacttcaaggcgtatagaaggccggagttggggaacaaagaatctaggaaagtgtaggtataatataaaatatatatctttaacatcttaaatcaaatcacc

SEQ ID NO: 2273 - DNA, 1348 bp, Cannabis sativa
caggaattagctgcgtctttgcaaactgatattcctgccatgatcaatgcgctcattaacatgggtttagaagctagtgtaaacatggaagacctcactggcaaagaaggtattcctagttaaagctcctgaggcaaatcatgattaaagctctcttcattggtcatccatagaagaaacatgcactaaaggtgtaccatcccccatcagagccccttcggagcataagaaatttttctttattactcttttggataaaatacattccattcatcaaattttggtttttgtcttctaatttttgatacgtttacaatgtacaaatctgcatgtagaatggagggattaatggggggtataataatagaccctaattgtcattttggttggtttgccatttaaacgtgaactgaaatgaagattgattcgggattaagctaaaagatgaaagctatttcttgtttgtaacatgtcattaatgaacatatgtatatgtatggtaagctctctttctccccattctcttatttgagtaaaattaaggtatcttgatggtattatgtctcattatttcaaaaaaaatgaaactaagatctccacctctacaatttagggatgatggtatccaaaagggactcgaacttaagattttggagtaaaccatgtacttgactatttgagttactttctttttagcgtgatggcatagcgtatttgtggtagttgtactttccacataaccaattcaaccgttttaactaataactgattcttggttaattttttatgtcgaacaactggtttctagttgttgagacaccggcttcgtttgttacaatatggcctattttctaggtagttagacacctatatgggctgtctgtccctatttaattagagctcttaagtcattttcgaggtgaagtcttagaagcttttagaagatttgaagttaggattaggttttaggaaacacattgagatattctgtaaggatagcaagtgagagagagaagtgttgtgagtttgtcttgaagatcaagaactcgagttgtagcaagtgatagagagaagagttcttgctcgaatgaatctctgtattgagtgtttattgctcaattactctcgagcctttgattgtaacatacatgattttatagtgaaacctcaaggaggaattgaagtatatgctaatttggttgctgagtgttagcattatttcgttttttctagtttaaattgttttcttactgatttaattgtgatcaaattgctttgagttgggctgtagaactacaatagtattatttagagatcttgagattagaaacctttttttttttttttt

SEQ ID NO: 2274 - DNA, 2096 bp, Cannabis sativa
ggccaagctatgcaaacctaaaaaatcgggtggaattggctttatgaacatccatgaatggaaccgagctgctgtaatcaaaaatgtttggtcacttgcaacataaaaaagataatctatgggtcaagtgggtgcacaatgtgtacattaaaaatgaagattggtggggttacaaagccccaatacaaagtagctggtattggagaaaactagttgagctcaaagatgaagtgagacatgtaatggacccgatacaattcacatcagaaaaatgtcagatttcctgtgtttacaagctgctcaccacgtcccaagaacactatcactggtgcaaagaagtctggtccaggttaaaccctccaaagcatagttttatactatggattgctgttcaaaacaggttaaaaaccagggaaaagctgtacagattcaacattgcagaagaaccgaattgtattttctgcaatggacctgaagaaacagtttctcatgtgtttttgaatgccctttatctcaaatctgtcttaaccagattaaaagctggcttggatggaaagctacagcagtaactttgcatgggattctcaagtggataaataggtccaagaaaagcaagttcaaaaagaaaatactagctgctgctattgcagctttggttaaccaaatctggaaagcaaggaataacaagatctggaaaacaagcattgtgagtccgagtgtgattgttcaagaaacgaaatggcaagtcaaaacaagggtaacatgtgttatgcctaagcaagttgctcaaatagacaaagattggtttgatttattgtaattaggctctattagctttatttttcttgtatagagcatacacaggccttattagaaaaggtgctataagatgtattaattgattgtagaagtaatgaaatctctgattcatcgaaaaaaagaaaaaaaaaagtcgctgcctaggttatattgaaaacagagagaacaaccgccaaggacaagtgggaaattctacccatcatactctatttctaacagagagaataattcccaaagaagaatgcaaaatgtactgcaatggcctcttgagacatttccctctggcagcaggaaatagtctggatataccacaaaaacagactaagcaaacacagcaaatgttgaagaaccaaagagttccatgtgatttcgagctagcatatagataaatatataacaaaaaatcttacttctttctttctttgtgggggtgctattaatggcccaaagcgggaatgtgacaattggttctctgcttgctccaacttttcagctgcataaatgataaaaagtacaacacagttaatgattttattaccatgataaacattacagaaagctagacgagcatttaaaaaaaaatctggtatcataacaatttaggtacctaagtctgaaatttgtcctgcaacataatctccattacccagtaggggtgaagaagaaagtgtattcacccagtacttgttccatagcagatccagtagatggctatcaagagaggacttaaaatatgtaatatccaaagaatagtactgcaaaagcacaacatgataaacgtttagataacaatggaccacaacattgataagagtacgaagtttcgtatacacttggaaagatgataacctgtttacaatgcacaccaaagtcttcaattttattcaaaggaatagtctggtactcggagacaggctcatctggaggcttatatccatctgggtatgtcctgaatgcaccaatctcaactttaccagcagaaacagtcctagtcggatctatcactacagctaaaaatggttcctgaaattgctggttcaacatttgtgttgaaacatcaatacccgagagccaacatccgtaaccagggtgagaatggtaccatccaaccacattttccaaccttccagcctgcaccccccgaaagaaagaaaaaatcacaatgttaacaacccaccattacagcctttctttcgaagtacataataaaaagtatttattaactacataattggttcctaaagtaaaaccctagggtttttcattgaaaaaaaaaa
